United States Patent Application Publication US 2017/0114356 A1 - sequence listing, part 15

SEQ ID NO: 19211 - DNA, 2919 bp, Zea Mays
cacaggacaaagaagagtggaaggcagactgagaagccaatcgcccaaaccgcccggccgctcatttcgtcgaacacctgttgcgcgccacctcgtcaccgacgcactcgatgcgtcgctactgccacgtccctcgcggccggcgtccggccgccgctcccaacgaccaccagacgctcccgccgccggagtggatcgagccgtacccggacctcgcggacccgagcccgtacgcctccgcgtcggcggccacgcccgcgccgtcgccgtggctgccccgcgtgatctcccttgtcctccgctccccgcccgccgccctcgccgccgacctccgcgccttctgcaggaccttcctcctccgcctctccccggccttcgtcgccgccgcgctccgctccccgcagctcgccccgcacccgctcccgtcgctccacttcttccgctccctgcccaacgccaccgacctccgcgcccacccgcagcacctcctcagctgctacgtctccctcctccactccttcgcgcgctccagggagaccgacgcggccggccaggcgcggcagctcgtcgcggagctgcgcgcgcacggggacgccgtcctcagccacctcacgccggcgtcgtcggcctcgttgatccgcagcctcgcggcgttcggcctctccgaggagctgctatgggcgtggcaggccatgcgcctcgccggcgtcgagccgtccaggctcacctacaactgcctgctggacggccttgtcaacgctgacctcctcgacactgccatcaacgtgttcgacgcaatgtccacggaacatcgagtgcgtcccgacgtggtttcctacaacattctcatcaaggggtactgccgcgcggggaggacacaggatgcaatggcgcggcttgcggatatgagggaacatgcagagctcgcgccagacaaggtgacatacctcactctcatgcagcgccactacagcgaggccacgttcccacaatgcatagcactgttccaagagatggaagagaggggaatggggaaggaaatacctcaacatgcctatgtcctggtgatcggcgcgctcagcaaggacgggaaaccatttgaggcactggctgtgtttgagaggatgtcgaagcgaggctgtccagccaatgcagccatgtacaccgcgctcattgactcgatgggtaaattcgggagggagaaagaggcaatggcactctttgagaggatgaaggccactggaattgagcttgatgcggtcacgtatggtgtggttgttaattgcttgtgccggtttggcaatttggaggaggcacttgcgtgcttcaggagctgtgtagagaagggcgttgcagtgaatgccattttctatacaagcctgatcgacggttttggaaaaactgggatggttgaccaagcgaaggagctcttcgaggagatggttgctaaaggatttgtgcctgactcgtattgctacaatgttctgatcgacgcattagtgaaagcaggacggacagacgatgcgtgtgctttctacaagagaatggaagacgatggctgtgatcaaacagtctacacatataccattctcatcgatggtttgttcaaggaacacaagaatgaggaggcactgaagttctgggacagcatgattgacaagggaatcaccccaacagctgcagctttcagggccctctccaatggactctgcctttctggtaaattcagccgtgcatggaggatattggatgaactggctccaatgggggtgattcctgagacggctcacgaggatatgatcaacgtgttgtgtaagactggcagattcaagcaggcctgcaaattggcagatggcattgtgcagaagggacgtgagatacctgggagggttcgaacgatgatgatcaatgctctaaggaaagcgggaaataccgatctggcatttaaattggtgcatagtaagataggcattgggtatgaaagatctggcagcgtcaaaagaagagtgaaatttcaaacactgtttgaatgatgatcaatgcactagggaggaaagcaggaaatacccatctggcatttaaactggtgcatagtaagattggctttgggtatgaaagatctggcggcatcgactgaagagtgaaattcgaaacactagttgaatgaggatccgatattctttatgaaagatgggctgggcacatttgaactgactgaacactgaaccaaaaccgaggcgaaccgacggttctttggatttttgttcggtgttggcttggaactgcatcaccaaaagtaggagaaaatctcaacctaaaactagttattggggggggagctatgaaaactttttttttagattttgaaagacctcatgtccaatagaatgagaaaatctcacaccgcaggcaaccaattgcccggctcaacccacaagggcatcaacaccgcacccgcacgacactcctatcccacaccagcgtcacacgacgccctaaccctatccaccatatcggtcgcagcgatgacgttggcgtcaggtgaaacgacggtgtcggcgcggcgcatcgggctcagatggcgacggaccacacgagcttgacgaggagactggaggtaaacatcaagaggacgaggaaaacaagaaaaggaaagcaatttcttaagttcagatgttttggatcacgtcaccaaggtaaaaactacaaatggggagggaagagacaagtgcaagtactatgcgaacttgtatcgatgtgatacagacaaattgtaagggccaactggaacctagccaagaaaatactagtgttggcactactctatctacttggaaatttgattttgatgaccttacaataatgattgaagatgagcaacaatttgtcttatctgaatgccttggccttaaatttctt

SEQ ID NO: 19212 - DNA, 2969 bp, Zea Mays
cacaggacaaagaagagtggaaggcagactgagaagccaatcgcccaaaccgcccggccgctcatttcgtcgaacacctgttgcgcgccacctcgtcaccgacgcactcgatgcgtcgctactgccacgtccctcgcggccggcgtccggccgccgctcccaacgaccaccagacgctcccgccgccggagtggatcgagccgtacccggacctcgcggacccgagcccgtacgcctccgcgtcggcggccacgcccgcgccgtcgccgtggctgccccgcgtgatctcccttgtcctccgctccccgcccgccgccctcgccgccgacctccgcgccttctgcaggaccttcctcctccgcctctccccggccttcgtcgccgccgcgctccgctccccgcagctcgccccgcacccgctcccgtcgctccacttcttccgctccctgcccaacgccaccgacctccgcgcccacccgcagcacctcctcagctgctacgtctccctcctccactccttcgcgcgctccagggagaccgacgcggccggccaggcgcggcagctcgtcgcggagctgcgcgcgcacggggacgccgtcctcagccacctcacgccggcgtcgtcggcctcgttgatccgcagcctcgcggcgttcggcctctccgaggagctgctatgggcgtggcaggccatgcgcctcgccggcgtcgagccgtccaggctcacctacaactgcctgctggacggccttgtcaacgctgacctcctcgacactgccatcaacgtgttcgacgcaatgtccacggaacatcgagtgcgtcccgacgtggtttcctacaacattctcatcaaggggtactgccgcgcggggaggacacaggatgcaatggcgcggcttgcggatatgagggaacatgcagagctcgcgccagacaaggtgacatacctcactctcatgcagcgccactacagcgaggccacgttcccacaatgcatagcactgttccaagagatggaagagaggggaatggggaaggaaatacctcaacatgcctatgtcctggtgatcggcgcgctcagcaaggacgggaaaccatttgaggcactggctgtgtttgagaggatgtcgaagcgaggctgtccagccaatgcagccatgtacaccgcgctcattgactcgatgggtaaattcgggagggagaaagaggcaatggcactctttgagaggatgaaggccactggaattgagcttgatgcggtcacgtatggtgtggttgttaattgcttgtgccggtttggcaatttggaggaggcacttgcgtgcttcaggagctgtgtagagaagggcgttgcagtgaatgccattttctatacaagcctgatcgacggttttggaaaaactgggatggttgaccaagcgaaggagctcttcgaggagatggttgctaaaggatttgtgcctgactcgtattgctacaatgttctgatcgacgcattagtgaaagcaggacggacagacgatgcgtgtgctttctacaagagaatggaagacgatggctgtgatcaaacagtctacacatataccattctcatcgatggtttgttcaaggaacacaagaatgaggaggcactgaagttctgggacagcatgattgacaagggaatcaccccaacagctgcagctttcagggccctctccaatggactctgcctttctggtaaattcagccgtgcatggaggatattggatgaactggctccaatgggggtgattcctgagacggctcacgaggatatgatcaacgtgttgtgtaagactggcagattcaagcaggcctgcaaattggcagatggcattgtgcagaagggacgtgagatacctgggagggttcgaacgatgatgatcaatgctctaaggaaagcgggaaataccgatctggcatttaaattggtgcatagtaagataggcattgggtatgaaagatctggcagcgtcaaaagaagagtgaaatttcaaacactgtttgaatgatgatcaatgcactagggaggaaagcaggaaatacccatctggcatttaaactggtgcatagtaagattggctttgggtatgaaagatctggcggcatcgactgaagagtgaaattcgaaacactagttgaatgaggatccgatattctttatgaaagatgggctgggcacatttgaactgactgaacactgaaccaaaaccgaggcgaaccgacggttctttggatttttgttcggtgttggcttggaactgcatcaccaaaagtaggagaaaatctcaacctaaaactagttattggggggggagctatgaaaactttttttttagattttgaaagacctcatgtccaatagaatgagaaaatctcacaccgcaggcaaccaattgcccggctcaacccacaagggcatcaacaccgcacccgcacgacactcctatcccacaccagcgtcacacgacgccctaaccctatccaccatatcggtcgcagcgatgacgttggcgtcaggtgaaacgacggtgtcggcgcggcgcatcgggctcagatggcgacggaccacacgataggggggcactgatggaaccgttgcaaatcatgtgaatgaaatggtagagcttgacgaggagactggaggtaaacatcaagaggacgaggaaaacaagaaaaggaaagcaatttcttaagttcagatgttttggatcacgtcaccaaggtaaaaactacaaatggggagggaagagacaagtgcaagtactatgcgaacttgtatcgatgtgatacagacaaattgtaagggccaactggaacctagccaagaaaatactagtgttggcactactctatctacttggaaatttgattttgatgaccttacaataatgattgaagatgagcaacaatttgtcttatctgaatgccttggccttaaatttctt

SEQ ID NO: 19213 - DNA, 2965 bp, Zea Mays
cacaggacaaagaagagtggaaggcagactgagaagccaatcgcccaaaccgcccggccgctcatttcgtcgaacacctgttgcgcgccacctcgtcaccgacgcactcgatgcgtcgctactgccacgtccctcgcggccggcgtccggccgccgctcccaacgaccaccagacgctcccgccgccggagtggatcgagccgtacccggacctcgcggacccgagcccgtacgcctccgcgtcggcggccacgcccgcgccgtcgccgtggctgccccgcgtgatctcccttgtcctccgctccccgcccgccgccctcgccgccgacctccgcgccttctgcaggaccttcctcctccgcctctccccggccttcgtcgccgccgcgctccgctccccgcagctcgccccgcacccgctcccgtcgctccacttcttccgctccctgcccaacgccaccgacctccgcgcccacccgcagcacctcctcagctgctacgtctccctcctccactccttcgcgcgctccagggagaccgacgcggccggccaggcgcggcagctcgtcgcggagctgcgcgcgcacggggacgccgtcctcagccacctcacgccggcgtcgtcggcctcgttgatccgcagcctcgcggcgttcggcctctccgaggagctgctatgggcgtggcaggccatgcgcctcgccggcgtcgagccgtccaggctcacctacaactgcctgctggacggccttgtcaacgctgacctcctcgacactgccatcaacgtgttcgacgcaatgtccacggaacatcgagtgcgtcccgacgtggtttcctacaacattctcatcaaggggtactgccgcgcggggaggacacaggatgcaatggcgcggcttgcggatatgagggaacatgcagagctcgcgccagacaaggtgacatacctcactctcatgcagcgccactacagcgaggccacgttcccacaatgcatagcactgttccaagagatggaagagaggggaatggggaaggaaatacctcaacatgcctatgtcctggtgatcggcgcgctcagcaaggacgggaaaccatttgaggcactggctgtgtttgagaggatgtcgaagcgaggctgtccagccaatgcagccatgtacaccgcgctcattgactcgatgggtaaattcgggagggagaaagaggcaatggcactctttgagaggatgaaggccactggaattgagcttgatgcggtcacgtatggtgtggttgttaattgcttgtgccggtttggcaatttggaggaggcacttgcgtgcttcaggagctgtgtagagaagggcgttgcagtgaatgccattttctatacaagcctgatcgacggttttggaaaaactgggatggttgaccaagcgaaggagctcttcgaggagatggttgctaaaggatttgtgcctgactcgtattgctacaatgttctgatcgacgcattagtgaaagcaggacggacagacgatgcgtgtgctttctacaagagaatggaagacgatggctgtgatcaaacagtctacacatataccattctcatcgatggtttgttcaaggaacacaagaatgaggaggcactgaagttctgggacagcatgattgacaagggaatcaccccaacagctgcagctttcagggccctctccaatggactctgcctttctggtaaattcagccgtgcatggaggatattggatgaactggctccaatgggggtgattcctgagacggctcacgaggatatgatcaacgtgttgtgtaagactggcagattcaagcaggcctgcaaattggcagatggcattgtgcagaagggacgtgagatacctgggagggttcgaacgatgatgatcaatgctctaaggaaagcgggaaataccgatctggcatttaaattggtgcatagtaagataggcattgggtatgaaagatctggcagcgtcaaaagaagagtgaaatttcaaacactgtttgaatgatgatcaatgcactagggaggaaagcaggaaatacccatctggcatttaaactggtgcatagtaagattggctttgggtatgaaagatctggcggcatcgactgaagagtgaaattcgaaacactagttgaatgaggatccgatattctttatgaaagatgggctgggcacatttgaactgactgaacactgaaccaaaaccgaggcgaaccgacggttctttggatttttgttcggtgttggcttggaactgcatcaccaaaagtaggagaaaatctcaacctaaaactagttattggggggggagctatgaaaactttttttttagattttgaaagacctcatgtccaatagaatgagaaaatctcacaccgcaggcaaccaattgcccggctcaacccacaagggcatcaacaccgcacccgcacgacactcctatcccacaccagcgtcacacgacgccctaaccctatccaccatatcggtcgcagcgatgacgttggcgtcaggtgaaacgacggtgtcggcgcggcgcatcgggctcagatggcgacggaccacacggggggcactgatggaaccgttgcaaatcatgtgaatgaaatggtagagcttgacgaggagactggaggtaaacatcaagaggacgaggaaaacaagaaaaggaaagcaatttcttaagttcagatgttttggatcacgtcaccaaggtaaaaactacaaatggggagggaagagacaagtgcaagtactatgcgaacttgtatcgatgtgatacagacaaattgtaagggccaactggaacctagccaagaaaatactagtgttggcactactctatctacttggaaatttgattttgatgaccttacaataatgattgaagatgagcaacaatttgtcttatctgaatgccttggccttaaatttctt

SEQ ID NO: 19214 - DNA, 2735 bp, Zea Mays
caaagaagagtggaaggcagactgagaagccaatcgcccaaaccgcccggccgctcatttcgtcgaacacctgttgcgcgccacctcgtcaccgacgcactcgatgcgtcgctactgccacgtccctcgcggccggcgtccggccgccgctcccaacgaccaccagacgctcccgccgccggagtggatcgagccgtacccggacctcgcggacccgagcccgtacgcctccgcgtcggcggccacgcccgcgccgtcgccgtggctgccccgcgtgatctcccttgtcctccgctccccgcccgccgccctcgccgccgacctccgcgccttctgcaggaccttcctcctccgcctctccccggccttcgtcgccgccgcgctccgctccccgcagctcgccccgcacccgctcccgtcgctccacttcttccgctccctgcccaacgccaccgacctccgcgcccacccgcagcacctcctcagctgctacgtctccctcctccactccttcgcgcgctccagggagaccgacgcggccggccaggcgcggcagctcgtcgcggagctgcgcgcgcacggggacgccgtcctcagccacctcacgccggcgtcgtcggcctcgttgatccgcagcctcgcggcgttcggcctctccgaggagctgctatgggcgtggcaggccatgcgcctcgccggcgtcgagccgtccaggctcacctacaactgcctgctggacggccttgtcaacgctgacctcctcgacactgccatcaacgtgttcgacgcaatgtccacggaacatcgagtgcgtcccgacgtggtttcctacaacattctcatcaaggggtactgccgcgcggggaggacacaggatgcaatggcgcggcttgcggatatgagggaacatgcagagctcgcgccagacaaggtgacatacctcactctcatgcagcgccactacagcgaggccacgttcccacaatgcatagcactgttccaagagatggaagagaggggaatggggaaggaaatacctcaacatgcctatgtcctggtgatcggcgcgctcagcaaggacgggaaaccatttgaggcactggctgtgtttgagaggatgtcgaagcgaggctgtccagccaatgcagccatgtacaccgcgctcattgactcgatgggtaaattcgggagggagaaagaggcaatggcactctttgagaggatgaaggccactggaattgagcttgatgcggtcacgtatggtgtggttgttaattgcttgtgccggtttggcaatttggaggaggcacttgcgtgcttcaggagctgtgtagagaagggcgttgcagtgaatgccattttctatacaagcctgatcgacggttttggaaaaactgggatggttgaccaagcgaaggagctcttcgaggagatggttgctaaaggatttgtgcctgactcgtattgctacaatgttctgatcgacgcattagtgaaagcaggacggacagacgatgcgtgtgctttctacaagagaatggaagacgatggctgtgatcaaacagtctacacatataccattctcatcgatggtttgttcaaggaacacaagaatgaggaggcactgaagttctgggacagcatgattgacaagggaatcaccccaacagctgcagctttcagggccctctccaatggactctgcctttctggtaaattcagccgtgcatggaggatattggatgaactggctccaatgggggtgattcctgagacggctcacgaggatatgatcaacgtgttgtgtaagactggcagattcaagcaggcctgcaaattggcagatggcattgtgcagaagggacgtgagatacctgggagggttcgaacgatgatgatcaatgctctaaggaaagcgggaaataccgatctggcatttaaattggtgcatagtaagataggcattgggtatgaaagatctggcagcgtcaaaagaagagtgaaatttcaaacactgtttgaatgatgatcaatgcactagggaggaaagcaggaaatacccatctggcatttaaactggtgcatagtaagattggctttgggtatgaaagatctggcggcatcgactgaagagtgaaattcgaaacactagttgaatgaggatccgatattctttatgaaagatgggctgggcacatttgaactgactgaacactgaaccaaaaccgaggcgaaccgacggttctttggatttttgttcggtgttggcttggaactgcatcaccaaaacgatgacgttggcgtcaggtgaaacgacggtgtcggcgcggcgcatcgggctcagatggcgacggaccacacgataggggggcactgatggaaccgttgcaaatcatgtgaatgaaatggtagagcttgacgaggagactggaggtaaacatcaagaggacgaggaaaacaagaaaaggaaagcaatttcttaagttcagatgttttggatcacgtcaccaaggtaaaaactacaaatggggagggaagagacaagtgcaagtactatgcgaacttgtatcgatgtgatacagacaaattgtaagggccaactggaacctagccaagaaaatactagtgttggcactactctatctacttggaaatttgattttgatgaccttacaataatgattgaagatgagcaacaatttgtcttatctgaatgccttggccttaaatttctt

SEQ ID NO: 19215 - DNA, 2386 bp, Zea Mays
cacaggaccacccctgcctgcgtcgtctcctcccgttcacccctgtctcgtcgtggcgacgattggggaccctagcctcctacgcccaataccctaaacccttcccttgcagcacctgccactgccagtgcattagatttacagcaacggattggtttggccaacacgttgagttcaggttcaatgtctgaaccagcacaacctagtggaggggaaggtgatgtcaacacgctccgaatacttgtagcaaccgactgccatctaggctacatggagaaagatgagatacgtggattttatacttctcggtggtgatctattccatgagaacaagccgtcacgctcaaccctggtaaaaacgattgagattctacggcgctactgcctaaatgatcaacctgtgaagttccaggttgtcagtgatcagacagttaactttccaaacaggtttggtaaggtaaattatgaagacccaaactttaacgttggtctgcctgtgttcaccattcatggaaatcatgatgaccctgctggagtggataatctctctgctatcgatattctttcggcttgcaatcttgtaaattattttggaaagatggaccttggtggctctggcgttggtcagatagcagtttatcctgtacttgtaaaaaagggcatgacttcagttgcactgtatggtcttggaaacattagagatgaacgactaaatagaatgtttcagacgcctcattcagtacagtggatgcgacctggaactcaagatggggagtcagcgtctgactggttcaatatattggtacttcatcagaataggataaagacaaaccctaaaagtgccatcaatgagcatttcttaccaggttcatcagtcgcgacgtccctgattgatggtgaagcaaaaccaaagcatgttcttttgttagaaatcaagggaaatcagtacaggccaaccaaaatacctctgagatctgtcagaccttttgaatatgctgaggttgtgttgaaagatgaagcagatgttaactcaaatgatcaggactctgtgcttgaacatttggataaaattgtaagaaatctgattgagaagagtagccaaccaactgccagcagatcagagcccaaacttccattagttagaatcaaggtagattactctgggttttcaacaataaacccacaacgttttggtcagaagtatgttggaaaggtcgcaaaccctcaagatattctcattttctcaaaatcagcaaagaagcgccagactacaggagatcacattgatgattctgagaaacttcgtcctgaggaactaaaccaacaaacaatcgaagctctggtcgcagagagtaacttgaaaatggagattcttccggttgatgatttggacattgcgttgcatgattttgtgaacaaggatgacaagatggcattttattcatgtttgcagagaaaccttgaagaaaccaggaataagttgagttctgaagcagataaatccaaatttgaggaagaagatataatagtcaaagttggcgagtgcatgcaggaacgcgttaaggaaaggtctctgcactctaaggacggcacacgtttgacaacaggctctcacaacttggatactggaggtaaatcttttacagctcaaagcaaccagaactccttcagtgatgatgaagacaccagggagatgcttcttggtgcaagatcaactgatgttggacgaaaatcatctggatttactagaccctccaaagatactgctgatgttgctaaacgtggtacttccaaaagaggcaggggaagaggcaccagttcaatgaagcagaccactcttagtttcagccagtcaaggtcagctaccgttattcgtagtgaggatgtggcttcctctgaggaggaagcagatgcaaatgaagttgttgaaaattcagaagaggagagtgcgcaacaagttggacgtaaaagagcagctcctaggggtagaggtagaggtagaggcggaggttccactgcaaagagggggcgaaaaacagatattgcttccatgcaaaatatgatgagcaaagatgatgatgattcagaagatgaaccgccaaagaaaactcctcgggtcaccaggaactatggcgctgtcaggaggagatgaccctttaaggagttcttgctcatgagagttataggctaggtgttttgtcttgtaaagttggaagagccgacgtgtttttatcaaccttgacgtcgaccagtttgcgttgccgtgaactgactgtaccttgtacacgcccgaatgtaacggatttttgggatttatacatccttgtagctgcttaaattccagcgattgctgtcaaatgaacttcgagaagccacggtgttcgtc

SEQ ID NO: 19216 - DNA, 2534 bp, Zea Mays
cacaggaccacccctgcctgcgtcgtctcctcccgttcacccctgtctcgtcgtggcgacgattggggaccctagcctcctacgcccaataccctaaacccttcccttgcagcacctgccactgccagtgcattagatttacagcaacggattggtttggccaacacgttgagttcaggttcaatgtctgaaccagcacaacctagtggaggggaaggtgatgtcaacacgctccgaatacttgtagcaaccgactgccatctaggctacatggagaaagatgagatacgtaggtttgattcctttcaagcatttgaggagatttgcgcattggcagataaaaataaggtggattttatacttctcggtggtgatctattccatgagaacaagccgtcacgctcaaccctggtaaaaacgattgagattctacggcgctactgcctaaatgatcaacctgtgaagttccaggttgtcagtgatcagacagttaactttccaaacaggtttggtaaggtaaattatgaagacccaaactttaacgttggtctgcctgtgttcaccattcatggaaatcatgatgaccctgctggagtggataatctctctgctatcgatattctttcggcttgcaatcttgtaaattattttggaaagatggaccttggtggctctggcgttggtcagatagcagtttatcctgtacttgtaaaaaagggcatgacttcagttgcactgtatggtcttggaaacattagagatgaacgactaaatagaatgtttcagacgcctcattcagtacagtggatgcgacctggaactcaagatggggagtcagcgtctgactggttcaatatattggtacttcatcagaataggataaagacaaaccctaaaagtgccatcaatgagcatttcttaccacgtttcctggattttattgtatggggccatgagcatgaatgtcttattgatcctcaggaggtccctggaatgggtttccacatcacacaaccaggttcatcagtcgcgacgtccctgattgatggtgaagcaaaaccaaagcatgttcttttgttagaaatcaagggaaatcagtacaggccaaccaaaatacctctgagatctgtcagaccttttgaatatgctgaggttgtgttgaaagatgaagcagatgttaactcaaatgatcaggactctgtgcttgaacatttggataaaattgtaagaaatctgattgagaagagtagccaaccaactgccagcagatcagagcccaaacttccattagttagaatcaagattactctgggttttcaacaataaacccacaacgttttggtcagaagtatgttggaaaggtcgcaaaccctcaagatattctcattttctcaaaatcagcaaagaagcgccagactacaggagatcacattgatgattctgagaaacttcgtcctgaggaactaaaccaacaaacaatcgaagctctggtcgcagagagtaacttgaaaatggagattcttccggttgatgatttggacattgcgttgcatgattttgtgaacaaggatgacaagatggcattttattcatgtttgcagagaaaccttgaagaaaccaggaataagttgagttctgaagcagataaatccaaatttgaggaagaagatataatagtcaaagttggcgagtgcatgcaggaacgcgttaaggaaaggtctctgcactctaaggacggcacacgtttgacaacaggctctcacaacttggatactggaggtaaatcttttacagctcaaagcaaccagaactccttcagtgatgatgaagacaccagggagatgcttcttggtgcaagatcaactgatgttggacgaaaatcatctggatttactagaccctccaaagatactgctgatgttgctaaacgtggtacttccaaaagaggcaggggaagaggcaccagttcaatgaagcagaccactcttagtttcagccagtcaaggtcagctaccgttattcgtagtgaggatgtggcttcctctgaggaggaagcagatgcaaatgaagttgttgaaaattcagaagaggagagtgcgcaacaagttggacgtaaaagagcagctcctaggggtagaggtagaggtagaggcggaggttccactgcaaagagggggcgaaaaacagatattgcttccatgcaaaatatgatgagcaaagatgatgatgattcagaagatgaaccgccaaagaaaactcctcgggtcaccaggaactatggcgctgtcaggaggagatgaccctttaaggagttcttgctcatgagagttataggctaggtgttttgtcttgtaaagttggaagagccgacgtgtttttatcaaccttgacgtcgaccagtttgcgttgccgtgaactgactgtaccttgtacacgcccgaatgtaacggatttttgggatttatacatccttgtagctgcttaaattccagcgattgctgtcaaatgaacttcgagaagccacggtgttcgtc

SEQ ID NO: 19217 - DNA, 2445 bp, Zea Mays
cacaggaccacccctgcctgcgtcgtctcctcccgttcacccctgtctcgtcgtggcgacgattggggaccctagcctcctacgcccaataccctaaacccttcccttgcagcacctgccactgccagtgcattagatttacagcaacggattggtttggccaacacgttgagttcaggttcaatgtctgaaccagcacaacctagtggaggggaaggtgatgtcaacacgctccgaatacttgtagcaaccgactgccatctaggctacatggagaaagatgagatacgtaggtttgattcctttcaagcatttgaggagatttgcgcattggcagataaaaataaggtggattttatacttctcggtggtgatctattccatgagaacaagccgtcacgctcaaccctggtaaaaacgattgagattctacggcgctactgcctaaatgatcaacctgtgaagttccaggttgtcagtgatcagacagttaactttccaaacaggtttggtaaggtaaattatgaagacccaaactttaacgttggtctgcctgtgttcaccattcatggaaatcatgatgaccctgctggagtggataatctctctgctatcgatattctttcggcttgcaatcttgtaaattattttggaaagatggaccttggtggctctggcgttggtcagatagcagtttatcctgtacttgtaaaaaagggcatgacttcagttgcactgtatggtcttggaaacattagagatgaacgactaaatagaatgtttcagacgcctcattcagtacagtggatgcgacctggaactcaagatggggagtcagcgtctgactggttcaatatattggtacttcatcagaataggataaagacaaaccctaaaagtgccatcaatgagcatttcttaccaggttcatcagtcgcgacgtccctgattgatggtgaagcaaaaccaaagcatgttcttttgttagaaatcaagggaaatcagtacaggccaaccaaaatacctctgagatctgtcagaccttttgaatatgctgaggttgtgttgaaagatgaagcagatgttaactcaaatgatcaggactctgtgcttgaacatttggataaaattgtaagaaatctgattgagaagagtagccaaccaactgccagcagatcagagcccaaacttccattagttagaatcaaggtagattactctgggttttcaacaataaacccacaacgttttggtcagaagtatgttggaaaggtcgcaaaccctcaagatattctcattttctcaaaatcagcaaagaagcgccagactacaggagatcacattgatgattctgagaaacttcgtcctgaggaactaaaccaacaaacaatcgaagctctggtcgcagagagtaacttgaaaatggagattcttccggttgatgatttggacattgcgttgcatgattttgtgaacaaggatgacaagatggcattttattcatgtttgcagagaaaccttgaagaaaccaggaataagttgagttctgaagcagataaatccaaatttgaggaagaagatataatagtcaaagttggcgagtgcatgcaggaacgcgttaaggaaaggtctctgcactctaaggacggcacacgtttgacaacaggctctcacaacttggatactggaggtaaatcttttacagctcaaagcaaccagaactccttcagtgatgatgaagacaccagggagatgcttcttggtgcaagatcaactgatgttggacgaaaatcatctggatttactagaccctccaaagatactgctgatgttgctaaacgtggtacttccaaaagaggcaggggaagaggcaccagttcaatgaagcagaccactcttagtttcagccagtcaaggtcagctaccgttattcgtagtgaggatgtggcttcctctgaggaggaagcagatgcaaatgaagttgttgaaaattcagaagaggagagtgcgcaacaagttggacgtaaaagagcagctcctaggggtagaggtagaggtagaggcggaggttccactgcaaagagggggcgaaaaacagatattgcttccatgcaaaatatgatgagcaaagatgatgatgattcagaagatgaaccgccaaagaaaactcctcgggtcaccaggaactatggcgctgtcaggaggagatgaccctttaaggagttcttgctcatgagagttataggctaggtgttttgtcttgtaaagttggaagagccgacgtgtttttatcaaccttgacgtcgaccagtttgcgttgccgtgaactgactgtaccttgtacacgcccgaatgtaacggatttttgggatttatacatccttgtagctgcttaaattccagcgattgctgtcaaatgaacttcgagaagccacggtgttcgtc

SEQ ID NO: 19218 - DNA, 2766 bp, Zea Mays
gatcaacaagtcgcagcgcagtccaactgtccaagcaaggcacgtcggtccaagagcgacgctgccggcccggccgcgctgctcctccgagtccgagatctgaaggcgcgggaggaaggaaacgggcgaaaggatccagcagcaccccgcgcgcgcggcggttaacttgtcccaggtctcggcgtggcgcggcgcctccctcccggccctgccggtgagagcgcggtccgatgaggcggcggccgttcctggaccagcgacggccgtcgttcaagcgccggtggcagcagcggccgtggtgggtgcgcctcttgctctccctcctcctcgccctcgcatgcgtcctcctcctcgctgtcctcctcggctcccccgaccccgacacctcgccgtccacctccgccgcgtcctccggatccgaggccacctcctcccctctcctcagtcaggtaaccacgtcgcgttttccgcatttttgggaccgtttcatcgtcgtacctttgactacgagcatgccaattttagtcagtaaccactgcacctactgaatctgcttatgtcgtgtctagtgctagcttttttgaaacacgataatgagtgctagcgagtagcatatgaagtttttccttttttcaaaccactcttctcgcgtgcagagaacttacttggagggaatcacggatgcgctcaacatgactgacgaaatgctgagcgcaggctcgttctcgaggcagctgatggaccagatttatctagccaaaatgtatgtcgtcgttgccaaggaggcaaacaacctgcagtttgtggtggagcttagtgcccaggtacggcgggcacagagcatcctagcccacgctgcagcccatggtggcacggtgatggaacaggaagcagagaaggcgatcagggatatgtcggtgctgctcttccaggcacagcagcttcggtatgacatcagtatcacgatcatgaagttgaaaggccagattcagtccttagaggacaagtcgaaagctgaggcagagaagagcacaaaatatggccagattgccgctgaggagctcccgaagggactttactgccttggcgttcgattgaccatggaatggttcaagaatcctgaccttcagaggaagttttcagataggagcccagcagcgcagagcaatctaagggataacggcctttatcatttctgtgtcttctcagacaacatccttgctgtttcagttgttgttaattctacggctataaactcgaggcaccctgacaaggttgtttttcacctagtgactgatgatttgaactatgctccgatgaaggcgtggtttgccatgaataactacagaggggtcactgtggagatacaaaaggtggaggactttacctggctcaatgcatcgtatgttcccgttcttaaacagctacaaaacgctgctacccagaagttctatttctctggcagtggtaatcgtggaacaccaattaaattcaggaacccaaagtacttatcaatgcttaaccacttgaggttctacattccagaaatatatcctgaattgcagaaggtggtatttcttgatgatgatattgttgttcagaaggacttgtcagaattgttcactatcaacctcaatggtaatgtgatgggtgctgtagagacttgcatggagacattccacagatttcataagtatcttaaccattcccaccctctaatccgtgctcattttgaccctgatgcatgcggctgggcatttggtatgaacgtgcttgatctggttgaatggaggaacaagaatgtgacaggcatatatcattattggcaggagcgcaatgctgatcataccctatggaagcttgggtctttaccacctggacttcttgctttctatggcttggttgaagcattggatcccaaatggcatgttttgggacttggctacacaactgttgatcttgctactatcaaggaaggggcagtactgcactacaatggaaatatgaagccatggctcaaaataggaatggagaagtacaagagcttttgggataactatgtggactattcacatcctttgattcagcagtgcttcatgcgttgattgatgtgtatcgacattataaatttttgtaagctctgtggtagatatgttccaagcgcatgctccaactgccacacggaaacattgtaattaaatcagtgggcttcgctctcaagttataatctctgacaaaacatcagtggctgtctatagtatctgtatttgatgaaatacagcaatcacatatctccagagtccagccacaggtaaacaacacatgagctaagaccgcgatgtagtaggctgctacttgaatacatccattacatacattcattacttgtgaccattgatgtaattttccattttttatttattgggtgagacaaccacagaatggagataatgtagaattgattttaaattattgacttgttacaagttttcagttatgtatccatatttattggatgctgaagacttacgacagctaagcctttctgtttattttatttattatttatacatgttgagaagtaaagtcacatatctcatttgcagctctacctgaatttgttgtctttcttactgttcaattcacatcttgtttaaggacagtaaagcttatttgcaaatacatttattgtgtgataaaaaatacatatcttgtgggaaaaagttcataaatactatatttaatacgagggaagtctttgcatcc

SEQ ID NO: 19219 - DNA, 2912 bp, Zea Mays
gatcaacaagtcgcagcgcagtccaactgtccaagcaaggcacgtcggtccaagagcgacgctgccggcccggccgcgctgctcctccgagtccgagatctgaaggcgcgggaggaaggaaacgggcgaaaggatccagcagcaccccgcgcgcgcggcggttaacttgtcccaggtctcggcgtggcgcggcgcctccctcccggccctgccggtgagagcgcggtccgatgaggcggcggccgttcctggaccagcgacggccgtcgttcaagcgccggtggcagcagcggccgtggtgggtgcgcctcttgctctccctcctcctcgccctcgcatgcgtcctcctcctcgctgtcctcctcggctcccccgaccccgacacctcgccgtccacctccgccgcgtcctccggatccgaggccacctcctcccctctcctcagtcagagaacttacttggagggaatcacggatgcgctcaacatgactgacgaaatgctgagcgcaggctcgttctcgaggcagctgatggaccagatttatctagccaaaatgtatgtcgtcgttgccaaggaggcaaacaacctgcagtttgtggtggagcttagtgcccaggtacggcgggcacagagcatcctagcccacgctgcagcccatggtggcacggtgatggaacaggaagcagagaaggcgatcagggatatgtcggtgctgctcttccaggcacagcagcttcggtatgacatcagtatcacgatcatgaagttgaaaggccagattcagtccttagaggacaagtcgaaagctgaggcagagaagagcacaaaatatggccagattgccgctgaggagctcccgaagggactttactgccttggcgttcgattgaccatggaatggttcaagaatcctgaccttcagaggaagttttcagataggagcccagcagcgcagagcaatctaagggataacggcctttatcatttctgtgtcttctcagacaacatccttgctgtttcagttgttgttaattctacggctataaactcgaggcaccctgacaaggttgtttttcacctagtgactgatgatttgaactatgctccgatgaaggcgtggtttgccatgaataactacagaggggtcactgtggagatacaaaaggtggaggactttacctggctcaatgcatcgtatgttcccgttcttaaacagctacaaaacgctgctacccagaagttctatttctctggcagtggtaatcgtggaacaccaattaaattcaggaacccaaagtacttatcaatgcttaaccacttgaggttctacattccagaaatatatcctgaattgcagaaggtggtatttcttgatgatgatattgttgttcagaaggacttgtcagaattgttcactatcaacctcaatggtaatgtgatgggtgctgtagagacttgcatggagacattccacagatttcataagtatcttaaccattcccaccctctaatccgtgctcattttgaccctgatgcatgcggctgggcatttggtatgaacgtgcttgatctggttgaatggaggaacaagaatgtgacaggcatatatcattattggcaggagcgcaatgctgatcataccctatggaagcttgggtctttaccacctggacttcttgctttctatggcttggttgaagcattggatcccaaatggcatgttttgggacttggctacacaactgttgatcttgctactatcaaggaaggggcagtactgcactacaatggaaatatgaagccatggctcaaaataggaatggagaagtacaagagcttttgggataactatgtggactattcacatcctttgattcagcagtgcttcatgcgttgattgatgtgtatcgacattataaatttttgtaagctctgtggtagatatgttccaagcgcatgctccaactgccacacggaaacattgtaattaaatcagtgggcttcgctctcaagttataatctctgacaaaacatcagtggctgtctatagtatctgtatttgatgaaatacagcaatcacatatctccagagtccagccacaggtacgtcgcaaagcctatgtatctagcaaaaaacggatggagtagttaatagtccaggactctgggtgacaaaagcagggtatccattatctactgacagagtcggccaaaaagtgcaggcacagagaaacatgtattcagtcaagcaacagctctacctattagaagcacaattgtggttcatgcaaaaaaaaaaattctcgaacgcggcggatgcatgaaaacgagtcatgcatacccggtacctcgaggaggacttggaaggagatgagctgctggtcgcgttcctggaggaggacagcaaggacgcggcgctccctcatcttgtgcaggatgccgacgctcaccgcggcggctccgacggccagcagcaccagcagaaggcggattttgtgatgctgtttactgcagaatggggcaaatgctgtggcagcggcttgaaggaactggggtttccttttcggttgcttcggttctggaaagagaagcaagcttgcttaggaatggtgtaacgaggcactaggtggcgccaagtcttcttgcttcaaggtggtgatgcacatgctcatctcagtctagcagtagcgagaaacatacattgattggttcaacccaaacaaacgtaatgttgaacaatctcgttgtaaccctactcatttgtcgttgcggtgttaaattattttaaccaaaatatggtgaatgtactaggtgggcggaccaaatcatttaacgtctctttctattattacattgcgaggtttatttggaatgcatacatgctatttttaatacccaactatatattgtt

SEQ ID NO: 19220 - DNA, 2639 bp, Zea Mays
aaaagaggtaggcttgccgcaccctggagacaaacacatcaagtatgtttgcatcctgcagaacaacacgcaatcatgagtttgcaattagcggatacccatagttacaatcaataagcaacaaacgttgcaactggagtaacaacacaacatgcaatggtaatcaaggagtaaaaacagagactcaagtttgcaattagaggatactcgcggcggggggcagggaggcgcgcgtacagcagggccgagggcgtgctcttatggggaggcatgctcggagtgttattgcaccctgggtgcattcaatatagagaatgcacccaggtgcattttagtgccgccgtgtatatatatatatatataaacaatacagaaaaattacagaaaatataattataaccagcaaaaattccagaaaacttatgcgtacagggaacacttcgaacaagtcttcatgaattatgcatcaacacaggcatacataacataatatgggaacacttcaagtcttcatgatacatgctcactagttttttagtttttacggatatccatgggtaacccgcgggcgacaaaaaatatccgtacccgacccgattttatcacgggtcgggcacaggcaagacccgcgggtacaaattcgtacccgaacccgcgggtaaaattgccatccctcttcatcgcatttggttgaactttagatgagctacaacacaggcaagtgtttacaggaaataaagtgtaaatacagtacataatcaagtccacagaaggaaaccatttataatatgaaaataactgttacttatgcagccatcatctacaaaatgacaaatgtagttgcatatatgttattctcttttttctctacttctgtttggagtatgccttttccaatccaaagttcatgtgtttgctgcggcatctacctcaacagcggccttcctattccttctagatctggaccttctccttctacgtctcttccttgtttctcttctctcctcgttatttgtggatgtgctggggtttacatctgttgggtcgacaacaggttccactgcttgtgttttgttttggttggcttcgctcaaggtgtccactgagctcgtgccctcaggatttctttctttctcattttccttctcgagcactttactttctctgccgtggttgctggcctcgccttgaggatcttccacctgtcttgtgccatccggttcttctttgctggcttcctggttgtctatcagtttttggttcccccgctgaagctcagatctatctaaatggcttccctctgaagcatcatctgattgctcattggcatcacctttgttctgttgaaactggccatcttctatgttggttgttaactttaagaactgttcttgtgaggaactgttatcttgttggttgctctcccatgcagtggtgttgtaggaattttgttcttctgcagtaacaggtacagaaccattggtgctttcagatttgtcgagtaccacaaggcatggaatcgttggagttttcagatttgtctaccacggtttcagaagttgcattttcagtgtttgctcccactacaatgctctcatcattgtggctgctctctgatattgtagtattgttggaattatcttctactgtagcaggaatgggatcactggaattttcggatttgtcaagatcaggctcagcttctttctgctgcaggagttcctttatagttatcgtctgatctgggtttgaagcaactgcattctcttttatttggttgatatggctctctttctccacaagagctgcttccaattctttctgcgtgttggtacgtcgcaaagcctatgtatctagcaaaaaacggatggagtagttaatagtccaggactctgggtgacaaaagcagggtatccattatctactgacagagtcggccaaaaagtgcaggcacagagaaacatgtattcagtcaagcaacagctctacctattagaagcacaattgtggttcatgcaaaaaaaaaaattctcgaacgcggcggatgcatgaaaacgagtcatgcatacccggtacctcgaggaggacttggaaggagatgagctgctggtcgcgttcctggaggaggacagcaaggacgcggcgctccctcatcttgtgcaggatgccgacgctcaccgcggcggctccgacggccagcagcaccagcagaaggcggattttgtgatgctgtttactgcagaatggggcaaatgctgtggcagcggcttgaaggaactggggtttccttttcggttgcttcggttctggaaagagaagcaagcttgcttaggaatggtgtaacgaggcactaggtggcgccaagtcttcttgcttcaaggtggtgatgcacatgctcatctcagtctagcagtagcgagaaacatacattgattggttcaacccaaacaaacgtaatgttgaacaatctcgttgtaaccctactcatttgtcgttgcggtgttaaattattttaaccaaaatatggtgaatgtactaggtgggcggaccaaatcatttaacgtctctttctattattacattgcgaggtttatttggaatgcatacatgctatttttaatacccaactatatattgtt

SEQ ID NO: 19221 - DNA, 2168 bp, Zea Mays
gtccactttcctcctcatctctttgttaatttccttttctttctgccaaaaacaagacagtaatatttggttgatgaggtgtttttgaataacatgctggatagataattcatagaacacaataaaaataaaaggcagatagaatgctctaaagtgctacagctattgcagtttacatcatcaagtggactgtacttactggcagaatagtttcagtatttacttgcagaataagaggatgttcaattaaatatagcgacttaggccatctccagcggatcctctatatcatcctctatttcaaactttactctgtaaacagtgtcaaacagtgttatctacaattccgtgttccctattttatacgattcaccaaagacaaccttagttgcctacagataaatttatgtctgcaaatagtgtcaatattgaagtcctctcaggggcgatttattatgtggactaccttatgactgcatgattctatgtttgatagtatcttcatgctttgggtatggaaagattttgcatgtgcaacactgtagttttgttgaatccatctttcttctgaggccctatttataatgcgggaatctttctcctgtaaattatcatgtttccattgaagcacctgcaaaatttgtgcttaaatacaccctaaattggcaatatgatggttctttcatgaaaatgccgattgcaaatagaatcatactttgcatgacattgtactgtttcttatattttacttactagtggtatcaataattccctaatttaagcattacaggcaatcctctatattcagttgatagatctcgacttttgaagtattatgcgcaaacacatttttaatctatttgatgatgaaacgtttcaaagagaactgaggttgtggtgttctatcaactcattttttttgtgctcagtttagtgcactatgcttaatttaatggccctatgtattccatctagagacctggaggtgtttggagttaattgaatgcttgtagtctgagaaccttgtttctttgagggcactacattctgtcatatattcggttttatctaaagaaatcttatctgtaggacactctgacaagattccttttttgacagtgttgtatttgtatagagtggtttattaggtgtcctgtaggtcttcatacaggtggaactatgttcttcagaacttcagatggatactatgagcattaatttcttgcttgtattcgttgaataaagggagtaaactgaagtggtggcatattgtttgagagtacttaattaatactctctctgtcttaaactttaagatattttaacttttctaaatacatcaattttattgtgaatctaggtacgtcgcaaagcctatgtatctagcaaaaaacggatggagtagttaatagtccaggactctgggtgacaaaagcagggtatccattatctactgacagagtcggccaaaaagtgcaggcacagagaaacatgtattcagtcaagcaacagctctacctattagaagcacaattgtggttcatgcaaaaaaaaaaattctcgaacgcggcggatgcatgaaaacgagtcatgcatacccggtacctcgaggaggacttggaaggagatgagctgctggtcgcgttcctggaggaggacagcaaggacgcggcgctccctcatcttgtgcaggatgccgacgctcaccgcggcggctccgacggccagcagcaccagcagaaggcggattttgtgatgctgtttactgcagaatggggcaaatgctgtggcagcggcttgaaggaactggggtttccttttcggttgcttcggttctggaaagagaagcaagcttgcttaggaatggtgtaacgaggcactaggtggcgccaagtcttcttgcttcaaggtggtgatgcacatgctcatctcagtctagcagtagcgagaaacatacattgattggttcaacccaaacaaacgtaatgttgaacaatctcgttgtaaccctactcatttgtcgttgcggtgttaaattattttaaccaaaatatggtgaatgtactaggtgggcggaccaaatcatttaacgtctctttctattattacattgcgaggtttatttggaatgcatacatgctatttttaatacccaactatatattgtt

SEQ ID NO: 19222 - DNA, 3323 bp, Zea Mays
atttatattaagcacacgtacagcccacgaaacagccccaatcggcccagtccacgaaacagccccaatcggcccagcccacgatgtaaccctagtccctagatgtttaaggagcagctgtgttgccgcattcacatacctatccctgttggtcgcccctcctggagctcgccgccgccctctcgctttattttcccgaccacaacgccaccgcccgacgcaaagttgccgctccctgagtctcgacaaccgagcaagccttctagaagttaaggaagcagcagaaccatggcatcccgtttctggggacagggggacagtgagtctgaggaggaggaggtggaagaagttgagtcagaacagggcagtgatagtgatgatgatggaggtcgaggtggtgcgggacgcggtgcccaaaaccgatacttgaagaatcaagaagatgacagcgatgagtctgatacaggtcaccgtgtgatccgctccctgagggacaagcgcaacgaggagatgagatctattgttgatcagatgcgtaatgcaatgaagatcaatgactgggtgagcttgcaggagagttttgagaagcttaacaaacatcttgagaaggttgttcgtgtcaatgaatctactgaggtaccaaaaatgtatatcaaagctcttgtgttgctggaggacttccttgctgaagcccttgcaaacaaggaggccaagaagaagatgagcagcagcaattcgaaggcattcaatgcgatgaggcaaaaactcaagaagaacaacaagcagtatgaagagcagatccagaagtgcagggagcatccagagagttttgaagatgaagctgcagatgataaagatacggatgatgacgatgttgatgaaagtgatgcagagattgaagatcctgataaaatagctatgtcagaatcagaagaggaacaagatgaagaggatgatgacaaggatggttgggaacagaaaaggagtaagaaggataagctgatggataagcagttcttgaaagatccaagtgaaatcacatgggatattgtcgataagaaactcaaagagattgtagcatctagggaaagaaagtttgatgttaaccctagtctacttgggcatatgccagtcaatgtgtggaagaagtgtgtcaataatatgcttcttgtgcttgatatactccagcagtatcctaacattgtagtagacacctcgtttgagcctgatgagaatgaaactcaaaagggtgcagactacaatggaacaatacatgttgtgggtgacctggttgcattccttgagagactggactctgaatttttgaagaccttacagtgcacagatccgtacacaaaagattatgttcagaggctcagagaggaacccctgtttctggttgtcgcacagaacgtccaagattatcttgaaagggttggaaacttcaaagctgctgccaaggttgcactgcgccgtgttgaactagtttactacaagccccaagaagtgtacgatgcaatgagaaaactcgcagagcagcctgaggactgtgtggacgatgatgatgcagaggctggtgatgaacataaagcagtagatgacaatagaggaccatcaccatttgttgtgattccagaggctgtgcacaggaagcctacttttccagaaagcggtagaactttgatggatggattgatgttcttaatctacaagtatggggatgaaaggaccaaagcccgtgcaatgctgtgtgacatatatcaccatgcgatctctgatgagttttcagtggctcgcgacttgcttttaatgagtcatttgcaagatggtattcagctcatggacatatcatcgcagattttattcaatagagtcatggcccagttagggctgtgtgctttcagggctggtttgataaatgaagcccatggttgcttgactgagctctattctactgggagggtgaaagaattgcttgcacaaggtgtgcaacaaagccgataccatgaaaaaactcccgaacaggaaagacttgagaggagaagacaaatgccttaccatatgcatataaacctggagcttttggaagccacacacttgatctgtgcgatgctgattgaagtccccaatatggctgccagcacctatgacaagcggagacctatgagcaaaacattccgaaggcttcttgaagtgagtgaaaggcagacatttgttgggccgcccgagaatgtgagggaccatgtaatggctgccacaagagccctcaacaagggtgatcaccaaaaggctttcagtgtcataaattcgttggagatttggaagcttttgaggaacagagagcatgtccttgagatgttgaagcttaagatcaaggaggaagctcttagaacctatctcttttcatactcgtcttcgtacgagtccttaagccttaaccagctcactaccatgtttgatctcagcgagcagcatgcccacagcattgttagcaagatgatgatgcatgaagagcttcatgctagctgggaccagccaacaaagtgcatcgtattccatagtgtggaccaaactaggcttcaggggctactcttccagatggcagataagctctcggtcctggtggagatcaatgagagggcatacgaggcaagaactggtggtgctctcgagggggtaccgcccaggcgcaggggcgagggtcaggataatatgggaaagtggcaggataactttgtctcgtcacaggggcggcagggtggtggcaacaggtttggatactccagcagaggtgcagtatctggtcaaagtggtggtggacaccagagggacaggggcaatcagggttaccgcgggggctatggtggcgtttcaaggtttcaggatgcaaggggtcgcaaccagtctaatccatcaggcagaggtggtgatggtggtgcacgcatggtgaacctgaacagggttggtagagtttagaagtgataattttcagctcaagtaatcctgaaattctcctaaaagccaagttctgaatcactgcattttacatagtttcctgttctgggctgagtcatctacctgtttcctacatttcgttgtagccttttaaattaaggggctaagaaattgaactaagagtttggtactgttttgtgggagtgtgacgatgtattcgctccaatatttgatatctatccgtgacacttgctataaactgtacttttctttgtgttatgtggtgttcattgggttatgaaaaagaaaaaggcatgtcgaagagagaagatcgttattctattcgcgttcggtaaggtaagattgtg

SEQ ID NO: 19223 - DNA, 3357 bp, Zea Mays
gttggtcgcccctcctggagctcgccgccgccctctcgctttattttcccgaccacaacgccaccgcccgacgcaaagttgccgctccctgagtctcgacaaccgtccaccggcgttcgtgtcgcagcgagtcagtccaccggtgttccccaggcagccggccagcggcggacgctttcaggcgtcgagcttctgctccttcggcgtccaggcatcgggcgcgtctggtggcgcagcggcgggcgacctccttctccaacgtcgagctcttagttgtagtctaaggagcaagccttctagaagttaaggaagcagcagaaccatggcatcccgtttctggggacagggggacagtgagtctgaggaggaggaggtggaagaagttgagtcagaacagggcagtgatagtgatgatgatggaggtcgaggtggtgcgggacgcggtgcccaaaaccgatacttgaagaatcaagaagatgacagcgatgagtctgatacaggtcaccgtgtgatccgctccctgagggacaagcgcaacgaggagatgagatctattgttgatcagatgcgtaatgcaatgaagatcaatgactgggtgagcttgcaggagagttttgagaagcttaacaaacatcttgagaaggttgttcgtgtcaatgaatctactgaggtaccaaaaatgtatatcaaagctcttgtgttgctggaggacttccttgctgaagcccttgcaaacaaggaggccaagaagaagatgagcagcagcaattcgaaggcattcaatgcgatgaggcaaaaactcaagaagaacaacaagcagtatgaagagcagatccagaagtgcagggagcatccagagagttttgaagatgaagctgcagatgataaagatacggatgatgacgatgttgatgaaagtgatgcagagattgaagatcctgataaaatagctatgtcagaatcagaagaggaacaagatgaagaggatgatgacaaggatggttgggaacagaaaaggagtaagaaggataagctgatggataagcagttcttgaaagatccaagtgaaatcacatgggatattgtcgataagaaactcaaagagattgtagcatctagggaaagaaagtttgatgttaaccctagtctacttgggcatatgccagtcaatgtgtggaagaagtgtgtcaataatatgcttcttgtgcttgatatactccagcagtatcctaacattgtagtagacacctcgtttgagcctgatgagaatgaaactcaaaagggtgcagactacaatggaacaatacatgttgtgggtgacctggttgcattccttgagagactggactctgaatttttgaagaccttacagtgcacagatccgtacacaaaagattatgttcagaggctcagagaggaacccctgtttctggttgtcgcacagaacgtccaagattatcttgaaagggttggaaacttcaaagctgctgccaaggttgcactgcgccgtgttgaactagtttactacaagccccaagaagtgtacgatgcaatgagaaaactcgcagagcagcctgaggactgtgtggacgatgatgatgcagaggctggtgatgaacataaagcagtagatgacaatagaggaccatcaccatttgttgtgattccagaggctgtgcacaggaagcctacttttccagaaagcggtagaactttgatggatggattgatgttcttaatctacaagtatggggatgaaaggaccaaagcccgtgcaatgctgtgtgacatatatcaccatgcgatctctgatgagttttcagtggctcgcgacttgcttttaatgagtcatttgcaagatggtattcagctcatggacatatcatcgcagattttattcaatagagtcatggcccagttagggctgtgtgctttcagggctggtttgataaatgaagcccatggttgcttgactgagctctattctactgggagggtgaaagaattgcttgcacaaggtgtgcaacaaagccgataccatgaaaaaactcccgaacaggaaagacttgagaggagaagacaaatgccttaccatatgcatataaacctggagcttttggaagccacacacttgatctgtgcgatgctgattgaagtccccaatatggctgccagcacctatgacaagcggagacctatgagcaaaacattccgaaggcttcttgaagtgagtgaaaggcagacatttgttgggccgcccgagaatgtgagggaccatgtaatggctgccacaagagccctcaacaagggtgatcaccaaaaggctttcagtgtcataaattcgttggagatttggaagcttttgaggaacagagagcatgtccttgagatgttgaagcttaagatcaaggaggaagctcttagaacctatctcttttcatactcgtcttcgtacgagtccttaagccttaaccagctcactaccatgtttgatctcagcgagcagcatgcccacagcattgttagcaagatgatgatgcatgaagagcttcatgctagctgggaccagccaacaaagtgcatcgtattccatagtgtggaccaaactaggcttcaggggctactcttccagatggcagataagctctcggtcctggtggagatcaatgagagggcatacgaggcaagaactggtggtgctctcgagggggtaccgcccaggcgcaggggcgagggtcaggataatatgggaaagtggcaggataactttgtctcgtcacaggggcggcagggtggtggcaacaggtttggatactccagcagaggtgcagtatctggtcaaagtggtggtggacaccagagggacaggggcaatcagggttaccgcgggggctatggtggcgtttcaaggtttcaggatgcaaggggtcgcaaccagtctaatccatcaggcagaggtggtgatggtggtgcacgcatggtgaacctgaacagggttggtagagtttagaagtgataattttcagctcaagtaatcctgaaattctcctaaaagccaagttctgaatcactgcattttacatagtttcctgttctgggctgagtcatctacctgtttcctacatttcgttgtagccttttaaattaaggggctaagaaattgaactaagagtttggtactgttttgtgggagtgtgacgatgtattcgctccaatatttgatatctatccgtgacacttgctataaactgtacttttctttgtgttatgtggtgttcattgggttatgaaaaagaaaaaggcatgtcgaagagagaagatcgttattctattcgcgttcggtaaggtaagattgtg

SEQ ID NO: 19224 - DNA, 3190 bp, Zea Mays
ttggtcgcccctcctggagctcgccgccgccctctcgctttattttcccgaccacaacgccaccgcccgacgcaaagttgccgctccctgagtctcgacaaccggtgtactctttgcagagcaagccttctagaagttaaggaagcagcagaaccatggcatcccgtttctggggacagggggacagtgagtctgaggaggaggaggtggaagaagttgagtcagaacagggcagtgatagtgatgatgatggaggtcgaggtggtgcgggacgcggtgcccaaaaccgatacttgaagaatcaagaagatgacagcgatgagtctgatacaggtcaccgtgtgatccgctccctgagggacaagcgcaacgaggagatgagatctattgttgatcagatgcgtaatgcaatgaagatcaatgactgggtgagcttgcaggagagttttgagaagcttaacaaacatcttgagaaggttgttcgtgtcaatgaatctactgaggtaccaaaaatgtatatcaaagctcttgtgttgctggaggacttccttgctgaagcccttgcaaacaaggaggccaagaagaagatgagcagcagcaattcgaaggcattcaatgcgatgaggcaaaaactcaagaagaacaacaagcagtatgaagagcagatccagaagtgcagggagcatccagagagttttgaagatgaagctgcagatgataaagatacggatgatgacgatgttgatgaaagtgatgcagagattgaagatcctgataaaatagctatgtcagaatcagaagaggaacaagatgaagaggatgatgacaaggatggttgggaacagaaaaggagtaagaaggataagctgatggataagcagttcttgaaagatccaagtgaaatcacatgggatattgtcgataagaaactcaaagagattgtagcatctagggaaagaaagtttgatgttaaccctagtctacttgggcatatgccagtcaatgtgtggaagaagtgtgtcaataatatgcttcttgtgcttgatatactccagcagtatcctaacattgtagtagacacctcgtttgagcctgatgagaatgaaactcaaaagggtgcagactacaatggaacaatacatgttgtgggtgacctggttgcattccttgagagactggactctgaatttttgaagaccttacagtgcacagatccgtacacaaaagattatgttcagaggctcagagaggaacccctgtttctggttgtcgcacagaacgtccaagattatcttgaaagggttggaaacttcaaagctgctgccaaggttgcactgcgccgtgttgaactagtttactacaagccccaagaagtgtacgatgcaatgagaaaactcgcagagcagcctgaggactgtgtggacgatgatgatgcagaggctggtgatgaacataaagcagtagatgacaatagaggaccatcaccatttgttgtgattccagaggctgtgcacaggaagcctacttttccagaaagcggtagaactttgatggatggattgatgttcttaatctacaagtatggggatgaaaggaccaaagcccgtgcaatgctgtgtgacatatatcaccatgcgatctctgatgagttttcagtggctcgcgacttgcttttaatgagtcatttgcaagatggtattcagctcatggacatatcatcgcagattttattcaatagagtcatggcccagttagggctgtgtgctttcagggctggtttgataaatgaagcccatggttgcttgactgagctctattctactgggagggtgaaagaattgcttgcacaaggtgtgcaacaaagccgataccatgaaaaaactcccgaacaggaaagacttgagaggagaagacaaatgccttaccatatgcatataaacctggagcttttggaagccacacacttgatctgtgcgatgctgattgaagtccccaatatggctgccagcacctatgacaagcggagacctatgagcaaaacattccgaaggcttcttgaagtgagtgaaaggcagacatttgttgggccgcccgagaatgtgagggaccatgtaatggctgccacaagagccctcaacaagggtgatcaccaaaaggctttcagtgtcataaattcgttggagatttggaagcttttgaggaacagagagcatgtccttgagatgttgaagcttaagatcaaggaggaagctcttagaacctatctcttttcatactcgtcttcgtacgagtccttaagccttaaccagctcactaccatgtttgatctcagcgagcagcatgcccacagcattgttagcaagatgatgatgcatgaagagcttcatgctagctgggaccagccaacaaagtgcatcgtattccatagtgtggaccaaactaggcttcaggggctactcttccagatggcagataagctctcggtcctggtggagatcaatgagagggcatacgaggcaagaactggtggtgctctcgagggggtaccgcccaggcgcaggggcgagggtcaggataatatgggaaagtggcaggataactttgtctcgtcacaggggcggcagggtggtggcaacaggtttggatactccagcagaggtgcagtatctggtcaaagtggtggtggacaccagagggacaggggcaatcagggttaccgcgggggctatggtggcgtttcaaggtttcaggatgcaaggggtcgcaaccagtctaatccatcaggcagaggtggtgatggtggtgcacgcatggtgaacctgaacagggttggtagagtttagaagtgataattttcagctcaagtaatcctgaaattctcctaaaagccaagttctgaatcactgcattttacatagtttcctgttctgggctgagtcatctacctgtttcctacatttcgttgtagccttttaaattaaggggctaagaaattgaactaagagtttggtactgttttgtgggagtgtgacgatgtattcgctccaatatttgatatctatccgtgacacttgctataaactgtacttttctttgtgttatgtggtgttcattgggttatgaaaaagaaaaaggcatgtcgaagagagaagatcgttattctattcgcgttcggtaaggtaagattgtg

SEQ ID NO: 19225 - DNA, 3110 bp, Zea Mays
ccaccatcggtctcctcctctgtcgagctcctgtgtcggagcaagccttctagaagttaaggaagcagcagaaccatggcatcccgtttctggggacagggggacagtgagtctgaggaggaggaggtggaagaagttgagtcagaacagggcagtgatagtgatgatgatggaggtcgaggtggtgcgggacgcggtgcccaaaaccgatacttgaagaatcaagaagatgacagcgatgagtctgatacaggtcaccgtgtgatccgctccctgagggacaagcgcaacgaggagatgagatctattgttgatcagatgcgtaatgcaatgaagatcaatgactgggtgagcttgcaggagagttttgagaagcttaacaaacatcttgagaaggttgttcgtgtcaatgaatctactgaggtaccaaaaatgtatatcaaagctcttgtgttgctggaggacttccttgctgaagcccttgcaaacaaggaggccaagaagaagatgagcagcagcaattcgaaggcattcaatgcgatgaggcaaaaactcaagaagaacaacaagcagtatgaagagcagatccagaagtgcagggagcatccagagagttttgaagatgaagctgcagatgataaagatacggatgatgacgatgttgatgaaagtgatgcagagattgaagatcctgataaaatagctatgtcagaatcagaagaggaacaagatgaagaggatgatgacaaggatggttgggaacagaaaaggagtaagaaggataagctgatggataagcagttcttgaaagatccaagtgaaatcacatgggatattgtcgataagaaactcaaagagattgtagcatctagggaaagaaagtttgatgttaaccctagtctacttgggcatatgccagtcaatgtgtggaagaagtgtgtcaataatatgcttcttgtgcttgatatactccagcagtatcctaacattgtagtagacacctcgtttgagcctgatgagaatgaaactcaaaagggtgcagactacaatggaacaatacatgttgtgggtgacctggttgcattccttgagagactggactctgaatttttgaagaccttacagtgcacagatccgtacacaaaagattatgttcagaggctcagagaggaacccctgtttctggttgtcgcacagaacgtccaagattatcttgaaagggttggaaacttcaaagctgctgccaaggttgcactgcgccgtgttgaactagtttactacaagccccaagaagtgtacgatgcaatgagaaaactcgcagagcagcctgaggactgtgtggacgatgatgatgcagaggctggtgatgaacataaagcagtagatgacaatagaggaccatcaccatttgttgtgattccagaggctgtgcacaggaagcctacttttccagaaagcggtagaactttgatggatggattgatgttcttaatctacaagtatggggatgaaaggaccaaagcccgtgcaatgctgtgtgacatatatcaccatgcgatctctgatgagttttcagtggctcgcgacttgcttttaatgagtcatttgcaagatggtattcagctcatggacatatcatcgcagattttattcaatagagtcatggcccagttagggctgtgtgctttcagggctggtttgataaatgaagcccatggttgcttgactgagctctattctactgggagggtgaaagaattgcttgcacaaggtgtgcaacaaagccgataccatgaaaaaactcccgaacaggaaagacttgagaggagaagacaaatgccttaccatatgcatataaacctggagcttttggaagccacacacttgatctgtgcgatgctgattgaagtccccaatatggctgccagcacctatgacaagcggagacctatgagcaaaacattccgaaggcttcttgaagtgagtgaaaggcagacatttgttgggccgcccgagaatgtgagggaccatgtaatggctgccacaagagccctcaacaagggtgatcaccaaaaggctttcagtgtcataaattcgttggagatttggaagcttttgaggaacagagagcatgtccttgagatgttgaagcttaagatcaaggaggaagctcttagaacctatctcttttcatactcgtcttcgtacgagtccttaagccttaaccagctcactaccatgtttgatctcagcgagcagcatgcccacagcattgttagcaagatgatgatgcatgaagagcttcatgctagctgggaccagccaacaaagtgcatcgtattccatagtgtggaccaaactaggcttcaggggctactcttccagatggcagataagctctcggtcctggtggagatcaatgagagggcatacgaggcaagaactggtggtgctctcgagggggtaccgcccaggcgcaggggcgagggtcaggataatatgggaaagtggcaggataactttgtctcgtcacaggggcggcagggtggtggcaacaggtttggatactccagcagaggtgcagtatctggtcaaagtggtggtggacaccagagggacaggggcaatcagggttaccgcgggggctatggtggcgtttcaaggtttcaggatgcaaggggtcgcaaccagtctaatccatcaggcagaggtggtgatggtggtgcacgcatggtgaacctgaacagggttggtagagtttagaagtgataattttcagctcaagtaatcctgaaattctcctaaaagccaagttctgaatcactgcattttacatagtttcctgttctgggctgagtcatctacctgtttcctacatttcgttgtagccttttaaattaaggggctaagaaattgaactaagagtttggtactgttttgtgggagtgtgacgatgtattcgctccaatatttgatatctatccgtgacacttgctataaactgtacttttctttgtgttatgtggtgttcattgggttatgaaaaagaaaaaggcatgtcgaagagagaagatcgttattctattcgcgttcggtaaggtaagattgtg

SEQ ID NO: 19226 - DNA, 1331 bp, Zea Mays
tgagcttaagctagaaagtagcagccagccgtggaaagacttgagaggagaagacaaatgccttaccatatgcatataaacctggagcttttggaagccacacacttgatctgtgcgatgctgattgaagtccccaatatggctgccagcacctatgacaagcggagacctatgagcaaaacattccgaaggcttcttgaagtgagtgaaaggcagacatttgttgggccgcccgagaatgtgagggaccatgtaatggctgccacaagagccctcaacaagggtgatcaccaaaaggctttcagtgtcataaattcgttggagatttggaagcttttgaggaacagagagcatgtccttgagatgttgaagcttaagatcaaggaggaagctcttagaacctatctcttttcatactcgtcttcgtacgagtccttaagccttaaccagctcactaccatgtttgatctcagcgagcagcatgcccacagcattgttagcaagatgatgatgcatgaagagcttcatgctagctgggaccagccaacaaagtgcatcgtattccatagtgtggaccaaactaggcttcaggggctactcttccagatggcagataagctctcggtcctggtggagatcaatgagagggcatacgaggcaagaactggtggtgctctcgagggggtaccgcccaggcgcaggggcgagggtcaggataatatgggaaagtggcaggataactttgtctcgtcacaggggcggcagggtggtggcaacaggtttggatactccagcagaggtgcagtatctggtcaaagtggtggtggacaccagagggacaggggcaatcagggttaccgcgggggctatggtggcgtttcaaggtttcaggatgcaaggggtcgcaaccagtctaatccatcaggcagaggtggtgatggtggtgcacgcatggtgaacctgaacagggttggtagagtttagaagtgataattttcagctcaagtaatcctgaaattctcctaaaagccaagttctgaatcactgcattttacatagtttcctgttctgggctgagtcatctacctgtttcctacatttcgttgtagccttttaaattaaggggctaagaaattgaactaagagtttggtactgttttgtgggagtgtgacgatgtattcgctccaatatttgatatctatccgtgacacttgctataaactgtacttttctttgtgttatgtggtgttcattgggttatgaaaaagaaaaaggcatgtcgaagagagaagatcgttattctattcgcgttcggtaaggtaagattgtg

SEQ ID NO: 19227 - DNA, 2706 bp, Zea Mays
tagcatcgtctatcatggagtcaccaaccaacagatttctcaatcttcccgccatgattttccccgtgctcttgctttttctcagaggctcggccgctggcatcgcatctgacacgctcagcagcgatggcaacatcaccgacggcgagattttggtctcatccggcagctcattcaccctgggcttcttctccccgaccggcgtgtcagcaaagaggtaccttggcatctggttcaccgcgtccccggatgccgtctgttgggtcgccaaccgtgacgcccccattagcaacacctcaggagtaggagtactggcagtcggcagcaccgggagccttcgccttctcgacggctccggccagaccgtgtggtcttccaacacgacgagttccgctcctgccgtggcgcagctacttgagtccggcaacctagtcgtgcgacagctgagcagcggcaacgtgctctggcagtcgttcgaccacccgtcgaacaccttgctcgccggcatgagactcggcaaggacccgaagactggcgcggagtggtcgctcacgtcgtggcgcgcgccgaacgacccgacgaccggggactgccggcgtgtgatggacacgaggggcctcccggactgcgtctcctggcaaggcaacaccaagaagtaccggacggggccctggaacgggctgtggttcagcggcgtcccggagatggcgtcctactcgactctgttctccaaccaggtcgtcgttgtgatgacccgtggccgcggctagagttcgccgggcgtgagtcggtagcagaccggtgaaaagaacgaagccaaggacaccgtcgtccgccccgacgagatcgcgtacgtcttcaacacctcggccgacgcgcccttctcccgcctcgtgctgaacgaggtcggcgtgctgcaacgcctagcgtgggaccccgccagccgggtctggaacgtcttcgcgcaggcgcccagggacgtctgcgacgactacgccatgtgcggcgcgttcggcctgtgcaacgtgaacacggcgtccacgctgttctgcagctgcgtcgtggggttcagccccgtgaaccccacgcagtggtccatgagggagtccggaggcgggtgccggaggaacgtgccgctggagtgcggcaacgggacgacgacggacgggttcaaggtggtgcagggagtgaagctccccgacacggacaacacgacggtggacatgggcgcgacgctggagcagtgcagggagaggtgcctcgccaactgctcgtgcgtggcctatgccgccgccgacatccgaggaggcggtgatggcagtggctgtgtcatgtggacgaataacattgttgacgtccggtacgtagacaaggggcaaaatctctatctgaggttggcaaagtctgaattagctagcaggaagagaatggttgcgacaaaaatcgtgcttccggttatcgcatctctgcttgcacttgtggctgctgccgtgtatctcgtttggaaattcaggctgagagcccaacgtcgaaaaaaggatatccagaagaaagccatggttggatacttgaccacgtcacacgaacttggtgatgaaaatctagagcttccatttgttagctttgaagatattgttactgcaacagacaacttctctgaagacaacatgcttggtcaaggtggatttgggaaggtttacaagggtatgctgggcgagaagaaagaagttgcaatcaaaaggctcggtcagggttctgggcaaggtgcagaggagttcagaaatgaagtagttctgattgccaaattgcagcacagaaacctcgtcagacttcttggttgctgcatttgtggggatgagaaattgctgatttacgaatatttgccaaacaaaagcttggattcattcatttttgatgctgctagaaaaaagctccttgattggccaacaaggttcaagataatcaagggaatatctagagggctcctttacctacacgaggattcaaggttgacgatagttcacagagatctcaaaccaagcaacatattgttggatgcggatatgaaccctaagatatcagatttcggtatggcaagaatctttggaggaaaccagcacgaggcaaatactaatcgagttgttgggacatacggttacatgtctcctgaatatgctatggatggcgccttttctgtcaagtctgacacatacagcttcggtgtcatactcttagagattataagtggtttcaagattagtttaaaccacatcacggatttcccaaatctattagcttatgcatggagcttatggaatgaaggaaaggcaatgaatttagtggactcatcccttgtcaagagttgtttaccaaatgaagctttaaggtgtatccacataggactcctatgtgtacaggacaatccaaatagcaggccgctcatgtcatcagtggtcttcatgttggagaatgaaaccacaacactttcagttccaaaacagcctgtatttttttcacaaaggtattctgaagcccaggaaacaggagaaaacactagtagctctatgaataacatgagcatgacaatgttatcagaggggcggtaggtggttaggttatgcaatgtttgtttgtgtaaataatttcctgtaccgacctgtaacatattagtactccccggttctaataagtttgactggctcgtct

SEQ ID NO: 19228 - DNA, 3906 bp, Zea Mays
cttggctattttgtgtcttaatccaccaagtcataatgtggactaatcttggttcttggcttggtcaattttattctgaaatacaaactttggcatcttgtctatccctgcatgccacgtatcctcccttttctcttcttctagtaataaaaaccttgggtgctctactgtatgaaacaccgggcattgttcataatgtattgttaaatattttagaccattacacggcattgacgttttgcattttcatcaaatttgtcagactacacccggtgaacttacgactccaccttgtccatgtgtacaatctctgatctatatcttggtaatggatatgaccagccttaccatttccatcctcctgctcctcctgatgatccgtgtctgcaaatccgatgaccagctggcaagcgcaaggccactttcacccggcgacctgctcatctccaaaggcggcgtctttgccctcggtttcttctccccgtccggctccaacaccagcacgagcctgtacgttgcgatctggttccacggcatccccgagcgcagccgcaccgtcgtgtgggtcgccaaccgcgacagcccagccaccacatcgtcgtccccgacgctcgccatcagcaacagctttgacctcgtgctttcggactcccagggccgcactctctggaggacgcagaacgccgccgccgcggccgtccacgacagcggcactcccctggccgtgctgctcgacacgggcaacctgcaactccagctgcccaacggtacggtcatatggcagagcttcgaccacccgactgacaccattctcccaggcatgcggttcctgatgatccacggggctcgccccgccgcgcgcctggtctcttggagaggccccgccgacccgtccaccggagccttctcgttcggcctcgaccccgtctccaacctccagctgatggtctggcacggggccgagccgtactgccgcatcagcgtgtggaacggcgtgtcggtgtcaggcggcatgtacaccggctcacctagctccatcgtgtaccagaccatcgtcaacaccggcgacgagttctacctcacgtacaccgtctccgacggctcgccgtacttccgtatcatgctcgaccacaccggcacgatgaagctcctgagctgggacaccaactcgtcgtcctggacgctcatctccgagcgccccaccggtggctacggcctctatggctcctgtggccccaacgcctactgcgacttcaccggggctgccccggcgtgccagtgcctcgagggcttcgagcccgtcgccgccgatctcaactcttcagaaggatgccggagaacggagcctctgcagtgcagcaaggcaagtcacttcgtggccttgcccgggatgagagttcctgacaagttcgtgctcctccggaacagaagctttgagcagtgcgcggctgagtgcagcaagaactgctcctgcaccgcctatgcttacgccaacttgagcagcagcggtgccatggaagaccagtcaaggtgcttggtttggaccggggagcttgtcgacacctggaaaagcatcaactatggcgagaagctgtacctccggcttgccagccctgttaaaaccaagagcaatatagtaaagattgtagtcccggttgtagcatgcctgctgctacccacatgcatagcccttgtcttcctatgcaaattcaaaggtacaacattaagcggcttgttttcaacgtgtaatgtgattgtgtatatgaaaagaaaagtatcaatgtcccaccagcagggaaatggcaaaagaagggaattcagaagaaagtgatgttaggatacttgagcacctccaatagactcggagacaaaaatgatgaatttccatttgttagcttcaatgacattgttgccgcaaccgataatttctctgactgcaatatgcttggaagaggaggctttggcaaagtttacaaggtaatgacagatttaacataatatgcattaaagaatttctaaagcagaagaaagaattttggatttcatcgttttcaacatcagaaggatgcaatcatgcagggaatattggaagatggcaaggaagttgctgtcaaaaggcttagtcaaggttctgggcaaggtattgatgaagtcagaaacgaggtagtcctactcgtcaaactacagcacaggaatctagtcagactgcttggttgctgtattcatgaagaagagaagttactgatctacgaatacttgcctaacaaaagcctagatgccttcctctttgggcagatacttcaagaacacgtgtacttgattggccaacacggttcaacataattaaaggcatagccaggggcattctatatctccaccaagattcaagattaacaataattcatagagatcttaaagcaagtaacatcttgttagacacagaaatgagtcccaaaatatcagatttcggtatggcaagaatcttcgggggaaaccagcaactagcaaacactacacgtgttgttgggacatacggttatatgtctcctgaatatgtgacaagtggtgccttttctgtcaagtcagacacatatagctttggtgttcttctcttggagattgtaagtggtttgaagattatctcaactcaatttataatggacttcccaaaccttataacatggaagttatgggaagagggaaatgcaacgaaattggtggactcattggttgctgaaagttgtccactccatgaagcttttaggtgtattcatgtaggacttttgtgtgtccaagacaatccaaatgcaaggccactcatgtcaacagttgtgtttatgttggagaatgaaaccacattgcttccagcaccaaaggagcctgtatatttttcaccaaggaataatgaaactgaagaaacaagaagaaacatagaaggttttctgaatatgtcgtgtatcacaacactggaaggccgctagatgttcacacttctaccatgtacatgttcaagccttttattaaccatgtactgtagggtaggtgaatttcagcatagctggtcgtaatatatacgaaattacagtcttcaaaagggatatatgtgaacttactgtactgaacacactgaattgaagcttgtggcttggaaaaaaatgtaaataatctagaggtttgagaattatatggtcaagtgtcataacaaagaatgcaataaaatttcacatgacattgctttaatcttcagttgctctaatgccaaaaggtgaagggtgcttaatctttcagtgcagtacctcatatggattattcgtagatttttttcataagatgttatatttttctataaagctagtaaacttgaggggttctttttccattaggccggtggtcattggagactaggaaacagccaaagttaaatgaataaactgtagcaagttcagagttgttttcagcattgtgtaacatacctcatatgtggggttttattcaattttttcgaaacatgctatttgcataagatgagcaaataataagtacacagctgattgcagctggtaaccggcaaatagttttcttggccaggtttaccatgccagaaatttagatgatttacctccaacactagctgcaagtgaaatttaggttattcagcaaatcgccactgacaggcagagctcacacattctgcaaaagcttcggatcactcctctgaatatgtagcacgccaggtacagattcatcaacgtatggacaccacggcactagaattagaagcgagagcgagtcagcgagacacccggggtacctggcgaagacggcggccatgggacacgggtgccgaactgtggcggcgcgaggcgtcaagggtccgtctagcgatactacggaagaagggcggtg

SEQ ID NO: 19229 - DNA, 3678 bp, Zea Mays
cttggttcttggcttggtcaattttattctgaaatacaaactttggcatcttgtctatccctgcatgccacgtatcctcccttttctcttcttctagtaataaaaaccttgggtgctctactgtatgaaacaccgggcattgttcataatgtattgttaaatattttagaccattacacggcattgacgttttgcattttcatcaaatttgtcagactacacccggtgaacttacgactccaccttgtccatgtgtacaatctctgatctatatcttggtaatggatatgaccagccttaccatttccatcctcctgctcctcctgatgatccgtgtctgcaaatccgatgaccagctggcaagcgcaaggccactttcacccggcgacctgctcatctccaaaggcggcgtctttgccctcggtttcttctccccgtccggctccaacaccagcacgagcctgtacgttgcgatctggttccacggcatccccgagcgcagccgcaccgtcgtgtgggtcgccaaccgcgacagcccagccaccacatcgtcgtccccgacgctcgccatcagcaacagctttgacctcgtgctttcggactcccagggccgcactctctggaggacgcagaacgccgccgccgcggccgtccacgacagcggcactcccctggccgtgctgctcgacacgggcaacctgcaactccagctgcccaacggtacggtcatatggcagagcttcgaccacccgactgacaccattctcccaggcatgcggttcctgatgatccacggggctcgccccgccgcgcgcctggtctcttggagaggccccgccgacccgtccaccggagccttctcgttcggcctcgaccccgtctccaacctccagctgatggtctggcacggggccgagccgtactgccgcatcagcgtgtggaacggcgtgtcggtgtcaggcggcatgtacaccggctcacctagctccatcgtgtaccagaccatcgtcaacaccggcgacgagttctacctcacgtacaccgtctccgacggctcgccgtacttccgtatcatgctcgaccacaccggcacgatgaagctcctgagctgggacaccaactcgtcgtcctggacgctcatctccgagcgccccaccggtggctacggcctctatggctcctgtggccccaacgcctactgcgacttcaccggggctgccccggcgtgccagtgcctcgagggcttcgagcccgtcgccgccgatctcaactcttcagaaggatgccggagaacggagcctctgcagtgcagcaaggcaagtcacttcgtggccttgcccgggatgagagttcctgacaagttcgtgctcctccggaacagaagctttgagcagtgcgcggctgagtgcagcaagaactgctcctgcaccgcctatgcttacgccaacttgagcagcagcggtgccatggaagaccagtcaaggtgcttggtttggaccggggagcttgtcgacacctggaaaagcatcaactatggcgagaagctgtacctccggcttgccagccctgttaaaaccaagagcaatatagtaaagattgtagtcccggttgtagcatgcctgctgctacccacatgcatagcccttgtcttcctatgcaaattcaaagggaaatggcaaaagaagggaattcagaagaaagtgatgttaggatacttgagcacctccaatagactcggagacaaaaatgatgaatttccatttgttagcttcaatgacattgttgccgcaaccgataatttctctgactgcaatatgcttggaagaggaggctttggcaaagtttacaagggaatattggaagatggcaaggaagttgctgtcaaaaggcttagtcaaggttctgggcaaggtattgatgaagtcagaaacgaggtagtcctactcgtcaaactacagcacaggaatctagtcagactgcttggttgctgtattcatgaagaagagaagttactgatctacgaatacttgcctaacaaaagcctagatgccttcctctttgatacttcaagaacacgtgtacttgattggccaacacggttcaacataattaaaggcatagccaggggcattctatatctccaccaagattcaagattaacaataattcatagagatcttaaagcaagtaacatcttgttagacacagaaatgagtcccaaaatatcagatttcggtatggcaagaatcttcgggggaaaccagcaactagcaaacactacacgtgttgttgggacatacggttatatgtctcctgaatatgtgacaagtggtgccttttctgtcaagtcagacacatatagctttggtgttcttctcttggagattgtaagtggtttgaagattatctcaactcaatttataatggacttcccaaaccttatagcttatacatggaagttatgggaagagggaaatgcaacgaaattggtggactcattggttgctgaaagttgtccactccatgaagcttttaggtgtattcatgtaggacttttgtgtgtccaagacaatccaaatgcaaggccactcatgtcaacagttgtgtttatgttggagaatgaaaccacattgcttccagcaccaaaggagcctgtatatttttcaccaaggaataatgaaactgaagaaacaagaagaaacatagaaggttttctgaatatgtcgtgtatcacaacactggaaggccgctagatgttcacacttctaccatgtacatgttcaagccttttattaaccatgtactgtagggtaggtgaatttcagcatagctggtcgtaatatatacgaaattacagtcttcaaaagggatatatgtgaacttactgtactgaacacactgaattgaagcttgtggcttggaaaaaaatgtaaataatctagaggtttgagaattatatggtcaagtgtcataacaaagaatgcaataaaatttcacatgacattgctttaatcttcagttgctctaatgccaaaaggtgaagggtgcttaatctttcagtgcagtacctcatatggattattcgtagatttttttcataagatgttatatttttctataaagctagtaaacttgaggggttctttttccattaggccggtggtcattggagactaggaaacagccaaagttaaatgaataaactgtagcaagttcagagttgttttcagcattgtgtaacatacctcatatgtggggttttattcaattttttcgaaacatgctatttgcataagatgagcaaataataagtacacagctgattgcagctggtaaccggcaaatagttttcttggccaggtttaccatgccagaaatttagatgatttacctccaacactagctgcaagtgaaatttaggttattcagcaaatcgccactgacaggcagagctcacacattctgcaaaagcttcggatcactcctctgaatatgtagcacgccaggtacagattcatcaacgtatggacaccacggcactagaattagaagcgagagcgagtcagcgagacacccggggtacctggcgaagacggcggccatgggacacgggtgccgaactgtggcggcgcgaggcgtcaagggtccgtctagcgatactacggaagaagggcggtg

SEQ ID NO: 19230 - DNA, 3583 bp, Zea Mays
cttggttcttggcttggtcaattttattctgaaatacaaactttggcatcttgtctatccctgcatgccacgtatcctcccttttctcttcttctagtaataaaaaccttgggtgctctactgtatgaaacaccgggcattgttcataatgtattgttaaatattttagaccattacacggcattgacgttttgcattttcatcaaatttgtcagactacacccggtgaacttacgactccaccttgtccatgtgtacaatctctgatctatatcttggtaatggatatgaccagccttaccatttccatcctcctgctcctcctgatgatccgtgtctgcaaatccgatgaccagctggcaagcgcaaggccactttcacccggcgacctgctcatctccaaaggcggcgtctttgccctcggtttcttctccccgtccggctccaacaccagcacgagcctgtacgttgcgatctggttccacggcatccccgagcgcagccgcaccgtcgtgtgggtcgccaaccgcgacagcccagccaccacatcgtcgtccccgacgctcgccatcagcaacagctttgacctcgtgctttcggactcccagggccgcactctctggaggacgcagaacgccgccgccgcggccgtccacgacagcggcactcccctggccgtgctgctcgacacgggcaacctgcaactccagctgcccaacggtacggtcatatggcagagcttcgaccacccgactgacaccattctcccaggcatgcggttcctgatgatccacggggctcgccccgccgcgcgcctggtctcttggagaggccccgccgacccgtccaccggagccttctcgttcggcctcgaccccgtctccaacctccagctgatggtctggcacggggccgagccgtactgccgcatcagcgtgtggaacggcgtgtcggtgtcaggcggcatgtacaccggctcacctagctccatcgtgtaccagaccatcgtcaacaccggcgacgagttctacctcacgtacaccgtctccgacggctcgccgtacttccgtatcatgctcgaccacaccggcacgatgaagctcctgagctgggacaccaactcgtcgtcctggacgctcatctccgagcgccccaccggtggctacggcctctatggctcctgtggccccaacgcctactgcgacttcaccggggctgccccggcgtgccagtgcctcgagggcttcgagcccgtcgccgccgatctcaactcttcagaaggatgccggagaacggagcctctgcagtgcagcaaggcaagtcacttcgtggccttgcccgggatgagagttcctgacaagttcgtgctcctccggaacagaagctttgagcagtgcgcggctgagtgcagcaagaactgctcctgcaccgcctatgcttacgccaacttgagcagcagcggtgccatggaagaccagtcaaggtgcttggtttggaccggggagcttgtcgacacctggaaaagcatcaactatggcgagaagctgtacctccggcttgccagccctgttaaaaccaagagcaatatagtaaagattgtagtcccggttgtagcatgcctgctgctacccacatgcatagcccttgtcttcctatgcaaattcaaagcagggaaatggatacttgagcacctccaatagactcggagacaaaaatgatgaatttccatttgttagcttcaatgacattgttgccgcaaccgataatttctctgactgcaatatgcttggaagaggaggctttggcaaagtttacaagggaatattggaagatggcaaggaagttgctgtcaaaaggcttagtcaaggttctgggcaaggtattgatgaagtcagaaacgaggtagtcctactcgtcaaactacagcacaggaatctagtcagactgcttggttgctgtattcatgaagaagagaagttactgatctacgaatacttgcctaacaaaagcctagatgccttcctctttgatacttcaagaacacgtgtacttgattggccaacacggttcaacataattaaaggcatagccaggggcattctatatctccaccaagattcaagattaacaataattcatagagatcttaaagcaagtaacatcttgttagacacagaaatgagtcccaaaatatcagatttcggtatggcaagaatcttcgggggaaaccagcaactagcaaacactacacgtgttgttgggacatacggttatatgtctcctgaatatgtgacaagtggtgccttttctgtcaagtcagacacatatagctttggtgttcttctcttggagattacatggaagttatgggaagagggaaatgcaacgaaattggtggactcattggttgctgaaagttgtccactccatgaagcttttaggtgtattcatgtaggacttttgtgtgtccaagacaatccaaatgcaaggccactcatgtcaacagttgtgtttatgttggagaatgaaaccacattgcttccagcaccaaaggagcctgtatatttttcaccaaggaataatgaaactgaagaaacaagaagaaacatagaaggttttctgaatatgtcgtgtatcacaacactggaaggccgctagatgttcacacttctaccatgtacatgttcaagccttttattaaccatgtactgtagggtaggtgaatttcagcatagctggtcgtaatatatacgaaattacagtcttcaaaagggatatatgtgaacttactgtactgaacacactgaattgaagcttgtggcttggaaaaaaatgtaaataatctagaggtttgagaattatatggtcaagtgtcataacaaagaatgcaataaaatttcacatgacattgctttaatcttcagttgctctaatgccaaaaggtgaagggtgcttaatctttcagtgcagtacctcatatggattattcgtagatttttttcataagatgttatatttttctataaagctagtaaacttgaggggttctttttccattaggccggtggtcattggagactaggaaacagccaaagttaaatgaataaactgtagcaagttcagagttgttttcagcattgtgtaacatacctcatatgtggggttttattcaattttttcgaaacatgctatttgcataagatgagcaaataataagtacacagctgattgcagctggtaaccggcaaatagttttcttggccaggtttaccatgccagaaatttagatgatttacctccaacactagctgcaagtgaaatttaggttattcagcaaatcgccactgacaggcagagctcacacattctgcaaaagcttcggatcactcctctgaatatgtagcacgccaggtacagattcatcaacgtatggacaccacggcactagaattagaagcgagagcgagtcagcgagacacccggggtacctggcgaagacggcggccatgggacacgggtgccgaactgtggcggcgcgaggcgtcaagggtccgtctagcgatactacggaagaagggcggtg

SEQ ID NO: 19231 - DNA, 3093 bp, Zea Mays
tgttattagttgtctgtgagttattacagactttggtatcatcctgctactgtagccccgttccatccacccatcaaagtgatgaaagctaaatttcgatttgatgggttggaaaacaggcccagtcattactacgaagtttccgttttgaaaaagaagtaatctaaattccatacgtccagtccaagtgttcagtgttcttcatcgtcatctacacacacggtatttccttcacattgtgcttccattccaagcagcctcgaatggcaaccagcaagaaaggcctgatggctatggtgtatattcgttctgccttcatcctcatattcttgagttcaccctgtcaatccaacgaccagctgactcaaacaaagccactcttgctcgaagacacgctcatctcggagggcggggactttgctcttggcttcttttcccctaccaattccagcaagaagctatacataggaatttggtaccaccgcgtcacagaacgcacagtggtatgggtcgccaaccgtgacaatccaatcaccacaccttcagccatgctcgccatcaccgacaatttagagctagtgttatcagactcccaaggacacactctttggatggcaacaggaaacacaagtggagatgctggaggagctgcttctgcggtgctactcaactctgggaactttgtccttcggttgccgaacggcacggaggtatggcatagcttcgatcacccgaccgatacaattcttccaaccatgaggatcctcctaagcttcaagacacaaccggcaacacgtttgattgcttggaagggccctgacaatccgtcaactggggatatttcttctggcatggattcaacgaaccttcagatgttcatttggaaaggggcactgccatactaccgtttccctgttgttaatgatatggcagtcgccggtgctatgtaccagcagagcaatggaaacgccgccatcatgtatgaaacgagggtgaacgcaggggatgcgttgtattatacgtacacagtctcgtccggttcaccctacacacgcttttcacttgactacacaggcaaagggagattactgagctggaacagcaccacatcgtcatggacagtcattatcgagcatcctcatagctgtgatctctatgcttcttgtggtccattcagctactgtgaccaaatggggccactaccgacgacatgccagtgccctgatgggtttgagctcctcaacagtctaaatttctctagaggatgccggagaaaggaagagctgaaatgcggagtggggaactatttcatggccatgtctagtatgaagcttcctgacaagttcttgcacattaagaatagaacctttgaccagtgtgctgacgagtgcactagaaactgctcctgtatggcatacgcctatgccaacctaagcagcattggtgctgtgggtgacacatcaaggtgtttggtttggagcggggatctcatcgacatggagaagaacagcttttcagaggtcttgtacatccggcttggtggatctgttcgaaggaagagcagtttgctgaaaattttactcccaattatactgtgtgtgctgctactcatgcttggagcccttgtctggacatgtaaaagcagaggcaaacggcaaaagaagagagttcaaaagagaaggatgctagaatacttgagttctactgatgacgctggggacaagaacataaacttcccatttattagctttgaaaacattgtcacagcaacagataatttctctgaatctaatttgcttgggaaaggaggttttggcaaagtgtacaagggaatgttggaaggcacaaaggaagtagctgtcaagagacttagcacgggttccggccaaggcaaggaggagttcaaaaatgaagtagtcctaattgcaaagttgcagcacaagaacctagttaagcttctcggttgttgtattcatgaagatgagaagctgttagtttatgagtacttacccaacaaaagcttggattacttcctctttggtattttgaaattccagtttttgatactgttaatgatgtccaacaaataaatgtcctgtgtgcctgctgatatgccctgttttatattattcttattagcttctgcaagaaaatcaatgcttcagtggccaacaaggttcaagataatccagggggttgctagaggaattatgtatctccatcatgactcaagattaactgtaattcatcgagatctaaaagcaagcaacatcttgctagataaggagatgaacccaaagatatcagatttcggcatggctaggatattctctggtgatcagctccaagcaaatactaaccgagttgtagggacatatggctacatgtctcctgaatatgcaatgaaaggtgcattttcagttaagtctgacacctacagctttggtgttcttatattggagattgtaagtggattaaagataagctcaccatatcttatcatggatttttctaaccttataacatttgcatggaacatgtggaaagatgggaaaccagaagattttcttgactcatctgtaacggagagttgctccctcgatgaagtttcacgatgcatccatataggactcctgtgcgctcaagacaatccgagttgcaggccactcatgtcaacagttgtgtccatgctggagaacaaagcaacaccactgccaacaccgaagcaacctaaagattttgcacttcgggactacaatcctggaaacgaaggtgtccacagggaattgtccgtaaatgatacaagtctcactatggtggagggccgttagattattgtttttgatactacgatgggggagcacatagcccaccagaaatattcattgaagacagacgtttagtccctattttgtttatgggtatttctgtttagacaaatttagtatcaatttaatctataaaatttattatgcaagaacaatctattggaaaggtaaagtttattatgcaatttatcaatttaggtttagattcagtatcaatttagtatcaattggaaaggtaaagtttattatgcaatgtataacagag

SEQ ID NO: 19232 - DNA, 2431 bp, Zea Mays
ctgagttggtggtataccaaaccctctattcagggctgagcctatcaacaggttcaacacagccctcttctaaatagtgctccactcatttaccttctaagagcactcgcactctcctagaccaactcaaataattcttgcttccttctagcttcacatcatttggaacgagttctaattttaattcagatgagataggcaaagccttggggccaatcatacctagtcccatgagttcctgaaccatactcctcatctcatttctcatctcactttttgtgattagtggatcctcttctttcttgtcaccatgaatcattgtccttttttcagcctcttcctctaacctttttgcttcagtctcctctgaactcatcatcatcactgcctgcaaacactaagacgaaccaggcttccttcccctctctcaattaatctgcagtacctccaacctcactagtcgtagcaacagcccgctctctttgtaatcaccgcccccagacccatctgctggactgccgctcggtggggcaacacatcttggacggcggatctcaagagggcaagggagcaagccttcctgtgagacgtcgacctgctgctgtccctcttctcccgcgccgcacaagactggtggcagcagcacgcgccacgatcctcctcgaccctccggcctctcccctccctgcacctgcagagagcgccgcaagctagctgcagaggagcaaaacagcaggaggaggacgaaaggaagaagagaaggcgagcggctgaatcctccctcgatcaccacacgcgctctgcccttccccgccaccgatctgccacctccgagcttgtccgccaacgccggatctgccggccacgtgatgcggctcaggcgacggacagagcctacgggcagcggcggcgccaaaacctagctctggataccatgtcgttttctggtaggggcgcttcccctcctggtgcatgtataaaaaagttcgaaggaagagcagtttgctgaaaattttactcccaattatactgtgtgtgctgctactcatgcttggagcccttgtctggacatgtaaaagcagaggcaaacggcaaaagaagagagttcaaaagagaaggatgctagaatacttgagttctactgatgacgctggggacaagaacataaacttcccatttattagctttgaaaacattgtcacagcaacagataatttctctgaatctaatttgcttgggaaaggaggttttggcaaagtgtacaagggaatgttggaaggcacaaaggaagtagctgtcaagagacttagcacgggttccggccaaggcaaggaggagttcaaaaatgaagtagtcctaattgcaaagttgcagcacaagaacctagttaagcttctcggttgttgtattcatgaagatgagaagctgttagtttatgagtacttacccaacaaaagcttggattacttcctctttgcttctgcaagaaaatcaatgcttcagtggccaacaaggttcaagataatccagggggttgctagaggaattatgtatctccatcatgactcaagattaactgtaattcatcgagatctaaaagcaagcaacatcttgctagataaggagatgaacccaaagatatcagatttcggcatggctaggatattctctggtgatcagctccaagcaaatactaaccgagttgtagggacatatggctacatgtctcctgaatatgcaatgaaaggtgcattttcagttaagtctgacacctacagctttggtgttcttatattggagattgtaagtggattaaagataagctcaccatatcttatcatggatttttctaaccttataacatttgcatggaacatgtggaaagatgggaaaccagaagattttcttgactcatctgtaacggagagttgctccctcgatgaagtttcacgatgcatccatataggactcctgtgcgctcaagacaatccgagttgcaggccactcatgtcaacagttgtgtccatgctggagaacaaagcaacaccactgccaacaccgaagcaacctaaagattttgcacttcgggactacaatcctggaaacgaaggtgtccacagggaattgtccgtaaatgatacaagtctcactatggtggagggccgttagattattgtttttgatactacgatgggggagcacatagcccaccagaaatattcattgaagacagacgtttagtccctattttgtttatgggtatttctgtttagacaaatttagtatcaatttaatctataaaatttattatgcaagaacaatctattggaaaggtaaagtttattatgcaatttatcaatttaggtttagattcagtatcaatttagtatcaattggaaaggtaaagtttattatgcaatgtataacagag

SEQ ID NO: 19233 - DNA, 2272 bp, Zea Mays
gtggtataccaaaccctctattcagggctgagcctatcaacaggttcaacacagccctcttctaaatagtgctccactcatttaccttctaagagcactcgcactctcctagaccaactcaaataattcttgcttccttctagcttcacatcatttggaacgagttctaattttaattcagatgagataggcaaagccttggggccaatcatacctagtcccatgagttcctgaaccatactcctcatctcatttctcatctcactttttgtgattagtggatcctcttctttcttgtcaccatgaatcattgtccttttttcagcctcttcctctaacctttttgcttcagtctcctctgaactcatcatcatcactgcctgcaaacactaagacgaaccaggcttccttcccctctctcaattaatctgcagtacctccaacctcactagtcgtagcaacagcccgctctctttgtaatcaccgcccccagacccatctgctggactgccgctcggtggggcaacacatcttggacggcggatctcaagagggcaagggagcaagccttcctgtgagacgtcgacctgctgctgtccctcttctcccgcgccgcacaagactggtggcagcagcacgcgccacgatcctcctcgaccctccggcctctcccctccctgcacctgcagagagcgccgcaagctagctgcagaggagcaaaacagcaggaggaggacgaaaggaagaagagaaggcgagcggctgaatcctccctcgatcaccacacgcgctctgcccttccccgccaccgatctgccacctccgagcttgtccgccaacgccggatctgccggccacgtgatgcggctcaggcgacggacagagcctacgggcagcggcggcgccaaaacctagctctggataccatgtcgttttctggtaggggcgcttcccctcctggtgcatgtataaaaaagttcgaaggaagagcagtttgctgaaaattttactcccaattatactgtgtgtgctgctactcatgcttggagcccttgtctggacatgtaaaagcagaggcaaacggcaaaagaagagagttcaaaagagaaggatgctagaatacttgagttctactgatgacgctggggacaagaacataaacttcccatttattagctttgaaaacattgtcacagcaacagataatttctctgaatctaatttgcttgggaaaggaggttttggcaaagtgtacaagggaatgttggaaggcacaaaggaagtagctgtcaagagacttagcacgggttccggccaaggcaaggaggagttcaaaaatgaagtagtcctaattgcaaagttgcagcacaagaacctagttaagcttctcggttgttgtattcatgaagatgagaagctgttagtttatgagtacttacccaacaaaagcttggattacttcctctttgcttctgcaagaaaatcaatgcttcagtggccaacaaggttcaagataatccagggggttgctagaggaattatgtatctccatcatgactcaagattaactgtaattcatcgagatctaaaagcaagcaacatcttgctagataaggagatgaacccaaagatatcagatttcggcatggctaggatattctctggtgatcagctccaagcaaatactaaccgagttgtagggacatagcatggaacatgtggaaagatgggaaaccagaagattttcttgactcatctgtaacggagagttgctccctcgatgaagtttcacgatgcatccatataggactcctgtgcgctcaagacaatccgagttgcaggccactcatgtcaacagttgtgtccatgctggagaacaaagcaacaccactgccaacaccgaagcaacctaaagattttgcacttcgggactacaatcctggaaacgaaggtgtccacagggaattgtccgtaaatgatacaagtctcactatggtggagggccgttagattattgtttttgatactacgatgggggagcacatagcccaccagaaatattcattgaagacagacgtttagtccctattttgtttatgggtatttctgtttagacaaatttagtatcaatttaatctataaaatttattatgcaagaacaatctattggaaaggtaaagtttattatgcaatttatcaatttaggtttagattcagtatcaatttagtatcaattggaaaggtaaagtttattatgcaatgtataacagag

SEQ ID NO: 19234 - DNA, 2192 bp, Zea Mays
ctagtcccatgagttcctgaaccatactcctcatctcatttctcatctcactttttgtgattagtggatcctcttctttcttgtcaccatgaatcattgtccttttttcagcctcttcctctaacctttttgcttcagtctcctctgaactcatcatcatcactgcctgcaaacactaagacgaaccaggcttccttcccctctctcaattaatctgcagtacctccaacctcactagtcgtagcaacagcccgctctctttgtaatcaccgcccccagacccatctgctggactgccgctcggtggggcaacacatcttggacggcggatctcaagagggcaagggagcaagccttcctgtgagacgtcgacctgctgctgtccctcttctcccgcgccgcacaagactggtggcagcagcacgcgccacgatcctcctcgaccctccggcctctcccctccctgcacctgcagagagcgccgcaagctagctgcagaggagcaaaacagcaggaggaggacgaaaggaagaagagaaggcgagcggctgaatcctccctcgatcaccacacgcgctctgcccttccccgccaccgatctgccacctccgagcttgtccgccaacgccggatctgccggccacgtgatgcggctcaggcgacggacagagcctacgggcagcggcggcgccaaaacctagctctggataccatgtcgttttctggtaggggcgcttcccctcctggtgcatgtataaaaaaggtatccataggtcatggaaacccttataaagtaagctcacattgcaaccaacgcttgttgcagtatattctgacaggatacatttctgtgtatagttcgaaggaagagcagtttgctgaaaattttactcccaattatactgtgtgtgctgctactcatgcttggagcccttgtctggacatgtaaaagcagaggtacaaaagaaaaagaaccatcatttaaaaaaaagcagtgcaaacggcaaaagaagagagttcaaaagagaaggatgctagaatacttgagttctactgatgacgctggggacaagaacataaacttcccatttattagctttgaaaacattgtcacagcaacagataatttctctgaatctaatttgcttgggaaaggaggttttggcaaagtgtacaagggaatgttggaaggcacaaaggaagtagctgtcaagagacttagcacgggttccggccaaggcaaggaggagttcaaaaatgaagtagtcctaattgcaaagttgcagcacaagaacctagttaagcttctcggttgttgtattcatgaagatgagaagctgttagtttatgagtacttacccaacaaaagcttggattacttcctctttgcttctgcaagaaaatcaatgcttcagtggccaacaaggttcaagataatccagggggttgctagaggaattatgtatctccatcatgactcaagattaactgtaattcatcgagatctaaaagcaagcaacatcttgctagataaggagatgaacccaaagatatcagatttcggcatggctaggatattctctggtgatcagctccaagcaaatactaaccgagttgtagggacatagcatggaacatgtggaaagatgggaaaccagaagattttcttgactcatctgtaacggagagttgctccctcgatgaagtttcacgatgcatccatataggactcctgtgcgctcaagacaatccgagttgcaggccactcatgtcaacagttgtgtccatgctggagaacaaagcaacaccactgccaacaccgaagcaacctaaagattttgcacttcgggactacaatcctggaaacgaaggtgtccacagggaattgtccgtaaatgatacaagtctcactatggtggagggccgttagattattgtttttgatactacgatgggggagcacatagcccaccagaaatattcattgaagacagacgtttagtccctattttgtttatgggtatttctgtttagacaaatttagtatcaatttaatctataaaatttattatgcaagaacaatctattggaaaggtaaagtttattatgcaatttatcaatttaggtttagattcagtatcaatttagtatcaattggaaaggtaaagtttattatgcaatgtataacagag

SEQ ID NO: 19235 - DNA, 3552 bp, Zea Mays
gcgcagcctgcagcccatcgatgattccgcagcccagctaatcccaaacaccgtcgagcggacctcggaagggaacggccggagtcgccggcacccgcgcttcgcagcccgtcggtcatgccgccgccgcagccactgcgtgccttatcttccttccctttacctcgccgccatcctacccatacccccgccactataaccggttgcgcctctacttccgaccgcctaccattcgcaatgccctccggcccggatgtaaggttcgtagtcggaaaccgtcggaaacccttggaccatttgccaccggcccaatgatatcgacctgccccggccgcggcaagatatcatccattgggagttcgaaactccatgtgacggtaaccagccaacctgtcggcatctccctcttgtcaattcaccgtgtcccgccgccgtgcgagtccggagttcctatctacttgatttctctgcatttccttctagtaggaagtaccattctagattggcgcgtcactagcacgatgacccatatgtcagtgttgttcttggtatgcaattctcctcagtagaccagttgcaatgctgaataatccacgattgtactaggctactagctgacaccttcgacatatgaggatgtttggtttctagggactattgtttagttctatcattttattctattttagtctataaattgtcaaatatagaaactaaaaagagttttagtttctatattcggtaattttgaaactaaaatggaataaaatgtagggactaaaaattagtcactagaaaccaaacaccccatgtatatatatttccagcgaggctctggtcatccaatcttccaacagctcatgccgatatcctaagtctccagagttagacatttcatgtatatatcccttcgtcctcagtttgcgcctgaattctcagcttcaccaaacaactgatgacccctgtagtctaattttttttgtccactaagctggattagtcctccaatctcattcaaatttctcaactgacaagaaccgcaaatcggagtactcgacccattccctaccccttcgagttcaaatatctgaggggtcatgggtcttagcgtgctatttccttgctgtctcctccacagcattataccaacttaccaacaaggtctaatcgccatggcttacctttatctgcctgttttgatcttccagttcatggtttgtttttgccaatccgttgacaggctaacacctgcaaagccgctcttgcatggtgatgttctcatatcaaatggtggtgtctttgctcttggcttcttctccctgaaaaactcaacttcgagctcatatgttggcatatggtacaacaacatccctgagcgcacatatgtgtggattgccaaccgtgacaacccaattaccaccaatgcgcccgggaagctagtttttaccaacagttctgaccttgtcttgttagactccacaggccacactatctggatgacaaaaaacaacatcactgcaggagaaggtggaactgctgccatcctgctcgactcggggaactttgttgtccaatcacaaaatggcactgacatatgggagagcttccattatccgactgacaccatggtccctgatcaacttctccatgggtggcgactcaagctcagatctccagattgttacttggaatgggacacggccatattggcggagagccgcatggggtggtgaagtgacattcggcacatttgagggcaacaccagcttcatggtgtacgaaacaatagttgacacaggggatggatactacatgaaactcactgtctctgaagggtcaccaagtatacgcttaactctggattacacgggcatgttaactttccgaagatggaacgtcaacacatcctcatgggcagttttcggacaattcccaagatgtcggagaaaggaggagctgaaatgtggtggcggagataaattcttaaccttgccatctatgaagactcctgacaagttcttgtacatcaagaacagaagttttgaccaatgcactgcagagtgcagtaacaactgctcatgcacagcgtatgcttatgctaacctgcaaaatgttgacacaacgcatgacacgacaaggtgcttggtctggatgggggagcttatcgatgcagagaaacttagtaacacatttggtgagaacctatatttccgggtccccacctcaccagtaagcaagaagaagagcactgtactaaagattgtacccgtggctacgggtacttttcttcttttaatcacatgcatatggcttgtatgcaagtcaagagggaaacaccaaagaaggaattctcagaacaatttactatgcctgaatccttccagcgaacttgggactgaaaaatctagatcttccatcagttagctttgaagacatcatcactgcaacaaataatttctctgagcacaagttgctcggggaaggtggttttggaaaagtttacaagggagtgctggaaggtggcaaggaagttgctatcaaaaggcttagcaagggttctgttcaagggatccaggagtttataaacgaagttattctgattgccaaactgcagcacagaaacttagtcagacttcttggtttctgcattcatgaagatgagaagttacttatctatgagtacttacctaacagaagcttagatgctttcctttttgatggtacaagaaaatctttgcttgattggccagtccggttcaaaataattaaaggggttgcaagaggaattctctatcttcaccaagattctagactaacaataattcatagagatctcaaagcaagcaacatcttgttggacacagatatgtgtcccaagatatcagattttggtacagccaggatttttagtggaagcgaacaacaagtaaatacaacacgagttgctggaacatacggttacatgtctcctgagtatgccatggaaggctcattctctgttaagtctgacacctatgcttttggtgttctgctacttgagattgtaagcggcttaaagatcagctcatccctaatgaactttccaagcctcatcgcttatgcatggagcttgtggaaagatggaaatgcattggaattggtcgactcatcaatttctgtgagttattcacttcaggaacttgtacggtgtgttcagttagggcttttgtgcgtccaagaccctccaaatgcaaggccactcatgtcatccatcgtgttcatgctagagaatgagacagctccacttcctacaccagaagaacctctatattttacagttaggaattacggaactgatcgatcaaatgaatacatgcagaggtctctgaataacatgagtatcacaactctagaggcgcgttagacatttcgcttcatcgttccttaaatttgtagacatttttaatctgtgttattgtacatttacactagccgttcatatttgtacacaaaagtgttccattaaatacgttgtattttccaacagcaatttgtgttataaaaatattcccc

SEQ ID NO: 19236 - DNA, 3677 bp, Zea Mays
caccgtcgagcggacctcggaagggaacggccggagtcgccggcacccgcgcttcgcagcccgtcggtcatgccgccgccgcagccactgcgtgccttatcttccttccctttacctcgccgccatcctacccatacccccgccactataaccggttgcgcctctacttccgaccgcctaccattcgcaatgccctccggcccggatgtaaggttcgtagtcggaaaccgtcggaaacccttggaccatttgccaccggcccaatgatatcgacctgccccggccgcggcaagatatcatccattgggagttcgaaactccatgtgacggtaaccagccaacctgtcggcatctccctcttgtcaattcaccgtgtcccgccgccgtgcgagtccggagttcctatctacttgatttctctgcatttccttctagtaggaagtaccattctagattggcgcgtcactagcacgatgacccatatgtcagtgttgttcttggtatgcaattctcctcagtagaccagttgcaatgctgaataatccacgattgtactaggctactagctgacaccttcgacatatgaggatgtttggtttctagggactattgtttagttctatcattttattctattttagtctataaattgtcaaatatagaaactaaaaagagttttagtttctatattcggtaattttgaaactaaaatggaataaaatgtagggactaaaaattagtcactagaaaccaaacaccccatgtatatatatttccagcgaggctctggtcatccaatcttccaacagctcatgccgatatcctaagtctccagagttagacatttcatgtatatatcccttcgtcctcagtttgcgcctgaattctcagcttcaccaaacaactgatgacccctgtagtctaattttttttgtccactaagctggattagtcctccaatctcattcaaatttctcaactgacaagaaccgcaaatcggagtactcgacccattccctaccccttcgagttcaaatatctgaggggtcatgggtcttagcgtgctatttccttgctgtctcctccacagcattataccaacttaccaacaaggtctaatcgccatggcttacctttatctgcctgttttgatcttccagttcatggtttgtttttgccaatccgttgacaggctaacacctgcaaagccgctcttgcatggtgatgttctcatatcaaatggtggtgtctttgctcttggcttcttctccctgaaaaactcaacttcgagctcatatgttggcatatggtacaacaacatccctgagcgcacatatgtgtggattgccaaccgtgacaacccaattaccaccaatgcgcccgggaagctagtttttaccaacagttctgaccttgtcttgttagactccacaggccacactatctggatgacaaaaaacaacatcactgcaggagaaggtggaactgctgccatcctgctcgactcggggaactttgttgtccaatcacaaaatggcactgacatatgggagagcttccattatccgactgacaccatggtccctgatgtaagtttttcattgagctcgtctgatgttgctaagcgccttgttgcctggaaggggcctgatgatccatccagcagcaacttctccatgggtggcgactcaagctcagatctccagattgttacttggaatgggacacggccatattggcggagagccgcatggggtggtgaagtgacattcggcacatttgagggcaacaccagcttcatggtgtacgaaacaatagttgacacaggggatggatactacatgaaactcactgtctctgaagggtcaccaagtatacgcttaactctggattacacgggcatgttaactttccgaagatggaacgtcaacacatcctcatgggcagttttcggacaattcccaagatgtcggagaaaggaggagctgaaatgtggtggcggagataaattcttaaccttgccatctatgaagactcctgacaagttcttgtacatcaagaacagaagttttgaccaatgcactgcagagtgcagtaacaactgctcatgcacagcgtatgcttatgctaacctgcaaaatgttgacacaacgcatgacacgacaaggtgcttggtctggatgggggagcttatcgatgcagagaaacttagtaacacatttggtgagaacctatatttccgggtccccacctcaccagagcttaaggattttaccagttcaccttgtaaagctttaaatgctcatgttaccaagatgtcttgctcacagaagaaccatttgtctaatgttaggtgtggtcagaatgaaatgtttttcaagtgttttctctttgtggatcacatttatgcagtaagcaagaagaagagcactgtactaaagattgtacccgtggctacgggtacttttcttcttttaatcacatgcatatggcttgtatgcaagtcaagagggaaacaccaaagaaggaattctcagaacaatttactatgcctgaatccttccagcgaacttgggactgaaaaatctagatcttccatcagttagctttgaagacatcatcactgcaacaaataatttctctgagcacaagttgctcggggaaggtggttttggaaaagtttacaagggagtgctggaaggtggcaaggaagttgctatcaaaaggcttagcaagggttctgttcaagggatccaggagtttataaacgaagttattctgattgccaaactgcagcacagaaacttagtcagacttcttggtttctgcattcatgaagatgagaagttacttatctatgagtacttacctaacagaagcttagatgctttcctttttgatggtacaagaaaatctttgcttgattggccagtccggttcaaaataattaaaggggttgcaagaggaattctctatcttcaccaagattctagactaacaataattcatagagatctcaaagcaagcaacatcttgttggacacagatatgtgtcccaagatatcagattttggtacagccaggatttttagtggaagcgaacaacaagtaaatacaacacgagttgctggaacatacggttacatgtctcctgagtatgccatggaaggctcattctctgttaagtctgacacctatgcttttggtgttctgctacttgagattgcatggagcttgtggaaagatggaaatgcattggaattggtcgactcatcaatttctgtgagttattcacttcaggaacttgtacggtgtgttcagttagggcttttgtgcgtccaagaccctccaaatgcaaggccactcatgtcatccatcgtgttcatgctagagaatgagacagctccacttcctacaccagaagaacctctatattttacagttaggaattacggaactgatcgatcaaatgaatacatgcagaggtctctgaataacatgagtatcacaactctagaggcgcgttagacatttcgcttcatcgttccttaaatttgtagacatttttaatctgtgttattgtacatttacactagccgttcatatttgtacacaaaagtgttccattaaatacgttgtattttccaacagcaatttgtgttataaaaatattcccc

SEQ ID NO: 19237 - DNA, 3302 bp, Zea Mays
caccgtcgagcggacctcggaagggaacggccggagtcgccggcacccgcgcttcgcagcccgtcggtcatgccgccgccgcagccactgcgtgccttatcttccttccctttacctcgccgccatcctacccatacccccgccactataaccggttgcgcctctacttccgaccgcctaccattcgcaatgccctccggcccggatgtaaggttcgtagtcggaaaccgtcggaaacccttggaccatttgccaccggcccaatgatatcgacctgccccggccgcggcaagatatcatccattgggagttcgaaactccatgtgacggtaaccagccaacctgtcggcatctccctcttgtcaattcaccgtgtcccgccgccgtgcgagtccggagttcctatctacttgatttctctgcatttccttctagtaggaagtaccattctagattggcgcgtcactagcacgatgacccatatgtcagtgttgttcttgcgaggctctggtcatccaatcttccaacagctcatgccgatatcctaagtctccagagttagacatttcatgtatatatcccttcgtcctcagtttgcgcctgaattctcagcttcaccaaacaactgatgacccctgtagtctaattttttttgtccactaagctggattagtcctccaatctcattcaaatttctcaactgacaagaaccgcaaatcggagtactcgacccattccctaccccttcgagttcaaatatctgaggggtcatgggtcttagcgtgctatttccttgctgtctcctccacagcattataccaacttaccaacaaggtctaatcgccatggcttacctttatctgcctgttttgatcttccagttcatggtttgtttttgccaatccgttgacaggctaacacctgcaaagccgctcttgcatggtgatgttctcatatcaaatggtggtgtctttgctcttggcttcttctccctgaaaaactcaacttcgagctcatatgttggcatatggtacaacaacatccctgagcgcacatatgtgtggattgccaaccgtgacaacccaattaccaccaatgcgcccgggaagctagtttttaccaacagttctgaccttgtcttgttagactccacaggccacactatctggatgacaaaaaacaacatcactgcaggagaaggtggaactgctgccatcctgctcgactcggggaactttgttgtccaatcacaaaatggcactgacatatgggagagcttccattatccgactgacaccatggtccctgatgtaagtttttcattgagctcgtctgatgttgctaagcgccttgttgcctggaaggggcctgatgatccatccagcagcaacttctccatgggtggcgactcaagctcagatctccagattgttacttggaatgggacacggccatattggcggagagccgcatggggtggtgaagtgacattcggcacatttgagggcaacaccagcttcatggtgtacgaaacaatagttgacacaggggatggatactacatgaaactcactgtctctgaagggtcaccaagtatacgcttaactctggattacacgggcatgttaactttccgaagatggaacgtcaacacatcctcatgggcagttttcggacaattcccaagatgtcggagaaaggaggagctgaaatgtggtggcggagataaattcttaaccttgccatctatgaagactcctgacaagttcttgtacatcaagaacagaagttttgaccaatgcactgcagagtgcagtaacaactgctcatgcacagcgtatgcttatgctaacctgcaaaatgttgacacaacgcatgacacgacaaggtgcttggtctggatgggggagcttatcgatgcagagaaacttagtaacacatttggtgagaacctatatttccgggtccccacctcaccagtaagcaagaagaagagcactgtactaaagattgtacccgtggctacgggtacttttcttcttttaatcacatgcatatggcttgtatgcaagtcaagagggaaacaccaaagaaggaattctcagaacaatttactatgcctgaatccttccagcgaacttgggactgaaaaatctagatcttccatcagttagctttgaagacatcatcactgcaacaaataatttctctgagcacaagttgctcggggaaggtggttttggaaaagtttacaagggagtgctggaaggtggcaaggaagttgctatcaaaaggcttagcaagggttctgttcaagggatccaggagtttataaacgaagttattctgattgccaaactgcagcacagaaacttagtcagacttcttggtttctgcattcatgaagatgagaagttacttatctatgagtacttacctaacagaagcttagatgctttcctttttgatggtacaagaaaatctttgcttgattggccagtccggttcaaaataattaaaggggttgcaagaggaattctctatcttcaccaagattctagactaacaataattcatagagatctcaaagcaagcaacatcttgttggacacagatatgtgtcccaagatatcagattttggtacagccaggatttttagtggaagcgaacaacaagtaaatacaacacgagttgctggaacatacggttacatgtctcctgagtatgccatggaaggctcattctctgttaagtctgacacctatgcttttggtgttctgctacttgagattgtaagcggcttaaagatcagctcatccctaatgaactttccaagcctcatcgcttatgcatggagcttgtggaaagatggaaatgcattggaattggtcgactcatcaatttctgtgagttattcacttcaggaacttgtacggtgtgttcagttagggcttttgtgcgtccaagaccctccaaatgcaaggccactcatgtcatccatcgtgttcatgctagagaatgagacagctccacttcctacaccagaagaacctctatattttacagttaggaattacggaactgatcgatcaaatgaatacatgcagaggtctctgaataacatgagtatcacaactctagaggcgcgttagacatttcgcttcatcgttccttaaatttgtagacatttttaatctgtgttattgtacatttacactagccgttcatatttgtacacaaaagtgttccattaaatacgttgtattttccaacagcaatttgtgttataaaaatattcccc

SEQ ID NO: 19238 - DNA, 2731 bp, Zea Mays
caccgtcgagcggacctcggaagggaacggccggagtcgccggcacccgcgcttcgcagcccgtcggtcatgccgccgccgcagccactgcgtgccttatcttccttccctttacctcgccgccatcctacccatacccccgccactataaccggttgcgcctctacttccgaccgcctaccattcgcaatgccctccggcccggatgtaaggttcgtagtcggaaaccgtcggaaacccttggaccatttgccaccggcccaatgatatcgacctgccccggccgcggcaagatatcatccattgggagttcgaaactccatgtgacggctaacacctgcaaagccgctcttgcatggtgatgttctcatatcaaatggtggtgtctttgctcttggcttcttctccctgaaaaactcaacttcgagctcatatgttggcatatggtacaacaacatccctgagcgcacatatgtgtggattgccaaccgtgacaacccaattaccaccaatgcgcccgggaagctagtttttaccaacagttctgaccttgtcttgttagactccacaggccacactatctggatgacaaaaaacaacatcactgcaggagaaggtggaactgctgccatcctgctcgactcggggaactttgttgtccaatcacaaaatggcactgacatatgggagagcttccattatccgactgacaccatggtccctgatgtaagtttttcattgagctcgtctgatgttgctaagcgccttgttgcctggaaggggcctgatgatccatccagcagcaacttctccatgggtggcgactcaagctcagatctccagattgttacttggaatgggacacggccatattggcggagagccgcatggggtggtgaagtgacattcggcacatttgagggcaacaccagcttcatggtgtacgaaacaatagttgacacaggggatggatactacatgaaactcactgtctctgaagggtcaccaagtatacgcttaactctggattacacgggcatgttaactttccgaagatggaacgtcaacacatcctcatgggcagttttcggacaattcccaagtacagcgtgtgcacattatgccttttgtggcccgtttgcctactgtgatggcactgagtctgttcctacttgcaagtgccttgatgggtttgaggcgatggtcttgatttttcccaaggatgtcggagaaaggaggagctgaaatgtggtggcggagataaattcttaaccttgccatctatgaagactcctgacaagttcttgtacatcaagaacagaagttttgaccaatgcactgcagagtgcagtaacaactgctcatgcacagcgtatgcttatgctaacctgcaaaatgttgacacaacgcatgacacgacaaggtgcttggtctggatgggggagcttatcgatgcagagaaacttagtaacacatttggtgagaacctatatttccgggtccccacctcaccagtaagcaagaagaagagcactgtactaaagattgtacccgtggctacggcgaacttgggactgaaaaatctagatcttccatcagttagctttgaagacatcatcactgcaacaaataatttctctgagcacaagttgctcggggaaggtggttttggaaaagtttacaagggagtgctggaaggtggcaaggaagttgctatcaaaaggcttagcaagggttctgttcaagggatccaggagtttataaacgaagttattctgattgccaaactgcagcacagaaacttagtcagacttcttggtttctgcattcatgaagatgagaagttacttatctatgagtacttacctaacagaagcttagatgctttcctttttgatggtacaagaaaatctttgcttgattggccagtccggttcaaaataattaaaggggttgcaagaggaattctctatcttcaccaagattctagactaacaataattcatagagatctcaaagcaagcaacatcttgttggacacagatatgtgtcccaagatatcagattttggtacagccaggatttttagtggaagcgaacaacaagtaaatacaacacgagttgctggaacatacggttacatgtctcctgagtatgccatggaaggctcattctctgttaagtctgacacctatgcttttggtgttctgctacttgagattgtaagcggcttaaagatcagctcatccctaatgaactttccaagcctcatcgcttatgcatggagcttgtggaaagatggaaatgcattggaattggtcgactcatcaatttctgtgagttattcacttcaggaacttgtacggtgtgttcagttagggcttttgtgcgtccaagaccctccaaatgcaaggccactcatgtcatccatcgtgttcatgctagagaatgagacagctccacttcctacaccagaagaacctctatattttacagttaggaattacggaactgatcgatcaaatgaatacatgcagaggtctctgaataacatgagtatcacaactctagaggcgcgttagacatttcgcttcatcgttccttaaatttgtagacatttttaatctgtgttattgtacatttacactagccgttcatatttgtacacaaaagtgttccattaaatacgttgtattttccaacagcaatttgtgttataaaaatattcccc

SEQ ID NO: 19239 - DNA, 2718 bp, Zea Mays
caccgtcgagcggacctcggaagggaacggccggagtcgccggcacccgcgcttcgcagcccgtcggtcatgccgccgccgcagccactgcgtgccttatcttccttccctttacctcgccgccatcctacccatacccccgccactataaccggttgcgcctctacttccgaccgcctaccattcgcaatgccctccggcccggatgtaaggttcgtagtcggaaaccgtcggaaacccttggaccatttgccaccggcccaatgatatcgacctgccccggccgcggcaagatatcatccattgggagttcgaaactccatgtgacggctaacacctgcaaagccgctcttgcatggtgatgttctcatatcaaatggtggtgtctttgctcttggcttcttctccctgaaaaactcaacttcgagctcatatgttggcatatggtacaacaacatccctgagcgcacatatgtgtggattgccaaccgtgacaacccaattaccaccaatgcgcccgggaagctagtttttaccaacagttctgaccttgtcttgttagactccacaggccacactatctggatgacaaaaaacaacatcactgcaggagaaggtggaactgctgccatcctgctcgactcggggaactttgttgtccaatcacaaaatggcactgacatatgggagagcttccattatccgactgacaccatggtccctgatgtaagtttttcattgagctcgtctgatgttgctaagcgccttgttgcctggaaggggcctgatgatccatccagcagcaacttctccatgggtggcgactcaagctcagatctccagattgttacttggaatgggacacggccatattggcggagagccgcatggggtggtgaagtgacattcggcacatttgagggcaacaccagcttcatggtgtacgaaacaatagttgacacaggggatggatactacatgaaactcactgtctctgaagggtcaccaagtatacgcttaactctggattacacgggcatgttaactttccgaagatggaacgtcaacacatcctcatgggcagttttcggacaattcccaagatgtcggagaaaggaggagctgaaatgtggtggcggagataaattcttaaccttgccatctatgaagactcctgacaagttcttgtacatcaagaacagaagttttgaccaatgcactgcagagtgcagtaacaactgctcatgcacagcgtatgcttatgctaacctgcaaaatgttgacacaacgcatgacacgacaaggtgcttggtctggatgggggagcttatcgatgcagagaaacttagtaacacatttggtgagaacctatatttccgggtccccacctcaccagtaagcaagaagaagagcactgtactaaagattgtacccgtggctacgggtacttttcttcttttaatcacatgcatatggcttgtatgcaagtcaagagggaaacaccaaagaaggaattctcagaacaatttactatgcctgaatccttccagcgaacttgggactgaaaaatctagatcttccatcagttagctttgaagacatcatcactgcaacaaataatttctctgagcacaagttgctcggggaaggtggttttggaaaagtttacaagggagtgctggaaggtggcaaggaagttgctatcaaaaggcttagcaagggttctgttcaagggatccaggagtttataaacgaagttattctgattgccaaactgcagcacagaaacttagtcagacttcttggtttctgcattcatgaagatgagaagttacttatctatgagtacttacctaacagaagcttagatgctttcctttttgatggtacaagaaaatctttgcttgattggccagtccggttcaaaataattaaaggggttgcaagaggaattctctatcttcaccaagattctagactaacaataattcatagagatctcaaagcaagcaacatcttgttggacacagatatgtgtcccaagatatcagattttggtacagccaggatttttagtggaagcgaacaacaagtaaatacaacacgagttgctggaacatacggttacatgtctcctgagtatgccatggaaggctcattctctgttaagtctgacacctatgcttttggtgttctgctacttgagattgtaagcggcttaaagatcagctcatccctaatgaactttccaagcctcatcgcttatgcatggagcttgtggaaagatggaaatgcattggaattggtcgactcatcaatttctgtgagttattcacttcaggaacttgtacggtgtgttcagttagggcttttgtgcgtccaagaccctccaaatgcaaggccactcatgtcatccatcgtgttcatgctagagaatgagacagctccacttcctacaccagaagaacctctatattttacagttaggaattacggaactgatcgatcaaatgaatacatgcagaggtctctgaataacatgagtatcacaactctagaggcgcgttagacatttcgcttcatcgttccttaaatttgtagacatttttaatctgtgttattgtacatttacactagccgttcatatttgtacacaaaagtgttccattaaatacgttgtattttccaacagcaatttgtgttataaaaatattcccc

SEQ ID NO: 19240 - DNA, 3434 bp, Zea Mays
caccgtcgagcggacctcggaagggaacggccggagtcgccggcacccgcgcttcgcagcccgtcggtcatgccgccgccgcagccactgcgtgccttatcttccttccctttacctcgccgccatcctacccatacccccgccactataaccggttgcgcctctacttccgaccgcctaccattcgcaatgccctccggcccggatgtaaggttcgtagtcggaaaccgtcggaaacccttggaccatttgccaccggcccaatgatatcgacctgccccggccgcggcaagatatcatccattgggagttcgaaactccatgtgacggtaaccagccaacctgtcggcatctccctcttgtcaattcaccgtgtcccgccgccgtgcgagtccggagttcctatctacttgatttctctgcatttccttctagtaggaagtaccattctagattggcgcgtcactagcacgatgacccatatgtcagtgttgttcttggtatgcaattctcctcagtagaccagttgcaatgctgaataatccacgattgtactaggctactagctgacaccttcgacatatgaggatgtttggtttctagggactattgtttagttctatcattttattctattttagtctataaattgtcaaatatagaaactaaaaagagttttagtttctatattcggtaattttgaaactaaaatggaataaaatgtagggactaaaaattagtcactagaaaccaaacaccccatgtatatatatttccagcgaggctctggtcatccaatcttccaacagctcatgccgatatcctaagtctccagagttagacatttcatgtatatatcccttcgtcctcagtttgcgcctgaattctcagcttcaccaaacaactgatgacccctgtagtctaattttttttgtccactaagctggattagtcctccaatctcattcaaatttctcaactgacaagaaccgcaaatcggagtactcgacccattccctaccccttcgagttcaaatatctgaggggtcatgggtcttagcgtgctatttccttgctgtctcctccacagcattataccaacttaccaacaaggtctaatcgccatggcttacctttatctgcctgttttgatcttccagttcatggtttgtttttgccaatccgttgacaggctaacacctgcaaagccgctcttgcatggtgatgttctcatatcaaatggtggtgtctttgctcttggcttcttctccctgaaaaactcaacttcgagctcatatgttggcatatggtacaacaacatccctgagcgcacatatgtgtggattgccaaccgtgacaacccaattaccaccaatgcgcccgggaagctagtttttaccaacagttctgaccttgtcttgttagactccacaggccacactatctggatgacaaaaaacaacatcactgcaggagaaggtggaactgctgccatcctgctcgactcggggaactttgttgtccaatcacaaaatggcactgacatatgggagagcttccattatccgactgacaccatggtccctgatgtaagtttttcattgagctcgtctgatgttgctaagcgccttgttgcctggaaggggcctgatgatccatccagcagcaacttctccatgggtggcgactcaagctcagatctccagattgttacttggaatgggacacggccatattggcggagagccgcatggggtggtgaagtgacattcggcacatttgagggcaacaccagcttcatggtgtacgaaacaatagttgacacaggggatggatactacatgaaactcactgtctctgaagggtcaccaagtatacgcttaactctggattacacgggcatgttaactttccgaagatggaacgtcaacacatcctcatgggcagttttcggacaattcccaagatgtcggagaaaggaggagctgaaatgtggtggcggagataaattcttaaccttgccatctatgaagactcctgacaagttcttgtacatcaagaacagaagttttgaccaatgcactgcagagtgcagtaacaactgctcatgcacagcgtatgcttatgctaacctgcaaaatgttgacacaacgcatgacacgacaaggtgcttggtctggatgggggagcttatcgatgcagagaaacttagtaacacatttggtgagaacctatatttccgggtccccacctcaccagtaagcaagaagaagagcactgtactaaagattgtacccgtggctacgggtacttttcttcttttaatcacatgcatatggcttgtatgcaagtcaagagggaaacaccaaagaaggaattctcagaacaatttactatgcctgaatccttccagcgaacttgggactgaaaaatctagatcttccatcagttagctttgaagacatcatcactgcaacaaataatttctctgagcacaagttgctcggggaaggtggttttggaaaagtttacaagggagtgctggaaggtggcaaggaagttgctatcaaaaggcttagcaagggttctgttcaagggatccaggagtttataaacgaagttattctgattgccaaactgcagcacagaaacttagtcagacttcttggtttctgcattcatgaagatgagaagttacttatctatgagtacttacctaacagaagcttagatgctttcctttttgatatgtgtcccaagatatcagattttggtacagccaggatttttagtggaagcgaacaacaagtaaatacaacacgagttgctggaacatacggttacatgtctcctgagtatgccatggaaggctcattctctgttaagtctgacacctatgcttttggtgttctgctacttgagattgtaagcggcttaaagatcagctcatccctaatgaactttccaagcctcatcgcttatgcatggagcttgtggaaagatggaaatgcattggaattggtcgactcatcaatttctgtgagttattcacttcaggaacttgtacggtgtgttcagttagggcttttgtgcgtccaagaccctccaaatgcaaggccactcatgtcatccatcgtgttcatgctagagaatgagacagctccacttcctacaccagaagaacctctatattttacagttaggaattacggaactgatcgatcaaatgaatacatgcagaggtctctgaataacatgagtatcacaactctagaggcgcgttagacatttcgcttcatcgttccttaaatttgtagacatttttaatctgtgttattgtacatttacactagccgttcatatttgtacacaaaagtgttccattaaatacgttgtattttccaacagcaatttgtgttataaaaatattcccc

SEQ ID NO: 19241 - DNA, 3587 bp, Zea Mays
caccgtcgagcggacctcggaagggaacggccggagtcgccggcacccgcgcttcgcagcccgtcggtcatgccgccgccgcagccactgcgtgccttatcttccttccctttacctcgccgccatcctacccatacccccgccactataaccggttgcgcctctacttccgaccgcctaccattcgcaatgccctccggcccggatgtaaggttcgtagtcggaaaccgtcggaaacccttggaccatttgccaccggcccaatgatatcgacctgccccggccgcggcaagatatcatccattgggagttcgaaactccatgtgacggtaaccagccaacctgtcggcatctccctcttgtcaattcaccgtgtcccgccgccgtgcgagtccggagttcctatctacttgatttctctgcatttccttctagtaggaagtaccattctagattggcgcgtcactagcacgatgacccatatgtcagtgttgttcttggtatgcaattctcctcagtagaccagttgcaatgctgaataatccacgattgtactaggctactagctgacaccttcgacatatgaggatgtttggtttctagggactattgtttagttctatcattttattctattttagtctataaattgtcaaatatagaaactaaaaagagttttagtttctatattcggtaattttgaaactaaaatggaataaaatgtagggactaaaaattagtcactagaaaccaaacaccccatgtatatatatttccagcgaggctctggtcatccaatcttccaacagctcatgccgatatcctaagtctccagagttagacatttcatgtatatatcccttcgtcctcagtttgcgcctgaattctcagcttcaccaaacaactgatgacccctgtagtctaattttttttgtccactaagctggattagtcctccaatctcattcaaatttctcaactgacaagaaccgcaaatcggagtactcgacccattccctaccccttcgagttcaaatatctgaggggtcatgggtcttagcgtgctatttccttgctgtctcctccacagcattataccaacttaccaacaaggtctaatcgccatggcttacctttatctgcctgttttgatcttccagttcatggtttgtttttgccaatccgttgacaggctaacacctgcaaagccgctcttgcatggtgatgttctcatatcaaatggtggtgtctttgctcttggcttcttctccctgaaaaactcaacttcgagctcatatgttggcatatggtacaacaacatccctgagcgcacatatgtgtggattgccaaccgtgacaacccaattaccaccaatgcgcccgggaagctagtttttaccaacagttctgaccttgtcttgttagactccacaggccacactatctggatgacaaaaaacaacatcactgcaggagaaggtggaactgctgccatcctgctcgactcggggaactttgttgtccaatcacaaaatggcactgacatatgggagagcttccattatccgactgacaccatggtccctgatgtaagtttttcattgagctcgtctgatgttgctaagcgccttgttgcctggaaggggcctgatgatccatccagcagcaacttctccatgggtggcgactcaagctcagatctccagattgttacttggaatgggacacggccatattggcggagagccgcatggggtggtgaagtgacattcggcacatttgagggcaacaccagcttcatggtgtacgaaacaatagttgacacaggggatggatactacatgaaactcactgtctctgaagggtcaccaagtatacgcttaactctggattacacgggcatgttaactttccgaagatggaacgtcaacacatcctcatgggcagttttcggacaattcccaagatgtcggagaaaggaggagctgaaatgtggtggcggagataaattcttaaccttgccatctatgaagactcctgacaagttcttgtacatcaagaacagaagttttgaccaatgcactgcagagtgcagtaacaactgctcatgcacagcgtatgcttatgctaacctgcaaaatgttgacacaacgcatgacacgacaaggtgcttggtctggatgggggagcttatcgatgcagagaaacttagtaacacatttggtgagaacctatatttccgggtccccacctcaccagagcttaaggattttaccagttcaccttgtaaagctttaaatgctcatgttaccaagatgtcttgctcacagaagaaccatttgtctaatgttaggtgtggtcagaatgaaatgtttttcaagtgttttctctttgtggatcacatttatgcagtaagcaagaagaagagcactgtactaaagattgtacccgtggctacgggtacttttcttcttttaatcacatgcatatggcttgtatgcaagtcaagagggaaacaccaaagaaggaattctcagaacaatttactatgcctgaatccttccagcgaacttgggactgaaaaatctagatcttccatcagttagctttgaagacatcatcactgcaacaaataatttctctgagcacaagttgctcggggaaggtggttttggaaaagtttacaagggagtgctggaaggtggcaaggaagttgctatcaaaaggcttagcaagggttctgttcaagggatccaggagtttataaacgaagttattctgattgccaaactgcagcacagaaacttagtcagacttcttggtttctgcattcatgaagatgagaagttacttatctatgagtacttacctaacagaagcttagatgctttcctttttgatatgtgtcccaagatatcagattttggtacagccaggatttttagtggaagcgaacaacaagtaaatacaacacgagttgctggaacatacggttacatgtctcctgagtatgccatggaaggctcattctctgttaagtctgacacctatgcttttggtgttctgctacttgagattgtaagcggcttaaagatcagctcatccctaatgaactttccaagcctcatcgcttatgcatggagcttgtggaaagatggaaatgcattggaattggtcgactcatcaatttctgtgagttattcacttcaggaacttgtacggtgtgttcagttagggcttttgtgcgtccaagaccctccaaatgcaaggccactcatgtcatccatcgtgttcatgctagagaatgagacagctccacttcctacaccagaagaacctctatattttacagttaggaattacggaactgatcgatcaaatgaatacatgcagaggtctctgaataacatgagtatcacaactctagaggcgcgttagacatttcgcttcatcgttccttaaatttgtagacatttttaatctgtgttattgtacatttacactagccgttcatatttgtacacaaaagtgttccattaaatacgttgtattttccaacagcaatttgtgttataaaaatattcccc

SEQ ID NO: 19242 - DNA, 3475 bp, Zea Mays
caccgtcgagcggacctcggaagggaacggccggagtcgccggcacccgcgcttcgcagcccgtcggtcatgccgccgccgcagccactgcgtgccttatcttccttccctttacctcgccgccatcctacccatacccccgccactataaccggttgcgcctctacttccgaccgcctaccattcgcaatgccctccggcccggatgtaaggttcgtagtcggaaaccgtcggaaacccttggaccatttgccaccggcccaatgatatcgacctgccccggccgcggcaagatatcatccattgggagttcgaaactccatgtgacggtaaccagccaacctgtcggcatctccctcttgtcaattcaccgtgtcccgccgccgtgcgagtccggagttcctatctacttgatttctctgcatttccttctagtaggaagtaccattctagattggcgcgtcactagcacgatgacccatatgtcagtgttgttcttggtatgcaattctcctcagtagaccagttgcaatgctgaataatccacgattgtactaggctactagctgacaccttcgacatatgaggatgtttggtttctagggactattgtttagttctatcattttattctattttagtctataaattgtcaaatatagaaactaaaaagagttttagtttctatattcggtaattttgaaactaaaatggaataaaatgtagggactaaaaattagtcactagaaaccaaacaccccatgtatatatatttccagcgaggctctggtcatccaatcttccaacagctcatgccgatatcctaagtctccagagttagacatttcatgtatatatcccttcgtcctcagtttgcgcctgaattctcagcttcaccaaacaactgatgacccctgtagtctaattttttttgtccactaagctggattagtcctccaatctcattcaaatttctcaactgacaagaaccgcaaatcggagtactcgacccattccctaccccttcgagttcaaatatctgaggggtcatgggtcttagcgtgctatttccttgctgtctcctccacagcattataccaacttaccaacaaggtctaatcgccatggcttacctttatctgcctgttttgatcttccagttcatggtttgtttttgccaatccgttgacaggctaacacctgcaaagccgctcttgcatggtgatgttctcatatcaaatggtggtgtctttgctcttggcttcttctccctgaaaaactcaacttcgagctcatatgttggcatatggtacaacaacatccctgagcgcacatatgtgtggattgccaaccgtgacaacccaattaccaccaatgcgcccgggaagctagtttttaccaacagttctgaccttgtcttgttagactccacaggccacactatctggatgacaaaaaacaacatcactgcaggagaaggtggaactgctgccatcctgctcgactcggggaactttgttgtccaatcacaaaatggcactgacatatgggagagcttccattatccgactgacaccatggtccctgatgtaagtttttcattgagctcgtctgatgttgctaagcgccttgttgcctggaaggggcctgatgatccatccagcagcaacttctccatgggtggcgactcaagctcagatctccagattgttacttggaatgggacacggccatattggcggagagccgcatggggtggtgaagtgacattcggcacatttgagggcaacaccagcttcatggtgtacgaaacaatagttgacacaggggatggatactacatgaaactcactgtctctgaagggtcaccaagtatacgcttaactctggattacacgggcatgttaactttccgaagatggaacgtcaacacatcctcatgggcagttttcggacaattcccaagatgtcggagaaaggaggagctgaaatgtggtggcggagataaattcttaaccttgccatctatgaagactcctgacaagttcttgtacatcaagaacagaagttttgaccaatgcactgcagagtgcagtaacaactgctcatgcacagcgtatgcttatgctaacctgcaaaatgttgacacaacgcatgacacgacaaggtgcttggtctggatgggggagcttatcgatgcagagaaacttagtaacacatttggtgagaacctatatttccgggtccccacctcaccagtaagcaagaagaagagcactgtactaaagattgtacccgtggctacggcgaacttgggactgaaaaatctagatcttccatcagttagctttgaagacatcatcactgcaacaaataatttctctgagcacaagttgctcggggaaggtggttttggaaaagtttacaagggagtgctggaaggtggcaaggaagttgctatcaaaaggcttagcaagggttctgttcaagggatccaggagtttataaacgaagttattctgattgccaaactgcagcacagaaacttagtcagacttcttggtttctgcattcatgaagatgagaagttacttatctatgagtacttacctaacagaagcttagatgctttcctttttgatggtacaagaaaatctttgcttgattggccagtccggttcaaaataattaaaggggttgcaagaggaattctctatcttcaccaagattctagactaacaataattcatagagatctcaaagcaagcaacatcttgttggacacagatatgtgtcccaagatatcagattttggtacagccaggatttttagtggaagcgaacaacaagtaaatacaacacgagttgctggaacatacggttacatgtctcctgagtatgccatggaaggctcattctctgttaagtctgacacctatgcttttggtgttctgctacttgagattgtaagcggcttaaagatcagctcatccctaatgaactttccaagcctcatcgcttatgcatggagcttgtggaaagatggaaatgcattggaattggtcgactcatcaatttctgtgagttattcacttcaggaacttgtacggtgtgttcagttagggcttttgtgcgtccaagaccctccaaatgcaaggccactcatgtcatccatcgtgttcatgctagagaatgagacagctccacttcctacaccagaagaacctctatattttacagttaggaattacggaactgatcgatcaaatgaatacatgcagaggtctctgaataacatgagtatcacaactctagaggcgcgttagacatttcgcttcatcgttccttaaatttgtagacatttttaatctgtgttattgtacatttacactagccgttcatatttgtacacaaaagtgttccattaaatacgttgtattttccaacagcaatttgtgttataaaaatattcccc

SEQ ID NO: 19243 - DNA, 3582 bp, Zea Mays
caccgtcgagcggacctcggaagggaacggccggagtcgccggcacccgcgcttcgcagcccgtcggtcatgccgccgccgcagccactgcgtgccttatcttccttccctttacctcgccgccatcctacccatacccccgccactataaccggttgcgcctctacttccgaccgcctaccattcgcaatgccctccggcccggatgtaaggttcgtagtcggaaaccgtcggaaacccttggaccatttgccaccggcccaatgatatcgacctgccccggccgcggcaagatatcatccattgggagttcgaaactccatgtgacggtaaccagccaacctgtcggcatctccctcttgtcaattcaccgtgtcccgccgccgtgcgagtccggagttcctatctacttgatttctctgcatttccttctagtaggaagtaccattctagattggcgcgtcactagcacgatgacccatatgtcagtgttgttcttggtatgcaattctcctcagtagaccagttgcaatgctgaataatccacgattgtactaggctactagctgacaccttcgacatatgaggatgtttggtttctagggactattgtttagttctatcattttattctattttagtctataaattgtcaaatatagaaactaaaaagagttttagtttctatattcggtaattttgaaactaaaatggaataaaatgtagggactaaaaattagtcactagaaaccaaacaccccatgtatatatatttccagcgaggctctggtcatccaatcttccaacagctcatgccgatatcctaagtctccagagttagacatttcatgtatatatcccttcgtcctcagtttgcgcctgaattctcagcttcaccaaacaactgatgacccctgtagtctaattttttttgtccactaagctggattagtcctccaatctcattcaaatttctcaactgacaagaaccgcaaatcggagtactcgacccattccctaccccttcgagttcaaatatctgaggggtcatgggtcttagcgtgctatttccttgctgtctcctccacagcattataccaacttaccaacaaggtctaatcgccatggcttacctttatctgcctgttttgatcttccagttcatggtttgtttttgccaatccgttgacaggctaacacctgcaaagccgctcttgcatggtgatgttctcatatcaaatggtggtgtctttgctcttggcttcttctccctgaaaaactcaacttcgagctcatatgttggcatatggtacaacaacatccctgagcgcacatatgtgtggattgccaaccgtgacaacccaattaccaccaatgcgcccgggaagctagtttttaccaacagttctgaccttgtcttgttagactccacaggccacactatctggatgacaaaaaacaacatcactgcaggagaaggtggaactgctgccatcctgctcgactcggggaactttgttgtccaatcacaaaatggcactgacatatgggagagcttccattatccgactgacaccatggtccctgatgtaagtttttcattgagctcgtctgatgttgctaagcgccttgttgcctggaaggggcctgatgatccatccagcagcaacttctccatgggtggcgactcaagctcagatctccagattgttacttggaatgggacacggccatattggcggagagccgcatggggtggtgaagtgacattcggcacatttgagggcaacaccagcttcatggtgtacgaaacaatagttgacacaggggatggatactacatgaaactcactgtctctgaagggtcaccaagtatacgcttaactctggattacacgggcatgttaactttccgaagatggaacgtcaacacatcctcatgggcagttttcggacaattcccaagatgtcggagaaaggaggagctgaaatgtggtggcggagataaattcttaaccttgccatctatgaagactcctgacaagttcttgtacatcaagaacagaagttttgaccaatgcactgcagagtgcagtaacaactgctcatgcacagcgtatgcttatgctaacctgcaaaatgttgacacaacgcatgacacgacaaggtgcttggtctggatgggggagcttatcgatgcagagaaacttagtaacacatttggtgagaacctatatttccgggtccccacctcaccaggtaagcaagaagaagagcactgtactaaagattgtacccgtggctacgggtacttttcttcttttaatcacatgcatatggcttgtatgcaagtcaagagggaaacaccaaagaaggaattctcagaacaatttactatgcctgaatccttccagcgaacttgggactgaaaaatctagatcttccatcagttagctttgaagacatcatcactgcaacaaataatttctctgagcacaagttgctcggggaaggtggttttggaaaagtttacaagggagtgctggaaggtggcaaggaagttgctatcaaaaggcttagcaagggttctgttcaagggatccaggagtttataaacgaagttattctgattgccaaactgcagcacagaaacttagtcagacttcttggtttctgcattcatgaagatgagaagttacttatctatgagtacttacctaacagaagcttagatgctttcctttttgatggtacaagaaaatctttgcttgattggccagtccggttcaaaataattaaaggggttgcaagaggaattctctatcttcaccaagattctagactaacaataattcatagagatctcaaagcaagcaacatcttgttggacacagatatgtgtcccaagatatcagattttggtacagccaggatttttagtggaagcgaacaacaagtaaatacaacacgagttgctggaacatacggttacatgtctcctgagtatgccatggaaggctcattctctgttaagtctgacacctatgcttttggtgttctgctacttgagattgtaagcggcttaaagatcagctcatccctaatgaactttccaagcctcatcgcttatgcatggagcttgtggaaagatggaaatgcattggaattggtcgactcatcaatttctgtgagttattcacttcaggaacttgtacggtgtgttcagttagggcttttgtgcgtccaagaccctccaaatgcaaggccactcatgtcatccatcgtgttcatgctagagaatgagacagctccacttcctacaccagaagaacctctatattttacagttaggaattacggaactgatcgatcaaatgaatacatgcagaggtctctgaataacatgagtatcacaactctagaggcgcgttagacatttcgcttcatcgttccttaaatttgtagacatttttaatctgtgttattgtacatttacactagccgttcatatttgtacacaaaagtgttccattaaatacgttgtattttccaacagcaatttgtgttataaaaatattcccc

SEQ ID NO: 19244 - DNA, 3545 bp, Zea Mays
caccgtcgagcggacctcggaagggaacggccggagtcgccggcacccgcgcttcgcagcccgtcggtcatgccgccgccgcagccactgcgtgccttatcttccttccctttacctcgccgccatcctacccatacccccgccactataaccggttgcgcctctacttccgaccgcctaccattcgcaatgccctccggcccggatgtaaggttcgtagtcggaaaccgtcggaaacccttggaccatttgccaccggcccaatgatatcgacctgccccggccgcggcaagatatcatccattgggagttcgaaactccatgtgacggtaaccagccaacctgtcggcatctccctcttgtcaattcaccgtgtcccgccgccgtgcgagtccggagttcctatctacttgatttctctgcatttccttctagtaggaagtaccattctagattggcgcgtcactagcacgatgacccatatgtcagtgttgttcttggtatgcaattctcctcagtagaccagttgcaatgctgaataatccacgattgtactaggctactagctgacaccttcgacatatgaggatgtttggtttctagggactattgtttagttctatcattttattctattttagtctataaattgtcaaatatagaaactaaaaagagttttagtttctatattcggtaattttgaaactaaaatggaataaaatgtagggactaaaaattagtcactagaaaccaaacaccccatgtatatatatttccagcgaggctctggtcatccaatcttccaacagctcatgccgatatcctaagtctccagagttagacatttcatgtatatatcccttcgtcctcagtttgcgcctgaattctcagcttcaccaaacaactgatgacccctgtagtctaattttttttgtccactaagctggattagtcctccaatctcattcaaatttctcaactgacaagaaccgcaaatcggagtactcgacccattccctaccccttcgagttcaaatatctgaggggtcatgggtcttagcgtgctatttccttgctgtctcctccacagcattataccaacttaccaacaaggtctaatcgccatggcttacctttatctgcctgttttgatcttccagttcatggtttgtttttgccaatccgttgacaggctaacacctgcaaagccgctcttgcatggtgatgttctcatatcaaatggtggtgtctttgctcttggcttcttctccctgaaaaactcaacttcgagctcatatgttggcatatggtacaacaacatccctgagcgcacatatgtgtggattgccaaccgtgacaacccaattaccaccaatgcgcccgggaagctagtttttaccaacagttctgaccttgtcttgttagactccacaggccacactatctggatgacaaaaaacaacatcactgcaggagaaggtggaactgctgccatcctgctcgactcggggaactttgttgtccaatcacaaaatggcactgacatatgggagagcttccattatccgactgacaccatggtccctgatgtaagtttttcattgagctcgtctgatgttgctaagcgccttgttgcctggaaggggcctgatgatccatccagcagcaacttctccatgggtggcgactcaagctcagatctccagattgttacttggaatgggacacggccatattggcggagagccgcatggggtggtgaagtgacattcggcacatttgagggcaacaccagcttcatggtgtacgaaacaatagttgacacaggggatggatactacatgaaactcactgtctctgaagggtcaccaagtatacgcttaactctggattacacgggcatgttaactttccgaagatggaacgtcaacacatcctcatgggcagttttcggacaattcccaagatgtcggagaaaggaggagctgaaatgtggtggcggagataaattcttaaccttgccatctatgaagactcctgacaagttcttgtacatcaagaacagaagttttgaccaatgcactgcagagtgcagtaacaactgctcatgcacagcgtatgcttatgctaacctgcaaaatgttgacacaacgcatgacacgacaaggtgcttggtctggatgggggagcttatcgatgcagagaaacttagtaacacatttgtaagcaagaagaagagcactgtactaaagattgtacccgtggctacgggtacttttcttcttttaatcacatgcatatggcttgtatgcaagtcaagagggaaacaccaaagaaggaattctcagaacaatttactatgcctgaatccttccagcgaacttgggactgaaaaatctagatcttccatcagttagctttgaagacatcatcactgcaacaaataatttctctgagcacaagttgctcggggaaggtggttttggaaaagtttacaagggagtgctggaaggtggcaaggaagttgctatcaaaaggcttagcaagggttctgttcaagggatccaggagtttataaacgaagttattctgattgccaaactgcagcacagaaacttagtcagacttcttggtttctgcattcatgaagatgagaagttacttatctatgagtacttacctaacagaagcttagatgctttcctttttgatggtacaagaaaatctttgcttgattggccagtccggttcaaaataattaaaggggttgcaagaggaattctctatcttcaccaagattctagactaacaataattcatagagatctcaaagcaagcaacatcttgttggacacagatatgtgtcccaagatatcagattttggtacagccaggatttttagtggaagcgaacaacaagtaaatacaacacgagttgctggaacatacggttacatgtctcctgagtatgccatggaaggctcattctctgttaagtctgacacctatgcttttggtgttctgctacttgagattgtaagcggcttaaagatcagctcatccctaatgaactttccaagcctcatcgcttatgcatggagcttgtggaaagatggaaatgcattggaattggtcgactcatcaatttctgtgagttattcacttcaggaacttgtacggtgtgttcagttagggcttttgtgcgtccaagaccctccaaatgcaaggccactcatgtcatccatcgtgttcatgctagagaatgagacagctccacttcctacaccagaagaacctctatattttacagttaggaattacggaactgatcgatcaaatgaatacatgcagaggtctctgaataacatgagtatcacaactctagaggcgcgttagacatttcgcttcatcgttccttaaatttgtagacatttttaatctgtgttattgtacatttacactagccgttcatatttgtacacaaaagtgttccattaaatacgttgtattttccaacagcaatttgtgttataaaaatattcccc

SEQ ID NO: 19245 - DNA, 3734 bp, Zea Mays
caccgtcgagcggacctcggaagggaacggccggagtcgccggcacccgcgcttcgcagcccgtcggtcatgccgccgccgcagccactgcgtgccttatcttccttccctttacctcgccgccatcctacccatacccccgccactataaccggttgcgcctctacttccgaccgcctaccattcgcaatgccctccggcccggatgtaaggttcgtagtcggaaaccgtcggaaacccttggaccatttgccaccggcccaatgatatcgacctgccccggccgcggcaagatatcatccattgggagttcgaaactccatgtgacggtaaccagccaacctgtcggcatctccctcttgtcaattcaccgtgtcccgccgccgtgcgagtccggagttcctatctacttgatttctctgcatttccttctagtaggaagtaccattctagattggcgcgtcactagcacgatgacccatatgtcagtgttgttcttggtatgcaattctcctcagtagaccagttgcaatgctgaataatccacgattgtactaggctactagctgacaccttcgacatatgaggatgtttggtttctagggactattgtttagttctatcattttattctattttagtctataaattgtcaaatatagaaactaaaaagagttttagtttctatattcggtaattttgaaactaaaatggaataaaatgtagggactaaaaattagtcactagaaaccaaacaccccatgtatatatatttccagcgaggctctggtcatccaatcttccaacagctcatgccgatatcctaagtctccagagttagacatttcatgtatatatcccttcgtcctcagtttgcgcctgaattctcagcttcaccaaacaactgatgacccctgtagtctaattttttttgtccactaagctggattagtcctccaatctcattcaaatttctcaactgacaagaaccgcaaatcggagtactcgacccattccctaccccttcgagttcaaatatctgaggggtcatgggtcttagcgtgctatttccttgctgtctcctccacagcattataccaacttaccaacaaggtctaatcgccatggcttacctttatctgcctgttttgatcttccagttcatggtttgtttttgccaatccgttgacaggctaacacctgcaaagccgctcttgcatggtgatgttctcatatcaaatggtggtgtctttgctcttggcttcttctccctgaaaaactcaacttcgagctcatatgttggcatatggtacaacaacatccctgagcgcacatatgtgtggattgccaaccgtgacaacccaattaccaccaatgcgcccgggaagctagtttttaccaacagttctgaccttgtcttgttagactccacaggccacactatctggatgacaaaaaacaacatcactgcaggagaaggtggaactgctgccatcctgctcgactcggggaactttgttgtccaatcacaaaatggcactgacatatgggagagcttccattatccgactgacaccatggtccctgatgtaagtttttcattgagctcgtctgatgttgctaagcgccttgttgcctggaaggggcctgatgatccatccagcagcaacttctccatgggtggcgactcaagctcagatctccagattgttacttggaatgggacacggccatattggcggagagccgcatggggtggtgaagtgacattcggcacatttgagggcaacaccagcttcatggtgtacgaaacaatagttgacacaggggatggatactacatgaaactcactgtctctgaagggtcaccaagtatacgcttaactctggattacacgggcatgttaactttccgaagatggaacgtcaacacatcctcatgggcagttttcggacaattcccaagatgtcggagaaaggaggagctgaaatgtggtggcggagataaattcttaaccttgccatctatgaagactcctgacaagttcttgtacatcaagaacagaagttttgaccaatgcactgcagagtgcagtaacaactgctcatgcacagcgtatgcttatgctaacctgcaaaatgttgacacaacgcatgacacgacaaggtgcttggtctggatgggggagcttatcgatgcagagaaacttagtaacacatttggtgagaacctatatttccgggtccccacctcaccagagcttaaggattttaccagttcaccttgtaaagctttaaatgctcatgttaccaagatgtcttgctcacagaagaaccatttgtctaatgttaggtgtggtcagaatgaaatgtttttcaagtgttttctctttgtggatcacatttatgcagtaagcaagaagaagagcactgtactaaagattgtacccgtggctacgggtacttttcttcttttaatcacatgcatatggcttgtatgcaagtcaagagggaaacaccaaagaaggaattctcagaacaatttactatgcctgaatccttccagcgaacttgggactgaaaaatctagatcttccatcagttagctttgaagacatcatcactgcaacaaataatttctctgagcacaagttgctcggggaaggtggttttggaaaagtttacaagggagtgctggaaggtggcaaggaagttgctatcaaaaggcttagcaagggttctgttcaagggatccaggagtttataaacgaagttattctgattgccaaactgcagcacagaaacttagtcagacttcttggtttctgcattcatgaagatgagaagttacttatctatgagtacttacctaacagaagcttagatgctttcctttttgatggtacaagaaaatctttgcttgattggccagtccggttcaaaataattaaaggggttgcaagaggaattctctatcttcaccaagattctagactaacaataattcatagagatctcaaagcaagcaacatcttgttggacacagatatgtgtcccaagatatcagattttggtacagccaggatttttagtggaagcgaacaacaagtaaatacaacacgagttgctggaacatacggttacatgtctcctgagtatgccatggaaggctcattctctgttaagtctgacacctatgcttttggtgttctgctacttgagattgtaagcggcttaaagatcagctcatccctaatgaactttccaagcctcatcgcttatgcatggagcttgtggaaagatggaaatgcattggaattggtcgactcatcaatttctgtgagttattcacttcaggaacttgtacggtgtgttcagttagggcttttgtgcgtccaagaccctccaaatgcaaggccactcatgtcatccatcgtgttcatgctagagaatgagacagctccacttcctacaccagaagaacctctatattttacagttaggaattacggaactgatcgatcaaatgaatacatgcagaggtctctgaataacatgagtatcacaactctagaggcgcgttagacatttcgcttcatcgttccttaaatttgtagacatttttaatctgtgttattgtacatttacactagccgttcatatttgtacacaaaagtgttccattaaatacgttgtattttccaacagcaatttgtgttataaaaatattcccc

SEQ ID NO: 19246 - DNA, 3377 bp, Zea Mays
caccgtcgagcggacctcggaagggaacggccggagtcgccggcacccgcgcttcgcagcccgtcggtcatgccgccgccgcagccactgcgtgccttatcttccttccctttacctcgccgccatcctacccatacccccgccactataaccggttgcgcctctacttccgaccgcctaccattcgcaatgccctccggcccggatgtaaggttcgtagtcggaaaccgtcggaaacccttggaccatttgccaccggcccaatgatatcgacctgccccggccgcggcaagatatcatccattgggagttcgaaactccatgtgacggtaaccagccaacctgtcggcatctccctcttgtcaattcaccgtgtcccgccgccgtgcgagtccggagttcctatctacttgatttctctgcatttccttctagtaggaagtaccattctagattggcgcgtcactagcacgatgacccatatgtcagtgttgttcttggtatgcaattctcctcagtagaccagttgcaatgctgaataatccacgattgtactaggctactagctgacaccttcgacatatgaggatgtttggtttctagggactattgtttagttctatcattttattctattttagtctataaattgtcaaatatagaaactaaaaagagttttagtttctatattcggtaattttgaaactaaaatggaataaaatgtagggactaaaaattagtcactagaaaccaaacaccccatgtatatatatttccagcgaggctctggtcatccaatcttccaacagctcatgccgatatcctaagtctccagagttagacatttcatgtatatatcccttcgtcctcagtttgcgcctgaattctcagcttcaccaaacaactgatgacccctgtagtctaattttttttgtccactaagctggattagtcctccaatctcattcaaatttctcaactgacaagaaccgcaaatcggagtactcgacccattccctaccccttcgagttcaaatatctgaggggtcatgggtcttagcgtgctatttccttgctgtctcctccacagcattataccaacttaccaacaaggtctaatcgccatggcttacctttatctgcctgttttgatcttccagttcatggtttgtttttgccaatccgttgacaggctaacacctgcaaagccgctcttgcatggtgatgttctcatatcaaatggtggtgtctttgctcttggcttcttctccctgaaaaactcaacttcgagctcatatgttggcatatggtacaacaacatccctgagcgcacatatgtgtggattgccaaccgtgacaacccaattaccaccaatgcgcccgggaagctagtttttaccaacagttctgaccttgtcttgttagactccacaggccacactatctggatgacaaaaaacaacatcactgcaggagaaggtggaactgctgccatcctgctcgactcggggaactttgttgtccaatcacaaaatggcactgacatatgggagagcttccattatccgactgacaccatggtccctgatgtaagtttttcattgagctcgtctgatgttgctaagcgccttgttgcctggaaggggcctgatgatccatccagcagcaacttctccatgggtggcgactcaagctcagatctccagattgttacttggaatgggacacggccatattggcggagagccgcatggggtggtgaagtgacattcggcacatttgagggcaacaccagcttcatggtgtacgaaacaatagttgacacaggggatggatactacatgaaactcactgtctctgaagggtcaccaagtatacgcttaactctggattacacgggcatgttaactttccgaagatggaacgtcaacacatcctcatgggcagttttcggacaattcccaagatgtcggagaaaggaggagctgaaatgtggtggcggagataaattcttaaccttgccatctatgaagactcctgacaagttcttgtacatcaagaacagaagttttgaccaatgcactgcagagtgcagtaacaactgctcatgcacagcgtatgcttatgctaacctgcaaaatgttgacacaacgcatgacacgacaaggtgcttggtctggatgggggagcttatcgatgcagagaaacttagtaacacatttggtgagaacctatatttccgggtccccacctcaccagtaagcaagaagaagagcactgtactaaagattgtacccgtggctacgggtacttttcttcttttaatcacatgcatatggcttgtatgcaagtcaagagggaaacaccaaagaaggaattctcagaacaatttactatgcctgaatccttccagcgaacttgggactgaaaaatctagatcttccatcagttagctttgaagacatcatcactgcaacaaataatttctctgagcacaagttgctcggggaaggtggttttggaaaagtttacaagggagtgctggaaggtggcaaggaagttgctatcaaaaggcttagcaagggttctgttcaagggatccaggagtttataaacgaagttattctgattgccaaactgcagcacagaaacttagtcagacttcttggtttctgcattcatgaagatgagaagttacttatctatgagtacttacctaacagaagcttagatgctttcctttttgatatgtgtcccaagatatcagattttggtacagccaggatttttagtggaagcgaacaacaagtaaatacaacacgagttgctggaacatacggttacatgtctcctgagtatgccatggaaggctcattctctgttaagtctgacacctatgcttttggtgttctgctacttgagattgcatggagcttgtggaaagatggaaatgcattggaattggtcgactcatcaatttctgtgagttattcacttcaggaacttgtacggtgtgttcagttagggcttttgtgcgtccaagaccctccaaatgcaaggccactcatgtcatccatcgtgttcatgctagagaatgagacagctccacttcctacaccagaagaacctctatattttacagttaggaattacggaactgatcgatcaaatgaatacatgcagaggtctctgaataacatgagtatcacaactctagaggcgcgttagacatttcgcttcatcgttccttaaatttgtagacatttttaatctgtgttattgtacatttacactagccgttcatatttgtacacaaaagtgttccattaaatacgttgtattttccaacagcaatttgtgttataaaaatattcccc

SEQ ID NO: 19247 - DNA, 1628 bp, Zea Mays
attttgtaatgctacgaagagcaagcaattatccgctaaaatcgccggttcgtttgcagggtcttgcagcaagactgggtggggttgaactgttcttgcatgcttgcaatatgaaggggaggactgtgcactccgctacgcgctcttctcgcggaagccggcgcccgcgcgagacggcggaaagttccaggtccacttcgcttcctctggacggctctcgggaacgcgggcgagaaggggcgacgcggcggcggatctggcggcgcaaggccgattcggagccggaggagcacatttgatcatggcatcctcgacagaagataacatgaaggctttgctgaaagtccttgtagactgtgccgaggatgccacaaaaacactgggtggtttagtagatcatgctttagaccacatgcatgatgaagagatcgtagctagaaccttgtatgccatcaaagataagctagaattgctgcaacaagatgccttagaggcaaaagtgcaagcatttccagaaattgttaagtacgatggcgatgacataagtgttgagcctacatctccgtcgacccctccaacagttactgaaccatctattgatgaagaggagttctactgccccgatgtgtctgatgagtggtacttcagcgactcagataggtcgactcgtaccagctactggaatatatattaggcatgtattccagttcgaggtagatgtcatccttttcaacgtctaagtagtcgtgcaagggcgccaactgttaggttatgtgcttgtaaacgacaatatctgttctcatctatgtccaagtctaagtccaacgtactgataataagctacaatgatgtcagcttattatgtctattttgtttagtctgttgtgttaatgtgctgctgttgctactcagacagttcatggcgacctttatataatattgtgctcctttaaatgcttgatgtgttctaatgttttactagtactgtcgatttctttgagtttaaaagatttcactaaatctatggcatgtggacatatactagaatggagcaagcaaacaatgcgacatcttcgcagccgatgtcaaatacaacaagtacacagctatttccccctcaaccccctatatggcctacgggcttcatgcagcagcctccaatggattacaacatgatggccaacctcaattttcctaatcctggccaaggtccaactacaatgtgggctcccatgcagactggaaattctacttcccaatcaaccatgattcctgcctcacagtctgcagtgtattggaaccattacttgaactttgtcaggaatcctctcggttcagtggaacctcctccttttggtgactcctatcctccttcaaatacaagtacatcattgcagggttcgaatactataccttccatacctgtcaaccttgactcagatgctgaacatagtgttcaggacatcaatagtccagaaaaaattgcagctcctgttttgaaaaataagaagtccaaggaacaaaactttacagctcctgaagaccttctcctttgcacaacatggttgcaaataagcagtgacccaattgtgcacactggacaaagaagggaggggctttgggcttga

SEQ ID NO: 19248 - DNA, 2664 bp, Zea Mays
acgggcatggcatacctttacctgcctgttttcatattcttgctgtccatggcttgttcatgccaatccgacgacaggctaacacctgcaaagccactcctgccgggcgacatgttgatctcacatggtggagtctttgctctcggcttcttctccctgacaaactcaagttcgagttcatatgtcggcatatggtacaacaacatccctgagcgcacatacgtgtggatcgccaaccgcgacaacccaatcactacagatgtgccagggacgaagctagcttttaccaacagttctgaccttgtcttgttagactccacaggccacactatctggatgacgagaagcagcatcagtgcaggaggcggtggaactgctgccgtcgtcctgctcgactcggggaacttggttatccagtcgatagatggtactgccatatgggagagctttgatcacctgaccgacaccgtcatccctggtgtaagtttatcgttgagctcgtctgatgctgctgctagtgctaggcgccttgttgcctggaaggggcctgatgatccatccagcggcaacttctccatgggtggcgactcaagctcagatctccagattgtcacttggaatgggacgaggccattctggcggagagctgcgtggggtggtgaggtgacattcggcacattcgaggacaacaccagcttcacgatgtacgaaacaataacaggcggcacaggggatgactactacatcaaactcaccgtctctgatggcgcaccgatcatacgcgtaagcctggattacacgggcttgtttacctaccgaagatggaacctcaaaacatcctcttggacagtctttgtacaattccccagttcagcctgtgaccgttatgccttctgtggcccgttcgcctactgtgatagcactgagactgttccgtcttgcaagtgccttgatgggtttgagcccattggtcttgatttttcccaaggatgtcggagaaaggaggagctcaaatgtggtgatggagatacattcttaaccttgcccaccatgaagactcctgacaagttcttatacatcaagaatagaagctttgaccagtgcactgcagagtgcagcaacaactgctcctgcacagcgtatgcttatgataacctgcaaaatgttgactcgacgattgacacaacaaggtgcttggtctggatgggggagcttatcgatgctgagaagttcggtaacacatttggtgagaacctgtatctccgggtctccagctcaccagtaaacaagatgaagaacactgtactaaagattgtactgccggctatgattacttttcttcttttaaccacatgcatatggcttctatgcaagttaagagggaaacaccaaacagggaatgttcagaacaatctactatgcttgaatcctcccaacgaatttgggaatgaaaatctagattttccatcattcagctttgaagacatcatcattgcaacaaacaatttctctgattataagttgcttggggaaggtggttttggaaaagtttacaagggagtgttggaaggtggcaaggaagtcgctgtcaaaaggcttagtaagggttctgtgcaagggattcaggagtttagaaatgaagttgttctgattgccaaactgcagcacagaaacttagtcagactccttggtttctgcattcatgaagacgagaagttacttatctatgagtacttacctaacaaaagcttagatgctttcctttttgatgctacaagaaaatcattgcttgattggccagcccggttcaagataattaaaggggtggcaagagggattctttatctccaccaagattctagactaacaataattcatagagatctcaaagcaagcaacatcttgttggacacagatatgtgtcccaagatatcagattttggtatggccaggatatttggtggaagcgaacgacaagtaaacacaacacgagttgctgcggctacatgtctcctgagtatgctatgcaaggctcattctctgttaagtctgacacctatgcttttggtgttctactactggagattgtaagcagcttaaagatcagctcatccctaataaactttccaaacctcattgcttatgcatggagcttatggaaagatggaaatgcatgggaattggtggactcatcaatttctgtgagttgttcacttcaggaactggtacgatgtattcagttaggccttctgtgcgtccaagaccatccaaatgcgaggccactcatgtcttccatcgtgttcatgctggagaatgaaacggccccacttcctaccccaagagaacctctatattttacagttcggaactacgaaactgatcgatcaaatgaatccgtgcaaagatatctgaataacatgagtatcacaactctagaggcgcgttagatttttagtttcatcgttacttaaatttgtaaaacttcttcttgtctgtgctagctatggcgaggattttttgtggaaatgagcaacaggcaaacactactcaagtcattggaacatatggttacatgtctcctgaatatgctatggaaggctcattctctgtcaagtctgacacctatagctttggtgttctactactggagattgtaagcggctt

SEQ ID NO: 19249 - DNA, 485 bp, Zea Mays
gcagaatttaatcttcaccattcgtatgggctgtaggacactaggtctgtagcaaaaatatgtatgaaattagatactatatatgccatgatctttcaccgattgtagaaccatgaagggatacaatatataagctaaaattttagaaaatgctacatctacggttgccaaggaattctaggtacatcaaccttttgaatagtatgggtccttgcacgctaatgtggtgatggttgtggtggctgtgactgcaagctgaaggacttcatgtcgcacatacacatgcggggcacgggactttgctaggagtgggagtgatttcatggccagcgacagtcaacagagggccaataataccaggcttcaaggttcttatggatggagagaagataccaaaatataaactggaggttgaagccactatctgatgaaatgatcaagtgttgcgcatataaatcatgttttgattttttttccattgtgtt

SEQ ID NO: 19250 - DNA, 615 bp, Zea Mays
tcatgtcgcacatacacatgcggggcacgggactttgctaggagtgggagtgatttcatggccagcgacagtcaacagaggttgcaggaacatgaactggatgcaaaacagctagctcttgttgctgggctgtttggtagcacgcctaagccgccacctcgcgccacagttttgccgccgcagatgcctacagatgttggaaatttgaaaaggattgtgaaatcaaaatatccatatgtcagcaatctttggatgctcataaaaaatggtccacactgctccttggcacgggccgcggatgtgccatgccgcggtggcggaccctgggaagcaggagcaccggcggcggcggcgccgtggcaacagagcagacgtaggcaggcgtgggagacgttggccatggtgactgcgctcgccaaggaaactcccactgataaagataaagagaaagcttcctcttcaatctcctccaaagagcttctacataggtcatataacccggcgtgcgctagacgcccgtcaactactagtaggtttacatgcacaaagagcttggaagtaacaaactgttgcaaggagacaagggatgggatggagctctccggtactaaatag

SEQ ID NO: 19251 - DNA, 2767 bp, Zea Mays
tttctacatacgacagcttcatcagtggtccagattattcctcctttcccatctaataaatttgacaactgacaagagcagcatctgagttggagggatagaaaaatctcagcatctgcgccattttctactacttatccttggggttgaactgtctaacggttctaccattgtgctatctcctttgtttgtcttctccacaaccatatatacaccaacttgccaaggaaggcttcatggccatggcttacctccccgttttcgtcttcctgttcatggttgtcttatgccaatccgatgacaggctaacacctgcaaagccactcttgcccaacgaggtgctcatctcaggcggtggtgtctttgctcttggcttcttctccctgaagaactcttcaaggtcttatgtcggcatatggtacaacaacattcccgagcgcacatacgtgtggattgccaaccgcgacaacccaattaccaccaatgtgcctgggaagctagtttttaccaacagttctgaccttgtcttgttagactccacaggccgcaccatctggacgacgacaaacaactataccgcaggaggaggcggtgaaactgcttccatcctgctcgactcggggaacttggttatccggttgccaaatggcaccgacatatgggagagcttcagttacccgactgacacaattgtccccaatgtaaatttttcactgaacgtagcttccagcgctacgctccttgttgcctggaagggacctgatgacccatccagtagtgatttctccatgggtggcgaccctagctcaggtctccagattatcgtttggaatgggacacagccatactggagaagagccgcatggggtggtgaactggtgcacggcatattccaaaacaacacaagcttcatgatgtaccagacagttgtcgatacaggagacgggtattacatgcaattgactgtgcctgatggctcacctagcatacgcttaactttggattacacaggtatgcctcttgtggcccatttggctactgcgatgacacagtacctgttcctgcatgcaagtgccttgatggttttgagcccaatggtcttgattcttccaaaggatgtcggagaaaggatgagctgaaatgtggtgacggagatagtttcttcaccttgcccagcatgaagactcctgacaagttcttatacatcaagaacagaagccttgaccaatgcgctgcagagtgcagggacaactgctcatgcacagcgtatgcttatgctaacctgcaaaatgttgacaccacgattgacacgacaaggtgcttggtctcaatcatgcacagcgtaattgatgctgcagtgacacttgcctttagtaagaataagaagagtaccacattgaagattgtactcccgattatggctggtttgattcttctaataacatgcacatggcttgtattcaagccaaaagacaaacacaaaagcaagaaaagtcagtacacactgcaacactcggatgcttccaacaggtttgagaacgaaaatttggaatttccatcaattgccttagaagacatcatcgttgcgacaaacgacttctctgattttaacatgcttggaaaaggtggattcggaaaagtttacaaggcaatgttggaaggtggcaaggaagtagctgtcaaaaggctcagtaaaggctctacacagggggtcgaggaatttagaaatgaagtagttctgattgctaaactgcagcacagaaacttagttagacttcttgattgctgcattcataaagatgagaagttactgatatatgaatacttaccaaacaaaagcttggacgccttcctttttgatgctacaaggaaatctttgcttgattggccatcccgtttcaaaataattaaaggtgtagcacgaggacttctttatctccaccaggattcaagattaacgataattcatagagatctcaaagcaagcaacatcttgttagacacagaaatgagtcccaagatatcggatttcggtatggcgaggatttttggtggaaatgagcaacatgcaaacactactcgagttgttggaacatatggttacatgtctcctgaatatgctatggaaggctcattctctgtcaagtctgacacctatagctttggtgttctactactggagattgtaagcggcttaaagattggctcaccccatctgataatggactatccaaatctcattgcttatgcatggagcttatgggaaggtggaaatgcaagggaattggtggactcgtcggttctggtgagttgtccacttcaggaagctgtacgatgcatccacttgggtcttttatgtgtccaagacagtccaaatgcgaggccgctcatgtcatccattgtgttcatgctagaaaatgaaacagccccggttcctaccccaaaaagacctgtatattttactactaggaattatgaaactaatcagtcagatcaatacatgcgaagatcgctgaataacatgagtatcacaactctagaggggcgttaaatgtttagtttcattgttcgctattttggtaaacttttgtttaatgtgtgccattaaacaattacattaggtttgtattaatacaattacgctagccgttcaggtttgtacatagaaaatgttccattaaatctgttgtacaccatcggttcggtgggttgtattgatatattctcgagactgtaaagttcactagtttttacaactggttccgca

SEQ ID NO: 19252 - DNA, 2864 bp, Zea Mays
tttctacatacgacagcttcatcagtggtccagattattcctcctttcccatctaataaatttgacaactgacaagagcagcatctgagttggagggatagaaaaatctcagcatctgcgccattttctactacttatccttggggttgaactgtctaacggttctaccattgtgctatctcctttgtttgtcttctccacaaccatatatacaccaacttgccaaggaaggcttcatggccatggcttacctccccgttttcgtcttcctgttcatggttgtcttatgccaatccgatgacaggctaacacctgcaaagccactcttgcccaacgaggtgctcatctcaggcggtggtgtctttgctcttggcttcttctccctgaagaactcttcaaggtcttatgtcggcatatggtacaacaacattcccgagcgcacatacgtgtggattgccaaccgcgacaacccaattaccaccaatgtgcctgggaagctagtttttaccaacagttctgaccttgtcttgttagactccacaggccgcaccatctggacgacgacaaacaactataccgcaggaggaggcggtgaaactgcttccatcctgctcgactcggggaacttggttatccggttgccaaatggcaccgacatatgggagagcttcagttacccgactgacacaattgtccccaatgtaaatttttcactgaacgtagcttccagcgctacgctccttgttgcctggaagggacctgatgacccatccagtagtgatttctccatgggtggcgaccctagctcaggtctccagattatcgtttggaatgggacacagccatactggagaagagccgcatggggtggtgaactggtgcacggcatattccaaaacaacacaagcttcatgatgtaccagacagttgtcgatacaggagacgggtattacatgcaattgactgtgcctgatggctcacctagcatacgcttaactttggattacacaggcatgtccactttccgaagatggaacaacaacacgtcttcgtggaaaatctttagccaattcccctatccatcatgtgacaggtatgcctcttgtggcccatttggctactgcgatgacacagtacctgttcctgcatgcaagtgccttgatggttttgagcccaatggtcttgattcttccaaaggatgtcggagaaaggatgagctgaaatgtggtgacggagatagtttcttcaccttgcccagcatgaagactcctgacaagttcttatacatcaagaacagaagccttgaccaatgcgctgcagagtgcagggacaactgctcatgcacagcgtatgcttatgctaacctgcaaaatgttgacaccacgattgacacgacaaggtgcttggtctcaatcatgcacagcgctgcctcaatcggtctcaattctaggcaaagaccatccaatgtgtgtaagaataagaagagtaccacattgaagattgtactcccgattatggctggtttgattcttctaataacatgcacatggcttgtattcaagccaaaagacaaacacaaaagcaagaaaagtcagtacacactgcaacactcggatgcttccaacaggtttgagaacgaaaatttggaatttccatcaattgccttagaagacatcatcgttgcgacaaacgacttctctgattttaacatgcttggaaaaggtggattcggaaaagtttacaaggcaatgttggaaggtggcaaggaagtagctgtcaaaaggctcagtaaaggctctacacagggggtcgaggaatttagaaatgaagtagttctgattgctaaactgcagcacagaaacttagttagacttcttgattgctgcattcataaagatgagaagttactgatatatgaatacttaccaaacaaaagcttggacgccttcctttttgatgctacaaggaaatctttgcttgattggccatcccgtttcaaaataattaaaggtgtagcacgaggacttctttatctccaccaggattcaagattaacgataattcatagagatctcaaagcaagcaacatcttgttagacacagaaatgagtcccaagatatcggatttcggtatggcgaggatttttggtggaaatgagcaacatgcaaacactactcgagttgttggaacatatggttacatgtctcctgaatatgctatggaaggctcattctctgtcaagtctgacacctatagctttggtgttctactactggagattgtaagcggcttaaagattggctcaccccatctgataatggactatccaaatctcattgcttatgcatggagcttatgggaaggtggaaatgcaagggaattggtggactcgtcggttctggtgagttgtccacttcaggaagctgtacgatgcatccacttgggtcttttatgtgtccaagacagtccaaatgcgaggccgctcatgtcatccattgtgttcatgctagaaaatgaaacagccccggttcctaccccaaaaagacctgtatattttactactaggaattatgaaactaatcagtcagatcaatacatgcgaagatcgctgaataacatgagtatcacaactctagaggggcgttaaatgtttagtttcattgttcgctattttggtaaacttttgtttaatgtgtgccattaaacaattacattaggtttgtattaatacaattacgctagccgttcaggtttgtacatagaaaatgttccattaaatctgttgtacaccatcggttcggtgggttgtattgatatattctcgagactgtaaagttcactagtttttacaactggttccgca

SEQ ID NO: 19253 - DNA, 2513 bp, Zea Mays
tttctacatacgacagcttcatcagtggtccagattattcctcctttcccatctaataaatttgacaactgacaagagcagcatctgagttggagggatagaaaaatctcagcatctgcgccattttctactacttatccttggggttgaactgtctaacggttctaccattgtgctatctcctttgtttgtcttctccacaaccatatatacaccaacttgccaaggaaggcttcatggccatggcttacctccccgttttcgtcttcctgttcatggttgtcttatgccaatccgatgacaggctaacacctgcaaagccactcttgcccaacgaggtgctcatctcaggcggtggtgtctttgctcttggcttcttctccctgaagaactcttcaaggtcttatgtcggcatatggtacaacaacattcccgagcgcacatacgtgtggattgccaaccgcgacaacccaattaccaccaatgtgcctgggaagctagtttttaccaacagttctgaccttgtcttgttagactccacaggccgcaccatctggacgacgacaaacaactataccgcaggaggaggcggtgaaactgcttccatcctgctcgactcggggaacttggttatccggttgccaaatggcaccgacatatgggagagcttcagttacccgactgacacaattgtccccaatgtaaatttttcactgaacgtagcttccagcgctacgctccttgttgcctggaagggacctgatgacccatccagtagtgatttctccatgggtggcgaccctagctcaggtctccagattatcgtttggaatgggacacagccatactggagaagagccgcatggggtggtgaactggtgcacggcatattccaaaacaacacaagcttcatgatgtaccagacagttgtcgatacaggagacgggtattacatgcaattgactgtgcctgatggctcacctagcatacgcttaactttggattacacaggcatgtccactttccgaagatggaacaacaacacgtcttcgtggaaaatctttagccaattcccctatccatcatgtgacaggatgtcggagaaaggatgagctgaaatgtggtgacggagatagtttcttcaccttgcccagcatgaagactcctgacaagttcttatacatcaagaacagaagccttgaccaatgcgctgcagagtgcagggacaactgctcatgcacagcgtatgcttatgctaacctgcaaaatgttgacaccacgattgacacgacaaggtgcttggtctcaatcatgcacagcgctgcctcaatcggtctcaattctaggcaaagaccatccaatgtgtgtaagaataagaagagtaccacattgaagattgtactcccgattatggctggtttgattcttctaataacatgcacatggcttgtattcaagccaaaaggtaggacactacttcatttttcagagtgcagtgttaatgaggtactcataaaaacgagactgatatcaatgtgtccgttcctgccagacaaacacaaaagcaagaaaagtcagtacacactgcaacactcggatgcttccaacaggtttgagaacgaaaatttggaatttccatcaattgccttagaagacatcatcgttgcgacaaacgacttctctgattttaacatgcttggaaaaggtggattcggaaaagtttacaaggtaaataaaagttttagcttgatagtttcagtagaagaaatattgtagcacttatctggataaatcgacaaacggtttcctcatctaggcaatgttggaaggtggcaaggaagtagctgtcaaaaggctcagtaaaggctctacacagggggtcgaggaatttagaaatgaagtagttctgattgctaaactgcagcacagaaacttagttagacttcttgattgctgcattcataaagatgagaagttactgatatatgaatacttaccaaacaaaagcttggacgccttcctttttgatgctacaaggaaatctttgcttgattggccatcccgtttcaaaataattaaaggtgtagcacgaggacttctttatctccaccaggattcaagattaacgataattcatagagatctcaaagcaagcaacatcttgttagacacagaaatgagtcccaagatatcggatttcggtatggcgaggatttttggtggaaatgagcaacatgcaaacactactcgagttgttggaacatatggttacatgtctcctgaatatgctatggaaggctcattctctgtcaagtctgacacctatagctttggtgttctactactggagattgtaagcggcttaaagattggctcaccccatctgataatggactatccaaatctcattgcttatgcatggagcttatgggaaggtggaaatgcaagggaattggtggactcgtcggttctgggacccacggcggagcattgggtgaacgtcaatagtcctc

SEQ ID NO: 19254 - DNA, 2912 bp, Zea Mays
ctatctttcgcgtacagtttgttgtgctgtggcgccggccagcagcaaggcctggtttggagggcggtgggctgggctgggctgggctggtgatctcggcttgtgcgtgcgtgacttagggcctagagatgcaaaaaaagaagggaaaaaaaatgattcgtgactctcccgaggtgcggtgcggccgcaccccgcatgccattgcggtattgccaacgtcgcttcgcccctgaatccctccgctaccgcgcctagggttttaggcttttagcacacaccggcggcgctgcataccaagggcttcccctgcccgcgccgatgccgcgcaagcacgcgccggcgtttacgccggaggcagcctccgcctcttcgtcaggcggggctggccagccgcataacctccccgtgcttcaggcgaagatgaagcgtgacccggagggctacgaggaggagctccgccagctccaccgccacttcgagtcctcggtgttcctattccagcagcaggcggcgctggctacaacctcgtcctcgggaggcggcggggaggtggccaaggagctcggggacctcgccctgttccttgcccacgtcgcgcctttctacccggatgacctcgccgatttgcccgaccagattggtggcttgctcgacaccaacgcgcgtgggctgccgccggggctcaggtctcacctcgtgcaggcgcttgtattgctggtgaatcggaagattgtcgatcttgaggacacaatggagttattcatggagcttcaagttattggagatcgagctgtaaaaaagctagcattttcgcatattgtacacagtatcaggaggatgaaccagaagcacaagaatgaatcgacaaatcgtaaactgcaaaacgtcctttttaaattcttacaggctgaagaagagtcacgagcaaagagagcatttactatcctttgtgatcttcaccgtcggagggtctggtttgatgaacgcacaacaaatgcaatatgtgatgcttgtttccacccttcctctaggattatgatagctgctatttcatttcttcttggatatgaaaatgctccacaagaggatgatagcgacgcatcaagcagtgaagatgaagcagatcaaaacccacaaattcttctcagtaaacaggacgtttataaggcaaatcacaagggtacgtctgctagtaaaaaaaagaagaaagctaaattacagcgggtcattcgtagcatgaaaagacaacagcggaaatctgtcgaggaaactggttccagtttctattcacccctgacatatttaaaagatgcccagggttttgcggagaagcttttctctcggttgcagaaatgcaatgagcgatttgaggtaaggatgatgatgctaaaagtaatcgcgaggaccattgggctgcatcacttggttttgttgaacttctacccgtatcttcaaagatacgttcaacctcatcaacgagatgtgacgactctactcgctgcagcagttcaggcttgccatgatatggtacctccagatgctgttgaaccactgttcaagcagatagtaaatcagtttgtgcatgaccgttctcgtccagagatgatgaatgaggatctgctccaagacctcgttttatacaaaaagtcccatgagaaagctgtttccattgctgctcgttcgctgatcacattgttcagagagatctgtccttcattgttagtcaagaaagatcgtggccgtcctgtggatccaaaggctcggcccaaagcatttggagaagtcactgttgctagcaacgttcctggtgccgagttgctagatgaaaatatttcttcagaaggggaaagttcggacgatgagtctgatggttttcactccgatgatgagatggacttgacacctgcccctcctggaacagaagaaaatatggagggttcatctgttgcaaacaaacatgatgccgatggagataccaaagaggaagatgacgcatctgatgatgaagatggtacggatcaagatgactccaacagtgatagtgatgaactagacgatgactctgatgtggatgtgggtactgatatatctgatgaagacgaaggtgacgacggtgaactgaaagaaagcataaatggttcagaggatgaagctttagaccagaatgaagacagcgaagaggaagacaagtcaaaaggcagtggctctaaagcgcagaagaggaagttaaatgattatattggacagctaaattctgctgatgcaagccttcgagctctgaagaggttagcaactgccaagaaggctgaagaaccatctgatgaaactggtaaaattctatccgatgaagatttcaaacgcatcaaagaactcaaggctaagaaagaagcgaagctggctttggctcagcatggactaatcaagggtgtcgacacaaggtctgtaacctttaagatgccatcatctgaccagctcagcaggaagcgtgtcgatccacttgagcttgaggctcacgtcaggagaaagatgtccaaggaagaaaggttggcgttggtgaaagctggaagagaggatagaggtccttacatggcaagggcggccgtgaaacagaaaaagaccggtggactgagcaataagcagaagcagcacaagaagaggatgccactggcagcgactagagccaaggcagcacgttcccggcaggagaagaagcagcagcgcaagcgctccgggaatcagttcaggggccgcaaggcgtggaagtgagagagcctctgctgccgctttgcgattcatctagccgaatggccaatttttttgactctttgtatcttcttctgccagttaatgtttccatataataccttgattctatgagaatgcttttccatatttcgccgttggtatctgct

SEQ ID NO: 19255 - DNA, 2956 bp, Zea Mays
ctatctttcgcgtacagtttgttgtgctgtggcgccggccagcagcaaggcctggtttggagggcggtgggctgggctgggctgggctggtgatctcggcttgtgcgtgcgtgacttagggcctagagatgcaaaaaaagaagggaaaaaaaatgattcgtgactctcccgaggtgcggtgcggccgcaccccgcatgccattgcggtattgccaacgtcgcttcgcccctgaatccctccgctaccgcgcctagggttttaggcttttagcacacaccggcggcgctgcataccaagggcttcccctgcccgcgccgatgccgcgcaagcacgcgccggcgtttacgccggaggcagcctccgcctcttcgtcaggcggggctggccagccgcataacctccccgtgcttcaggcgaagatgaagcgtgacccggagggctacgaggaggagctccgccagctccaccgccacttcgagtcctcggtgttcctattccagcagcaggcggcgctggctacaacctcgtcctcgggaggcggcggggaggtggccaaggagctcggggacctcgccctgttccttgcccacgtcgcgcctttctacccggatgacctcgccgatttgcccgaccagattggtggcttgctcgacaccaacgcgcgtgggctgccgccggggctcaggtctcacctcgtgcaggcgcttgtattgctggtgaatcggaagattgtcgatcttgaggacacaatggagttattcatggagcttcaagttattggagatcgagctgtaaaaaagctagcattttcgcatattgtacacagtatcaggaggatgaaccagaagcacaagaatgaatcgacaaatcgtaaactgcaaaacgtcctttttaaattcttacaggctgaagaagagtcacgagcaaagagagcatttactatcctttgtgatcttcaccgtcggagggtctggtttgatgaacgcacaacaaatgcaatatgtgatgcttgtttccacccttcctctaggattatgatagctgctatttcatttcttcttggatatgaaaatgctccacaagaggatgatagcgacgcatcaagcagtgaagatgaagcagatcaaaacccacaaattcttctcagtaaacaggacgtttataaggcaaatcacaagggtacgtctgctagtaaaaaaaagaagaaagctaaattacagcgggtcattcgtagcatgaaaagacaacagcggaaatctgtcgaggaaactggttccagtttctattcacccctgacatatttaaaagatgcccagggttttgcggagaagcttttctctcggttgcagaaatgcaatgagcgatttgaggtaaggatgatgatgctaaaagtaatcgcgaggaccattgggctgcatcacttggttttgttgaacttctacccgtatcttcaaagatacgttcaacctcatcaacgagatgtgacgactctactcgctgcagcagttcaggcttgccatgatatgatgctgttgaaccactgttcaagcagatagtaaatcagtttgtgcatgaccgttctcgtccagaggctattgctgttggcttaaatgttgtgagagagatctgcatgagaatacctttgatgatgaatgaggatctgctccaagacctcgttttatacaaaaagtcccatgagaaagctgtttccattgctgctcgttcgctgatcacattgttcagagagatctgtccttcattgttagtcaagaaagatcgtggccgtcctgtggatccaaaggctcggcccaaagcatttggagaagtcactgttgctagcaacgttcctggtgccgagttgctagatgaaaatatttcttcagaaggggaaagttcggacgatgagtctgatggttttcactccgatgatgagatggacttgacacctgcccctcctggaacagaagaaaatatggagggttcatctgttgcaaacaaacatgatgccgatggagataccaaagaggaagatgacgcatctgatgatgaagatggtacggatcaagatgactccaacagtgatagtgatgaactagacgatgactctgatgtggatgtgggtactgatatatctgatgaagacgaaggtgacgacggtgaactgaaagaaagcataaatggttcagaggatgaagctttagaccagaatgaagacagcgaagaggaagacaagtcaaaaggcagtggctctaaagcgcagaagaggaagttaaatgattatattggacagctaaattctgctgatgcaagccttcgagctctgaagaggttagcaactgccaagaaggctgaagaaccatctgatgaaactggtaaaattctatccgatgaagatttcaaacgcatcaaagaactcaaggctaagaaagaagcgaagctggctttggctcagcatggactaatcaagggtgtcgacacaaggtctgtaacctttaagatgccatcatctgaccagctcagcaggaagcgtgtcgatccacttgagcttgaggctcacgtcaggagaaagatgtccaaggaagaaaggttggcgttggtgaaagctggaagagaggatagaggtccttacatggcaagggcggccgtgaaacagaaaaagaccggtggactgagcaataagcagaagcagcacaagaagaggatgccactggcagcgactagagccaaggcagcacgttcccggcaggagaagaagcagcagcgcaagcgctccgggaatcagttcaggggccgcaaggcgtggaagtgagagagcctctgctgccgctttgcgattcatctagccgaatggccaatttttttgactctttgtatcttcttctgccagttaatgtttccatataataccttgattctatgagaatgcttttccatatttcgccgttggtatctgct

SEQ ID NO: 19256 - DNA, 2947 bp, Zea Mays
ctatctttcgcgtacagtttgttgtgctgtggcgccggccagcagcaaggcctggtttggagggcggtgggctgggctgggctgggctggtgatctcggcttgtgcgtgcgtgacttagggcctagagatgcaaaaaaagaagggaaaaaaaatgattcgtgactctcccgaggtgcggtgcggccgcaccccgcatgccattgcggtattgccaacgtcgcttcgcccctgaatccctccgctaccgcgcctagggttttaggcttttagcacacaccggcggcgctgcataccaagggcttcccctgcccgcgccgatgccgcgcaagcacgcgccggcgtttacgccggaggcagcctccgcctcttcgtcaggcggggctggccagccgcataacctccccgtgcttcaggcgaagatgaagcgtgacccggagggctacgaggaggagctccgccagctccaccgccacttcgagtcctcggtgttcctattccagcagcaggcggcgctggctacaacctcgtcctcgggaggcggcggggaggtggccaaggagctcggggacctcgccctgttccttgcccacgtcgcgcctttctacccggatgacctcgccgatttgcccgaccagattggtggcttgctcgacaccaacgcgcgtgggctgccgccggggctcaggtctcacctcgtgcaggcgcttgtattgctggtgaatcggaagattgtcgatcttgaggacacaatggagttattcatggagcttcaagttattggagatcgagctgtaaaaaagctagcattttcgcatattgtacacagtatcaggaggatgaaccagaagcacaagaatgaatcgacaaatcgtaaactgcaaaacgtcctttttaaattcttacaggctgaagaagagtcacgagcaaagagagcatttactatcctttgtgatcttcaccgtcggagggtctggtttgatgaacgcacaacaaatgcaatatgtgatgcttgtttccacccttcctctaggattatgatagctgctatttcatttcttcttggatatgaaaatgctccacaagaggatgatagcgacgcatcaagcagtgaagatgaagcagatcaaaacccacaaattcttctcagtaaacaggacgtttataaggcaaatcacaagggtacgtctgctagtaaaaaaaagaagaaagctaaattacagcgggtcattcgtagcatgaaaagacaacagcggaaatctgtcgaggaaactggttccagtttctattcacccctgacatatttaaaagatgcccagggttttgcggagaagcttttctctcggttgcagaaatgcaatgagcgatttgaggtaaggatgatgatgctaaaagtaatcgcgaggaccattgggctgcatcacttggttttgttgaacttctacccgtatcttcaaagatacgttcaacctcatcaacgagatgtgacgactctactcgctgcagcagttcaggcttgccatgatatggtacctccagatgctgttgaaccactgttcaagcagatagtaaatcagtttgtgcatgaccgttctcgtccagaggctattgctgttggcttaaatgttgtgagagagatctgcatgagaatacctttgatgatgaatgaggatctgctccaagacctcgttttatacaaaaagtcccatgagaaagctgtttccattgctgctcgttcgctgatcacattgttcagagagtcaagaaagatcgtggccgtcctgtggatccaaaggctcggcccaaagcatttggagaagtcactgttgctagcaacgttcctggtgccgagttgctagatgaaaatatttcttcagaaggggaaagttcggacgatgagtctgatggttttcactccgatgatgagatggacttgacacctgcccctcctggaacagaagaaaatatggagggttcatctgttgcaaacaaacatgatgccgatggagataccaaagaggaagatgacgcatctgatgatgaagatggtacggatcaagatgactccaacagtgatagtgatgaactagacgatgactctgatgtggatgtgggtactgatatatctgatgaagacgaaggtgacgacggtgaactgaaagaaagcataaatggttcagaggatgaagctttagaccagaatgaagacagcgaagaggaagacaagtcaaaaggcagtggctctaaagcgcagaagaggaagttaaatgattatattggacagctaaattctgctgatgcaagccttcgagctctgaagaggttagcaactgccaagaaggctgaagaaccatctgatgaaactggtaaaattctatccgatgaagatttcaaacgcatcaaagaactcaaggctaagaaagaagcgaagctggctttggctcagcatggactaatcaagggtgtcgacacaaggtctgtaacctttaagatgccatcatctgaccagctcagcaggaagcgtgtcgatccacttgagcttgaggctcacgtcaggagaaagatgtccaaggaagaaaggttggcgttggtgaaagctggaagagaggatagaggtccttacatggcaagggcggccgtgaaacagaaaaagaccggtggactgagcaataagcagaagcagcacaagaagaggatgccactggcagcgactagagccaaggcagcacgttcccggcaggagaagaagcagcagcgcaagcgctccgggaatcagttcaggggccgcaaggcgtggaagtgagagagcctctgctgccgctttgcgattcatctagccgaatggccaatttttttgactctttgtatcttcttctgccagttaatgtttccatataataccttgattctatgagaatgcttttccatatttcgccgttggtatctgct

SEQ ID NO: 19257 - DNA, 3347 bp, Zea Mays
agagaaagatgcaaatatatggtaaaaatctagtatgaatcactaattttgtaaaatttcgtgggtgcaaaaatggctctaaaaacagtttacgaaggcagatatctagatgagacttaactataagtgaaaccatgcatctaaatgctctctacatgccttcagttccaattccaaatctgatctagcaccaaaaaaatcccacgagcaaacatttggccagccgtgacaccaaaaaggcaaaaatcaactaatagcgcaaccgggggcgcggctacaagtacagctacaaatagcgccccgcgacgcactcggcgcccggaacgcaacgcagcggcaaaagcgacactgccagcagcgagcgggtggaaccagaccagaccagacatgtcgacgacggagccgctcctctcggccggcgccgagaagaagaagggcggcaagggtccgcgcgtgggcatcgacgaggcgctgtcggcgcacgcgggggagttcgggcggtggcagctgcggcacttcgtggccgtgtcggcggcgtgggcgctcgaggcgctgcacaccatggtgatcatcttcgcggaccgggagccggcgaccgtgccggtgccctgcgccgccgccgggcgggagtgggccggtggcggcggttcaggcgccgctgcgtcgaccgtcgtcgagtggggcctcgtctgcggccagcgctacaaggtcggcctcgcccaggccgtcttcttcgccggctgcatgatcggtcagtgccgtgctagctcgccgctgctggccacgcgctctaatccattcgttcgttccgtttcgccgtgccgtgccgtacccctgcgtgtacctggactggaattcgtttcctgctcgttcgtggttactagggagtagtagtagtagtatgtgtggttcagggcaataattcgcgtcgaatcggtatctaataaagctgcggcttggcattttgggaacgacagttgggtggggaatgtaaagcacgggcacttcgagcttgattattcgagccccagcatattcggaatcggaagggagcgcgacgacaaggcacaagagcgatctcgtggacgtgtactcgtgttgcgcttccgaggcgggcgtcgagcgagtgcttcgcttccggcgtgctcggccacatgcacgacacgagtgccgatgccgacctgctgctatgcgctgtcgacaaggtttgtctgactctgatccgatcagatggacgagatggtcatcttctcggtccacagtcctaggcaggcagtggtcaggttggtcatgtctactagccgtctaggcaggcattccaaagctatacgagacggccctcttctcgtcagccaccgattggtctaggagacggccgccgtagcgcgaggtgacacgcgtggagcagatttcctcaccgtagctcggatacgtggctgcccccgccgcgccaagtgccacgccaaggcggctgtcacggctcatcacctcagccaatcaatatcgcttgcattgacacaagcatccaaaaacccactgcatcacacaactacacaaaaaccaggctacgggctgggtgcctctttgggtctttggatgggctacttttccagctagacacacggcctcgtccaacacgttaactaactgtcttcctctgcatgcaatgcaattgcaatgcaatccaggcgcgggcgtgttcggccacctgtcggactcgttcctgggccggaagggggcgctgcaggtggtgtgcgtgctcaacgccgccttcggcctcctcaccgcgctgtccccgaactactgggcctacgcggcgctgcgcctcctcacgggcttcagcgcggggagcgtgggcgtgctggccttcgtcctggccaccgagcccgtcggccccgcccgccgcggcgccgcgggcatgtccaccttctacttcttctccggcggcatcgcggcgctcgcggccgtcgcggcgctcttccagggctcctggcgcgcgctctacgccgtcacctcgctcccctcgctcgtcttcgccgtcgccgtcgtgccgttcttcgtctccgagtcgccgcggtggtacctcgtgcgccgccgccccgacgacgccctgcgggtcatccgcgccatcgccgccaccaacggcagggccgtccctgaggatctcaggcttaagctcgacgacgaggagccagggaacaaggacgttggtgggagtacggcgcatgcggcgtcctcgggctccatcgtcgacgtgttccggtcgccgaccacgcgggtgcggcttgtgctctccgtgcttatcaacctcctcagctcggtggtgtactacggcctcagcctcaacgtggtcaacctcaagaccaacctctacgtcaccgtcgtcgtcaactcgctcgccgagatgcccgcctacctgctcacggcgctcctcctcgatcatttcgggcggaagcctctcgccatcggcaccatgctgctcagcggcgtcttctgcaccgccgggagtctcgtacccggcgcagggatcatgagggtggcgtgcggcgtggtgggcatcttcggcatggcggcaacgtacaacctgctgttcatctacacggcggagctgttccctacggtggtgcggaacgcggcgctggggtgcacggcgcaggcggcgcagatgggggccatcgtggcgccgctggtggtgatgctcggggagaggctgccgttcgcggtgttcggcgcctcgggcatcgtcggcggcctgcttgtcttgtacctgccggagacgatgaacaagcccctgtacgacaccatggcgggtctggaggaaggggagaagaacgttgtcaagtgacacatgttgggatctcagatcagatgaaacggtcttttgtagtctcgtgttcactacgatcgaatgtgcaatagtgcaagatgtcgcgaggtgatgaattccacaaagacgaggagagttagtgctggcttactgccaaggagtggggatctagcggtgctgtttttcaggttacgctagtgtacatctaagcgtccagcttgtgcccgactacacatctccaagtttaacgaagaattgtttttcctcgttttccggaggatggaaaatccaggtttgcgtttttttttgtcgtcaaggaagctgtgtcctggactgaaacagaagccaatgtccatagccactgtatccgcccccttccctcagtagaggcgcaagaagctgcagagaacccgtctcccttcccttaagcacgatataggaaacacacgagacaatgatatagggttgggcctctggcctctttctgatctccgtattatgagtgggtgtatatgttcct

SEQ ID NO: 19258 - DNA, 1724 bp, Zea Mays
gcgtgctcggccacatgcacgacacgagtgccgatgccgacctgctgctatgcgctgtcgacaaggcgcgggcgtgttcggccacctgtcggactcgttcctgggccggaagggggcgctgcaggtggtgtgcgtgctcaacgccgccttcggcctcctcaccgcgctgtccccgaactactgggcctacgcggcgctgcgcctcctcacgggcttcagcgcggggagcgtgggcgtgctggccttcgtcctggccaccgagcccgtcggccccgcccgccgcggcgccgcgggcatgtccaccttctacttcttctccggcggcatcgcggcgctcgcggccgtcgcggcgctcttccagggctcctggcgcgcgctctacgccgtcacctcgctcccctcgctcgtcttcgccgtcgccgtcgtgccgttcttcgtctccgagtcgccgcggtggtacctcgtgcgccgccgccccgacgacgccctgcgggtcatccgcgccatcgccgccaccaacggcagggccgtccctgaggatctcaggcttaagctcgacgacgaggagccagggaacaaggacgttggtgggagtacggcgcatgcggcgtcctcgggctccatcgtcgacgtgttccggtcgccgaccacgcgggtgcggcttgtgctctccgtgcttatcaacctcctcagctcggtggtgtactacggcctcagcctcaacgtggtcaacctcaagaccaacctctacgtcaccgtcgtcgtcaactcgctcgccgagatgcccgcctacctgctcacggcgctcctcctcgatcatttcgggcggaagcctctcgccatcggcaccatgctgctcagcggcgtcttctgcaccgccgggagtctcgtacccggcgcagggatcatgagggtggcgtgcggcgtggtgggcatcttcggcatggcggcaacgtacaacctgctgttcatctacacggcggagctgttccctacggtggtgcggaacgcggcgctggggtgcacggcgcaggcggcgcagatgggggccatcgtggcgccgctggtggtgatgctcggggagaggctgccgttcgcggtgttcggcgcctcgggcatcgtcggcggcctgcttgtcttgtacctgccggagacgatgaacaagcccctgtacgacaccatggcgggtctggaggaaggggagaagaacgttgtcaagtgacacatgttgggatctcagatcagatgaaacggtcttttgtagtctcgtgttcactacgatcgaatgtgcaatagtgcaagatgtcgcgaggtgatgaattccacaaagacgaggagagttagtgctggcttactgccaaggagtggggatctagcggtgctgtttttcaggttacgctagtgtacatctaagcgtccagcttgtgcccgactacacatctccaagtttaacgaagaattgtttttcctcgttttccggaggatggaaaatccaggtttgcgtttttttttgtcgtcaaggaagctgtgtcctggactgaaacagaagccaatgtccatagccactgtatccgcccccttccctcagtagaggcgcaagaagctgcagagaacccgtctcccttcccttaagcacgatataggaaacacacgagacaatgatatagggttgggcctctggcctctttctgatctccgtattatgagtgggtgtatatgttcct

SEQ ID NO: 19259 - DNA, 1028 bp, Zea Mays
cttacgaatgccaaggtagggtgtgggatctgggcgccgagggagggggacggggctggggcccaatgcaggattgaactccacctcccgctaccgggacaaacacgagcacggaccacatcgtgttggccacagcgaggggatctggcggcgccgccgacgcaacacggtggagcacggaccgagccatccctgcgcatgcattgagacgcgaaggggggcgttaccattggctggacggggaagaagagaggagccagggggcgccacaaccgccggctggacagggaagaagaacgtggatccagggcggtgcaggcgtcagtttcttctcccaaggactgctgcgacgacggcaacttctccgataccggcgatgacgcgtgctaaacacacaagactcatgcggaaggtggggcaagatctcgaggaggaagagggcgagagagaggagtggggactggggagcgagtggagagaatggaggcgagagagaggtgtggggagcgagtggagagaatggagaccgaggcagatgcctaggaaggggcggtccctttggatgtactcacggagtgcgtcggccatgcccgtcctgttgaggacgtccatggcggagccgaaggcgccgacaccgggaaaaaacgagccgttccgcggcgacgatgtcctccgggctctgcacgtcgccgatgtcgaagccaaggtagcgaattgcgtagtggagctctcctccgggctctccacgagctgaccgagcggttgggcgcgacgtcgtgcggaagaagactgctgcggtggagtatgggccgccccaaacgtatgggccgcaccaaaatttcagcccagagcgccggtactgctgtggtgttgtgtcttgcaaaaaaaaattagtaccatactggctagtaaaggagacatagagcggcttataagcgttggctcggacgcaacaataagaactctgttgttatgtgtttagtggctgaactatctagattcaactcgtgagtacgtgtaaatttttg

SEQ ID NO: 19260 - DNA, 2897 bp, Zea Mays
tgtttaattttaaataacgatgagatttgaagccctccgacatctttcattcctctcgctgtcaaacaaggctttagaaccctacacagcggttgctctaattatcagcgggaagggttactgcatataatttggtttgtactagaggaggaccaatcaagtcagtcggcagacaacatataaggtagacgttcgttattgtaccgcctgtgcggaaactaacagcgttcatgaatcatgacgaagacgaacaccatgagaagccacgacctccatggttacagccaccgccacctactcgtacagtcttcaatcctgcttttcctcggaactttttccgccgcacaagctgcatccgacatcctcagcaagggcagtaaccttacctatggcgagaccctggtctccgctaacgggtcgttcacattagggttcttctctcgcggagtgccggcaaggaggtacctgggaatctggttcacggtgtccaactccagcggcgacgctgtatgctgggtagcgaaccgtgaccaccctctcggcgactcttccggcgtgctggcgatcagcgatacgggaagccttgtcctgctcgacggctctggccgggcggcgtggtcttcgaacacgaccgccggcgccggcgccgcttccccaacggtgaagctactcgagtccggcaacctcgtcctgctggacgggaacgacggaggagtcgacgactacggcgtcgtgaagctgtggcagtcgttcgaccacccgacgaacaccttgctccctggcgccaagatcggcatcaacctgtggagcggcggcgggtggtcactcacgtcgtggcgtgatgccgacgacccctcgccgggggaattccggtacacgatggtcaggcgagggttgctgcccgagatcgtgacgctggactcgagcgacgccatcaagtaccgcacgggagtgtggaacgggcggtggttcagcggcatcccggagatgaactcgttctcgaacatgttcgtcttccaggtgacggtaagcccgagcgaggtcagctacagctacgccgccaaggccggcgcgccgccatccctgtcccgcgtcctcctcaactacacggctgacgccgtgcgcgtcgtgtggtggctggacaagcgagggtgggacaacttcttcacggggccgcgagatgactgcgaccactacaacaggtgcgggcattctggcgtgtgcaatcatactgcagcgtcgacgacgtggccgtgcagctgtgtccagggcttcgtccccgtctcgtcgtcggactgggacgggagagactcatctggcgggtgccggcggaacgtgtcgctggactgcggcgacaatggcaccacggacgggtttgtccgtttgccgggagtgaagctgcccgacacgctcaactcgtcgctggacacgagcatcacgctggacgagtgcagggcgaggtgccttgccaactgctcctgcgtggcgtatgccgcggcagatgtgcaaggcggaggcgatgatgttggcactggatgcatcatgtggcctgaaaacctcactgacctacgctacgtggctggaggacagaccctgtacctacggcaggctactcccccatctgggactggaaggttaaagaaagaaacgcgggttctcgtagcagctggatcaacattgggtttcattggccttatcatgctggccatcttcgctgtgcaggcggttcggataaggcgtcggaacttgttaattcaaatgacggaggcagttgaaacagcccaagatccctctgtttcttccattgctctggctactgtcaagagtgcaacaaggaatttctccacaaggaatgtgataggcgaaggcactttcggcatcgtatatgagggcaagttgcccagagggcatccgctcctacacgggctagccgggagaaccattgccgtgaagaggctgaaaccgatcggcgatcttccggacataatcgtcaggtatttcacgagagagatgcagctcatgtccgggctcaagcagcaccggaatgtgctccgcctccttgcctactgcgacgaagccagcgaacggatcctggtgtacgagtacatgcacaggaggagcttggacgcctacatattcggaacacctagagaacgcgcgctgctgaactggtgccggaggctgcagatcattcaggggatcgccgacggcgtgaagcacctccacgagggagaagggtcggccggcaacgtgatccaccgggatctgaagccggccaatgtgctgctggacggcggatggcaggccaaggtggccgacttcgggacagcaaaattgctcgtcgctggagctaccggaactcggacaaggataggcacacctggatacatggctccagagtacgttcagagcgacggtggcgagacgacgctcaagtgcgacgtgtatagcttcggagtcactttaatggagacactgagcggacgaaagaactgtgacacgccaagcctcgtctcagaagtaaagaccatactgaactgcctcggccgttcgagatgctaggcagcccctgctcggagcttgccgagcccatggtgccgacggtcgtcggcaatgcagccttggctacgctcctggaggccgatctctccagaccgacggtgtacgagacaatcgattttagataagagatgacgcgctcgcactgcgttgctgctaagcttataacacttgttttatacttcgtactgttgttttacactgattataattgttattaataacatttttggtttgtttggtcgaaaagacatgacggtactaagggctaacacttacgctatctccaacagatgctctatcttgtttccttattccaaacttctatttacaaacag

SEQ ID NO: 19261 - DNA, 1108 bp, Zea Mays
accacaccccaccgcaatgcccagaggtccccccaatgtcggaagggcgacgggttcacccacaccccccgctggcggatccccccgccgcctgcccgcccgcgcgccaagaattccattcacctccccccacgctgccaggagctctgcccggcccccgggtgccgaacgaccaccaggttcacccgtgtctgccgccggcggatgcccccctcccccggtggctaggagctccattcgtgctgccgtcgtgtgctgctgggcgtctcccccaatggtgttacagcatgggcattagagcactcaatgacggacggggagctactctggcgcgcatcgttcaccccggcagtacctattctgacgcgtatggtaggtggccatcatgttcctcacgcaagggcaggtgcaactcgggaggtgcctcactactgcatctacgtccacacgctatcggccaatttcaccttcaaatccatcttcccccaacgccaaatacccagtaaggctaggccacatctctatcatatatgaaagccggttttgtctgtcatacactttcgttatgaaaatgtgtgtagcctccaaaaaagcccttcacaggcctgataaatcaaggattgatattatgagagaaataggtgccacaatttctagtagaatttctacatgttcatgaatgattttattgttgctaatgaatgttgtaatagattgagtatactgcaatagagacaacgaaggcagatgggtttttgcagactcagactcaagtttgattgattgctatttgctaccaacaaaaaatagctacacacaggttctgcgttgccttgcattcaaagcattttttattttattgtaaagaatttgttgttatttaaacttgataggtcttgacaagaaagttctattgtacttcatatttgtatatatgatcaacatctctatgtgcagtatgcttgagaatagctttaaggctgagtaacaagacaaagtacgtcaaaaggcaacgtctaagtaatatgttgatacacagaggtaatccttctcatagcttctgctccaacatgttttgcgaatttattgcattattggtgtataaaag

SEQ ID NO: 19262 - DNA, 1645 bp, Zea Mays
cacttagttctgattgatttactactcggttaatcatcgtttagttacgtggattaattaacgtgagcgattctagacgaaatagtttattgccgcgcgacatggcacgcaacacactaaacaaggtgcgcggaacggcgtacgcgacagcgcgcgtcgacacgtgtggacgacacgcacgatgtgtgcgaacggcacgcgctgacttaaacgtgccacgcgaacagtacaggcgggtagtgtgcggacaacacgcgacatgagtgagcgacgcgtgatgcgtgaagcagaatgcgaacatgcgagaatcactaactaaatgttgtttttatactaaaaataaattagttaaaatatgtgaaacaatgaaacaatattattaacacgtcgttacaaatctaaaacaactggaacgcgacgaaatggatctacgacgtaaaatatattcaatatttactagttcacgtatttaagatgaggtagcgtattttagttggctaagccgaaaccacaaggagtaccacaaaatcgtggctgcaaccaatcctgcacaacactttttctacgtgagtggtgagccaattttattaaagcgcgcgaatcgcgtctcgctcgaacggcgaggcgagaacagcacaggcgagtcgtgcgcgggttaaaaacggtaaatcagcttcaatggggaaaacaatattaaaaccttagttaaataaatatttaataaaatacctaaaacatgtgaaatgatgaaatagtattagtaacacgaggacaacgtcgttgcaaatccaatgcacttaaaacagattgaaacgagtaattaaagcaaaaggcatggaataattacttaatcgcagattaccgatgatgtagtgcatctcactggtgacgaagtggccgcacaaagggtcacaagaagcaagaccacaacagatcccggaaggatgggatcagtgtggctatgggcatttctcttctttcttcagccaaaagcacgaccaggagaaaggggtcatccatggttgatttgattacacggagagagcacgaccaacagctgcagggggagggtctactctcctgctgccctgctgcacagaacggtaggacgcagagtagcaggtggccatggcgagtgggggagaagcatggctgtcggcaagggggcacttcaccggaggaacgcatgggcaggggcggttcctggctggacgccatggccacggctcggtagggcgcgcgcgcagcaagggggccccggtcagccaagctatagggctcgcgcgcacaggagggctcagccgcgcgcaggcctccttgccgcgattcggacagcgaggtcccggccgaactgggctcgggcgcgcgcagaaagtggggttgggagcgggtcggctaacagggggaagaaagtcggccgcgcccagggagcagttccaatgacggagcaacgacgccattagaggagagctcgatccgtagaggaactcgacgtgcactggactgggcggctccttgtgcgcgtcgtgggggctcaacacgattggcggcatgcgagtggagagggtggttgcgaggaagaaggaacccgaccggtgggcccggcggctgggcaggggtaccatgcggcggctagggtttgggg

SEQ ID NO: 19263 - DNA, 2783 bp, Zea Mays
tgcgtgtgtcccctgtgcggatactaacagcgttcatgaatcatgacgaagacgaacaccatgagaagccaccaccatggatacagccaccgccactgccacctactcgtacagtcttcaatcctgcttttcctcggaacttttgccgccgcacaagctgcatccgacatcctcagcaagggcagtaaccttactaacggcgagaccctggtctccgctaacgggtcgttcacattagggttcttcactcgcggcgtgccggcaaggaggtacctgggcatctggttcacggtggccaactccagcagcgacgctgtatgctgggtggcgaaccgggacctccctctcggcgacacctccggcgtgctggtgatcagcgacacgggaagccttgtcctgctcgacggttctggccggacggcgtggtcttcgaacacgactgcaggcgccgcttccccgacggtgaagctactcgagtccggcaacctcgtcctgctcgacgggaacggcggccgcgacgactacgacgtggtgaagctgtggcagtcgttcgatcacccgacgaacaccttgctcccgggcgccaagatcggcatgaacctgtggagcggcggcgggtggtcactcacgtcgtggcgggacgccgacgacccctcgacgggggaattccggtacgcgatggtcaggcgaggagggttgctgcccgagatcgtgatgctggactcgagcgatgccatcaagtaccgcacgggagtgtggaacgggcggtggttcagcggcatcccggagatgaactcgtactcgaacatgttcgtcttccatgtgacggtgagccagagcgaggtcagcttcagctacgccgccatgccggcgcgccgccatccctttcccgcgtcctcctcaactacacggctgaggccgtgcgcgtcgtgtgggtgccggacaagcgagggtgggcaaacttcttcacgggaccccgagaagactgcgaccactacaacaggtgcgggcactctggcctgtgtccagggcttcgtccccgtctcgtcgtcggactgggacgggagagacccatctggcgggtgccggcggaacgtgtcgctggactgcggcgacaatggcaccacggacgggtttgtccgtttgccgggagtgaagctgcccgacacgctcaactcgtcgctggacacgagcatcacgctggacgagtgcagggcgaagtgccttgccaactgctcctgcgtggcgtatgccgcggcagatgtgcaaggcggaggcgatgatgttagcactggatgcatcatgtggcctgaaaacctcactgacctacgctacgtggctggaggacagaccctgtacctacggcaggctactcccccatctgggacaggaaggtcaaagaaagaaacggtggttctcatagcagctggatcaatattgggcttcattgtccttgtcatgctggccatcttcgctgtgcaggcggttcggataaggcgtcggaacttgataattcaaatgacggaggcagttgaaacagcccaagatccctctgtttcttccattgctctggctactgtcaagagtgcaacaaggaatttctccacaaggaatgtgataggcgaaggcactttcggcatcgtatatgagggcaagttgcccagagggcatccgctcctacacgtgctagccgggagaaccattgccgtgaagaggctgaaatcgatcggcgatcttccggacataatcgtcaggtatttcacgagagagatgcagctcatgtccgggctcaagcagcaccggaatgtgctccgcctccttgcctactgcgacgaagccagcgaacggatcctggtgtacgagtacatgcacaggaggagcttggactcctacatattcggaacacctagagaacgcgcgctgctgaactggcgccggaggctgcagatcattcaggggatcgccgacggcgtgaagcacctccacgagggagaagggtcgtccggcaacgtgatccaccgggatctgaagccggccaatgtgctgctggacggcggatggcaggccaaggtggccgacttcgggacagcaaaattgctcgtcgctggagctaccggaactcggacaaggataggcacagctggatacatggctccagagtacgttcagagcgacggtagcgagacgacgctcaagtgcgacgtgtatagcttcggagtcactttaatggagacactgagcggacgaaagaactgtgacacgccaggcctcgtctcagaagcctggagactctgggtgggccgctgcgtcacggcactccttgatccagcggttgcaccggcgcctgccaagcccgagcttgcgcaactgcgcaggtgcatccaggtcggcctcctctgcgtccaggagaagccggacgagaggcccgccatgtccgcggttgtcgagatgctaggcagcccctgctcggagcttgccgagcccatggtgccgacggtcgtcggcaatgcagccttggctactctcctggaggccgatctctccagaccgacggtgtacgagacaatcgattttagataagagatgacgcgctcgcactgcgttgctgcttagcttataacacttgtttatactttcgtactgttgttttacactgattataattgttattagtaacgtttttgttttgtttggtcgaaaagacatgacggtactaagggctaacacttacgctatctccaacagatgctctatcttgtttccttatttcaaacttgtattta

SEQ ID NO: 19264 - DNA, 2416 bp, Zea Mays
atccccatcctttccactactcatcagttttctcatctcagctcagctagctttcccctcccttgcaactgcaagcttgcccaacccaataagctaagcaagcacgcaccatacacactctctagtagctagctaagctagccggccgcccctcctcgcacgcgtgcgcgcaccagcatctatcatcagagctagccacgaaacggatcggagcagcagatctcgatcggcggcccacatgggggatcacgctgagatgttgcatgccgctccggccatgtacaacggcgctggcgctgcccctcatggcgggtggtggaatacggcggtgcccgcgacgacgtgctcgacgacggagctggctgggttcaccacgtggtcgtccgccctggctgctagctacgacctggcggccgaggggacaaaggccaagagcgccgccgcctcttcggagtcccccgggaacaacagctccgtgaccttccaagaaccggcctgcgtcacggatcctcccggcgtcggaaccgccgtggtgcaagtgcaacagcctcttgccaccggttacgccgactggacacatccctatatgagcagtggcgctactactttgcatgggtttctgcaagacggtcaccagcaggacatgagctcagcaactgagcagagctccatgaccgcatcaagcctgatgaacccttcatccaataacctagccctggcgctgcaaggtcaccaccaccaccaccaggagcatgagcaccagcagcagatgctgtccagcttcggatccgagctgctcttgtcgccgacgacctcaccctacgggttccagtcctctctgctacgaagcctcatggagccggccgcggcgacgaagcaggctttgccggggtaccagcagcagcagtatgatcagtaccagcagcagatgggcatgggccaggcgaggtttgcaccaccggcggccggagctgccagcagggaggcactccagttcagcaacgacgcgctgttcagctggaacccttctgctgctgggttcggcttcggcctcggcgtgccgccggcgccggaccaagctagcagcgtacgttctgtcgtcaaaccatcgccggcagcggcgcgtgctacagcgacccttgcattaaagactgcgctggaaggagtaggagagtctgctagctcgatcatcaccaagaagaaggcgaacggcgagccggccttgaagaagcccaggctcgagacgccgtctccgttgccaacgttcaaggttaggaaggagaagctaggggacaggatcactgcactccaacaactagtcgctccttttggaaaggtgagggatagctagcttttgatgactactgctgactatatattacaaacaagcagctagtgctttgttgtagtactaccaacatcgactaacagcttccgtccgtcgtcccagctgcaaaagacacgctcctttttctccttcctgatctggagacgatctatatatatagcctcaaaatctaacatcgtctcgatcgatgcgcgtgcagacggacacagcatcggtgctccatgagaccatcgagtacatcaagttcctccacgaccaagttggtgtccttagtgctccatacttgaagaacaacggccatcatcaagtgctccgccacttgaagagctcaagtcctgacaagtcgtccaaggacgacgacagccatgccagcgagatttcgctcaagggccgggggctgtgcttggtccccatatcgagcacgttcgccgtagccagcgaggtgcccgtcgacttcgtgtggagcactccgttcgctgccaactttaggtagaagaaggatgagaattgagaaagagccaaagctctgatcgatcagaggcgtcgaaagagaaataactactacctcgttaccacagatcgatcgacctgctggccctgaatcctgattatatatatatatatatatatatatatatgtttcttagtctagtgacctagtagctagcagtgtatgactgtgtatggtcatggttatctctcataactgtactagtactaagcttattgcagactaagctttgctagctagagatgaacctttggaatgagtccttgaaagacttggactcattctccaggttcatctatctatccacccagggtgtaagctaataagggatcacctaatatatttgagagggcacaacaagtctctctactgatcgtcatcagcttctaattatgattggtttgttaggttgcatcattgggtagttgtggaaagatttgttaaagatgtgtaatggtttctataccttaaactagtgacgacggaatggatcaaagtgcgtagcaggtttctattgattgtactacgtacccaataaaagtggcatctctttgatt

SEQ ID NO: 19265 - DNA, 2463 bp, Zea Mays
ccttcatcctgccattacgccttacctcgctgacaacgtcagcttcttcaacggactccgcagctcgcagatcacgcaatccccggtaaacaaactccggccacgcgcgcccgtgccgggtctttcgctgaccagcggggcccagtcgtcatccttcttcccccactcgctcgacgcagacccaatcccaacagaaatcgccgcatggctcgccgctcacttcggatcggccgaacgacctcctggatatcgggctgccccacccgatggtgtataagggaccccggcactcgattcatatctctcgcctcgctgttactcgccctcctcgccacaatatcgataattttgcgccgtcgcggggaaaacaggggctgccgcgggggaacttcggctagccgtcatccgcgcctccagtgtgggcctcagagccttccctcggttgcggggcgggcgctggtggcctcgccacctggaattgtcgccggggacttcaccaattggtcgccggacctctcctatcacgatcgagccgccgcgcagcgagggcggacttcctcggagcttaatctgcgaacctttttgaacgatctaggcttcctggaatttggaacgtggatttgatctgctcctccaatggcaacctttagcaaggctagcaggctgtgtggtgcagtgactatgcaaccaaaacaggtgtggagtctactctcgagaatcctgtctaagctgctcggtcttcctggtattttgttgaagaaattccgaaaggaaggtgtgtcggaattggatgctgttgcattgccagagctatcacaggatgtgttgatggacatctttagtacacttgaggtccctgacctcatccgagcaggctcggtttgctcgtcatggcatgctacttacaaatgcctgctcgacctgaggcaatacaagcaaccccagacaccatgcctgttctacacttgtgaatctgccggtagcaacatagggtttctatacaacctcaaggaaaataggtcctacaagttaactctaccggagccacccatccgcagtaggttactgatcgggtcctcgaacggttggttgattactgcagatgagaggtctgaactgcaccttgtgaatcccataactggagaacaggttgcacttccctctgtgattaccatagagcatgtgaagcccatctttgatgcatcaggtactatccatatgtacgagttgtcatatgaaacaccacccgacctgtttgatcttggcgatctgcgcgatgaactctacttcaaggcatttgtgtttcctgatccatccaccactggaagctacatcgtggttcttattcatgagccacgttcacggctttcgtttgcacgaccgggagatgacaagtggacctcggttggacaaggtatcggatataaagactgcacatatgtggatggtcttttgtatacagtggattggactggagaaattgatgcttttgattttaccgcatcccctgttaaaatgacagtaattatggacagtctgaagtatcctccatgtgaaaacctgtacattattcaggctccatggggtgatctgctgcatgtttggaggactattgacgttccacccaatgctccatcgtgggaccctgaaaagtgcctggcagaaaccgtaaaaatacaagtgcataaagtggacttggaagcaaagaaatgggtgaaaataaacaggttgcagtgtgatggtgttttatttcttggccacaacgattcactttaccgtagtgctcaagtacatccaggactcaagtcaaatcatgcatacttcactgacgattgtaaagaattgactgttgcattcaaaaattccacacgtgatatgggagttatggacttggaaaataatgccaagaaggaaattgtctctcaaatttggtccaactggccctgtcccacttggataacacctaatcttatgaagctgaatcaggcattcaacaaatagctttttagcggtaaaggctcatgaacgagaaggccaggatgttgtccatggagcagaggaagcggctgcagctcgccaggctgctcgccatcgaccgacccatctggctgctggacgagccctccgtcgcgctggacgcagagggtaccaggctgcttgaacacatcatcgcggagcaccgggagaagggtggcatcgtgttcgtggccacgcatctgccgattcagattgaggattctatgtcgcttcggcttccccggaggaagacgctggttgatcttgtccattgatggcttgatgccaatgtgaccaggaatttagctgtatatctttctaattccgccccagctatctgtctgaatgctgtcagagcaataattttttttgctggtgctgcatttgtcatccttttttgacagcatgacaatacattctctatgttgataatatgtgcagttgtta

SEQ ID NO: 19266 - DNA, 2314 bp, Zea Mays
catccttcttcccccactcgctcgacgcagacccaatcccaacagaaatcgccgcatggctcgccgctcacttcggatcggccgaacgacctcctggatatcgggctgccccacccgatggtgtataagggaccccggcactcgattcatatctctcgcctcgctgttactcgccctcctcgccacaatatcgataattttgcgccgtcgcggggaaaacaggggctgccgcgggggaacttcggctagccgtcatccgcgcctccagtgtgggcctcagagccttccctcggttgcggggcgggcgctggtggcctcgccacctggaattgtcgccggggacttcaccaattggtcgccggacctctcctatcacgatcgagccgccgcgcagcgagggcggacttcctcggagcttaatctgcgaacctttttgaacgatctaggcttcctggaatttggaacgtggatttgatctgctcctccaatggcaacctttagcaaggctagcaggctgtgtggtgcagtgactatgcaaccaaaacaggtgtggagtctactctcgagaatcctgtctaagctgctcggtcttcctggtattttgttgaagaaattccgaaaggaaggtgtgtcggaattggatgctgttgcattgccagagctatcacaggatgtgttgatggacatctttagtacacttgaggtccctgacctcatccgagcaggctcggtttgctcgtcatggcatgctacttacaaatgcctgctcgacctgaggcaatacaagcaaccccagacaccatgcctgttctacacttgtgaatctgccggtagcaacatagggtttctatacaacctcaaggaaaataggtcctacaagttaactctaccggagccacccatccgcagtaggttactgatcgggtcctcgaacggttggttgattactgcagatgagaggtctgaactgcaccttgtgaatcccataactggagaacaggttgcacttccctctgtgattaccatagagcatgtgaagcccatctttgatgcatcaggtactatccatatgtacgagttgtcatatgaaacaccacccgacctgtttgatcttggcgatctgcgcgatgaactctacttcaaggcatttgtgtttcctgatccatccaccactggaagctacatcgtggttcttattcatgagccacgttcacggctttcgtttgcacgaccgggagatgacaagtggacctcggttggacaaggtatcggatataaagactgcacatatgtggatggtcttttgtatacagtggattggactggagaaattgatgcttttgattttaccgcatcccctgttaaaatgacagtaattatggacagtctgaagtatcctccatgtgaaaacctgtacattattcaggctccatggggtgatctgctgcatgtttggaggactattgacgttccacccaatgctccatcgtgggaccctgaaaagtgcctggcagaaaccgtaaaaatacaagtgcataaagtggacttggaagcaaagaaatgggtgaaaataaacaggttgcagtgtgatggtgttttatttcttggccacaacgattcactttaccgtagtgctcaagtacatccaggactcaagtcaaatcatgcatacttcactgacgattgtaaagaattgactgttgcattcaaaaattccacacgtgatatgggagttatggacttggaaaataatgccaagaaggaaattgtctctcaaatttggtccaactggccctgtcccacttggataacacctaatcttatgaagctgaatcaggcattcaacagatagctttttagcggtaaaggctcatgaacgagaaggccaggatgttgtccatggagcagaggaagcggctgcagctcgccaggctgctcgccatcgaccgacccatctggctgctggacgagccctccgtcgcgctggacgcagagggtaccaggctgcttgaacacatcatcgcggagcaccgggagaagggtggcatcgtgttcgtggccacgcatctgccgattcagattgaggattctatgtcgcttcggcttccccggaggaagacgctggttgatcttgtccattgatggcttgatgccaatgtgaccaggaatttagctgtatatctttctaattccgccccagctatctgtctgaatgctgtcagagcaataattttttttgctggtgctgcatttgtcatccttttttgacagcatgacaatacattctctatgttgataatatgtgcagttgtta

SEQ ID NO: 19267 - DNA, 2317 bp, Zea Mays
catccttcttcccccactcgctcgacgcagacccaatcccaacagaaatcgccgcatggctcgccgctcacttcggatcggccgaacgacctcctggatatcgggctgccccacccgatggtgtataagggaccccggcactcgattcatatctctcgcctcgctgttactcgccctcctcgccacaatatcgataattttgcgccgtcgcggggaaaacaggggctgccgcgggggaacttcggctagccgtcatccgcgcctccagtgtgggcctcagagccttccctcggttgcggggcgggcgctggtggcctcgccacctggaattgtcgccggggacttcaccaattggtcgccggacctctcctatcacgatcgagccgccgcgcagcgagggcggacttcctcggagcttaatctgcgaacctttttgaacgatctaggcttcctggaatttggaacgtggatttgatctgctcctccaatggcaacctttagcaaggctagcaggctgtgtggtgcagtgactatgcaaccaaaacagctgtggagtctactactctcgagaatcttgcctaagctgctcggtcttcctggtattttgctgaagaaattccgaaaggaaggtgtgatggaattggatgctgctgcattgccagagctgccacaggatgtgttgatggacatctttggtacacttgaggtccctgacctcatccgagcaggctcggtttgctcgtcatggcatgctacctacaaatgcttgctcgacctgaggcaatacaagcaaccccagacaccatgcctgttctacacttgtgaatctgccggtagcaacgtagggtttctatacagcctcaaggaaaataggtcctacaagttaactctaccggagccacccatccgcagtaggttactgatcgggtcctccaacggttggttgattactgcagatgagaggtcggagctgcaccttgtgaatcccataactggagaacaggttgcacttccctctgtgattaccatagagcatgtgaagcccatctttgatgcatcaggtactatccgtatgtacgagttgtcatatcagacaccacccgacctgtttgatctcggtgatctgcgcgatgaactctacttcaaggcatttgtgtttcccgatccatccaccactggaagctacatcgtggttcttatccatgagccatattcacgactttcgtttgcacgaccgggagatgacaagtggacctgggttggacaaggtagccaatataaagactgcacatatgtggatggtcttttgtatacagtgaattactctggagaaattgatgcgtttgattttaccgcgtctcctgttaaaatgacagtaattatgaaagagctgaagtatcctgtatgtgaaaacatgtacattattcaggctccatggggtgatctgctgcatgtttggaggactattgacgttccacccaatgctccgccgtgggtccctggaaaatgcatggtcgaaaccttaaaaatacaagtgcataaagtggacttggaagcaaagcaacgagtggaaataaacagattgcagtgtgatagtgttttatttcttggccacaacgattcactttgccttagtactcaagtacatccagaactcaagtcaaatcatgcatatttcactgacgattttaaagaattgactgttttattaaaaaattgcatgcgtgatatgggagttatggacttggaaaatagtgtcaagaaggaaattgtctctcaaatttggtccaactggccctgtcccacttggataacacccaatcttatgaagctgaatcaggcattcaacagatagctttttagcggtaaaggctcatgaacgagaaggccaggatgttgtccatggagcagaggaagcggctgcagctcgccaggctgctcgccatcgaccgacccatctggctgctggacgagccctccgtcgcgctggacgcagagggtaccaggctgcttgaacacatcatcgcggagcaccgggagaagggtggcatcgtgttcgtggccacgcatctgccgattcagattgaggattctatgtcgcttcggcttccccggaggaagacgctggttgatcttgtccattgatggcttgatgccaatgtgaccaggaatttagctgtatatctttctaattccgccccagctatctgtctgaatgctgtcagagcaataattttttttgctggtgctgcatttgtcatccttttttgacagcatgacaatacattctctatgttgataatatgtgcagttgtta

SEQ ID NO: 19268 - DNA, 1778 bp, Zea Mays
cttcttcccccactcgctcgacgcagacccaatcccaacagaaatcgccgcatggctcgccgctcacttcggatcggccgaacgacctcctggatatcgggctgccccacccgatggtgtataagggaccccggcactcgattcatatctctcgcctcgctgttactcgccctcctcgccacaatatcgataattttgcgccgtcgcggggaaaacaggggctgccgcgggggaacttcggctagccgtcatccgcgcctccagtgtgggcctcagagccttccctcggttgcggggcgggcgctggtggcctcgccacctggaattgtcgccggggacttcaccaattggtcgccggacctctcctatcacgatcgagccgccgcgcagcgagggcggacttcctcggagcttaatctgcgaacctttttaaacgatcttggcttcctggaattaggaacgtggatttgctgtggagtctactactctcgagaatcttgcctaagctgctcggtcttcctggtattttgctgaagaaattccgaaaggaaggtgtgatggaattggatgctgctgcattgccagagctgccacaggatgtgttgatggacatctttggtacacttgaggtccctgacctcatccgagcaggctcggtttgctcgtcatggcatgctacctacaaatgcttgctcgacctgaggcaatacaagcaaccccagacaccatgcctgttctacacttgtgaatctgccggtagcaacgtagggtttctatacagcctcaaggaaaataggtcctacaagttaactctaccggagccacccatccgcagtaggttactgatcgggtcctccaacggttggttgattactgcagatgagaggtcggagctgcaccttgtgaatcccataactggagaacaggttgcacttccctctgtgattaccatagagcatgtgaagcccatctttgatgcatcaggtactatccgtatgtacgagttgtcatatcagacaccacccgacctgtttgatctcggtgatctgcgcgatgaactctacttcaaggcatttgtgtttcccgatccatccaccactggaagctacatcgtggttcttatccatgagccatattcacgactttcgtttgcacgaccgggagatgacaagtggacctgggttggacaaggtagccaatataaagactgcacatatgtggatggtcttttgtatacagtgaattactctggagaaattgatgcgtttgattttaccgcgtctcctgttaaaatgacagtaattatgaaagagctgaagtatcctgtatgtgaaaacatgtacattattcaggctccatggggtgatctgctgcatgtttggaggactattgacgttccacccaatgctccgccgtgggtccctggaaaatgcatggtcgaaaccttaaaaatacaagtgcataaagtggacttggaagcaaagcaacgagtggaaataaacagattgcagtgtgatagtgttttatttcttggccacaacgattcactttgccttagtactcaagtacatccagaactcaagtcaaatcatgcatatttcactgacgattttaaagaattgactgttttattaaaaaattgcatgcgtgatatgggagttatggacttggaaaatagtgtcaagaaggaaattgtctctcaaatttggtccaactggccctgtcccacttggataacacccaatcttatgaagctgaatcaggcattcaacagatag

SEQ ID NO: 19269 - DNA, 1182 bp, Zea Mays
agaaagccaaagaacaagataaatcctacagaacattgcatattcgttgctgatatgttcttgtgatttccatctgaagttcttccttttatcctttacgtggttactgccttgcagattgctgtaagaaaagagcagtgaatgcagcagaaataagtctcttgggaccattggaggtgctctctgaccccattctggaggtagctggtccactattcaagacaaggagtctcgtttgtgttgacaggactcgtagagaatatctgctcagggagcttgaatccaaggaaaggcagcgatgggtgatggggggaggactttggaaagcatggcccgtgctgcactgaacaagacgaactgggggcgcaaaaaagagcgagatcacaagctcccataacaacactccaccagagaccaacaaagagatcgaaggaaggaagcctcttgcaaccactctccggtccgactccgacgggtgcagctggacgggaccctacattgtaaatgtacagtatgggtccatgcacacatgctcgaagattgatgcaatgttgacggtgaccagtgacagtgagccccccagcgcgcgcaggcacaggcaggcgtgcagcgtccctgaacaggattgagacggaggagaggaggagggtatcactgcatgccactgggcgtgcaggcgatcttgcgaagcacgttcaggtgtgctgaggttctatctagatggcgcgcgcgtgtgtgtactggagatctggagagagcgggcggggcgaagcaactgattgatgaactggatttgcggacaaatctggaggccaaaaaggcgtcattggggtcccgattggttggaggacggcagctttctgttctgcagatgctggtgtgtgccttgttgaccaggggtgtttgttggctgttacgggcatggcgcgtcaccgagtctggtctgctgtgcttctggttctggcgtgcaggagggtgtgaggtgaccgcccgtcgccgttgtcgcgtgagggaaaaggaagcgttctccgtctcggggcactgcagcgtcgccgtgcatgatctacatgacatgcacggcattttctttgctttgatttgttacctatactcccgcggttcacaaatatataagttgagttttagtctaaaactttgactgttcgttttatttaaaaaatc

SEQ ID NO: 19270 - DNA, 3010 bp, Zea Mays
ctccttcctcccttctccacattctcttccacttccacctccgtccgttccccttctcctcctcctctcctccccttccatgccctcttagcttctgaaggtctccgccacctcctgctagctacccttctgagctttcaagctttgctgaacgcacgcgggcggacgcgccgaacttgatggacaaccagcagctccagttccagcaagcgttgcagcagcagcacctgctgctggaccagatcccggcgacgacggcggagagctgcgacaacacggggcgcggcggtggtggccgggggtccgacccactggccgacgagttcgagagcaagtccggcagcgagaacgtggacggcgtctccgtggacgaccaggacgaccccaaccagcggcccagcaagaagaagcgctaccaccgccacaccctgcatcagatccaggagatggaagctttcttcaaggaatgcccgcacccggacgacaagcagcgcaaggagctgagtcgggagctgggtctggtacccctccaggtcaagttctggttccagaacaagcgcacgcaaatgaagaaccagcacgagcggcaggagaactcgcagctgagggcggagaacgagaagctgcgcgcggagaacatgcggtacaaggaggccctcagcagcgcgtcctgccccaactgcggcgggccggccgcgctcggcgagatgtccttcgacgagcaccacctccgcgtcgagaacgcgcggctccgggaggagatcgacaggatctccgccatcgccgccaagtacgtgggcaagcccatggtgtccttccccgtgctgtccagcccgctcgctggggcgcgtccgtcgccgctggacatcgacagcggtggcgtactggggggtgctgccacttatggcggcgccgctgacatcttcggcggcggcggcggcgtcgctgcttgtggtgcggccagggattgtgacaagcctatgattgtggagctggctgtgacggccatggaggagctggttcggatggcgcagctggacgagccgctgtggaacgcgccggcaggcgggcacgacgggtctgctgagacgctgaacgaggaggagtacgcgcgcatgttcgtccctgctggagggctcgggctaaaaaagcagtacgggttcaagtcggaggcgtcgcgcgacagctccgtcgtcatcatgacccatgccagcctcgtcgagatcctcatggacgtgaatcagtatgcgacggtgttctcgagcatcgtgtcgagagctgcgacgctggaggtgctgtccaccggcgtggctgggaactacaatggcgcattgcaagtgatgtcggttgagtttcaggtgccttccccactggtgccgactagggatagctatttcgtgaggtactgcaagcagaacgcggatggaacatgggccgtcgtcgacgtctcgctggacaccagctcagtcctcaagtgccggcgccggccgtcgggatgcctgatccaggaaatgcccaatggctactcaaaggtgacctgggtggaacacgtcgaggtggatgacaggtcggtaaacggcatctacaaactgctggtggactcagggctcgccttcggtgcacgccgatgggtcggaacgctggaccgccagtgcgagcgccttgccagtgtcatggccagcaacattccgaccagtgacatcggcgtgatcactagcacggaggggaggaagagcatgctgaagctggctgagaggatggtgacgagcttctgcggtggcgtgacggcctcagccgcgcaccagtggacgacgctgtccggcagtggtgctgacgacgtccgtgtcatgaccaggaagagcgtcgacgaccctggcaggccgccgggcatagtcctcaatgctgccacctctttctggctccctatcacacccaagcgtgtcttcgacttcctccgtgacgaaagctctcgcagcgagtgggacatcctctccaatggcggcgtcgttcaagaaatggctcacattgccaatggccgcgaccatggcaactgcgtctcgcttcttcgtgtcaatcagagcaccaactcgacccaaagcaacatgctgatcctgcaagagagctgcacggacgcctcgggctcgtacgtcatctatgcgccggtggacgtggtggccatgaacgtggtcctcaacggcggcgaccccgactacgtggcgctcctgccctctggcttcgccatcctgcccgacggcccgtcaggcagcagcaacatgcaaggcggtggcggtggcggcgtcggctcaggcgggtcgctcctgacggtggcgttccagatcttggtcgactccgtccccaccgccaagctctcgctggggtcggtggcgaccgtgaacagcctcatcgcccgcaccgtggagcgcatcaaggcggcggtctccggcgagagtgttacccagcagtagctagcttagtcgaatcagacactcttcttatccttgcatcattgaaggagcagcaagttttagagctttcatcagtgggaagtcaagaacgcacctcagactctccttgccatgtggtgctcatagttcgagttcttttttcgcctagtttccccaaaatttctgggtagaaatatttcagtcgcgcaacaagaaaatgagtcaccactacgcaagggttgttggttcgggtattgacttcctctacatgtcggcctctcggatgctgctacctctgaatttaggcttctttttcttctcttgtgggatacaaaaaccgtaatttagcatgtaatttgtgctgttgctgcagttgttcagatttatccagcatatatcctggattccccaaattgagatttatttgtgtcccttagttttgtgtctagccaccatctcagacgtgcctgtgtgtctcagttattgccttgtgcttgcatacttgcgttattgctgagtgtcttcactgctattttgcagcttttaaattctcagttagtttactt

SEQ ID NO: 19271 - DNA, 2869 bp, Zea Mays
aaacgcacggaacatatatgcctcaacagccgaacttgatggacaaccagcagctccagttccagcaagcgttgcagcagcagcacctgctgctggaccagatcccggcgacgacggcggagagctgcgacaacacggggcgcggcggtggtggccgggggtccgacccactggccgacgagttcgagagcaagtccggcagcgagaacgtggacggcgtctccgtggacgaccaggacgaccccaaccagcggcccagcaagaagaagcgctaccaccgccacaccctgcatcagatccaggagatggaagctttcttcaaggaatgcccgcacccggacgacaagcagcgcaaggagctgagtcgggagctgggtctggtacccctccaggtcaagttctggttccagaacaagcgcacgcaaatgaagaaccagcacgagcggcaggagaactcgcagctgagggcggagaacgagaagctgcgcgcggagaacatgcggtacaaggaggccctcagcagcgcgtcctgccccaactgcggcgggccggccgcgctcggcgagatgtccttcgacgagcaccacctccgcgtcgagaacgcgcggctccgggaggagatcgacaggatctccgccatcgccgccaagtacgtgggcaagcccatggtgtccttccccgtgctgtccagcccgctcgctggggcgcgtccgtcgccgctggacatcgacagcggtggcgtactggggggtgctgccacttatggcggcgccgctgacatcttcggcggcggcggcggcgtcgctgcttgtggtgcggccagggattgtgacaagcctatgattgtggagctggctgtgacggccatggaggagctggttcggatggcgcagctggacgagccgctgtggaacgcgccggcaggcgggcacgacgggtctgctgagacgctgaacgaggaggagtacgcgcgcatgttcgtccctgctggagggctcgggctaaaaaagcagtacgggttcaagtcggaggcgtcgcgcgacagctccgtcgtcatcatgacccatgccagcctcgtcgagatcctcatggacgtgaatcagtatgcgacggtgttctcgagcatcgtgtcgagagctgcgacgctggaggtgctgtccaccggcgtggctgggaactacaatggcgcattgcaagtgatgtcggttgagtttcaggtgccttccccactggtgccgactagggatagctatttcgtgaggtactgcaagcagaacgcggatggaacatgggccgtcgtcgacgtctcgctggacaccagctcagtcctcaagtgccggcgccggccgtcgggatgcctgatccaggaaatgcccaatggctactcaaaggtgacctgggtggaacacgtcgaggtggatgacaggtcggtaaacggcatctacaaactgctggtggactcagggctcgccttcggtgcacgccgatgggtcggaacgctggaccgccagtgcgagcgccttgccagtgtcatggccagcaacattccgaccagtgacatcggcgtgatcactagcacggaggggaggaagagcatgctgaagctggctgagaggatggtgacgagcttctgcggtggcgtgacggcctcagccgcgcaccagtggacgacgctgtccggcagtggtgctgacgacgtccgtgtcatgaccaggaagagcgtcgacgaccctggcaggccgccgggcatagtcctcaatgctgccacctctttctggctccctatcacacccaagcgtgtcttcgacttcctccgtgacgaaagctctcgcagcgagtgggacatcctctccaatggcggcgtcgttcaagaaatggctcacattgccaatggccgcgaccatggcaactgcgtctcgcttcttcgtgtcaatcagagcaccaactcgacccaaagcaacatgctgatcctgcaagagagctgcacggacgcctcgggctcgtacgtcatctatgcgccggtggacgtggtggccatgaacgtggtcctcaacggcggcgaccccgactacgtggcgctcctgccctctggcttcgccatcctgcccgacggcccgtcaggcagcagcaacatgcaaggcggtggcggtggcggcgtcggctcaggcgggtcgctcctgacggtggcgttccagatcttggtcgactccgtccccaccgccaagctctcgctggggtcggtggcgaccgtgaacagcctcatcgcccgcaccgtggagcgcatcaaggcggcggtctccggcgagagtgttacccagcagtagctagcttagtcgaatcagacactcttcttatccttgcatcattgaaggagcagcaagttttagagctttcatcagtgggaagtcaagaacgcacctcagactctccttgccatgtggtgctcatagttcgagttcttttttcgcctagtttccccaaaatttctgggtagaaatatttcagtcgcgcaacaagaaaatgagtcaccactacgcaagggttgttggttcgggtattgacttcctctacatgtcggcctctcggatgctgctacctctgaatttaggcttctttttcttctcttgtgggatacaaaaaccgtaatttagcatgtaatttgtgctgttgctgcagttgttcagatttatccagcatatatcctggattccccaaattgagatttatttgtgtcccttagttttgtgtctagccaccatctcagacgtgcctgtgtgtctcagttattgccttgtgcttgcatacttgcgttattgctgagtgtcttcactgctattttgcagcttttaaattctcagttagtttactt

SEQ ID NO: 19272 - DNA, 1694 bp, Zea Mays
gttctgaaacatgcatgagatgcatagatgtcggttgagtttcaggtgccttccccactggtgccgactagggatagctatttcgtgaggtactgcaagcagaacgcggatggaacatgggccgtcgtcgacgtctcgctggacaccagctcagtcctcaagtgccggcgccggccgtcgggatgcctgatccaggaaatgcccaatggctactcaaaggtgacctgggtggaacacgtcgaggtggatgacaggtcggtaaacggcatctacaaactgctggtggactcagggctcgccttcggtgcacgccgatgggtcggaacgctggaccgccagtgcgagcgccttgccagtgtcatggccagcaacattccgaccagtgacatcggcgtgatcactagcacggaggggaggaagagcatgctgaagctggctgagaggatggtgacgagcttctgcggtggcgtgacggcctcagccgcgcaccagtggacgacgctgtccggcagtggtgctgacgacgtccgtgtcatgaccaggaagagcgtcgacgaccctggcaggccgccgggcatagtcctcaatgctgccacctctttctggctccctatcacacccaagcgtgtcttcgacttcctccgtgacgaaagctctcgcagcgagtgggacatcctctccaatggcggcgtcgttcaagaaatggctcacattgccaatggccgcgaccatggcaactgcgtctcgcttcttcgtgtcaatagcaccaactcgacccaaagcaacatgctgatcctgcaagagagctgcacggacgcctcgggctcgtacgtcatctatgcgccggtggacgtggtggccatgaacgtggtcctcaacggcggcgaccccgactacgtggcgctcctgccctctggcttcgccatcctgcccgacggcccgtcaggcagcagcaacatgcaaggcggtggcggtggcggcgtcggctcaggcgggtcgctcctgacggtggcgttccagatcttggtcgactccgtccccaccgccaagctctcgctggggtcggtggcgaccgtgaacagcctcatcgcccgcaccgtggagcgcatcaaggcggcggtctccggcgagagtgttacccagcagtagctagcttagtcgaatcagacactcttcttatccttgcatcattgaaggagcagcaagttttagagctttcatcagtgggaagtcaagaacgcacctcagactctccttgccatgtggtgctcatagttcgagttcttttttcgcctagtttccccaaaatttctgggtagaaatatttcagtcgcgcaacaagaaaatgagtcaccactacgcaagggttgttggttcgggtattgacttcctctacatgtcggcctctcggatgctgctacctctgaatttaggcttctttttcttctcttgtgggatacaaaaaccgtaatttagcatgtaatttgtgctgttgctgcagttgttcagatttatccagcatatatcctggattccccaaattgagatttatttgtgtcccttagttttgtgtctagccaccatctcagacgtgcctgtgtgtctcagttattgccttgtgcttgcatacttgcgttattgctgagtgtcttcactgctattttgcagcttttaaattctcagttagtttactt

SEQ ID NO: 19273 - DNA, 1781 bp, Zea Mays
ctgaaacatgcatgagatgcataggtgccttccccactggtgccgactagggatagctatttcgtgaggtactgcaagcagaacgcggatggaacatgggccgtcgtcgacgtctcgctggacaccagctcagtcctcaagtgccggcgccggccgtcgggatgcctgatccaggaaatgcccaatggctactcaaaggtgacctgggtggaacacgtcgaggtggatgacaggtcggtaaacggcatctacaaactgctggtggactcagggctcgccttcggtgcacgccgatgggtcggaacgctggaccgccagtgcgagcgccttgccagtgtcatggccagcaacattccgaccagtgacatcggcgtgatcactagcacggaggggaggaagagcatgctgaagctggctgagaggatggtgacgagcttctgcggtggcgtgacggcctcagccgcgcaccagtggacgacgctgtccggcagtggtgctgacgacgtccgtgtcatgaccaggaagagcgtcgacgaccctggcaggccgccgggcatagtcctcaatgctgccacctctttctggctccctatcacacccaagcgtgtcttcgacttcctccgtgacgaaagctctcgcagcgaggcacgcacccgcgcgcccacccatacccagtttttttttaatcgagaacacgttctacctagctatgaaccgccttttctttttttcttttttctttttttgcagtgggacatcctctccaatggcggcgtcgttcaagaaatggctcacattgccaatggccgcgaccatggcaactgcgtctcgcttcttcgtgtcaatcagagcaccaactcgacccaaagcaacatgctgatcctgcaagagagctgcacggacgcctcgggctcgtacgtcatctatgcgccggtggacgtggtggccatgaacgtggtcctcaacggcggcgaccccgactacgtggcgctcctgccctctggcttcgccatcctgcccgacggcccgtcaggcagcagcaacatgcaaggcggtggcggtggcggcgtcggctcaggcgggtcgctcctgacggtggcgttccagatcttggtcgactccgtccccaccgccaagctctcgctggggtcggtggcgaccgtgaacagcctcatcgcccgcaccgtggagcgcatcaaggcggcggtctccggcgagagtgttacccagcagtagctagcttagtcgaatcagacactcttcttatccttgcatcattgaaggagcagcaagttttagagctttcatcagtgggaagtcaagaacgcacctcagactctccttgccatgtggtgctcatagttcgagttcttttttcgcctagtttccccaaaatttctgggtagaaatatttcagtcgcgcaacaagaaaatgagtcaccactacgcaagggttgttggttcgggtattgacttcctctacatgtcggcctctcggatgctgctacctctgaatttaggcttctttttcttctcttgtgggatacaaaaaccgtaatttagcatgtaatttgtgctgttgctgcagttgttcagatttatccagcatatatcctggattccccaaattgagatttatttgtgtcccttagttttgtgtctagccaccatctcagacgtgcctgtgtgtctcagttattgccttgtgcttgcatacttgcgttattgctgagtgtcttcactgctattttgcagcttttaaattctcagttagtttactt

SEQ ID NO: 19274 - DNA, 703 bp, Zea Mays
ggcaaatgcaccggggcttgcctgagtaacactaggttagtgttgttagacgacgttcacttggcgaacatcttcaggtttgtccatcagcatcatcctgcggattagcccgcgcttggggtcgacttggctcgtcttctgcatcgcgcgattaatttacgtacttgaatgacatgtattatgcacatgaatgcatataaacatgaatattacaaacctaaatagcgctacgcgatagcgaataaaacacctagcagcgaggcgttaaactatcttatatggaaacactagttattaatatacgactacgcgtaataattacgcttctctaaattaaacgaacctaacacaaacatcacaaacaacaaatcatacactttaaacataattagcctaaacacaattcatcagctacttaattaaatgctaaatttatctctcgctttataaattatatcactttgcttaccaagaactaatttaattttatttcgcatcatacatatttatttaatctatcttacaatattattgtttagacattttaaaatactaaatttaaacttccttcactaattttaccgtacgtcatatcattaacatctcaaacctatccaacgcgattactccaaaattatgaaaataatcacatcgcattcatcgaactaattcaataattaaactaacggaaatatgaatcggc

SEQ ID NO: 19275 - DNA, 924 bp, Zea Mays
gacaggcatctacgacatagcggaggaactcgtatgcatcctcctggcgcccccacctgaagtgctcggcaaataggggcatgcagcggataacttttgctggggaatcgagcgccccagcatctgcccgaagcagccgagcaatctggagcaggagccgagctcgacgcagggagttccatggcgagcaggggaagcagagaagggagaaggaaggggagcaagcagcggcgtggctgctggcgctagcaggcagagggcgctcggcgagctgcacgggaggagcacgcagggagcagctgggcgcgagcagaaggagatccggcgagcgcagggcacgccatggagaggagcgaaggagattggggccgtgtgcagcagagaagctccagcagcggccgcgacagagggagatgaagaggtgatgcggctgcttccaggagataaagctggtgcttgaaaaaatctgcgtacggcaaaagggaagggcggctgagcggcgttgggataagggcaggctgagatctttttttattttctttttctttttctttgtttttttgtttatcagaattcgaagatattttggatcgagatttataacgataatcaaagggtcgatagtatttgtgacacggtctgattcgattcaaaacctgttaaattttatctatgatctgagcacctgatcccacagtcatagataatttaccagagaaaatgaggtcgcgtgcacgcgaggaacagggagatgaacgttgtgcggtgtaggccgatgaaaatatcccagagagataagcgccgagaggagataagatcggctggattttttttacggacaagcggtggctgaaaaatcagaggagttgggcggcaacttaattaaagcttcaatcacaaaagattcggatgattagaagttgc

SEQ ID NO: 19276 - DNA, 1729 bp, Zea Mays
gtccaatccgagagtcggcagacgtggggacctgccattggatggcgctggatgcccttcactcccgtcccagattcatcgtcctgcagctcctcttccatctccgatctgctgccataccactaccacaccatggatagccaaactccactgcataacccgctgcgaagaaaccttctaaagtgactaagtgatcgatctccttgtcctgaaaggctgaaacctaaggcgagagaggccacgggagagcgccatggttctcctgctcctgggctgctctcctgcatcgtcgcgcccagactgctctccagcttccaggagaagatgcagcaccgccggacagaaaatggtcaggtgctctctgaatgaagaaacgcagctgaacaaacatggactagtatccaagcagttaatttcatgccttgctgcttcgcttgtgttcgtctctccacctagtcagaaacctttgcccgtccaggcttgtgccagattgcaacagtggcagccattgacagtgcttcagttcctctgaagtttgacaacccttcagatgatgtcagcacagggatgatgatgaggggtatgaccgccaaaaacttcgatccagttcgctactctggtagatggtttgaggtagcctcgttgaaacgtggatttgctggtcagggacaagaagactgtcactgtactcagggagtgtattcttttgatgagaaggcacgctcaatccaggtggatacattctgtgtccacggtggacctgatggatacatcaccggcattcggggcagggtgcaatgcctatctgaagaggacattgcaagtgctgagacagatcttgagaggcaggagatggtccgtgggaaatgctttctccggttccccacactgccattcatacccaaggaaccctatgatgtccttgcaacagactatgacaattatgcaattgtgtctggagctaaggatacaagctttattcagatatactcaagaacacccaaccccgggccagaattcattgacaagtacaagtcttatgttgccaacttcggctatgacccaagcaagatcaaggacactcctcaagactgcgagtacatgtcctcagaccagattgcgctgatgatgtcgatgcccgggatgaatgaggccttgacgaatcagttcccagacctcaagctaaaggcaccggtcgcacttaacccattcacaagcgtgtttgataccctgaagaagttgcttgaactgtacttcaagtaaaaaacagtgtagcattgtccagtagccaatagccaattgcccaacttctcgacttggatcttcaatggaatgaagttcagtttattctgacgtttgctagtcagttagttctttttaagtacattgtttttttgtctattatataagagtgggatatgtaagattaagatctgttcagctgttctcggttactgtttgtacaattgttctttttcctgatgtttttatacaccattgcgattgtctgtccctggtatgccatcgcaaaatcacttactccctctatggcatcgagttacaaaacttaacccttttatattctattttaactcccttattaggagtttggtgatggccgaccttcagtggttcatacagaacagggaacgccaaggctgctggcttcacgccttcgcatgttcatggcagcaatagaagaagggttgggaacttgtttgtgggcaac

SEQ ID NO: 19277 - DNA, 1408 bp, Zea Mays
cctgccattggatggcgctggatgcccttcactcccgtcccagattcatcgtcctgcagctcctcttccatctccgatctgctgccataccactaccacaccatggatagccaaactccactgcataacccgctgcgaagaaaccttctaaagtgactaagtgatcgatctccttgtcctgaaaggctgaaacctaaggcgagagaggccacgggagagcgccatggttctcctgctcctgggctgctctcctgcatcgtcgcgcccagactgctctccagcttccaggagaagatgcagcaccgccggacagaaaatggtcaggtgctctctgaatgaagaaacgcagctgaacaaacatggactagtatccaagcagttaatttcatgccttgctgcttcgcttgtgttcgtctctccacctagtcagaaacctttgcccgtccaggcttgtgccagattgcaacagtggcagccattgacagtgcttcagttcctctgaagtttgacaacccttcagatgatgtcagcacagggatgatgatgaggggtatgaccgccaaaaacttcgatccagttcgctactctggtagatggtttgaggtagcctcgttgaaacgtggatttgctggtcagggacaagaagactgtcactgtactcagatatactcaagaacacccaaccccgggccagaattcattgacaagtacaagtcttatgttgccaacttcggctatgacccaagcaagatcaaggacactcctcaagactgcgagtacatgtcctcagaccagattgcgctgatgatgtcgatgcccgggatgaatgaggccttgacgaatcagttcccagacctcaagctaaaggcaccggtcgcacttaacccattcacaagcgtgtttgataccctgaagaagttgcttgaactgtacttcaagtaaaaaacagtgtagcattgtccagtagccaatagccaattgcccaacttctcgacttggatcttcaatggaatgaagttcagtttattctgacgtttgctagtcagttagttctttttaagtacattgtttttttgtctattatataagagtgggatatgtaagattaagatctgttcagctgttctcggttactgtttgtacaattgttctttttcctgatgtttttatacaccattgcgattgtctgtccctggtatgccatcgcaaaatcacttactccctctatggcatcgagttacaaaacttaacccttttatattctattttaactcccttattaggagtttggtgatggccgaccttcagtggttcatacagaacagggaacgccaaggctgctggcttcacgccttcgcatgttcatggcagcaatagaagaagggttgggaacttgtttgtgggcaac

SEQ ID NO: 19278 - DNA, 1660 bp, Zea Mays
cctgccattggatggcgctggatgcccttcactcccgtcccagattcatcgtcctgcagctcctcttccatctccgatctgctgccataccactaccacaccatggatagccaaactccactgcataacccgctgcgaagaaaccttctaaagtgactaagtgatcgatctccttgtcctgaaaggctgaaacctaaggcgagagaggccacgggagagcgccatggttctcctgctcctgggctgctctcctgcatcgtcgcgcccagactgctctccagcttccaggagaagatgcagcaccgccggacagaaaatggtcaggtgctctctgaatgaagaaacgcagctgaacaaacatggactagtatccaagcagttaatttcatgccttgctgcttcgcttgtgttcgtctctccacctagtcagaaacctttgcccgtccaggcttgtgccagattgcaacagtggcagccattgacagtgcttcagttcctctgaagtttgacaacccttcagatgatgtcagcacagggatgatgatgaggggtatgaccgccaaaaacttcgatccagttcgctactctggtagatggtttgaggtagcctcgttgaaacgtggatttgctggtcagggacaagaagactgtcactgtactcaggtggatacattctgtgtccacggtggacctgatggatacatcaccggcattcggggcagggtgcaatgcctatctgaagaggacattgcaagtgctgagacagatcttgagaggcaggagatggtccgtgggaaatgctttctccggttccccacactgccattcatacccaaggaaccctatgatgtccttgcaacagactatgacaattatgcaattgtgtctggagctaaggatacaagctttattcagatatactcaagaacacccaaccccgggccagaattcattgacaagtacaagtcttatgttgccaacttcggctatgacccaagcaagatcaaggacactcctcaagactgcgagtacatgtcctcagaccagattgcgctgatgatgtcgatgcccgggatgaatgaggccttgacgaatcagttcccagacctcaagctaaaggcaccggtcgcacttaacccattcacaagcgtgtttgataccctgaagaagttgcttgaactgtacttcaagtaaaaaacagtgtagcattgtccagtagccaatagccaattgcccaacttctcgacttggatcttcaatggaatgaagttcagtttattctgacgtttgctagtcagttagttctttttaagtacattgtttttttgtctattatataagagtgggatatgtaagattaagatctgttcagctgttctcggttactgtttgtacaattgttctttttcctgatgtttttatacaccattgcgattgtctgtccctggtatgccatcgcaaaatcacttactccctctatggcatcgagttacaaaacttaacccttttatattctattttaactcccttattaggagtttggtgatggccgaccttcagtggttcatacagaacagggaacgccaaggctgctggcttcacgccttcgcatgttcatggcagcaatagaagaagggttgggaacttgtttgtgggcaac

SEQ ID NO: 19279 - DNA, 1829 bp, Zea Mays
ctgggtcggcggcacacgcgcagccagagccgccctgggctccatcggtaccgtgggcctccgaacacgtggcccacaagcgaagaagcatgggcctctattctgaaggcgacgttccctcgcgttaattgtggtttaggttccgttccccaattttacttgacgctccctcctccctcctccctctctcttgtcttctcccttgcggcgatccggattccgccgcaacggcccctctcgccttctccctcgcggcgctcgatccctccggattggcgcgtggaggggacagtgatcagctggttcaacaaaactagtaaagatggcatcagaagggaacaaagacgtacctcatgaagctttgaccgtggatcactcatcgatttcgggttcaaagcgcaagcgtggccgcccaaggaaatatgagtatcctgtaaatgaactaccacagaaggtacagcccatccagagcgccccacctcttcttcactgcacacaagatggctcaagtctggccagccatgcatctggtggcggtgctcatggtaattggtccgctcaacctaggaattcagctaatgcttctcttcaaggacaatcaggtgctcaaaggttgggttccagatgaaattaatctccgcccaataacacctaaggatgaccttgccccagagctacccatgctgcgaccgagtcaagttcgaaagcgagcatcagcgatccatatgcaacctgctcttcctgtgccaatgcacttggagaatgttacacttgcaaagcctctgcagatgaggagacctgttgagaaaactattgctaagcatgctgtgcctcttgcttctaggccttacattagttctggtgttgttgcagcaatacctatatcggttgctcccatcaatcctgaaatgagaacttcggccaggcaggatgctgaacttgtgatcccacaatcatcagtttctgcagtgccaataaaatttgtttgtcctgcctcggtaccatgcaagcaactggctaatcaaaatgagtttactggaaataagtctgttgatgaggttcagaaagattcggaatctccaaatgtaaccaaggaatcaccagtgaaagctgaaaaaccaaacattgctcttgtggatgtagtggccaaggattctctaggggaagggcaacaacttaatgatcaagtaacggatgtagttagggatttttctggtcaaactcaaaatgttgatgtgacaatgtctgatgagatcaagatagcatcaggtgccagagataagccaaattctgcaaattgtgaacagcagagttctaaggaaccatcagacatcacagaacaatctgagcagctcaagacagagaccgatgtccagaaaggagttgatgcctcagatgacattcatcctgcgcatgatgaacaataaatcaaggttgtcggcttattgggatgtggagctggaattttagcatggaccaatgctttaggtgtataggtgagagattaagtagagttacataaacccaaaaaaaatcacctaggacgtagcagttatagcacagagagaatacttgatggacttctcatttttaggaagatgacccggcttaaagttattttgaactcctggtcttgtaatatgcctttttaatattttaagctctattcacagacatatggaaacatgatgctatacaggaaaacttgcatgttatatgtaatggccctcttgtttgttgttattctcccccaaaaaagtatttttcaacagattttgttcccgtgttttgtacctaaatttaccagccttgcttttcttactcctgaa

SEQ ID NO: 19280 - DNA, 1745 bp, Zea Mays
cccaattttacttgacgctccctcctccctcctccctctctcttgtcttctcccttgcggcgatccggattccgccgcaacggcccctctcgccttctccctcgcggcgctcgatccctccggattggcgcgtggaggggacagtggtttagaggagagaaacaagtgccgattgacaccaatagggtattcttaccattttcagatcagctggttcaacaaaactagtaaagatggcatcagaagggaacaaagacgtacctcatgaagctttgaccgtggatcactcatcgatttcgggttcaaagcgcaagcgtggccgcccaaggaaatatgagtatcctgtaaatgaactaccacagaaggtacagcccatccagagcgccccacctcttcttcactgcacacaagatggctcaagtctggccagccatgcatctggtggcggtgctcatggtaattggtccgctcaacctaggaattcagctaatgcttctcttcaagtgaaggacaatcaggtgctcaaaggttgggttccagatgaaattaatctccgcccaataacacctaaggatgaccttgccccagagctacccatgctgcgaccgagtcaagttcgaaagcgagcatcagcgatccatatgcaacctgctcttcctgtgccaatgcacttggagaatgttacacttgcaaagcctctgcagatgaggagacctgttgagaaaactattgctaagcatgctgtgcctcttgcttctaggccttacattagttctggtgttgttgcagcaatacctatatcggttgctcccatcaatcctgaaatgagaacttcggccaggcaggatgctgaacttgtgatcccacaatcatcagtttctgcagtgccaataaaatttgtttgtcctgcctcggtaccatgcaagcaactggctaatcaaaatgagtttactggaaataagtctgttgatgaggttcagaaagattcggaatctccaaatgtaaccaaggaatcaccagtgaaagctgaaaaaccaaacattgctcttgtggatgtagtggccaaggattctctaggggaagggcaacaacttaatgatcaagtaacggatgtagttagggatttttctggtcaaactcaaaatgttgatgtgacaatgtctgatgagatcaagatagcatcaggtgccagagataagccaaattctgcaaattgtgaacagcagagttctaaggaaccatcagacatcacagaacaatctgagcagctcaagacagagaccgatgtccagaaaggagttgatgcctcagatgacattcatcctgcgcatgatgaacaataaatcaaggttgtcggcttattgggatgtggagctggaattttagcatggaccaatgctttaggtgtataggtgagagattaagtagagttacataaacccaaaaaaaatcacctaggacgtagcagttatagcacagagagaatacttgatggacttctcatttttaggaagatgacccggcttaaagttattttgaactcctggtcttgtaatatgcctttttaatattttaagctctattcacagacatatggaaacatgatgctatacaggaaaacttgcatgttatatgtaatggccctcttgtttgttgttattctcccccaaaaaagtatttttcaacagattttgttcccgtgttttgtacctaaatttaccagccttgcttttcttactcctgaa

SEQ ID NO: 19281 - DNA, 1157 bp, Zea Mays
attttacttgacgctccctcctccctcctccctctctcttgtcttctcccttgcggcgatccggattccgccgcaacggcccctctcgccttctccctcgcggcgctcgatccctccggattggcgcgtggaggggacagtggtttagaggagagaaacaagtgccgattgacaccaatagggtattcttaccattttcagatcagctggttcaacaaaactagtaaagatggcatcagaagggaacaaagacgtacctcatgaagctttgaccgtggatcactcatcgatttcgggttcaaagcgcaagcgtggccgcccaaggaaatatgagtatcctgtaaatgaactaccacagaaggtacagcccatccagagcgccccacctcttcttcactgcacacaagatggctcaagtctggccagccatgcatctggtggcggtgctcatgcaatacctatatcggttgctcccatcaatcctgaaatgagaacttcggccaggcaggatgctgaacttgtgatcccacaatcatcagtttctgcagtgccaataaaatttgtttgtcctgcctcggtaccatgcaagcaactggctaatcaaaatgagtttactggaaataagtctgttgatgaggttcagaaagattcggaatctccaaatgtaaccaaggaatcaccagtgaaagctgaaaaaccaaacattgctcttgtggatgtagtggccaaggattctctaggggaagggcaacaacttaatgatcaagtaacggatgtagttagggatttttctggtcaaactcaaaatgttgatgtgacaatgtctgatgagatcaagatagcatcaggtgccagagataagccaaattctgcaaattgtgaacagcagagttctaaggaaccatcagacatcacagaacaatctgagcagctcaagacagagaccgatgtccagaaaggagttgatgcctcagtcccggaaaagaagactcatctgttccgttatcatggtcaaggaaagccttccaattccaacagaagaggctcatcgccgtttaaaaaattgcaaagctacaagagcctcggtagcattttcagcagttaatcctttattgtctagaagatcctgcatatagtcttgtaaaacaatatttcac

SEQ ID NO: 19282 - DNA, 1757 bp, Zea Mays
cttgacgctccctcctccctcctccctctctcttgtcttctcccttgcggcgatccggattccgccgcaacggcccctctcgccttctccctcgcggcgctcgatccctccggattggcgcgtggaggggacagtgatcagctggttcaacaaaactagtaaagatggcatcagaagggaacaaagacgtacctcatgaagctttgaccgtggatcactcatcgatttcgggttcaaagcgcaagcgtggccgcccaaggaaatatgagtatcctgtaaatgaactaccacagaaggtacagcccatccagagcgccccacctcttcttcactgcacacaagatggctcaagtctggccagccatgcatctggtggcggtgctcatggtaattggtccgctcaacctaggaattcagctaatgcttctcttcaaggtaattctggcaaagatgactttcttggcaagcattttgtgggcaagctgaccaagaaagttcctgggttttcgctcattacggtaaaagtgaaggacaatcaggtgctcaaaggttgggttccagatgaaattaatctccgcccaataacacctaaggatgaccttgccccagagctacccatgctgcgaccgagtcaagttcgaaagcgagcatcagcgatccatatgcaacctgctcttcctgtgccaatgcacttggagaatgttacacttgcaaagcctctgcagatgaggagacctgttgagaaaactattgctaagcatgctgtgcctcttgcttctaggccttacattagttctggtgttgttgcagcaatacctatatcggttgctcccatcaatcctgaaatgagaacttcggccaggcaggatgctgaacttgtgatcccacaatcatcagtttctgcagtgccaataaaatttgtttgtcctgcctcggtaccatgcaagcaactggctaatcaaaatgagtttactggaaataagtctgttgatgaggttcagaaagattcggaatctccaaatgtaaccaaggaatcaccagtgaaagctgaaaaaccaaacattgctcttgtggatgtagtggccaaggattctctaggggaagggcaacaacttaatgatcaagtaacggatgtagttagggatttttctggtcaaactcaaaatgttgatgtgacaatgtctgatgagatcaagatagcatcaggtgccagagataagccaaattctgcaaattgtgaacagcagagttctaaggaaccatcagaacaatctgagcagctcaagacagagaccgatgtccagaaaggagttgatgcctcagatgacattcatcctgcgcatgatgaacaataaatcaaggttgtcggcttattgggatgtggagctggaattttagcatggaccaatgctttaggtgtataggtgagagattaagtagagttacataaacccaaaaaaaatcacctaggacgtagcagttatagcacagagagaatacttgatggacttctcatttttaggaagatgacccggcttaaagttattttgaactcctggtcttgtaatatgcctttttaatattttaagctctattcacagacatatggaaacatgatgctatacaggaaaacttgcatgttatatgtaatggccctcttgtttgttgttattctcccccaaaaaagtatttttcaacagattttgttcccgtgttttgtacctaaatttaccagccttgcttttcttactcctgaa

SEQ ID NO: 19283 - DNA, 1391 bp, Zea Mays
cttgacgctccctcctccctcctccctctctcttgtcttctcccttgcggcgatccggattccgccgcaacggcccctctcgccttctccctcgcggcgctcgatccctccggattggcgcgtggaggggacagtgatcagctggttcaacaaaactagtaaagatggcatcagaagggaacaaagacgtacctcatgaagctttgaccgtggatcactcatcgatttcgggttcaaagcgcaagcgtggccgcccaaggaaatatgagtatcctgtaaatgaactaccacagaaggtacagcccatccagagcgccccacctcttcttcactgcacacaagatggctcaagtctggccagccatgcatctggtggcggtgctcatggtaattggtccgctcaacctaggaattcagctaatgcttctcttcaagcaatacctatatcggttgctcccatcaatcctgaaatgagaacttcggccaggcaggatgctgaacttgtgatcccacaatcatcagtttctgcagtgccaataaaatttgtttgtcctgcctcggtaccatgcaagcaactggctaatcaaaatgagtttactggaaataagtctgttgatgaggttcagaaagattcggaatctccaaatgtaaccaaggaatcaccagtgaaagctgaaaaaccaaacattgctcttgtggatgtagtggccaaggattctctaggggaagggcaacaacttaatgatcaagtaacggatgtagttagggatttttctggtcaaactcaaaatgttgatgtgacaatgtctgatgagatcaagatagcatcaggtgccagagataagccaaattctgcaaattgtgaacagcagagttctaaggaaccatcagacatcacagaacaatctgagcagctcaagacagagaccgatgtccagaaaggagttgatgcctcagatgacattcatcctgcgcatgatgaacaataaatcaaggttgtcggcttattgggatgtggagctggaattttagcatggaccaatgctttaggtgtataggtgagagattaagtagagttacataaacccaaaaaaaatcacctaggacgtagcagttatagcacagagagaatacttgatggacttctcatttttaggaagatgacccggcttaaagttattttgaactcctggtcttgtaatatgcctttttaatattttaagctctattcacagacatatggaaacatgatgctatacaggaaaacttgcatgttatatgtaatggccctcttgtttgttgttattctcccccaaaaaagtatttttcaacagattttgttcccgtgttttgtacctaaatttaccagccttgcttttcttactcctgaa

SEQ ID NO: 19284 - DNA, 1340 bp, Zea Mays
gacgctccctcctccctcctccctctctcttgtcttctcccttgcggcgatccggattccgccgcaacggcccctctcgccttctccctcgcggcgctcgatccctccggattggcgcgtggaggggacagtgatcagctggttcaacaaaactagtaaagatggcatcagaagggaacaaagacgtacctcatgaagctttgaccgtggatcactcatcgatttcgggttcaaagcgcaagcgtggccgcccaaggaaatatgagtatcctgtaaatgaactaccacagaaggtacagcccatccagagcgccccacctcttcttcactgcacacaagatggctcaagtctggccagccatgcatctggtggcggtgctcatgcaatacctatatcggttgctcccatcaatcctgaaatgagaacttcggccaggcaggatgctgaacttgtgatcccacaatcatcagtttctgcagtgccaataaaatttgtttgtcctgcctcggtaccatgcaagcaactggctaatcaaaatgagtttactggaaataagtctgttgatgaggttcagaaagattcggaatctccaaatgtaaccaaggaatcaccagtgaaagctgaaaaaccaaacattgctcttgtggatgtagtggccaaggattctctaggggaagggcaacaacttaatgatcaagtaacggatgtagttagggatttttctggtcaaactcaaaatgttgatgtgacaatgtctgatgagatcaagatagcatcaggtgccagagataagccaaattctgcaaattgtgaacagcagagttctaaggaaccatcagacatcacagaacaatctgagcagctcaagacagagaccgatgtccagaaaggagttgatgcctcagatgacattcatcctgcgcatgatgaacaataaatcaaggttgtcggcttattgggatgtggagctggaattttagcatggaccaatgctttaggtgtataggtgagagattaagtagagttacataaacccaaaaaaaatcacctaggacgtagcagttatagcacagagagaatacttgatggacttctcatttttaggaagatgacccggcttaaagttattttgaactcctggtcttgtaatatgcctttttaatattttaagctctattcacagacatatggaaacatgatgctatacaggaaaacttgcatgttatatgtaatggccctcttgtttgttgttattctcccccaaaaaagtatttttcaacagattttgttcccgtgttttgtacctaaatttaccagccttgcttttcttactcctgaa

SEQ ID NO: 19285 - DNA, 1567 bp, Zea Mays
ctccctcctccctcctccctctctcttgtcttctcccttgcggcgatccggattccgccgcaacggcccctctcgccttctccctcgcggcgctcgatccctccggattggcgcgtggaggggacagtggtttagaggagagaaacaagtgccgattgacaccaatagggtattcttaccattttcagatcagctggttcaacaaaactagtaaagatggcatcagaagggaacaaagacgtacctcatgaagctttgaccgtggatcactcatcgatttcgggttcaaagcgcaagcgtggccgcccaaggaaatatgagtatcctgtaaatgaactaccacagaaggtacagcccatccagagcgccccacctcttcttcactgcacacaagatggctcaagtctggccagccatgcatctggtggcggtgctcatggtaattggtccgctcaacctaggaattcagctaatgcttctcttcaaggtaattctggcaaagatgactttcttggcaagcattttgtgggcaagctgaccaagaaagttcctgggttttcgctcattacggtaaaagtgaaggacaatcaggtgctcaaaggttgggttccagatgaaattaatctccgcccaataacacctaaggatgaccttgccccagagctacccatgctgcgaccgagtcaagttcgaaagcgagcatcagcgatccatatgcaacctgctcttcctgtgccaatgcacttggagaatgttacacttgcaaagcctctgcagatgaggagacctgttgagaaaactattgctaagcatgctgtgcctcttgcttctaggccttacattagttctggtgttgttgcagcaatacctatatcggttgctcccatcaatcctgaaatgagaacttcggccaggcaggatgctgaacttgtgatcccacaatcatcagtttctgcagtgccaataaaatttgtttgtcctgcctcggtaccatgcaagcaactggctaatcaaaatgagtttactggaaataagtctgttgatgaggttcagaaagattcggaatctccaaatgtaaccaaggaatcaccagtgaaagctgaaaaaccaaacattgctcttgtggatgtagtggccaaggattctctaggggaagggcaacaacttaatgatcaagtaacggatgtagttagggatttttctggtcaaactcaaaatgttgatgtgacaatgtctgatgagatcaagatagcatcaggtgccagagataagccaaattctgcaaattgtgaacagcagagttctaaggaaccatcagacatcacagaacaatctgagcagctcaagacagagaccgatgtccagaaaggagttgatgcctcagtcccggaaaagaagactcatctgttccgttatcatggtcaaggaaagccttccaattccaacagaagaggctcatcgccgtttaaaaaattgcaaagctacaagagcctcggtagcattttcagcagttaatcctttattgtctagaagatcctgcatatagtcttgtaaaacaatatttcac

SEQ ID NO: 19286 - DNA, 1687 bp, Zea Mays
ccaaagcaagcccgagaagtcccaaaagtcaagagccagcccaaagttagcgtcgtcgtgtagtcgtctttctcaagagtcaagagcatcatttcacctagtacccagtaaatggaggcgctcgtggtgcggcagctgggcgatcccaccctgccccctggcggtgaagcctccccgttcgccgcggtctctggggatcacccagtgccggagatctcatcgccgacggctgtccgagtgcgagtcgcggcgaccagcctcaacttcgccacgttcctccaggtgcagggcaagtaccaggagcggcccccgcttccgttcgtgcctggatccgactactctggcgtggtcgacgcagtcggtcccggcgtgcgtgggctccggcccggcgaccgcgtctgctcctttaccggcctcggttccttcgctgacttcatcgtcgccgaggagaagcagctatttttggtgcctgatggatgcgacctggtcacagctggggctttaccagttgcatttggtgctacttgttcttggtgctgctggtggtgtcggggcatctgctgtgcaaataggaaaagtttgtggtgctgttgttattgcagttgctaggggggctgagaaatcggattatctcaaatccataggtgccgatcatgtaattgactcaagcaaggataatgttatagaaagtgccagtctttcttaaaggctagaggcttgaaaggtgttgatgttttatatgacccagtcggggggaaattaactcaagatagcctgaaacttctcaattggggagcacaaattcttgtcatcggatttgccagtggtgatgttccagttattcgagcgaatattgctcttgttaagaactggacagttcatggtttgtactggggaagctacttaactcaccggccacaagtactcattgattcgctcaatgaactcttgtcatggctttcaaagggtctgataacagttcaaatttcacactgctacagacttgttgaggtccatcttgctttctctgccctgagagataggaaggcggttggcaaagtgatgattgtaatgggctcctcagctgtaccaaggctctgatatcattcagaaacgtttctctacgagatcataccaaggctctgttatcattcagaaacatttctctacgagatcatgaggcttatactgtgtatctcttttatcatctgagactgaagtagtttccttgtcaataatgtggtgtatgatctacaaaaataatcagagaaataagcagtttatatcgacacagtgccaagcagcatatacaactgatgagaaacagctctaccatgccaatgctgtgagtagtggcatgtacaataaatacaacctgattaaccagcatctagatcgcaaggattggattatggtggcagtgggaagacctcgccgttttttttatgttttacaccattaggtgatcttattccaaatatgttgtgtattaaatataatatgtagctccttagaagcggatgcactcgaccatagcaaagtgtacaacaacgagaaaagagaggcttaggtgttgtttggttcaagaaatgtacaacaacgagaaaagagaggcttaggtgttgtttggttcaagaaatgtaacgcaaatggtaatggtaatggtttacgttcgattactggcggt

SEQ ID NO: 19287 - DNA, 1589 bp, Zea Mays
cccaaagttagcgtcgtcgtgtagtcgtctttctcaagagtcaagagcatcatttcacctagtacccagtaaatggaggcgctcgtggtgcggcagctgggcgatcccaccctgccccctggcggtgaagcctccccgttcgccgcggtctctggggatcacccagtgccggagatctcatcgccgacggctgtccgagtgcgagtcgcggcgaccagcctcaacttcgccacgttcctccaggtgcagggcaagtaccaggagcggcccccgcttccgttcgtgcctggatccgactactctggcgtggtcgacgcagtcggtcccggcgtgcgtgggctccggcccggcgaccgcgtctgctcctttaccggcctcggttccttcgctgacttcatcgtcgccgaggagaagcagctgtgctacttgttcttggtgctgctggtggtgtcggggcatctgctgtgcaaataggaaaagtttgtggtgctgttgttattgcagttgctaggggggctgagaaatcggattatctcaaatccataggtgccgatcatgtaattgactcaagcaaggataatgttatagaaagtgccagtctttcttaaaggctagaggcttgaaaggtgttgatgttttatatgacccagtcggggggaaattaactcaagatagcctgaaacttctcaattggggagcacaaattcttgtcatcggatttgccagtggtgatgttccagttattcgagcgaatattgctcttgttaagaactggacagttcatggtttgtactggggaagctacttaactcaccggccacaagtactcattgattcgctcaatgaactcttgtcatggctttcaaagggtctgataacagttcaaatttcacactgctacagacttgttgaggtccatcttgctttctctgccctgagagataggaaggcggttggcaaagtgatgattgtaatgggctcctcagctgtaccaaggctctgatatcattcagaaacgtttctctacgagatcataccaaggctctgttatcattcagaaacatttctctacgagatcatgaggcttatactgtgtatctcttttatcatctgagactgaagtagtttccttgtcaataatgtggtgtatgatctacaaaaataatcagagaaataagcagtttatatcgacacagtgccaagcagcatatacaactgatgagaaacagctctaccatgccaatgctgtgagtagtggcatgtacaataaatacaacctgattaaccagcatctagatcgcaaggattggattatggtggcagtgggaagacctcgccgttttttttatgttttacaccattaggtgatcttattccaaatatgttgtgtattaaatataatatgtagctccttagaagcggatgcactcgaccatagcaaagtgtacaacaacgagaaaagagaggcttaggtgttgtttggttcaagaaatgtacaacaacgagaaaagagaggcttaggtgttgtttggttcaagaaatgtaacgcaaatggtaatggtaatggtttacgttcgattactggcggt

SEQ ID NO: 19288 - DNA, 1184 bp, Zea Mays
gaggagaagcagctgtgctacttgttcttggtgctgctggtggtgtcggggcatctgctgtgcaaataggaaaagtttgtggtgctgttgttattgcagttgctaggggggctgagaaatcggattatctcaaatccataggtgccgatcatgtaattgactcaagcaaggataatgttatagaaagtgccagtctttcttaaaggctagaggcttgaaaggtgttgatgttttatatgacccagtcggggggaaattaactcaagatagcctgaaacttctcaattggggagcacaaattcttgtcatcggatttgccagtggtgatgttccagttattcgagcgaatattgctcttgttaagaactggacagttcatggtttgtactggggaagctacttaactcaccggccacaagtactcattgattcgctcaatgaactcttgtcatggctttcaaagggtctgataacagttcaaatttcacactgctacagacttgttgaggtccatcttgctttctctgccctgagagataggaaggcggttggcaaagtgatgattgtaatgggctcctcagctgtaccaaggctctgatatcattcagaaacgtttctctacgagatcataccaaggctctgttatcattcagaaacatttctctacgagatcatgaggcttatactgtgtatctcttttatcatctgagactgaagtagtttccttgtcaataatgtggtgtatgatctacaaaaataatcagagaaataagcagtttatatcgacacagtgccaagcagcatatacaactgatgagaaacagctctaccatgccaatgctgtgagtagtggcatgtacaataaatacaacctgattaaccagcatctagatcgcaaggattggattatggtggcagtgggaagacctcgccgttttttttatgttttacaccattaggtgatcttattccaaatatgttgtgtattaaatataatatgtagctccttagaagcggatgcactcgaccatagcaaagtgtacaacaacgagaaaagagaggcttaggtgttgtttggttcaagaaatgtacaacaacgagaaaagagaggcttaggtgttgtttggttcaagaaatgtaacgcaaatggtaatggtaatggtttacgttcgattactggcggt

SEQ ID NO: 19289 - DNA, 717 bp, Zea Mays
ctccatttgaaagaataagtatgagcatattaaagagaaaggtccatcttgctttctctgccctgagagataggaaggcggttggcaaagtgatgattgtaatgggctcctcagctgtaccaaggctctgatatcattcagaaacgtttctctacgagatcataccaaggctctgttatcattcagaaacatttctctacgagatcatgaggcttatactgtgtatctcttttatcatctgagactgaagtagtttccttgtcaataatgtggtgtatgatctacaaaaataatcagagaaataagcagtttatatcgacacagtgccaagcagcatatacaactgatgagaaacagctctaccatgccaatgctgtgagtagtggcatgtacaataaatacaacctgattaaccagcatctagatcgcaaggattggattatggtggcagtgggaagacctcgccgttttttttatgttttacaccattaggtgatcttattccaaatatgttgtgtattaaatataatatgtagctccttagaagcggatgcactcgaccatagcaaagtgtacaacaacgagaaaagagaggcttaggtgttgtttggttcaagaaatgtacaacaacgagaaaagagaggcttaggtgttgtttggttcaagaaatgtaacgcaaatggtaatggtaatggtttacgttcgattactggcggt

SEQ ID NO: 19290 - DNA, 1372 bp, Zea Mays
atggagccccggccgtcagccagccaggtccggcgtccgggtctgcgccctgcggcgtcactgctgtcgccaccgtctccgatggtcccacatccatccagcgggccgcgcgtggtacaaaaggctcttcctcgccgtcagttcattccaaatggctgctgcagcagagcacggcaactgcgatgcttgggcggccagagacccttctggggttctctcaccatacaagtttaaccgcagggcagtgcaaagcagcgacgtttcgctgaagatcatatactgcggggtgtgttacggtgacgttatgtggatacagaacaagcacaacgactcagtttatcctctggttcctgggcatgagatagctggggttgtgactgaggttggcgcagacgtcaaggccttcaaggtgggtgaccacgcaggcgttggaacctacgtgaactcgtgccggcactgcgagaactgcaacagctctctggagaactactgcccagaaacagttttcacttacaacacaactgatgctgatgggaccatcacaaaggggggctactccactcacattgtcgtccatgaaaggtactgcttcaagatacccgatggctaccctctggcgcaggcagcgcctcttctgtgtgctggaatcaccgtctataccccaatggcgcggcacaacatgaagcagcctgggaagtcgctgggagtcattgggctcggtggcctaggccacatggcggtcaaatttggcaaggccttcggcctcaaggtcacggttttcagcacgagcgaatcgaagagggaagaagccattaacctccttggagcagataactttgttatatcgtcagacacgcagcagatggaggccctgaaaaactccctgcacttcatagttgacactgcttctggtgaccatccattcgatccgtatctctcgctccttaaggttggcggtgtgatgacaatagtgtgctttccaagtgagatcaagatgcaccctgcgagcctcaatcgtggtgggcggaccttgtctggtagtattgtcggaggtacaaaagacatccaggagatggttaacttttgcgcggagaacaaaatctatccagagatcgagatcatcaagatggattatatcaacgaggctctcgccaggcttgttaaccgagacgtgaaataccgctttgtcatcgacatcaagaactctttcgagtagcatgctcattcacatgatccctgtcttctttgtcaatgtatgagagataatgagtcgtttcgaataaagcttagacatgataaataacaagtatgcttgtgactgtaaaatcgttctataaataaggcgctgtgttgaacgatagctgacaagttt

SEQ ID NO: 19291 - DNA, 1184 bp, Zea Mays
tgctagaattctttggaatagctgccagtgttgttttccttgccttttacatggcagtgcaaagcagcgacgtttcgctgaagatcatatactgcggggtgtgttacggtgacgttatgtggatacagaacaagcacaacgactcagtttatcctctggttcctgggcatgagatagctggggttgtgactgaggttggcgcagacgtcaaggccttcaaggtgggtgaccacgcaggcgttggaacctacgtgaactcgtgccggcactgcgagaactgcaacagctctctggagaactactgcccagaaacagttttcacttacaacacaactgatgctgatgggaccatcacaaaggggggctactccactcacattgtcgtccatgaaaggtactgcttcaagatacccgatggctaccctctggcgcaggcagcgcctcttctgtgtgctggaatcaccgtctataccccaatggcgcggcacaacatgaagcagcctgggaagtcgctgggagtcattgggctcggtggcctaggccacatggcggtcaaatttggcaaggccttcggcctcaaggtcacggttttcagcacgagcgaatcgaagagggaagaagccattaacctccttggagcagataactttgttatatcgtcagacacgcagcagatggaggccctgaaaaactccctgcacttcatagttgacactgcttctggtgaccatccattcgatccgtatctctcgctccttaaggttggcggtgtgatgacaatagtgtgctttccaagtgagatcaagatgcaccctgcgagcctcaatcgtggtgggcggaccttgtctggtagtattgtcggaggtacaaaagacatccaggagatggttaacttttgcgcggagaacaaaatctatccagagatcgagatcatcaagatggattatatcaacgaggctctcgccaggcttgttaaccgagacgtgaaataccgctttgtcatcgacatcaagaactctttcgagtagcatgctcattcacatgatccctgtcttctttgtcaatgtatgagagataatgagtcgtttcgaataaagcttagacatgataaataacaagtatgcttgtgactgtaaaatcgttctataaataaggcgctgtgttgaacgatagctgacaagttt

SEQ ID NO: 19292 - DNA, 4786 bp, Zea Mays
  misc_feature (4785)..(4786): n is a, c, g, or t
aaaaacttatggcccggcctgccactaaagccccacaaaggaaagcgtcacctgcggcgccgtccgtcgtcttcttcagcgcgcgcccgcgccgccgaaaccgccggcggcctcctaccaggtttcaactgaagcacgcagtccacaccgaagcaacgcttcgctcctcttcgccgtagtctttctcggccctccgctcccatactggttgttctacttattcaacgcgcgcgacatacattggagttgcgatccaaactgctggtgcagttttacttgtcacaacccttggtggttcagcataaactccatgagcgacgacggcatggcctccgctgcggtggagccgcccaagcgggagcaaaattttctagtgaaggtggggatggaggcatggacgcagtcgttcgcggttgcacacaaagtcaggttggtgcacatcctcaagaatctccacacctcggaggtgaaaatctactccgacgcgtccaaggagttcataggagtactggatggtgagtctggcggcgaggtgctgcaggagtacgtgcaacagtcaccgcagcttggggagctgctcgaggcatggcggctccaccgggagaacccggggatggcgcacatacttttgctctttgcagctgtcctgggccaccctgatggtaagctgcggcgacatggttcggttaagaagagcttggacggtgtcgctaggatgatactggaggataaggagaagatgggggatgtgtatttggagctgaatagtggtgagttccgacggcagaatgcagcactggatttgcttgctgcaattgtcaggcgtggagggggtctagcgtctgaggtcgctgagagatttgattttaagatacctattttgccgcagctggctgggacaatgaagaagaaggggagcagggatggaaggaatcggcggaagggtgccgactttgggtccacaaggcggtcgtttattgggtttgccatgtcatttttggaggttgggaatccaaggctgcttagatgggtccttcaacagaaggaggtatattcaggggtgcttcgtgggattggaaatgatgatgctgagactgtcatctatgtcctctcaactttgcgagacaatgtcctggtagatgagtctcttgtcccaccagggctcaggagtgtcctctttggaagtgtcacattggagcagctgagcttgatctcaggaaatcttgaatcaggggaagcagctgacattgctcatgaggtattggtcatggtgtgcactgatccaaaaaatggattgatgccaggatcaaatttgagaggtaatgagaaacgcttactagatctcatgaaaaagttgaaagctactgaggttgttcatcacaaaaaattgttactggccattgtgagtaatagactgtctctttgttcggcgtacatgaatgagtttccttacaatattgaaccacgttcgtctccttcatggttttcagccatctcccttgcagctgatgtcatagcttcagcaaaatgcaatagcattgttcaaactctttcatccagttcacatggtctggtatctgtagatgatgaagaagttcaggtagtcttgaagtgcatggtgcccaatgtatgctctcgagcaatgataaatagggggttgctgcattctgatgatcttgtgaagcatggttctctgaggcttgtttttgaatcagttaacctgctttgttatatcactgaatccatcaattgcatggtatcaaaagggagactgaagtcagaattcattggctcagagaaagtaaccatgaaaatagatggtttcccagtattaagctgttctgatgctacagatgcatccttagttgatgaggttcaccagggagatgaaatgcaggtcaagaggtggacatctctaagagaatacatccaagatgaagttcatggagctatgcctgatcctcaagtctttctcaagttactctcttctaccagccaaaaacatcaaagttattctcagagcatacaaaagaataatgctcaactttctgagcctcctcaaaagaaacgaagatgcagtccttcctgtgaagttgatgatattattattggtggcattgatgttgagcaggataaggacgcatctgaagaacaaggcctggaattaaaaaatgaccgcacaaccaccttgtgtgagatatggagcttagataaacaagatccaaagacgaaagatgcaaatgttgtggaaaatgtcttccactcgaagttgctggatgttctcaggctttatttgggggtgatgcccagctcttttgatggatcatatgacttctttaagattataccacctaacccattggatctgtccatggatgagcaacagtccctgttatcttttttacttgaatattcaggccaatctagaggatgtttggacccagaaagagttccagaatcaatgtacaagtatctgcaacccttggtttatatcatgttgcattcacagattaagaacatccgtgatcaagcatatattttagttaaagctgctatggcaagttcgggtgcttttgatcataacttcacagagattgatgcatggttggttttcttgcctggttatgaggccaaatggtgtgtaagagagaacctaagaattggagcacctaataaattatcacacattgtgatcccttttctgtgtgatgctatttcggtagttggtaataacctgtataaataccaagagcacacacacaagcttatctctaaatcaggccagttggaaggccgttctccagatttcagccctctgattatttgtgttcttcagaaatgccttaggctactcgacacagcatctagaagtacaaagttacacgagaagtctacaatttcattgtatgtgtgcaacacgatccaccttattcttcagtctcaggtactattctaaaagaaagatttgataaattttcatcccaagaactgaactctaggatttatctggctgagtggaggccgttaacaaatatgctgcatttcttgaggaaaatttctgaccagcaaaattatagcctgttcaacacgctggaacattctcctgagtttgatggtaactcgttgtgctctgtatctagacaggttgaagaattgttgaatcaagaacaaactaattcgctggatgatgtagcaaccgcattcttattttcaatcatatgtgcacctccaaaagatgttatcagtgcctttccagatcttcttgatttgatatattcttcagcagcatcagactgttcaaggatgatatcaatgctgaccatgcaaacacagttgaggacgaatgccagaacctctctgtttcaacagaatcagctccgctaagtacatttttaagtgtcagtcccttctgtgcgcttttaccttcagtattgagccttgcatgttcttcgccagatgaaatcatggaagcacataaggatgcacttctaagactccttgaagttaaattgtctgactgcacattcagtgagcttaccttgtatctgagagtcatcttgttctggactcatcacctactgtcatcatatactattaaggattcaaattcagatgatcttgagcaagtatgtcatttgtgctttggtcttcttgatagagtatttgagcgtattcaagttttgactgctgacccttcacagtcaaattctgaatacccgtactatcccgctcaacatatccaagacattgttgattctgttcttcggcatcctgttattaccctgtctttgtcatgctctttatccaattgccaaaatttagcagatgggagtttggaacatctggaagaagctttggctatttttgcgacggaaaatctgcaccttatagaccgtttcgttctaaaccttttgggtaaattgtatgaccttttgctaatgtttggtagctatggtggtaactactctacagataatgggccatcccatgagtcactgtttgctgctccaaatcttctgctggagaacataatattgttgttcaaggagaagtttgagctctgcgtggacaaactaaattttgaattgcttttgccaaatttctacatggttcgcacactgtcaaagttcttttctcctttcaaactcctggagcttgcaaattggatgttctcaaaattggatggtcacaacttcagttcacctgcttttgtttctgctgttttgatgtgcctatacattattgatgtcaccatggaaatgctgtgcttttatctgcaaaaaactgatcagagatcacaatcctatctatttcggcacttggagattcacaattctgatatcaatgccattcagcaagcctatcacatcattcttcattttgctactaaatggaatgttgagtttgctgatcattgcttgctgaagatgctgtgccatattcattacacagaaagatgcgcaggatggaacactgactatattgcattccatatggtattatctacaatggccatcaatactcccattgacattcttcatcactgcattttccccacatctaaggttaaagcaaaagcaatcctgttgcttttggaagcaagtcctatgcatctgaacctttttagccagatattcttggaaattttaaataaagacacttatgttttgcaagtcaaggattctgattccaacaatttgtgggctcaagaagatggtgctatacttctgttgcctgccgctttatcatgcttgaaatttcacagcaatgacaataggcagtgtnn

SEQ ID NO: 19293 - DNA, 4566 bp, Zea Mays
  misc_feature (4565)..(4566): n is a, c, g, or t
gtcgtcttcttcagcgcgcgcccgcgccgccgaaaccgccggcggcctcctaccaggtttcaactgaagcacgcagtccacaccgaagcaacgcttcgctcctcttcgccgtagtctttctcggccctccgctcccatactggttgttctacttattcaacgcgcgcgacatacattggagttgcgatccaaactgctggtgcagttttacttgtcacaacccttggtggttcagcataaactccatgagcgacgacggcatggcctccgctgcggtggagccgcccaagcgggagcaaaattttctagtgaaggtggggatggaggcatggacgcagtcgttcgcggttgcacacaaagtcaggttggtgcacatcctcaagaatctccacacctcggaggtgaaaatctactccgacgcgtccaaggagttcataggagtactggatggtgagtctggcggcgaggtgctgcaggagtacgtgcaacagtcaccgcagcttggggagctgctcgaggcatggcggctccaccgggagaacccggggatggcgcacatacttttgctctttgcagctgtcctgggccaccctgatggtaagctgcggcgacatggttcggttaagaagagcttggacggtgtcgctaggatgatactggaggataaggagaagatgggggatgtgtatttggagctgaatagtggtgagttccgacggcagaatgcagcactggatttgcttgctgcaattgtcaggcgtggagggggtctagcgtctgaggtcgctgagagatttgattttaagatacctattttgccgcagctggctgggacaatgaagaagaaggggagcagggatggaaggaatcggcggaagggtgccgactttgggtccacaaggcggtcgtttattgggtttgccatgtcatttttggaggttgggaatccaaggctgcttagatgggtccttcaacagaaggaggtatattcaggggtgcttcgtgggattggaaatgatgatgctgagactgtcatctatgtcctctcaactttgcgagacaatgtcctggtagatgagtctcttgtcccaccagggctcaggagtgtcctctttggaagtgtcacattggagcagctgagcttgatctcaggaaatcttgaatcaggggaagcagctgacattgctcatgaggtattggtcatggtgtgcactgatccaaaaaatggattgatgccaggatcaaatttgagaggtaatgagaaacgcttactagatctcatgaaaaagttgaaagctactgaggttgttcatcacaaaaaattgttactggccattgtgagtaatagactgtctctttgttcggcgtacatgaatgagtttccttacaatattgaaccacgttcgtctccttcatggttttcagccatctcccttgcagctgatgtcatagcttcagcaaaatgcaatagcattgttcaaactctttcatccagttcacatggtctggtatctgtagatgatgaagaagttcaggtagtcttgaagtgcatggtgcccaatgtatgctctcgagcaatgataaatagggggttgctgcattctgatgatcttgtgaagcatggttctctgaggcttgtttttgaatcagttaacctgctttgttatatcactgaatccatcaattgcatggtatcaaaagggagactgaagtcagaattcattggctcagagaaagtaaccatgaaaatagatggtttcccagtattaagctgttctgatgctacagatgcatccttagttgatgaggttcaccagggagatgaaatgcaggtcaagaggtggacatctctaagagaatacatccaagatgaagttcatggagctatgcctgatcctcaagtctttctcaagttactctcttctaccagccaaaaacatcaaagttattctcagagcatacaaaagaataatgctcaactttctgagcctcctcaaaagaaacgaagatgcagtccttcctgtgaagttgatgatattattattggtggcattgatgttgagcaggataaggacgcatctgaagaacaaggcctggaattaaaaaatgaccgcacaaccaccttgtgtgagatatggagcttagataaacaagatccaaagacgaaagatgcaaatgttgtggaaaatgtcttccactcgaagttgctggatgttctcaggctttatttgggggtgatgcccagctcttttgatggatcatatgacttctttaagattataccacctaacccattggatctgtccatggatgagcaacagtccctgttatcttttttacttgaatattcaggccaatctagaggatgtttggacccagaaagagttccagaatcaatgtacaagtatctgcaacccttggtttatatcatgttgcattcacagattaagaacatccgtgatcaagcatatattttagttaaagctgctatggcaagttcgggtgcttttgatcataacttcacagagattgatgcatggttggttttcttgcctggttatgaggccaaatggtgtgtaagagagaacctaagaattggagcacctaataaattatcacacattgtgatcccttttctgtgtgatgctatttcggtagttggtaataacctgtataaataccaagagcacacacacaagcttatctctaaatcaggccagttggaaggccgttctccagatttcagccctctgattatttgtgttcttcagaaatgccttaggctactcgacacagcatctagaagtacaaagttacacgagaagtctacaatttcattgtatgtgtgcaacacgatccaccttattcttcagtctcaggtactattctaaaagaaagatttgataaattttcatcccaagaactgaactctaggatttatctggctgagtggaggccgttaacaaatatgctgcatttcttgaggaaaatttctgaccagcaaaattatagcctgttcaacacgctggaacattctcctgagtttgatgatatattcttcagcagcatcagactgttcaaggatgatatcaatgctgaccatgcaaacacagttgaggacgaatgccagaacctctctgtttcaacagaatcagctccgctaagtacatttttaagtgtcagtcccttctgtgcgcttttaccttcagtattgagccttgcatgttcttcgccagatgaaatcatggaagcacataaggatgcacttctaagactccttgaagttaaattgtctgactgcacattcagtgagcttaccttgtatctgagagtcatcttgttctggactcatcacctactgtcatcatatactattaaggattcaaattcagatgatcttgagcaagtatgtcatttgtgctttggtcttcttgatagagtatttgagcgtattcaagttttgactgctgacccttcacagtcaaattctgaatacccgtactatcccgctcaacatatccaagacattgttgattctgttcttcggcatcctgttattaccctgtctttgtcatgctctttatccaattgccaaaatttagcagatgggagtttggaacatctggaagaagctttggctatttttgcgacggaaaatctgcaccttatagaccgtttcgttctaaaccttttgggtaaattgtatgaccttttgctaatgtttggtagctatggtggtaactactctacagataatgggccatcccatgagtcactgtttgctgctccaaatcttctgctggagaacataatattgttgttcaaggagaagtttgagctctgcgtggacaaactaaattttgaattgcttttgccaaatttctacatggttcgcacactgtcaaagttcttttctcctttcaaactcctggagcttgcaaattggatgttctcaaaattggatggtcacaacttcagttcacctgcttttgtttctgctgttttgatgtgcctatacattattgatgtcaccatggaaatgctgtgcttttatctgcaaaaaactgatcagagatcacaatcctatctatttcggcacttggagattcacaattctgatatcaatgccattcagcaagcctatcacatcattcttcattttgctactaaatggaatgttgagtttgctgatcattgcttgctgaagatgctgtgccatattcattacacagaaagatgcgcaggatggaacactgactatattgcattccatatggtattatctacaatggccatcaatactcccattgacattcttcatcactgcattttccccacatctaaggttaaagcaaaagcaatcctgttgcttttggaagcaagtcctatgcatctgaacctttttagccagatattcttggaaattttaaataaagacacttatgttttgcaagtcaaggattctgattccaacaatttgtgggctcaagaagatggtgctatacttctgttgcctgccgctttatcatgcttgaaatttcacagcaatgacaataggcagtgtnn

SEQ ID NO: 19294 - DNA, 4759 bp, Zea Mays
  misc_feature (4758)..(4759): n is a, c, g, or t
agcgcgcgcccgcgccgccgaaaccgccggcggcctcctaccaggtttcaactgaagcacgcagtccacaccgaagcaacgcttcgctcctcttcgccgtagtctttctcggccctccgctcccatactggttgttctacttattcaacgcgcgcgacatacattggagttgcgatccaaactgctggtgcagttttacttgtcacaacccttggtggttcagcataaactccatgagcgacgacggcatggcctccgctgcggtggagccgcccaagcgggagcaaaattttctagtgaaggtggggatggaggcatggacgcagtcgttcgcggttgcacacaaagtcaggttggtgcacatcctcaagaatctccacacctcggaggtgaaaatctactccgacgcgtccaaggagttcataggagtactggatggtgagtctggcggcgaggtgctgcaggagtacgtgcaacagtcaccgcagcttggggagctgctcgaggcatggcggctccaccgggagaacccggggatggcgcacatacttttgctctttgcagctgtcctgggccaccctgatggtaagctgcggcgacatggttcggttaagaagagcttggacggtgtcgctaggatgatactggaggataaggagaagatgggggatgtgtatttggagctgaatagtggtgagttccgacggcagaatgcagcactggatttgcttgctgcaattgtcaggcgtggagggggtctagcgtctgaggtcgctgagagatttgattttaagatacctattttgccgcagctggctgggacaatgaagaagaaggggagcagggatggaaggaatcggcggaagggtgccgactttgggtccacaaggcggtcgtttattgggtttgccatgtcatttttggaggttgggaatccaaggctgcttagatgggtccttcaacagaaggaggtatattcaggggtgcttcgtgggattggaaatgatgatgctgagactgtcatctatgtcctctcaactttgcgagacaatgtcctggtagatgagtctcttgtcccaccagggctcaggagtgtcctctttggaagtgtcacattggagcagctgagcttgatctcaggaaatcttgaatcaggggaagcagctgacattgctcatgaggtattggtcatggtgtgcactgatccaaaaaatggattgatgccaggatcaaatttgagaggtaatgagaaacgcttactagatctcatgaaaaagttgaaagctactgaggttgttcatcacaaaaaattgttactggccattgtgagtaatagactgtctctttgttcggcgtacatgaatgagtttccttacaatattgaaccacgttcgtctccttcatggttttcagccatctcccttgcagctgatgtcatagcttcagcaaaatgcaatagcattgttcaaactctttcatccagttcacatggtctggtatctgtagatgatgaagaagttcaggtagtcttgaagtgcatggtgcccaatgtatgctctcgagcaatgataaatagggggttgctgcattctgatgatcttgtgaagcatggttctctgaggcttgtttttgaatcagttaacctgctttgttatatcactgaatccatcaattgcatggtatcaaaagggagactgaagtcagaattcattggctcagagaaagtaaccatgaaaatagatggtttcccagtattaagctgttctgatgctacagatgcatccttagttgatgaggttcaccagggagatgaaatgcaggtcaagaggtggacatctctaagagaatacatccaagatgaagttcatggagctatgcctgatcctcaagtctttctcaagttactctcttctaccagccaaaaacatcaaagttattctcagagcatacaaaagaataatgctcaactttctgagcctcctcaaaagaaacgaagatgcagtccttcctgtgaagttgatgatattattattggtggcattgatgttgagcaggataaggacgcatctgaagaacaaggcctggaattaaaaaatgaccgcacaaccaccttgtgtgagatatggagcttagataaacaagatccaaagacgaaagatgcaaatgttgtggaaaatgtcttccactcgaagttgctggatgttctcaggctttatttgggggtgatgcccagctcttttgatggatcatatgacttctttaagattataccacctaacccattggatctgtccatggatgagcaacagtccctgttatcttttttacttgaatattcaggccaatctagaggatgtttggacccagaaagagttccagaatcaatgtacaagtatctgcaacccttggtttatatcatgttgcattcacagattaagaacatccgtgatcaagcatatattttagttaaagctgctatggcaagttcgggtgcttttgatcataacttcacagagattgatgcatggttggttttcttgcctggttatgaggccaaatggtgtgtaagagagaacctaagaattggagcacctaataaattatcacacattgtgatcccttttctgtgtgatgctatttcggtagttggtaataacctgtataaataccaagagcacacacacaagcttatctctaaatcaggccagttggaagaaatgccttaggctactcgacacagcatctagaagtacaaagttacacgagaagtctacaatttcattgtatgtgtgcaacacgatccaccttattcttcagtctcaggtactattctaaaagaaagatttgataaattttcatcccaagaactgaactctaggatttatctggctgagtggaggccgttaacaaatatgctgcatttcttgaggaaaatttctgaccagcaaaattatagcctgttcaacacgctggaacattctcctgagtttgatggtaactcgttgtgctctgtatctagacaggttgaagaattgttgaatcaagaacaaactaattcgctggatgatgtagcaaccgcattcttattttcaatcatatgtgcacctccaaaagatgttatcagtgcctttccagatcttcttgatttggtgaaagcacattttccatctcatgttgctttcttgtcatcggttctttttctacaacatgattatctggctaaagttgctagttgttggccagatatattcttcagcagcatcagactgttcaaggatgatatcaatgctgaccatgcaaacacagttgaggacgaatgccagaacctctctgtttcaacagaatcagctccgctaagtacatttttaagtgtcagtcccttctgtgcgcttttaccttcagtattgagccttgcatgttcttcgccagatgaaatcatggaagcacataaggatgcacttctaagactccttgaagttaaattgtctgactgcacattcagtgagcttaccttgtatctgagagtcatcttgttctggactcatcacctactgtcatcatatactattaaggattcaaattcagatgatcttgagcaagtatgtcatttgtgctttggtcttcttgatagagtatttgagcgtattcaagttttgactgctgacccttcacagtcaaattctgaatacccgtactatcccgctcaacatatccaagacattgttgattctgttcttcggcatcctgttattaccctgtctttgtcatgctctttatccaattgccaaaatttagcagatgggagtttggaacatctggaagaagctttggctatttttgcgacggaaaatctgcaccttatagaccgtttcgttctaaaccttttgggtaaattgtatgaccttttgctaatgtttggtagctatggtggtaactactctacagataatgggccatcccatgagtcactgtttgctgctccaaatcttctgctggagaacataatattgttgttcaaggagaagtttgagctctgcgtggacaaactaaattttgaattgcttttgccaaatttctacatggttcgcacactgtcaaagttcttttctcctttcaaactcctggagcttgcaaattggatgttctcaaaattggatggtcacaacttcagttcacctgcttttgtttctgctgttttgatgtgcctatacattattgatgtcaccatggaaatgctgtgcttttatctgcaaaaaactgatcagagatcacaatcctatctatttcggcacttggagattcacaattctgatatcaatgccattcagcaagcctatcacatcattcttcattttgctactaaatggaatgttgagtttgctgatcattgcttgctgaagatgctgtgccatattcattacacagaaagatgcgcaggatggaacactgactatattgcattccatatggtattatctacaatggccatcaatactcccattgacattcttcatcactgcattttccccacatctaaggttaaagcaaaagcaatcctgttgcttttggaagcaagtcctatgcatctgaacctttttagccagatattcttggaaattttaaataaagacacttatgttttgcaagtcaaggattctgattccaacaatttgtgggctcaagaagatggtgctatacttctgttgcctgccgctttatcatgcttgaaatttcacagcaatgacaataggcagtgtnn

SEQ ID NO: 19295 - DNA, 4801 bp, Zea Mays
  misc_feature (4800)..(4801): n is a, c, g, or t
cgccggcggcctcctaccaggtttcaactgaagcacgcagtccacaccgaagcaacgcttcgctcctcttcgccgtagtctttctcggccctccgctcccatactggccgctgttttttctttgccaggttgttctacttattcaacgcgcgcgacatacattggagttgcgatccaaactgctggtgcagttttacttgtcacaacccttggtggttcagcataaactccatgagcgacgacggcatggcctccgctgcggtggagccgcccaagcgggagcaaaattttctagtgaaggtggggatggaggcatggacgcagtcgttcgcggttgcacacaaagtcaggttggtgcacatcctcaagaatctccacacctcggaggtgaaaatctactccgacgcgtccaaggagttcataggagtactggatggtgagtctggcggcgaggtgctgcaggagtacgtgcaacagtcaccgcagcttggggagctgctcgaggcatggcggctccaccgggagaacccggggatggcgcacatacttttgctctttgcagctgtcctgggccaccctgatggtaagctgcggcgacatggttcggttaagaagagcttggacggtgtcgctaggatgatactggaggataaggagaagatgggggatgtgtatttggagctgaatagtggtgagttccgacggcagaatgcagcactggatttgcttgctgcaattgtcaggcgtggagggggtctagcgtctgaggtcgctgagagatttgattttaagatacctattttgccgcagctggctgggacaatgaagaagaaggggagcagggatggaaggaatcggcggaagggtgccgactttgggtccacaaggcggtcgtttattgggtttgccatgtcatttttggaggttgggaatccaaggctgcttagatgggtccttcaacagaaggaggtatattcaggggtgcttcgtgggattggaaatgatgatgctgagactgtcatctatgtcctctcaactttgcgagacaatgtcctggtagatgagtctcttgtcccaccagggctcaggagtgtcctctttggaagtgtcacattggagcagctgagcttgatctcaggaaatcttgaatcaggggaagcagctgacattgctcatgaggtattggtcatggtgtgcactgatccaaaaaatggattgatgccaggatcaaatttgagaggtaatgagaaacgcttactagatctcatgaaaaagttgaaagctactgaggttgttcatcacaaaaaattgttactggccattgtgagtaatagactgtctctttgttcggcgtacatgaatgagtttccttacaatattgaaccacgttcgtctccttcatggttttcagccatctcccttgcagctgatgtcatagcttcagcaaaatgcaatagcattgttcaaactctttcatccagttcacatggtctggtatctgtagatgatgaagaagttcaggtagtcttgaagtgcatggtgcccaatgtatgctctcgagcaatgataaatagggggttgctgcattctgatgatcttgtgaagcatggttctctgaggcttgtttttgaatcagttaacctgctttgttatatcactgaatccatcaattgcatggtatcaaaagggagactgaagtcagaattcattggctcagagaaagtaaccatgaaaatagatggtttcccagtattaagctgttctgatgctacagatgcatccttagttgatgaggttcaccagggagatgaaatgcaggtcaagaggtggacatctctaagagaatacatccaagatgaagttcatggagctatgcctgatcctcaagtctttctcaagttactctcttctaccagccaaaaacatcaaagttattctcagagcatacaaaagaataatgctcaactttctgagcctcctcaaaagaaacgaagatgcagtccttcctgtgaagttgatgatattattattggtggcattgatgttgagcaggataaggacgcatctgaagaacaaggcctggaattaaaaaatgaccgcacaaccaccttgtgtgagatatggagcttagataaacaagatccaaagacgaaagatgcaaatgttgtggaaaatgtcttccactcgaagttgctggatgttctcaggctttatttgggggtgatgcccagctcttttgatggatcatatgacttctttaagattataccacctaacccattggatctgtccatggatgagcaacagtccctgttatcttttttacttgaatattcaggccaatctagaggatgtttggacccagaaagagttccagaatcaatgtacaagtatctgcaacccttggtttatatcatgttgcattcacagattaagaacatccgtgatcaagcatatattttagttaaagctgctatggcaagttcgggtgcttttgatcataacttcacagagattgatgcatggttggttttcttgcctggttatgaggccaaatggtgtgtaagagagaacctaagaattggagcacctaataaattatcacacattgtgatcccttttctgtgtgatgctatttcggtagttggtaataacctgtataaataccaagagcacacacacaagcttatctctaaatcaggccagttggaaggccgttctccagatttcagccctctgattatttgtgttcttcagaaatgccttaggctactcgacacagcatctagaagtacaaagttacacgagaagtctacaatttcattgtatgtgtgcaacacgatccaccttattcttcagtctcaggtactattctaaaagaaagatttgataaattttcatcccaagaactgaactctaggatttatctggctgagtggaggccgttaacaaatatgctgcatttcttgaggaaaatttctgaccagcaaaattatagcctgttcaacacgctggaacattctcctgagtttgatggtaactcgttgtgctctgtatctagacaggttgaagaattgttgaatcaagaacaaactaattcgctggatgatgtagcaaccgcattcttattttcaatcatatgtgcacctccaaaagatgttatcagtgcctttccagatcttcttgatttggtgaaagcacattttccatctcatgttgctttcttgtcatcggttctttttctacaacatgattatctggctaaagttgctagttgttggccagatatattcttcagcagcatcagactgttcaaggatgatatcaatgctgaccatgcaaacacagttgaggacgaatgccagaacctctctgtttcaacagaatcagctccgctaagtacatttttaagtgtcagtcccttctgtgcgcttttaccttcagtattgagccttgcatgttcttcgccagatgaaatcatggaagcacataaggatgcacttctaagactccttgaagttaaattgtctgactgcacattcagtgagcttaccttgtatctgagagtcatcttgttctggactcatcacctactgtcatcatatactattaaggattcaaattcagatgatcttgagcaagtatgtcatttgtgctttggtcttcttgatagagtatttgagcgtattcaagttttgactgctgacccttcacagtcaaattctgaatacccgtactatcccgctcaacatatccaagacattgttgattctgttcttcggcatcctgttattaccctgtctttgtcatgctctttatccaattgccaaaatttagcagatgggagtttggaacatctggaagaagctttggctatttttgcgacggaaaatctgcaccttatagaccgtttcgttctaaaccttttgggtaaattgtatgaccttttgctaatgtttggtagctatggtggtaactactctacagataatgggccatcccatgagtcactgtttgctgctccaaatcttctgctggagaacataatattgttgttcaaggagaagtttgagctctgcgtggacaaactaaattttgaattgcttttgccaaatttctacatggttcgcacactgtcaaagttcttttctcctttcaaactcctggagcttgcaaattggatgttctcaaaattggatggtcacaacttcagttcacctgcttttgtttctgctgttttgatgtgcctatacattattgatgtcaccatggaaatgctgtgcttttatctgcaaaaaactgatcagagatcacaatcctatctatttcggcacttggagattcacaattctgatatcaatgccattcagcaagcctatcacatcattcttcattttgctactaaatggaatgttgagtttgctgatcattgcttgctgaagatgctgtgccatattcattacacagaaagatgcgcaggatggaacactgactatattgcattccatatggtattatctacaatggccatcaatactcccattgacattcttcatcactgcattttccccacatctaaggttaaagcaaaagcaatcctgttgcttttggaagcaagtcctatgcatctgaacctttttagccagatattcttggaaattttaaataaagacacttatgttttgcaagtcaaggattctgattccaacaatttgtgggctcaagaagatggtgctatacttctgttgcctgccgctttatcatgcttgaaatttcacagcaatgacaataggcagtgtnn

SEQ ID NO: 19296 - DNA, 4601 bp, Zea Mays
  misc_feature (4600)..(4601): n is a, c, g, or t
cctcctaccaggtttcaactgaagcacgcagtccacaccgaagcaacgcttcgctcctcttcgccgtagtctttctcggccctccgctcccatactggttgttctacttattcaacgcgcgcgacatacattggagttgcgatccaaactgctggtgcagttttacttgtcacaacccttggtggttcagcataaactccatgagcgacgacggcatggcctccgctgcggtggagccgcccaagcgggagcaaaattttctagtgaaggtggggatggaggcatggacgcagtcgttcgcggttgcacacaaagtcaggttggtgcacatcctcaagaatctccacacctcggaggtgaaaatctactccgacgcgtccaaggagttcataggagtactggatggtgagtctggcggcgaggtgctgcaggagtacgtgcaacagtcaccgcagcttggggagctgctcgaggcatggcggctccaccgggagaacccggggatggcgcacatacttttgctctttgcagctgtcctgggccaccctgatggtaagctgcggcgacatggttcggttaagaagagcttggacggtgtcgctaggatgatactggaggataaggagaagatgggggatgtgtatttggagctgaatagtggtgagttccgacggcagaatgcagcactggatttgcttgctgcaattgtcaggcgtggagggggtctagcgtctgaggtcgctgagagatttgattttaagatacctattttgccgcagctggctgggacaatgaagaagaaggggagcagggatggaaggaatcggcggaagggtgccgactttgggtccacaaggcggtcgtttattgggtttgccatgtcatttttggaggttgggaatccaaggctgcttagatgggtccttcaacagaaggaggtatattcaggggtgcttcgtgggattggaaatgatgatgctgagactgtcatctatgtcctctcaactttgcgagacaatgtcctggtagatgagtctcttgtcccaccagggctcaggagtgtcctctttggaagtgtcacattggagcagctgagcttgatctcaggaaatcttgaatcaggggaagcagctgacattgctcatgaggtattggtcatggtgtgcactgatccaaaaaatggattgatgccaggatcaaatttgagaggtaatgagaaacgcttactagatctcatgaaaaagttgaaagctactgaggttgttcatcacaaaaaattgttactggccattgtgagtaatagactgtctctttgttcggcgtacatgaatgagtttccttacaatattgaaccacgttcgtctccttcatggttttcagccatctcccttgcagctgatgtcatagcttcagcaaaatgcaatagcattgttcaaactctttcatccagttcacatggtctggtatctgtagatgatgaagaagttcaggtagtcttgaagtgcatggtgcccaatgtatgctctcgagcaatgataaatagggggttgctgcattctgatgatcttgtgaagcatggttctctgaggcttgtttttgaatcagttaacctgctttgttatatcactgaatccatcaattgcatggtatcaaaagggagactgaagtcagaattcattggctcagagaaagtaaccatgaaaatagatggtttcccagtattaagctgttctgatgctacagatgcatccttagttgatgaggttcaccagggagatgaaatgcaggtcaagaggtggacatctctaagagaatacatccaagatgaagttcatggagctatgcctgatcctcaagtctttctcaagttactctcttctaccagccaaaaacatcaaagttattctcagagcatacaaaagaataatgctcaactttctgagcctcctcaaaagaaacgaagatgcagtccttcctgtgaagttgatgatattattattggtggcattgatgttgagcaggataaggacgcatctgaagaacaaggcctggaattaaaaaatgaccgcacaaccaccttgtgtgagatatggagcttagataaacaagatccaaagacgaaagatgcaaatgttgtggaaaatgtcttccactcgaagttgctggatgttctcaggctttatttgggggtgatgcccagctcttttgatggatcatatgacttctttaagattataccacctaacccattggatctgtccatggatgagcaacagtccctgttatcttttttacttgaatattcaggccaatctagaggatgtttggacccagaaagagttccagaatcaatgtacaagtatctgcaacccttggtttatatcatgttgcattcacagattaagaacatccgtgatcaagcatatattttagttaaagctgctatggcaagttcgggtgcttttgatcataacttcacagagattgatgcatggttggttttcttgcctggttatgaggccaaatggtgtgtaagagagaacctaagaattggagcacctaataaattatcacacattgtgatcccttttctgtgtgatgctatttcggtagttggtaataacctgtataaataccaagagcacacacacaagcttatctctaaatcaggccagttggaaggccgttctccagatttcagccctctgattatttgtgttcttcagaaatgccttaggctactcgacacagcatctagaagtacaaagttacacgagaagtctacaatttcattgtatgtgtgcaacacgatccaccttattcttcagtctcaggtggacatgcatttattgcctgatcttataggttgaagaattgttgaatcaagaacaaactaattcgctggatgatgtagcaaccgcattcttattttcaatcatatgtgcacctccaaaagatgttatcagtgcctttccagatcttcttgatttggtgaaagcacattttccatctcatgttgctttcttgtcatcggttctttttctacaacatgattatctggctaaagttgctagttgttggccagatatattcttcagcagcatcagactgttcaaggatgatatcaatgctgaccatgcaaacacagttgaggacgaatgccagaacctctctgtttcaacagaatcagctccgctaagtacatttttaagtgtcagtcccttctgtgcgcttttaccttcagtattgagccttgcatgttcttcgccagatgaaatcatggaagcacataaggatgcacttctaagactccttgaagttaaattgtctgactgcacattcagtgagcttaccttgtatctgagagtcatcttgttctggactcatcacctactgtcatcatatactattaaggattcaaattcagatgatcttgagcaagtatgtcatttgtgctttggtcttcttgatagagtatttgagcgtattcaagttttgactgctgacccttcacagtcaaattctgaatacccgtactatcccgctcaacatatccaagacattgttgattctgttcttcggcatcctgttattaccctgtctttgtcatgctctttatccaattgccaaaatttagcagatgggagtttggaacatctggaagaagctttggctatttttgcgacggaaaatctgcaccttatagaccgtttcgttctaaaccttttgggtaaattgtatgaccttttgctaatgtttggtagctatggtggtaactactctacagataatgggccatcccatgagtcactgtttgctgctccaaatcttctgctggagaacataatattgttgttcaaggagaagtttgagctctgcgtggacaaactaaattttgaattgcttttgccaaatttctacatggttcgcacactgtcaaagttcttttctcctttcaaactcctggagcttgcaaattggatgttctcaaaattggatggtcacaacttcagttcacctgcttttgtttctgctgttttgatgtgcctatacattattgatgtcaccatggaaatgctgtgcttttatctgcaaaaaactgatcagagatcacaatcctatctatttcggcacttggagattcacaattctgatatcaatgccattcagcaagcctatcacatcattcttcattttgctactaaatggaatgttgagtttgctgatcattgcttgctgaagatgctgtgccatattcattacacagaaagatgcgcaggatggaacactgactatattgcattccatatggtattatctacaatggccatcaatactcccattgacattcttcatcactgcattttccccacatctaaggttaaagcaaaagcaatcctgttgcttttggaagcaagtcctatgcatctgaacctttttagccagatattcttggaaattttaaataaagacacttatgttttgcaagtcaaggattctgattccaacaatttgtgggctcaagaagatggtgctatacttctgttgcctgccgctttatcatgcttgaaatttcacagcaatgacaataggcagtgtnn

SEQ ID NO: 19297 - DNA, 4701 bp, Zea Mays
  misc_feature (4700)..(4701): n is a, c, g, or t
tcaactgaagcacgcagtccacaccgaagcaacgcttcgctcctcttcgccgtagtctttctcggccctccgctcccatactggttgttctacttattcaacgcgcgcgacatacattggagttgcgatccaaactgctggtgcagttttacttgtcacaacccttggtggttcagcataaactccatgagcgacgacggcatggcctccgctgcggtggagccgcccaagcgggagcaaaattttctagtgaaggtggggatggaggcatggacgcagtcgttcgcggttgcacacaaagtcaggttggtgcacatcctcaagaatctccacacctcggaggtgaaaatctactccgacgcgtccaaggagttcataggagtactggatggtgagtctggcggcgaggtgctgcaggagtacgtgcaacagtcaccgcagcttggggagctgctcgaggcatggcggctccaccgggagaacccggggatggcgcacatacttttgctctttgcagctgtcctgggccaccctgatggtaagctgcggcgacatggttcggttaagaagagcttggacggtgtcgctaggatgatactggaggataaggagaagatgggggatgtgtatttggagctgaatagtggtgagttccgacggcagaatgcagcactggatttgcttgctgcaattgtcaggcgtggagggggtctagcgtctgaggtcgctgagagatttgattttaagatacctattttgccgcagctggctgggacaatgaagaagaaggggagcagggatggaaggaatcggcggaagggtgccgactttgggtccacaaggcggtcgtttattgggtttgccatgtcatttttggaggttgggaatccaaggctgcttagatgggtccttcaacagaaggaggtatattcaggggtgcttcgtgggattggaaatgatgatgctgagactgtcatctatgtcctctcaactttgcgagacaatgtcctggtagatgagtctcttgtcccaccagggctcaggagtgtcctctttggaagtgtcacattggagcagctgagcttgatctcaggaaatcttgaatcaggggaagcagctgacattgctcatgaggtattggtcatggtgtgcactgatccaaaaaatggattgatgccaggatcaaatttgagaggtaatgagaaacgcttactagatctcatgaaaaagttgaaagctactgaggttgttcatcacaaaaaattgttactggccattgtgagtaatagactgtctctttgttcggcgtacatgaatgagtttccttacaatattgaaccacgttcgtctccttcatggttttcagccatctcccttgcagctgatgtcatagcttcagcaaaatgcaatagcattgttcaaactctttcatccagttcacatggtctggtatctgtagatgatgaagaagttcaggtagtcttgaagtgcatggtgcccaatgtatgctctcgagcaatgataaatagggggttgctgcattctgatgatcttgtgaagcatggttctctgaggcttgtttttgaatcagttaacctgctttgttatatcactgaatccatcaattgcatggtatcaaaagggagactgaagtcagaattcattggctcagagaaagtaaccatgaaaatagatggtttcccagtattaagctgttctgatgctacagatgcatccttagttgatgaggttcaccagggagatgaaatgcaggtcaagaggtggacatctctaagagaatacatccaagatgaagttcatggagctatgcctgatcctcaagtctttctcaagttactctcttctaccagccaaaaacatcaaagttattctcagagcatacaaaagaataatgctcaactttctgagcctcctcaaaagaaacgaagatgcagtccttcctgtgaagttgatgatattattattggtggcattgatgttgagcaggataaggacgcatctgaagaacaaggcctggaattaaaaaatgaccgcacaaccaccttgtgtgagatatggagcttagataaacaagatccaaagacgaaagatgcaaatgttgtggaaaatgtcttccactcgaagttgctggatgttctcaggctttatttgggggtgatgcccagctcttttgatggatcatatgacttctttaagattataccacctaacccattggatctgtccatggatgagcaacagtccctgttatcttttttacttgaatattcaggccaatctagaggatgtttggacccagaaagagttccagaatcaatgtacaagtatctgcaacccttggtttatatcatgttgcattcacagattaagaacatccgtgatcaagcatatattttagttaaagctgctatggcaagttcgggtgcttttgatcataacttcacagagattgatgcatggttggttttcttgcctggttatgaggccaaatggtgtgtaagagagaacctaagaattggagcacctaataaattatcacacattgtgatcccttttctgtgtgatgctatttcggtagttggtaataacctgtataaataccaagagcacacacacaagcttatctctaaatcaggccagttggaaggctactcgacacagcatctagaagtacaaagttacacgagaagtctacaatttcattgtatgtgtgcaacacgatccaccttattcttcagtctcaggtactattctaaaagaaagatttgataaattttcatcccaagaactgaactctaggatttatctggctgagtggaggccgttaacaaatatgctgcatttcttgaggaaaatttctgaccagcaaaattatagcctgttcaacacgctggaacattctcctgagtttgatggtaactcgttgtgctctgtatctagacaggttgaagaattgttgaatcaagaacaaactaattcgctggatgatgtagcaaccgcattcttattttcaatcatatgtgcacctccaaaagatgttatcagtgcctttccagatcttcttgatttggtgaaagcacattttccatctcatgttgctttcttgtcatcggttctttttctacaacatgattatctggctaaagttgctagttgttggccagatatattcttcagcagcatcagactgttcaaggatgatatcaatgctgaccatgcaaacacagttgaggacgaatgccagaacctctctgtttcaacagaatcagctccgctaagtacatttttaagtgtcagtcccttctgtgcgcttttaccttcagtattgagccttgcatgttcttcgccagatgaaatcatggaagcacataaggatgcacttctaagactccttgaagttaaattgtctgactgcacattcagtgagcttaccttgtatctgagagtcatcttgttctggactcatcacctactgtcatcatatactattaaggattcaaattcagatgatcttgagcaagtatgtcatttgtgctttggtcttcttgatagagtatttgagcgtattcaagttttgactgctgacccttcacagtcaaattctgaatacccgtactatcccgctcaacatatccaagacattgttgattctgttcttcggcatcctgttattaccctgtctttgtcatgctctttatccaattgccaaaatttagcagatgggagtttggaacatctggaagaagctttggctatttttgcgacggaaaatctgcaccttatagaccgtttcgttctaaaccttttgggtaaattgtatgaccttttgctaatgtttggtagctatggtggtaactactctacagataatgggccatcccatgagtcactgtttgctgctccaaatcttctgctggagaacataatattgttgttcaaggagaagtttgagctctgcgtggacaaactaaattttgaattgcttttgccaaatttctacatggttcgcacactgtcaaagttcttttctcctttcaaactcctggagcttgcaaattggatgttctcaaaattggatggtcacaacttcagttcacctgcttttgtttctgctgttttgatgtgcctatacattattgatgtcaccatggaaatgctgtgcttttatctgcaaaaaactgatcagagatcacaatcctatctatttcggcacttggagattcacaattctgatatcaatgccattcagcaagcctatcacatcattcttcattttgctactaaatggaatgttgagtttgctgatcattgcttgctgaagatgctgtgccatattcattacacagaaagatgcgcaggatggaacactgactatattgcattccatatggtattatctacaatggccatcaatactcccattgacattcttcatcactgcattttccccacatctaaggttaaagcaaaagcaatcctgttgcttttggaagcaagtcctatgcatctgaacctttttagccagatattcttggaaattttaaataaagacacttatgttttgcaagtcaaggattctgattccaacaatttgtgggctcaagaagatggtgctatacttctgttgcctgccgctttatcatgcttgaaatttcacagcaatgacaataggcagtgtnn

SEQ ID NO: 19298 - DNA, 4743 bp, Zea Mays
  misc_feature (4742)..(4743): n is a, c, g, or t
tcaactgaagcacgcagtccacaccgaagcaacgcttcgctcctcttcgccgtagtctttctcggccctccgctcccatactggttgttctacttattcaacgcgcgcgacatacattggagttgcgatccaaactgctggtgcagttttacttgtcacaacccttggtggttcagcataaactccatgagcgacgacggcatggcctccgctgcggtggagccgcccaagcgggagcaaaattttctagtgaaggtggggatggaggcatggacgcagtcgttcgcggttgcacacaaagtcaggttggtgcacatcctcaagaatctccacacctcggaggtgaaaatctactccgacgcgtccaaggagttcataggagtactggatggtgagtctggcggcgaggtgctgcaggagtacgtgcaacagtcaccgcagcttggggagctgctcgaggcatggcggctccaccgggagaacccggggatggcgcacatacttttgctctttgcagctgtcctgggccaccctgatggtaagctgcggcgacatggttcggttaagaagagcttggacggtgtcgctaggatgatactggaggataaggagaagatgggggatgtgtatttggagctgaatagtggtgagttccgacggcagaatgcagcactggatttgcttgctgcaattgtcaggcgtggagggggtctagcgtctgaggtcgctgagagatttgattttaagatacctattttgccgcagctggctgggacaatgaagaagaaggggagcagggatggaaggaatcggcggaagggtgccgactttgggtccacaaggcggtcgtttattgggtttgccatgtcatttttggaggttgggaatccaaggctgcttagatgggtccttcaacagaaggaggtatattcaggggtgcttcgtgggattggaaatgatgatgctgagactgtcatctatgtcctctcaactttgcgagacaatgtcctggtagatgagtctcttgtcccaccagggctcaggagtgtcctctttggaagtgtcacattggagcagctgagcttgatctcaggaaatcttgaatcaggggaagcagctgacattgctcatgaggtattggtcatggtgtgcactgatccaaaaaatggattgatgccaggatcaaatttgagaggtaatgagaaacgcttactagatctcatgaaaaagttgaaagctactgaggttgttcatcacaaaaaattgttactggccattgtgagtaatagactgtctctttgttcggcgtacatgaatgagtttccttacaatattgaaccacgttcgtctccttcatggttttcagccatctcccttgcagctgatgtcatagcttcagcaaaatgcaatagcattgttcaaactctttcatccagttcacatggtctggtatctgtagatgatgaagaagttcaggtagtcttgaagtgcatggtgcccaatgtatgctctcgagcaatgataaatagggggttgctgcattctgatgatcttgtgaagcatggttctctgaggcttgtttttgaatcagttaacctgctttgttatatcactgaatccatcaattgcatggtatcaaaagggagactgaagtcagaattcattggctcagagaaagtaaccatgaaaatagatggtttcccagtattaagctgttctgatgctacagatgcatccttagttgatgaggttcaccagggagatgaaatgcaggtcaagaggtggacatctctaagagaatacatccaagatgaagttcatggagctatgcctgatcctcaagtctttctcaagttactctcttctaccagccaaaaacatcaaagttattctcagagcatacaaaagaataatgctcaactttctgagcctcctcaaaagaaacgaagatgcagtccttcctgtgaagttgatgatattattattggtggcattgatgttgagcaggataaggacgcatctgaagaacaaggcctggaattaaaaaatgaccgcacaaccaccttgtgtgagatatggagcttagataaacaagatccaaagacgaaagatgcaaatgttgtggaaaatgtcttccactcgaagttgctggatgttctcaggctttatttgggggtgatgcccagctcttttgatggatcatatgacttctttaagattataccacctaacccattggatctgtccatggatgagcaacagtccctgttatcttttttacttgaatattcaggccaatctagaggatgtttggacccagaaagagttccagaatcaatgtacaagtatctgcaacccttggtttatatcatgttgcattcacagattaagaacatccgtgatcaagcatatattttagttaaagctgctatggcaagttcgggtgcttttgatcataacttcacagagattgatgcatggttggttttcttgcctggttatgaggccaaatggtgtgtaagagagaacctaagaattggagcacctaataaattatcacacattgtgatcccttttctgtgtgatgctatttcggtagttggtaataacctgtataaataccaagagcacacacacaagcttatctctaaatcaggccagttggaagaaatgccttaggctactcgacacagcatctagaagtacaaagttacacgagaagtctacaatttcattgtatgtgtgcaacacgatccaccttattcttcagtctcaggtggacatgcatttattgcctgatcttataggtactattctaaaagaaagatttgataaattttcatcccaagaactgaactctaggatttatctggctgagtggaggccgttaacaaatatgctgcatttcttgaggaaaatttctgaccagcaaaattatagcctgttcaacacgctggaacattctcctgagtttgatggtaactcgttgtgctctgtatctagacaggttgaagaattgttgaatcaagaacaaactaattcgctggatgatgtagcaaccgcattcttattttcaatcatatgtgcacctccaaaagatgttatcagtgcctttccagatcttcttgatttggtgaaagcacattttccatctcatgttgctttcttgtcatcggttctttttctacaacatgattatctggctaaagttgctagttgttggccagatatattcttcagcagcatcagactgttcaaggatgatatcaatgctgaccatgcaaacacagttgaggacgaatgccagaacctctctgtttcaacagaatcagctccgctaagtacatttttaagtgtcagtcccttctgtgcgcttttaccttcagtattgagccttgcatgttcttcgccagatgaaatcatggaagcacataaggatgcacttctaagactccttgaagttaaattgtctgactgcacattcagtgagcttaccttgtatctgagagtcatcttgttctggactcatcacctactgtcatcatatactattaaggattcaaattcagatgatcttgagcaagtatgtcatttgtgctttggtcttcttgatagagtatttgagcgtattcaagttttgactgctgacccttcacagtcaaattctgaatacccgtactatcccgctcaacatatccaagacattgttgattctgttcttcggcatcctgttattaccctgtctttgtcatgctctttatccaattgccaaaatttagcagatgggagtttggaacatctggaagaagctttggctatttttgcgacggaaaatctgcaccttatagaccgtttcgttctaaaccttttgggtaaattgtatgaccttttgctaatgtttggtagctatggtggtaactactctacagataatgggccatcccatgagtcactgtttgctgctccaaatcttctgctggagaacataatattgttgttcaaggagaagtttgagctctgcgtggacaaactaaattttgaattgcttttgccaaatttctacatggttcgcacactgtcaaagttcttttctcctttcaaactcctggagcttgcaaattggatgttctcaaaattggatggtcacaacttcagttcacctgcttttgtttctgctgttttgatgtgcctatacattattgatgtcaccatggaaatgctgtgcttttatctgcaaaaaactgatcagagatcacaatcctatctatttcggcacttggagattcacaattctgatatcaatgccattcagcaagcctatcacatcattcttcattttgctactaaatggaatgttgagtttgctgatcattgcttgctgaagatgctgtgccatattcattacacagaaagatgcgcaggatggaacactgactatattgcattccatatggtattatctacaatggccatcaatactcccattgacattcttcatcactgcattttccccacatctaaggttaaagcaaaagcaatcctgttgcttttggaagcaagtcctatgcatctgaacctttttagccagatattcttggaaattttaaataaagacacttatgttttgcaagtcaaggattctgattccaacaatttgtgggctcaagaagatggtgctatacttctgttgcctgccgctttatcatgcttgaaatttcacagcaatgacaataggcagtgtnn

SEQ ID NO: 19299 - DNA, 3092 bp, Zea Mays
ccttttttatcttgcgattctcaatcccatactcttcacatgggttacattgaacctgctgaatttgcccgactagggcttcttgcaatcacacttgttagtatagcatctcctgataatgaattaaggatgttgggctatgagtgcctaggaacattcaaaaaatcccttgagtatgctcagagaagtaaggaaacctggcagcttcagctgcttctgacataccttcagaatgggatatccgaacagtggcagaagataccttccattattgctgtttttgctgcagaagcatctttgacgctactggatggctcacatgctcaatttactgtcatgagaaattttttaatgcattccacttctgtcaacctgcagagcattccattatttccaaccttattgcagagcagttctgtgcattttaaagccgaacgtctgtggatgcttcggttattatctgctggatcaaatctagctgatgatgctaaaatatacaagagaggaagagtcttagaacttgctcttgccttctgttcttcacccgtttcagattttgaatcaaaggttttagtccttaaggtgctgaagaagtgtgtcaagctgccagttctagctcatcatctagtaaaagagtctggcattctgttgtggttattgtctgttatttcagtccgtagcgaagtgtctgacggttctgaaagctcctgttctagagtaactgagttagcgttggaggtagtcaatggtttgatatcatcaagattgatcacagattggctccaagaaaccgcccttgagcagctctcaacaatatcatcatacctttctgttctaattaacaatgccaaattattgaaaggaaatgttcatttgttgacttcagctctaagtgtgattacatcaacaatgaggttgtctatgaaaaggaagatataccaaccacattttaccttgtccctccatggtgtatttaatctgtgccaaactattggtggtagctcaagaagtacagagcataagcttgtaatggaacttggtatcgatgccattctgatgaatggtcctataccaattttatctgaaatggataagtcaagaatatcaatggttgtttcatgggcaacttcaagcatcttctggttgtactctaaccaaagatcgctgttggaaatatcctgcaaagagccaccaagaaatgagtctctactttcaaagattttgcgcttgttagccgcttctgtaatacttggaaagatatctagcatctttcatggaaagagtgtagatcttgcagggaacaccagtgaaactctttgctctttcttggacaatgcatatgaaagggctgaaacggcaaagagttgcagtgtgaatgatactctagctgtcattatactacaccttcaagaccatatgccaaagaacagtgattccttgccatcagttattgcagccctttgcttgttgcttcttgacagatccatgaacaaacacctggccaacaaccgagggaaaattgaaatgctttgctcaaagataggctgcccggctgaatcaaatcctgcatggagatggcattactatcaaccatggaaggattctgctttgcagcgcacggggatggagcgactggaagaagagcaggcctgccgaagcctcctggtcctattttccagtgccttcagtgcctgcctgtcagagttcccggtgttgtccctagatgatgttgagaagtctggccttttccagtgggaaagagacttaatggctaaacaatcttccacttagcacgctgaagaactaggatgacccacatttgagctgtgtgtacaatcatgctcgtacgattgatcttgtttagaacttggaagaagagaatgcttcgaccctcagctggattggatggatgaacctacggtgctgcacaagccgaaccggccctgcgcccctgcctaacaccaatatgttggacacttccactactgttcttcacttcccatttgtataacgggacctgcattattgtagcatgggtgcagcgtttcctatgtaatttctgtgacattaccaactcacaatattgatttcatctgaaatgtaacatattttttcacagaaatgcttgcagcccatgcggccatgcctgtttgttcagctgctggtgtgatgactgcgatgcaaccgtgctggcggtgtatgtatgcatctggaccttgaagggcagcagcagcctgccgttctcggaagtcggacagtgtgccctccgggagcaagttgagggacagggttgttcttgcccaccgcacgggcgacctgaggacacgtgcggggtgcgggcttccgactctgatggctgcagacctgcagtctacacagccctgcacgatgtcaccgctgcagcctgcagtgcagcttatgaaggattgcaaaaccgtcaaaaaccggcggaagaagaggatgaagacagtgatgataacacaaccgaccctagtgctggtgatgatggcagccatggtgatgctgaattatatggtgcagaagggagtggtacaggagggagtggtgcaggagattggaggtccactggaggaagtcggttcacccattccacacaagattcttaccatgatgcacctcattcacagcgagagacaataagtgatcggcgtcgttcgatttcatttcctgtccaagatggaatctgtagctcaagtagcttcgttcttctaactatccaactggataagacccaatctataacctttatgcatggcaatggcaaccgagtccgcgaacctatggaccccctccaccatcaggcaaagcaccaccatcgatcatgtatggatatggaaactatggacctcctccaccaccatattcaaatttatcaaatatgtacccaccaggaccacaatatgggcatggacaagttcccgctgcaccgacctatcactgtcagtatgacggattggatcaatatcacgacccttccaacatgcctgagtactatcactatgaatcgaactaaacatcggcccgaggtcgaggatagatatgcatgcgtggccgaggaagctgcagtgtag

SEQ ID NO: 19300 - DNA, 3071 bp, Zea Mays
ccttttttatcttgcgattctcaatcccatactcttcacatgggttacattgaacctgctgaatttgcccgactagggcttcttgcaatcacacttgttagtatagcatctcctgataatgaattaaggatgttgggctatgagtgcctaggaacattcaaaaaatcccttgagtatgctcagagaagtaaggaaacctggcagcttcagctgcttctgacataccttcagaatgggatatccgaacagtggcagaagataccttccattattgctgtttttgctgcagaagcatctttgacgctactggatggctcacatgctcaatttactgtcatgagaaattttttaatgcattccacttctgtcaacctgcagagcagttctgtgcattttaaagccgaacgtctgtggatgcttcggttattatctgctggatcaaatctagctgatgatgctaaaatatacaagagaggaagagtcttagaacttgctcttgccttctgttcttcacccgtttcagattttgaatcaaaggttttagtccttaaggtgctgaagaagtgtgtcaagctgccagttctagctcatcatctagtaaaagagtctggcattctgttgtggttattgtctgttatttcagtccgtagcgaagtgtctgacggttctgaaagctcctgttctagagtaactgagttagcgttggaggtagtcaatggtttgatatcatcaagattgatcacagattggctccaagaaaccgcccttgagcagctctcaacaatatcatcatacctttctgttctaattaacaatgccaaattattgaaaggaaatgttcatttgttgacttcagctctaagtgtgattacatcaacaatgaggttgtctatgaaaaggaagatataccaaccacattttaccttgtccctccatggtgtatttaatctgtgccaaactattggtggtagctcaagaagtacagagcataagcttgtaatggaacttggtatcgatgccattctgatgaatggtcctataccaattttatctgaaatggataagtcaagaatatcaatggttgtttcatgggcaacttcaagcatcttctggttgtactctaaccaaagatcgctgttggaaatatcctgcaaagagccaccaagaaatgagtctctactttcaaagattttgcgcttgttagccgcttctgtaatacttggaaagatatctagcatctttcatggaaagagtgtagatcttgcagggaacaccagtgaaactctttgctctttcttggacaatgcatatgaaagggctgaaacggcaaagagttgcagtgtgaatgatactctagctgtcattatactacaccttcaagaccatatgccaaagaacagtgattccttgccatcagttattgcagccctttgcttgttgcttcttgacagatccagtaagcaagtgaacaaacacctggccaacaaccgagggaaaattgaaatgctttgctcaaagataggctgcccggctgaatcaaatcctgcatggagatggcattactatcaaccatggaaggattctgctttgcagcgcacggggatggagcgactggaagaagagcaggcctgccgaagcctcctggtcctattttccagtgccttcagtgcctgcctgtcagagttcccggtgttgtccctagatgatgttgagaagtctggccttttccagtgggaaagagacttaatggctaaacaatcttccacttagcacgctgaagaactaggatgacccacatttgagctgtgtgtacaatcatgctcgtacgattgatcttgtttagaacttggaagaagagaatgcttcgaccctcagctggattggatggatgaacctacggtgctgcacaagccgaaccggccctgcgcccctgcctaacaccaatatgttggacacttccactactgttcttcacttcccatttgtataacgggacctgcattattgtagcatgggtgcagcgtttcctatgtaatttctgtgacattaccaactcacaatattgatttcatctgaaatgtaacatattttttcacagaaatgcttgcagcccatgcggccatgcctgtttgttcagctgctggtgtgatgactgcgatgcaaccgtgctggcggtgtatgtatgcatctggaccttgaagggcagcagcagcctgccgttctcggaagtcggacagtgtgccctccgggagcaagttgagggacagggttgttcttgcccaccgcacgggcgacctgaggacacgtgcggggtgcgggcttccgactctgatggctgcagacctgcagtctacacagccctgcacgatgtcaccgctgcagcctgcagtgcagcttatgaaggattgcaaaaccgtcaaaaaccggcggaagaagaggatgaagacagtgatgataacacaaccgaccctagtgctggtgatgatggcagccatggtgatgctgaattatatggtgcagaagggagtggtacaggagggagtggtgcaggagattggaggtccactggaggaagtcggttcacccattccacacaagattcttaccatgatgcacctcattcacagcgagagacaataagtgatcggcgtcgttcgatttcatttcctgtccaagatggaatctgtagctcaagtagcttcgttcttctaactatccaactggataagacccaatctataacctttatgcatggcaatggcaaccgagtccgcgaacctatggaccccctccaccatcaggcaaagcaccaccatcgatcatgtatggatatggaaactatggacctcctccaccaccatattcaaatttatcaaatatgtacccaccaggaccacaatatgggcatggacaagttcccgctgcaccgacctatcactgtcagtatgacggattggatcaatatcacgacccttccaacatgcctgagtactatcactatgaatcgaactaaacatcggcccgaggtcgaggatagatatgcatgcgtggccgaggaagctgcagtgtag

SEQ ID NO: 19301 - DNA, 3088 bp, Zea Mays
ttttatcttgcgattctcaatcccatactcttcacatgggttacattgaacctgctgaatttgcccgactagggcttcttgcaatcacacttgttagtatagcatctcctgataatgaattaaggatgttgggctatgagtgcctaggaacattcaaaaaatcccttgagtatgctcagagaagtaaggaaacctggcagcttcagctgcttctgacataccttcagaatgggatatccgaacagtggcagaagataccttccattattgctgtttttgctgcagaagcatctttgacgctactggatggctcacatgctcaatttactgtcatgagaaattttttaatgcattccacttctgtcaacctgcagagcattccattatttccaaccttattgcagagcagttctgtgcattttaaagccgaacgtctgtggatgcttcggttattatctgctggatcaaatctagctgatgatgctaaaatatacaagagaggaagagtcttagaacttgctcttgccttctgttcttcacccgtttcagattttgaatcaaaggttttagtccttaagaagtgtgtcaagctgccagttctagctcatcatctagtaaaagagtctggcattctgttgtggttattgtctgttatttcagtccgtagcgaagtgtctgacggttctgaaagctcctgttctagagtaactgagttagcgttggaggtagtcaatggtttgatatcatcaagattgatcacagattggctccaagaaaccgcccttgagcagctctcaacaatatcatcatacctttctgttctaattaacaatgccaaattattgaaaggaaatgttcatttgttgacttcagctctaagtgtgattacatcaacaatgaggttgtctatgaaaaggaagatataccaaccacattttaccttgtccctccatggtgtatttaatctgtgccaaactattggtggtagctcaagaagtacagagcataagcttgtaatggaacttggtatcgatgccattctgatgaatggtcctataccaattttatctgaaatggataagtcaagaatatcaatggttgtttcatgggcaacttcaagcatcttctggttgtactctaaccaaagatcgctgttggaaatatcctgcaaagagccaccaagaaatgagtctctactttcaaagattttgcgcttgttagccgcttctgtaatacttggaaagatatctagcatctttcatggaaagagtgtagatcttgcagggaacaccagtgaaactctttgctctttcttggacaatgcatatgaaagggctgaaacggcaaagagttgcagtgtgaatgatactctagctgtcattatactacaccttcaagaccatatgccaaagaacagtgattccttgccatcagttattgcagccctttgcttgttgcttcttgacagatccagtaagcaagtgaacaaacacctggccaacaaccgagggaaaattgaaatgctttgctcaaagataggctgcccggctgaatcaaatcctgcatggagatggcattactatcaaccatggaaggattctgctttgcagcgcacggggatggagcgactggaagaagagcaggcctgccgaagcctcctggtcctattttccagtgccttcagtgcctgcctgtcagagttcccggtgttgtccctagatgatgttgagaagtctggccttttccagtgggaaagagacttaatggctaaacaatcttccacttagcacgctgaagaactaggatgacccacatttgagctgtgtgtacaatcatgctcgtacgattgatcttgtttagaacttggaagaagagaatgcttcgaccctcagctggattggatggatgaacctacggtgctgcacaagccgaaccggccctgcgcccctgcctaacaccaatatgttggacacttccactactgttcttcacttcccatttgtataacgggacctgcattattgtagcatgggtgcagcgtttcctatgtaatttctgtgacattaccaactcacaatattgatttcatctgaaatgtaacatattttttcacagaaatgcttgcagcccatgcggccatgcctgtttgttcagctgctggtgtgatgactgcgatgcaaccgtgctggcggtgtatgtatgcatctggaccttgaagggcagcagcagcctgccgttctcggaagtcggacagtgtgccctccgggagcaagttgagggacagggttgttcttgcccaccgcacgggcgacctgaggacacgtgcggggtgcgggcttccgactctgatggctgcagacctgcagtctacacagccctgcacgatgtcaccgctgcagcctgcagtgcagcttatgaaggattgcaaaaccgtcaaaaaccggcggaagaagaggatgaagacagtgatgataacacaaccgaccctagtgctggtgatgatggcagccatggtgatgctgaattatatggtgcagaagggagtggtacaggagggagtggtgcaggagattggaggtccactggaggaagtcggttcacccattccacacaagattcttaccatgatgcacctcattcacagcgagagacaataagtgatcggcgtcgttcgatttcatttcctgtccaagatggaatctgtagctcaagtagcttcgttcttctaactatccaactggataagacccaatctataacctttatgcatggcaatggcaaccgagtccgcgaacctatggaccccctccaccatcaggcaaagcaccaccatcgatcatgtatggatatggaaactatggacctcctccaccaccatattcaaatttatcaaatatgtacccaccaggaccacaatatgggcatggacaagttcccgctgcaccgacctatcactgtcagtatgacggattggatcaatatcacgacccttccaacatgcctgagtactatcactatgaatcgaactaaacatcggcccgaggtcgaggatagatatgcatgcgtggccgaggaagctgcagtgtag

SEQ ID NO: 19302 - DNA, 2957 bp, Zea Mays
tgcgattctcaatcccatactcttcacatgggttacattgaacctgctgaatttgcccgactagggcttcttgcaatcacacttgttagtatagcatctcctgataatgaattaaggatgttgggctatgagtgcctaggaacattcaaaaaatcccttgagtatgctcagagaagtaaggaaacctggcagcttcagctgcttctgacataccttcagaatgggatatccgaacagtggcagaagataccttccattattgctgtttttgctgcagaagcatctttgacgctactggatggctcacatgctcaatttactgtcatgagaaattttttaatgcattccacttctgtcaacctgcagagcattccattatttccaaccttattgcagagcagttctgtgcattttaaagccgaacgtctgtggatgcttcggttattatctgctggatcaaatctagctgatgatgctaaaatatacaagagaggaagagtcttagaacttgctcttgccttctgttcttcacccgtttcagattttgaatcaaaggttttagtccttaaggtgctgaagaagtgtgtcaagctgccagttctagctcatcatctagtaaaagagtctggcattctgttgtggttattgtctgttatttcagtccgtagcgaagtgtctgacggttctgaaagctcctgttctagagtaactgagttagcgttggaggtagtcaatggtttgatatcatcaagattgatcacagattggctccaagaaaccgcccttgagcagctctcaacaatatcatcatacctttctgttctaattaacaatgccaaattattgaaaggaaatgttcatttgttgacttcagctctaagtgtgattacatcaacaatgaggttgtctatgaaaaggaagatataccaaccacattttaccttgtccctccatggtgtatttaatctgtgccaaactattggtggtagctcaagaagtacagagcataagcttgtaatggaacttggtatcgatgccattctgatgaatggtcctataccaattttatctgaaatggataagtcaagaatatcaatggttgtttcatgggcaacttcaagcatcttctggttgtactctaaccaaagatcgctgttggaaatatcctgcaaagagccaccaagaaatgaggaacaccagtgaaactctttgctctttcttggacaatgcatatgaaagggctgaaacggcaaagagttgcagtgtgaatgatactctagctgtcattatactacaccttcaagaccatatgccaaagaacagtgattccttgccatcagttattgcagccctttgcttgttgcttcttgacagatccagtaagcaagtgaacaaacacctggccaacaaccgagggaaaattgaaatgctttgctcaaagataggctgcccggctgaatcaaatcctgcatggagatgcgcacggggatggagcgactggaagaagagcaggcctgccgaagcctcctggtcctattttccagtgccttcagtgcctgcctgtcagagttcccggtgttgtccctagatgatgttgagaagtctggccttttccagtgggaaagagacttaatggctaaacaatcttccacttagcacgctgaagaactaggatgacccacatttgagctgtgtgtacaatcatgctcgtacgattgatcttgtttagaacttggaagaagagaatgcttcgaccctcagctggattggatggatgaacctacggtgctgcacaagccgaaccggccctgcgcccctgcctaacaccaatatgttggacacttccactactgttcttcacttcccatttgtataacgggacctgcattattgtagcatgggtgcagcgtttcctatgtaatttctgtgacattaccaactcacaatattgatttcatctgaaatgtaacatattttttcacagaaatgcttgcagcccatgcggccatgcctgtttgttcagctgctggtgtgatgactgcgatgcaaccgtgctggcggtgtatgtatgcatctggaccttgaagggcagcagcagcctgccgttctcggaagtcggacagtgtgccctccgggagcaagttgagggacagggttgttcttgcccaccgcacgggcgacctgaggacacgtgcggggtgcgggcttccgactctgatggctgcagacctgcagtctacacagccctgcacgatgtcaccgctgcagcctgcagtgcagcttatgaaggattgcaaaaccgtcaaaaaccggcggaagaagaggatgaagacagtgatgataacacaaccgaccctagtgctggtgatgatggcagccatggtgatgctgaattatatggtgcagaagggagtggtacaggagggagtggtgcaggagattggaggtccactggaggaagtcggttcacccattccacacaagattcttaccatgatgcacctcattcacagcgagagacaataagtgatcggcgtcgttcgatttcatttcctgtccaagatggaatctgtagctcaagtagcttcgttcttctaactatccaactggataagacccaatctataacctttatgcatggcaatggcaaccgagtccgcgaacctatggaccccctccaccatcaggcaaagcaccaccatcgatcatgtatggatatggaaactatggacctcctccaccaccatattcaaatttatcaaatatgtacccaccaggaccacaatatgggcatggacaagttcccgctgcaccgacctatcactgtcagtatgacggattggatcaatatcacgacccttccaacatgcctgagtactatcactatgaatcgaactaaacatcggcccgaggtcgaggatagatatgcatgcgtggccgaggaagctgcagtgtag

SEQ ID NO: 19303 - DNA, 2994 bp, Zea Mays
tgcgattctcaatcccatactcttcacatgggttacattgaacctgctgaatttgcccgactagggcttcttgcaatcacacttgttagtatagcatctcctgataatgaattaaggatgttgggctatgagtgcctaggaacattcaaaaaatcccttgagtatgctcagagaagtaaggaaacctggcagcttcagctgcttctgacataccttcagaatgggatatccgaacagtggcagaagataccttccattattgctgtttttgctgcagaagcatctttgacgctactggatggctcacatgctcaatttactgtcatgagaaattttttaatgcattccacttctgtcaacctgcagagcattccattatttccaaccttattgcagagcagttctgtgcattttaaagccgaacgtctgtggatgcttcggttattatctgctggatcaaatctagctgatgatgctaaaatatacaagagaggaagagtcttagaacttgctcttgccttctgttcttcacccgtttcagattttgaatcaaaggttttagtccttaaggtgctgaagaagtgtgtcaagctgccagttctagctcatcatctagtaaaagagtctggcattctgttgtggttattgtctgttatttcagtccgtagcgaagtgtctgacggttctgaaagctcctgttctagagtaactgagttagcgttggaggtagtcaatggtttgatatcatcaagattgatcacagattggctccaagaaaccgcccttgagcagctctcaacaatatcatcatacctttctgttctaattaacaatgccaaattattgaaaggaaatgttcatttgttgacttcagctctaagtgtgattacatcaacaatgaggttgtctatgaaaaggaagatataccaaccacattttaccttgtccctccatggtgtatttaatctgtgccaaactattggtggtagctcaagaagtacagagcataagcttgtaatggaacttggtatcgatgccattctgatgaatggtcctataccaattttatctgaaatggataagtcaagaatatcaatggttgtttcatgggcaacttcaagcatcttctggttgtactctaaccaaagatcgctgttggaaatatcctgcaaagagccaccaagaaatgaggaacaccagtgaaactctttgctctttcttggacaatgcatatgaaagggctgaaacggcaaagagttgcagtgtgaatgatactctagctgtcattatactacaccttcaagaccatatgccaaagaacagtgattccttgccatcagttattgcagccctttgcttgttgcttcttgacagatccagtaagcaagtgaacaaacacctggccaacaaccgagggaaaattgaaatgctttgctcaaagataggctgcccggctgaatcaaatcctgcatggagatggcattactatcaaccatggaaggattctgctttgcagcgcacggggatggagcgactggaagaagagcaggcctgccgaagcctcctggtcctattttccagtgccttcagtgcctgcctgtcagagttcccggtgttgtccctagatgatgttgagaagtctggccttttccagtgggaaagagacttaatggctaaacaatcttccacttagcacgctgaagaactaggatgacccacatttgagctgtgtgtacaatcatgctcgtacgattgatcttgtttagaacttggaagaagagaatgcttcgaccctcagctggattggatggatgaacctacggtgctgcacaagccgaaccggccctgcgcccctgcctaacaccaatatgttggacacttccactactgttcttcacttcccatttgtataacgggacctgcattattgtagcatgggtgcagcgtttcctatgtaatttctgtgacattaccaactcacaatattgatttcatctgaaatgtaacatattttttcacagaaatgcttgcagcccatgcggccatgcctgtttgttcagctgctggtgtgatgactgcgatgcaaccgtgctggcggtgtatgtatgcatctggaccttgaagggcagcagcagcctgccgttctcggaagtcggacagtgtgccctccgggagcaagttgagggacagggttgttcttgcccaccgcacgggcgacctgaggacacgtgcggggtgcgggcttccgactctgatggctgcagacctgcagtctacacagccctgcacgatgtcaccgctgcagcctgcagtgcagcttatgaaggattgcaaaaccgtcaaaaaccggcggaagaagaggatgaagacagtgatgataacacaaccgaccctagtgctggtgatgatggcagccatggtgatgctgaattatatggtgcagaagggagtggtacaggagggagtggtgcaggagattggaggtccactggaggaagtcggttcacccattccacacaagattcttaccatgatgcacctcattcacagcgagagacaataagtgatcggcgtcgttcgatttcatttcctgtccaagatggaatctgtagctcaagtagcttcgttcttctaactatccaactggataagacccaatctataacctttatgcatggcaatggcaaccgagtccgcgaacctatggaccccctccaccatcaggcaaagcaccaccatcgatcatgtatggatatggaaactatggacctcctccaccaccatattcaaatttatcaaatatgtacccaccaggaccacaatatgggcatggacaagttcccgctgcaccgacctatcactgtcagtatgacggattggatcaatatcacgacccttccaacatgcctgagtactatcactatgaatcgaactaaacatcggcccgaggtcgaggatagatatgcatgcgtggccgaggaagctgcagtgtag

SEQ ID NO: 19304 - DNA, 3047 bp, Zea Mays
ctcaatcccatactcttcacatgggttacattgaacctgctgaatttgcccgactagggcttcttgcaatcacacttgttagtatagcatctcctgataatgaattaaggatgttgggctatgagtgcctaggaacattcaaaaaatcccttgagtatgctcagagaagtaaggaaacctggcagcttcagctgcttctgacataccttcagaatgggatatccgaacagtggcagaagataccttccattattgctgtttttgctgcagaagcatctttgacgctactggatggctcacatgctcaatttactgtcatgagaaattttttaatgcattccacttctgtcaacctgcagttctgtgcattttaaagccgaacgtctgtggatgcttcggttattatctgctggatcaaatctagctgatgatgctaaaatatacaagagaggaagagtcttagaacttgctcttgccttctgttcttcacccgtttcagattttgaatcaaaggttttagtccttaaggtgctgaagaagtgtgtcaagctgccagttctagctcatcatctagtaaaagagtctggcattctgttgtggttattgtctgttatttcagtccgtagcgaagtgtctgacggttctgaaagctcctgttctagagtaactgagttagcgttggaggtagtcaatggtttgatatcatcaagattgatcacagattggctccaagaaaccgcccttgagcagctctcaacaatatcatcatacctttctgttctaattaacaatgccaaattattgaaaggaaatgttcatttgttgacttcagctctaagtgtgattacatcaacaatgaggttgtctatgaaaaggaagatataccaaccacattttaccttgtccctccatggtgtatttaatctgtgccaaactattggtggtagctcaagaagtacagagcataagcttgtaatggaacttggtatcgatgccattctgatgaatggtcctataccaattttatctgaaatggataagtcaagaatatcaatggttgtttcatgggcaacttcaagcatcttctggttgtactctaaccaaagatcgctgttggaaatatcctgcaaagagccaccaagaaatgagtctctactttcaaagattttgcgcttgttagccgcttctgtaatacttggaaagatatctagcatctttcatggaaagagtgtagatcttgcagggaacaccagtgaaactctttgctctttcttggacaatgcatatgaaagggctgaaacggcaaagagttgcagtgtgaatgatactctagctgtcattatactacaccttcaagaccatatgccaaagaacagtgattccttgccatcagttattgcagccctttgcttgttgcttcttgacagatccagtaagcaagtgaacaaacacctggccaacaaccgagggaaaattgaaatgctttgctcaaagataggctgcccggctgaatcaaatcctgcatggagatggcattactatcaaccatggaaggattctgctttgcagcgcacggggatggagcgactggaagaagagcaggcctgccgaagcctcctggtcctattttccagtgccttcagtgcctgcctgtcagagttcccggtgttgtccctagatgatgttgagaagtctggccttttccagtgggaaagagacttaatggctaaacaatcttccacttagcacgctgaagaactaggatgacccacatttgagctgtgtgtacaatcatgctcgtacgattgatcttgtttagaacttggaagaagagaatgcttcgaccctcagctggattggatggatgaacctacggtgctgcacaagccgaaccggccctgcgcccctgcctaacaccaatatgttggacacttccactactgttcttcacttcccatttgtataacgggacctgcattattgtagcatgggtgcagcgtttcctatgtaatttctgtgacattaccaactcacaatattgatttcatctgaaatgtaacatattttttcacagaaatgcttgcagcccatgcggccatgcctgtttgttcagctgctggtgtgatgactgcgatgcaaccgtgctggcggtgtatgtatgcatctggaccttgaagggcagcagcagcctgccgttctcggaagtcggacagtgtgccctccgggagcaagttgagggacagggttgttcttgcccaccgcacgggcgacctgaggacacgtgcggggtgcgggcttccgactctgatggctgcagacctgcagtctacacagccctgcacgatgtcaccgctgcagcctgcagtgcagcttatgaaggattgcaaaaccgtcaaaaaccggcggaagaagaggatgaagacagtgatgataacacaaccgaccctagtgctggtgatgatggcagccatggtgatgctgaattatatggtgcagaagggagtggtacaggagggagtggtgcaggagattggaggtccactggaggaagtcggttcacccattccacacaagattcttaccatgatgcacctcattcacagcgagagacaataagtgatcggcgtcgttcgatttcatttcctgtccaagatggaatctgtagctcaagtagcttcgttcttctaactatccaactggataagacccaatctataacctttatgcatggcaatggcaaccgagtccgcgaacctatggaccccctccaccatcaggcaaagcaccaccatcgatcatgtatggatatggaaactatggacctcctccaccaccatattcaaatttatcaaatatgtacccaccaggaccacaatatgggcatggacaagttcccgctgcaccgacctatcactgtcagtatgacggattggatcaatatcacgacccttccaacatgcctgagtactatcactatgaatcgaactaaacatcggcccgaggtcgaggatagatatgcatgcgtggccgaggaagctgcagtgtag

SEQ ID NO: 19305 - DNA, 2240 bp, Zea Mays
gtcactcacacatgtgcgcgggcacgggaaaagcacgagtctacttttccctttcgatatgcggccgaggagagcctctctggcgaatggcgagtggcgagcgattcgtctagactctagacaagcccggctgcgcatttcgatgcaaatacgtggaggatggagtaaaatactaagtaagtgagagagaggatagaggaaggagagggtcttttcttttcttgacccaaggtccaaggaggggatcaggggggagtgagcgagggggaggttttgccgccggcaatggagacgaatctccgggctcagagcccgctctgctcccggacccgccccgcactcgccgtgcgcccggacgctgccgccactggcctcacgctgtctgtcataaggcgcagccgatttacgagaggcgggctcgttcgatgcatggtgtcaagttcagattatcataagagtagtccgagaaggacgtcgacttctaagagcaagggtgtcccttccggagggtatgcttcaagacctactgctgaatccagcacgaagaagatagaacagagcagcgacgatgaaggtgattttagcagaaccaatgggtcactctatggtgaggcagcggagcaggcaagtactgcagaagagtcgtctcaggtttactcgacaggagacatttcaagcagcgcagaaaggggcgaagctgggaccgaagaagaggctgaccaaaatcaatcttcagcgttgttttctgtatctgtggatgatgactcaatcgacaggaaacttgatgagtaccgtggtaaaataagtgcactagcaagttcgaaacctaaatcttcatcacttgcaagtgttgctggacaaaacgaaccagttggcgggcaagaggaaccagtaactggttccaaggaacatgacagttcaattgttgatgcgcccataagaggcaggccatttgctgaggctgttgtgggatataaggattttactgaatcagtagcaggaatggcagccagcaagaatgaggaagaacaacttgtctcgttagaagatgtggtggggataagtacagatgcagatatagaagcaccggttgaggatgatgttgatccagaagtgctactgaggaggcttcaagagcttgctgatgagaattatttgattgggaacaactgtttttctttccctgaagtagtgatggctgattcgatgattgatctttacttaaaccgcagcatgtcggccttagctagcgagtccaatgtttttgtaaaaggagcattcaatggttggagatggaacgctttcactgaaacaatgcataaaagtgaattaagaggggattggtggtgctgcaagctctacattcccaagcaggcatacagattagactttgtattctttaatggtgacactgtctatgaaaacaacaatcacaatgattttttcctggaaatagaaagtggcatagatgaacactcatttgaggatttcttggttgaagaaaaacgaaaggaactcgagaggctagctgcagaagaagctgaaaggaaaatacaagctgaggaggagcggaagcgaggggaagaaagggccgcgatggaggctgacagagcacaggcaagatccgaggttgagatgaagaaagagaaattgcgccagttgttgagttcagccagtagatatgctgataacttatggtacatagaaccgaacacctacagaggaggggacagggttagattgtactatcacagaagctcaagaccactaatgcatgacactgagatttggatgcatggaggttacaacaactggattgatggactctcaatagctgaaagacttgtcaaatctcatgaaaaggaaggtgattggtggtatgcagaaggaattatgataacaatggaagacaggatttccatgctatcgttccgaataacatatcggatgatatcttttgggtggaagaagaacataggatctttacaaggcttcaacaagagagaagagaaagggagggcgctgaaagaataaaggctgagagatctgcaaaaatgaaggctgagatgaaggaaaagactatgagagcgtttctgctttcacaaaaacatattgtgtatactgagccgctcgaagtacatgcaggaaccactgtggacattctttataacccttctaacacagtgctgaatggaaagacggaggtttggttcagaggttcctttaaccgttggactcat

SEQ ID NO: 19306 - DNA, 2172 bp, Zea Mays
gtcactcacacatgtgcgcgggcacgggaaaagcacgagtctacttttccctttcgatatgcggccgaggagagcctctctggcgaatggcgagtggcgagcgattcgtctagactctagacaagcccggctgcgcatttcgatgcaaatacgtggaggatggagtaaaatactaagtaagtgagagagaggatagaggaaggagagggtcttttcttttcttgacccaaggtccaaggaggggatcaggggggagtgagcgagggggaggttttgccgccggcaatggagacgaatctccgggctcagagcccgctctgctcccggacccgccccgcactcgccgtgcgcccggacgctgccgccactggcctcacgctgtctgtcataaggcgcagccgatttacgagaggcgggctcgttcgatgcatggtgtcaagttcagattatcataagagtagtccgagaaggacgtcgacttctaagagcaagggtgtcccttccggagggtatgcttcaagacctactgctgaatccagcacgaagaagatagaacagagcagcgacgatgaaggtgattttagcagaaccaatgggtcactctatggtgaggcagcggagcaggcaagtactgcagaagagtcgtctcaggtttactcgacaggagacatttcaagcagcgcagaaaggggcgaagctgggaccgaagaagaggctgaccaaaatcaatcttcagcgttgttttctgtatctgtggatgatgactcaatcgacaggaaacttgatgagtaccgtggtaaaataagtgcactagcaagttcgaaacctaaatcttcatcacttgcaagtgttgctggacaaaacgaaccagttggcgggcaagaggaaccagtaactggttccaaggaacatgacagttcaattgttgatgcgcccataagaggcaggccatttgctgaggctgttgtgggatataaggattttactgaatcagtagcaggaatggcagccagcaagaatgaggaagaacaacttgtctcgttagaagatgtggtggggataagtacagatgcagatatagaagcaccggttgaggatgatgttgatccagaagtgctactgaggaggcttcaagagcttgctgatgagaattatttgattgggaacaactgtttttctttccctgaagtagtgatggctgattcgatgattgatctttacttaaaccgcagcatgtcggccttagctagcgagtccaatgtttttgtaaaaggagcattcaatggttggagatggaacgctttcactgaaacaatgcataaaagtgaattaagaggggattggtggtgctgcaagctctacattcccaagcaggcatacagattagactttgtattctttaatggtgacactgtctatgaaaacaacaatcacaatgattttttcctggaaatagaaagtggcatagatgaacactcatttgaggatttcttggttgaagaaaaacgaaaggaactcgagaggctagctgcagaagaagctgaaaggaaaatacaagctgaggaggagcggaagcgaggggaagaaagggccgcgatggaggctgacagagcacaggcaagatccgaggttgagatgaagaaagagaaattgcgccagttgttgagttcagccagtagatatgctgataacttatggtacatagaaccgaacacctacagaggaggggacagggttagattgtactatcacagaagctcaagaccactaatgcatgacactgagatttggatgcatggaggttacaacaactggattgatggactctcaatagctgaaagacttgtcaaatctcatgaaaaggaaggtgattggtggtatgcagaagttacattacctgaaagggcattgctgtttgattgggtttttgctgatgggccacctgggaatgcaaggaattatgataacaatggaagacaggatttccatgctatcgttccgaataacatatcggatgatatcttttgggtggaagaagaacataggatctttacaaggcttcaacaagagagaagagaaagggagggcgctgaaagaataaaggctgagagatctgcaaaaatgaaggctgagatgaaggaaaagactatgagagcaaaaaaaaaaaaaaaa

SEQ ID NO: 19307 - DNA, 2107 bp, Zea Mays
ctcacacatgtgcgcgggcacgggaaaagcacgagtctacttttccctttcgatatgcggccgaggagagcctctctggcgaatggcgagtggcgagcgattcgtctagactctagacaagcccggctgcgcatttcgatgcaaatacgtggaggatggagtaaaatactaagtaagtgagagagaggatagaggaaggagagggtcttttcttttcttgacccaaggtccaaggaggggatcaggggggagtgagcgagggggaggttttgccgccggcaatggagacgaatctccgggctcagagcccgctctgctcccggacccgccccgcactcgccgtgcgcccggacgctgccgccactggcctcacgctgtctgtcataaggcgcagccgatttacgagaggcgggctcgttcgatgcatggtgtcaagttcagattatcataagagtagtccgagaaggacgtcgacttctaagagcaagggtgtcccttccggagggtatgcttcaagacctactgctgaatccagcacgaagaagatagaacagagcagcgacgatgaaggtgattttagcagaaccaatgggtcactctatggtgaggcagcggagcaggcaagtactgcagaagagtcgtctcaggtttactcgacaggagacatttcaagcagcgcagaaaggggcgaagctgggaccgaagaagaggctgaccaaaatcaatcttcagcgttgttttctgtatctgtggatgatgactcaatcgacaggaaacttgatgagtaccgtggtaaaataagtgcactagcaagttcgaaacctaaatcttcatcacttgcaagtgttgctggacaaaacgaaccagttggcgggcaagaggaaccagtaactggttccaaggaacatgacagttcaattgttgatgcgcccataagaggcaggccatttgctgaggctgttgtgggatataaggattttactgaatcagtagcaggaatggcagccagcaagaatgaggaagaacaacttgtctcgttagaagatgtggtggggataagtacagatgcagatatagaagcaccggttgaggatgatgttgatccagaagtgctactgaggaggcttcaagagcttgctgatgagaattatttgattgggaacaactgtttttctttccctgaagtagtgatggctgattcgatgattgatctttacttaaaccgcagcatgtcggccttagctagcgagtccaatgtttttgtaaaaggagcattcaatggttggagatggaacgctttcactgaaacaatgcataaaagtgaattaagaggggattggtggtgctgcaagctctacattcccaagcaggcatacagattagactttgtattctttaatggtgacactgtctatgaaaacaacaatcacaatgattttttcctggaaatagaaagtggcatagatgaacactcatttgaggatttcttggttgaagaaaaacgaaaggaactcgagaggctagctgcagaagaagctgaaaggaaaatacaagctgaggaggagcggaagcgaggggaagaaagggccgcgatggaggctgacagagcacaggcaagatccgaggttgagatgaagaaagagaaattgcgccagttgttgagttcagccagtagatatgctgataacttatggtacatagaaccgaacacctacagaggaggggacagggttagattgtactatcacagaagctcaagaccactaatgcatgacactgagatttggatgcatggaggttacaacaactggattgatggactctcaatagctgaaagacttgtcaaatctcatgaaaaggaaggtgattggtggtatgcagaagttacattacctgaaagggcattgctgtttgattgggtttttgctgatgggccacctgggaatgcaaggaattatgataacaatggaagacaggatttccatgctatcgttccgaataacatatcggatgatatcttttgggtggaagaagaacataggatctttacaaggcttcaacaagagagaagagaaagggagggcgctgaaagaataaaggctgagaa

SEQ ID NO: 19308 - DNA, 851 bp, Zea Mays
cttagctagcgagtccaatgtttttgtaaaaggagcattcaatggttggagatggaacgctttcactgaaacaatgcataaaagtgaattaagaggggattggtggtgctgcaagctctacattcccaagcaggcatacagattagactttgtattctttaatggtgacactgtctatgaaaacaacaatcacaatgattttttcctggaaatagaaagtggcatagatgaacactcatttgaggatttcttggttgaagaaaaacgaaaggaactcgagaggctagctgcagaagaagctgaaaggaaaatacaagctgaggaggagcggaagcgaggggaagaaagggccgcgatggaggctgacagagcacaggcaagatccgaggttgagatgaagaaagagaaattgcgccagttgttgagttcagccagtagatatgctgataacttatggtacatagaaccgaacacctacagaggaggggacagggttagattgtactatcacagaagctcaagaccactaatgcatgacactgagatttggatgcatggaggttacaacaactggattgatggactctcaatagctgaaagacttgtcaaatctcatgaaaaggaaggtgattggtggtatgcagaaggctgagagatctgcaaaaatgaaggctgagatgaaggaaaagactatgagagcgtttctgctttcacaaaaacatattgtgtatactgagccgctcgaagtacatgcaggaaccactgtggacattctttataacccttctaacacagtgctgaatggaaagacggaggtttggttcagaggttcctttaaccgttggactcat

SEQ ID NO: 19309 - DNA, 842 bp, Zea Mays
gttatgatggactttgtcttctctgagtcagaaggtggaatatatgacaataggaatgggatggactatcatattcctgtgtctgattctgttgcaagggaacctccaatgcatattgtacacattgcagtggaaatggctcctatcgcgaaggtcggaggccttggtgatgttgttacaagcctttcacgagctgttcaagatttaggccataaagttgaggttattctgccgaaatatgattgtttaaaccttaacagtgtgaaggatttacgctaccaacaaagttttacttggggtggcacagagataaaagtatggtttggaaaggttgaagatctccctgtttatttcttggaaccacaaaatgggatgttttgggttggatgtgtctacgggaagaatgatgagagtagatttggcttcttctgtcattctgctctggagtttttgctccaaaaaggatcttctcctgatatcatacattgtcatgattggtcaagtgctcccgttgcttggctgtacaaggaacattatgctcttaatgggatcggaaatggtcggattgtatttaccatccacaatcttgagtttggagcgcatcacattggcaaggcaatggcacattgtgacaaagctacaactgtatccgatacatactcgaaggaagtggccggacatggagctattgcacctcactactataaattccatggaattcgaaatggaattgatcctgatatttgggatccatatactgacaaatttattccgggtccattatacatcagagaatgttgttgagggcaagagtgctgcaaaaaaggcattgcagcagatgc

SEQ ID NO: 19310 - DNA, 1829 bp, Zea Mays
gttatgatggactttgtcttctctgagtcagaaggtggaatatatgacaataggaatgggatggactatcatattcctgtgtctgattctgttgcaagggaacctccaatgcatattgtacacattgcagtggaaatggctcctatcgcgaaggtcggaggccttggtgatgttgttacaagcctttcacgagctgttcaagatttaggccataaagttgaggttattctgccgaaatatgattgtttaaaccttaacagtgtgaaggatttacgctaccaacaaagttttacttggggtggcacagagataaaagtatggtttggaaaggttgaagatctccctgtttatttcttggaaccacaaaatgggatgttttgggttggatgtgtctacgggaagaatgatgagagtagatttggcttcttctgtcattctgctctggagtttttgctccaaaaaggatcttctcctgatatcatacattgtcatgattggtcaagtgctcccgttgcttggctgtacaaggaacattatgctcttaatgggatcggaaatggtcggattgtatttaccatccacaatcttgagtttggagcgcatcacattggcaaggcaatggcacattgtgacaaagctacaactgtatccgatacatactcgaaggaagtggccggacatggagctattgcacctcactactataaattccatggaattcgaaatggaattgatcctgatatttgggatccatatactgacaaatttattccggtccattatacatcagagaatgttgttgagggcaagagtgctgcaaaaaaggcattgcagcagatgcttggattacagcaaactgatacccctgttgttggaatcatcactcgtctaacagttcagaagggaatccaccttatcaaacatgcaatgcatcgagctcttgaacgcaatggacaggtggttttactgggttctgcaccagatcctcgcatacaaagtgactttacaaatttggccagtaagctgcatggtgaataccatggccgagtgaagctatgtctaacctatgacgagccactgtcacatttgatatatgctggcgcagacttcattctcgttccttccatcttcgaaccttgtggtctaacacagcttattgctatgcgctatggatccatcccagttgttcggaaaactggaggcctgtacgacaccgtttttgatgtcgacaatgataaggatcgggctcaagcacaaggtctcgagccaaatggattcagtttcgaaggagctgatagcagtggtgtggattatgctctcgacagagccataaccacattttatgatgcacgcgactggttcaattccctttgcaagagggtaatggagcaagattggtcatggaacagacctgccctagactacatggagttgtaccattctgctcgcaaaagctgatagcttttaccactagggaaatcaggctcgttttgcccaggttagaagcatctcagcctcaggccttgtgcaaattcatttgtgcactgggaagaaaagagtaccgactggccttgagcatgcccgccgtctaaggatgcaacacacaccgtgtatagttagagaatgctactcgtcgtacgtttcatgcatgtgttttgtgtatacacctcatgtagcttgcaaaacaacagtacgacgtatcccggccgtctaccatgcctgagggcgtatataggctataggcttatgcaaagcatgtaccattaattaattattacatagtctttttatgtcaaagtagtggaggcaaccatgatcttccttcaccg

SEQ ID NO: 19311 - DNA, 1993 bp, Zea Mays
gttatgatggactttgtcttctctgagtcagaaggtggaatatatgacaataggaatgggatggactatcatattcctgtgtctgattctgttgcaagggaacctccaatgcatattgtacacattgcagtggaaatggctcctatcgcgaaggtcggaggccttggtgatgttgttacaagcctttcacgagctgttcaagatttaggccataaagttgaggttattctgccgaaatatgattgtttaaaccttaacagtgtgaaggatttacgctaccaacaaagttttacttggggtggcacagagataaaagtatggtttggaaaggttgaagatctccctgtttatttcttggaaccacaaaatgggatgttttgggttggatgtgtctacgggaagaatgatgagagtagatttggcttcttctgtcattctgctctggagtttttgctccaaaaaggatcttctcctgatatcatacattgtcatgattggtcaagtgctcccgttgcttggctgtacaaggaacattatgctcttaatgggatcggaaatggtcggattgtatttaccatccacaatcttgagtttggagcgcatcacattggcaaggcaatggcacattgtgacaaagctacaactgtatccgatacatactcgaaggaagtggccggacatggagctattgcacctcactactataaattccatggaattcgaaatggaattgatcctgatatttgggatccatatactgacaaatttattccggtccattatacatcagagaatgttgttgagggcaagagtgctgcaaaaaaggcattgcagcagatgcttggattacagcaaactgatacccctgttgttggaatcatcactcgtctaacagttcagaagggaatccaccttatcaaacatgcaatgcatcgagctcttgaacgcaatggacaggtggttttactgggttctgcaccagatcctcgcatacaaagtgactttacaaatttggccagtaagctgcatggtgaataccatggccgagtgaagctatgtctaacctatgacgagccactgtcacatttgatatatgctggcgcagacttcattctcgttccttccatcttcgaaccttgtggtctaacacagcttattgctatgcgctatggatccatcccagttgttcggaaaactggaggcctgtacgacaccgtttttgatgtcgacaatgataaggatcgggctcaagcacaaggtctcgagccaaatggattcagtttcgaaggagctgatagcagtggtgtggattatgctctcgacagagccataaccacattttatgatgcacgcgactggttcaattccctttgcaagagggtaatggagcaagattggtcatggaacagacctgccctagactacatggagttgtaccattctgctcgcaaaagctgatagcttttaccactagggaaatcaggctcgttttgcccagggttggcatgctatgtggtattttgaggaagaaaatcagggggtttaatttgattgggccacttgtaatgaccaagtttgtgagtacagtcatgcctcttacctaaaatatggtagtatgcatgaagcaaacaatgcattcaattcatatatgcatagtcaaggtgaagaagttggaaaaacagttctataagcatgttgctgcacccattagtaatcaagacaagtatggtttgtgtagttggaaggatgtagttatcattgtttagagtattgtaattcttgtgctcctttatttactgatgtaacaaagtcctcattgttcatgtccctattgaattaagtgatggggtatgaacacttatgtgaggactattaactagtaatgagtactttttgttgcagaacaataatgtctttgttatgaacaattatgtgaggactattgaattgactgagttttcactatttgaggaaacaaccatggttggtaaac

SEQ ID NO: 19312 - DNA, 1829 bp, Zea Mays
ataaagttgaggttattctgccgaaatatgattgtttaaaccttaacagtcgtctttttcacttcaatgaagttgagttcatttagttttaaaagcacatgaatttatggagggagaatattcttaatgtgtgctctttcatatttaatctgcagtacctttttatgttatttgtggagagtttcatgtgtatggatggatgaccaatggtagttggtggataccaattttcttcattatgttggcgtccttcggttgcaggtgaaggatttacgctaccaacaaagttttacttggggtggcacagagataaaagtatggtttggaaaggttgaagatctccctgtttatttcttggaaccacaaaatgggatgttttgggttggatgtgtctacgggaagaatgatgagagtagatttggcttcttctgtcattctgctctggagtttttgctccaaaaaggatcttctcctgatatcatacattgtcatgattggtcaagtgctcccgttgcttggctgtacaaggaacattatgctcttaatgggatcggaaatggtcggattgtatttaccatccacaatcttgagtttggagcgcatcacattggcaaggcaatggcacattgtgacaaagctacaactgtatccgatacatactcgaaggaagtggccggacatggagctattgcacctcactactataaattccatggaattcgaaatggaattgatcctgatatttgggatccatatactgacaaatttattccggtccattatacatcagagaatgttgttgagggcaagagtgctgcaaaaaaggcattgcagcagatgcttggattacagcaaactgatacccctgttgttggaatcatcactcgtctaacagttcagaagggaatccaccttatcaaacatgcaatgcatcgagctcttgaacgcaatggacaggtggttttactgggttctgcaccagatcctcgcatacaaagtgactttacaaatttggccagtaagctgcatggtgaataccatggccgagtgaagctatgtctaacctatgacgagccactgtcacatttgatatatgctggcgcagacttcattctcgttccttccatcttcgaaccttgtggtctaacacagcttattgctatgcgctatggatccatcccagttgttcggaaaactggaggcctgtacgacaccgtttttgatgtcgacaatgataaggatcgggctcaagcacaaggtctcgagccaaatggattcagtttcgaaggagctgatagcagtggtgtggattatgctctcgacagagccataaccacattttatgatgcacgcgactggttcaattccctttgcaagagggtaatggagcaagattggtcatggaacagacctgccctagactacatggagttgtaccattctgctcgcaaaagctgatagcttttaccactagggaaatcaggctcgttttgcccaggttagaagcatctcagcctcaggccttgtgcaaattcatttgtgcactgggaagaaaagagtaccgactggccttgagcatgcccgccgtctaaggatgcaacacacaccgtgtatagttagagaatgctactcgtcgtacgtttcatgcatgtgttttgtgtatacacctcatgtagcttgcaaaacaacagtacgacgtatcccggccgtctaccatgcctgagggcgtatataggctataggcttatgcaaagcatgtaccattaattaattattacatagtctttttatgtcaaagtagtggaggcaaccatgatcttccttcaccg

SEQ ID NO: 19313 - DNA, 1136 bp, Zea Mays
gtggccttttacataagcaacccccccgacctcttttccctaccctctctttcgttacctacaggctacagctcccgtctctccgccgcttgcttggaaaacgaagaaaccctcctccaccaacccaatccagctacatccgtctgggtgaactccagggccaggagcagttcgccgccttcgttcgcatcacctacgcggttcgatccaactggaaggaacgtgatggccaagacgagctcgttcaagctggagcacccccttgagaagaggcagtctgaggctaatcggatcagagagaagtaccctgacagaattccagtgattgttgagaaggctgagaggagtgacattcctgacatcgacaagaaaaagtacctcgtccctgctgatcttacggttggacaattcgtgtatgttgttaggaagagaatcaagctcagtgctgagaaagctatcttcatctttgtgaagaacacccttccaccaacagctgctctgatgtcttcaatctatgaagagaacaaggatgaggatggattcctctacatgacctacagtggtgagaacaccttcgggctcctctagatggctcaccacaatcgggtctgccttgcccttgcttccctactgatgccctgcctcgtgtaaataagacctgccaagcaattgtgtatattctggtttcctcgctcaactgctggaagtctaaaacctaccttatcatggacaccgtttaaattaagtaattgactggacctgaatctggggggtcctatgacctatgtcgtttacggttactggtccttgtaaatgctgtaacgaggtcaattggattcgcagtatgctattgaatccgattgctgttgccgttttattgcttgactggtgcctgcagcctgctgcttggtgtctgctgccgacagcagcagctagtggaacggctcaccgtcaggcacgagggccttatgtcgccggtgccattactgcgtttgggctctgttgctgatggcggcagagtctggatggtgatgggcgtgtcaggatgaatgcatggaatcctggttcttgcgttggcgctatatgggctggtctgttgctgctagtctgctactagcatttagtttcggctgttg

SEQ ID NO: 19314 - DNA, 1089 bp, Zea Mays
gtggccttttacataagcaacccccccgacctcttttccctaccctctctttcgttacctacaggctacagctcccgtctctccgccgcttgcttggaaaacgaagaaaccctcctccaccaacccaatccagctacatccgtctgggtgaactccagggccaggagcagttcgccgccttcgttcgcatcacctacgcggttcgatccaactggcaggaaggaacgtgatggccaagacgagctcgttcaagctggagcacccccttgagaagaggcagtctgaggctaatcggatcagagagaagtaccctgacagaattccagtgattgttgagaaggctgagaggagtgacattcctgacatcgacaagaaaaagaagagaatcaagctcagtgctgagaaagctatcttcatctttgtgaagaacacccttccaccaacagctgctctgatgtcttcaatctatgaagagaacaaggatgaggatggattcctctacatgacctacagtggtgagaacaccttcgggctcctctagatggctcaccacaatcgggtctgccttgcccttgcttccctactgatgccctgcctcgtgtaaataagacctgccaagcaattgtgtatattctggtttcctcgctcaactgctggaagtctaaaacctaccttatcatggacaccgtttaaattaagtaattgactggacctgaatctggggggtcctatgacctatgtcgtttacggttactggtccttgtaaatgctgtaacgaggtcaattggattcgcagtatgctattgaatccgattgctgttgccgttttattgcttgactggtgcctgcagcctgctgcttggtgtctgctgccgacagcagcagctagtggaacggctcaccgtcaggcacgagggccttatgtcgccggtgccattactgcgtttgggctctgttgctgatggcggcagagtctggatggtgatgggcgtgtcaggatgaatgcatggaatcctggttcttgcgttggcgctatatgggctggtctgttgctgctagtctgctactagcatttagtttcggctgttg

SEQ ID NO: 19315 - DNA, 1031 bp, Zea Mays
aatggaagtatggtgctgttgttgattggatagtaatgcgtggctgcaattatgtgcttcgactgagtgttcttccacaagtttatgttagacagtgatattcagtagttgtacatgatacaagtggctagtcaatctgtaaatccaaactgatcattggagaagaggcagtctgaggctaatcggatcagagagaagtaccctgacagaattccagtgattgttgagaaggctgagaggagtgacattcctgacatcgacaagaaaaagtacctcgtccctgctgatcttacggttggacaattcgtgtatgttgttaggaagagaatcaagctcagtgctgagaaagctatcttcatctttgtgaagaacacccttccaccaacagctgctctgatgtcttcaatctatgaagagaacaaggatgaggatggattcctctacatgacctacagtggtgagaacaccttcgggctcctctagatggctcaccacaatcgggtctgccttgcccttgcttccctactgatgccctgcctcgtgtaaataagacctgccaagcaattgtgtatattctggtttcctcgctcaactgctggaagtctaaaacctaccttatcatggacaccgtttaaattaagtaattgactggacctgaatctggggggtcctatgacctatgtcgtttacggttactggtccttgtaaatgctgtaacgaggtcaattggattcgcagtatgctattgaatccgattgctgttgccgttttattgcttgactggtgcctgcagcctgctgcttggtgtctgctgccgacagcagcagctagtggaacggctcaccgtcaggcacgagggccttatgtcgccggtgccattactgcgtttgggctctgttgctgatggcggcagagtctggatggtgatgggcgtgtcaggatgaatgcatggaatcctggttcttgcgttggcgctatatgggctggtctgttgctgctagtctgctactagcatttagtttcggctgttg

SEQ ID NO: 19316 - DNA, 1249 bp, Zea Mays
aattcctctgaccgccgcatgaaacaaaatgatgagtgccatcgcactgtgcgctgttccttccctcaacaactgtgttctagctcgttgagcaacttagcttaatcagtctcttattggtgtgttcttcaattctcgttcgcagttagcttttttcctcgctctcgcgcccttcattcggttctgctgccatatcgatctcctccgacgagtacgtatgtacgcgcgcggtaagaatgctgtggctgacccaatataatagatctctggggaatcgaaaacctacgggatattggtgcggttcaatcagaaagcttgcgctccaaagcccaggggctccactctttgactgagccgtgccaatatcacgtcctcgctttgcttgcccatgcatcctcattccttctcaatctttcgccaattactccatgcatgtacctgactacctgagtttagatctcttctcgcgatgatgactgcggtgtttttttttttgtgtgtgtgtgcgtgttcttaacaacatgccgcgcgcaacctttcgcttctgtgtgagaaatcatgtgttaataatgttgttcttcatcatttcatgcttgcgagctacatcctagctctctcgtatctacaagttttctgttgtgggtactttaattcatcgtgtggcggagttcttttgctctcttatttttaatgggtaataactgtaacaaattgtctgtgaaattaataagatggtttacacgattgtatgtacgtatgtagcattcctctcgaaaaggcgaagacaagtactgtcgtgtatttattagcatgattctttaatttgttaagctgcgtccagcaattttgcagatatatatcatgtgtgtttgtagctagcactataggggctgctgggagtcaagagaatgtactcttgactactagattcttaatatgaagatagacgatgacagttcagaatttactaccacaatttttcgaaattgtgtgtttgtagcaagcacaatttttcgaaactattcccttgtttttctttgcacatatatagctaacagtgtgcaggggtggaaatgctagatatagctagctagctagtacatacatcaacgacagttcatgcccagtgtatagctagcatgcatgcatgctgttttcgaagaacagcacagaaatgcagttctctcttggagagacctaataatgtgtatcagttagaggagcaaaagcgcgcgatgtttatgtatag

SEQ ID NO: 19317 - DNA, 3737 bp, Zea Mays
cttctagttaaaagtcgctggggtttggcactccctccgcgtttcacgcggccggcagcgctggcgacggacccaatggtgttttcttcaattcgacgcagccgttcgcgtccacgtccgctcgccctctacagcctctcgccctctgcagcctcgtatatacatacaacaacacccggtccccaaagaaaggccacacacagtcgcactcgacagccgccaccaccaccacctggtccacgtcgccggcggcaatgtgggcgcaactggccgtcgcgctgttcgtggcgttagccgtggctcccccggcccgtggctccgacgtgccttcgttcccgctgtcgcaggcgcagtccccatccaactcctcgtccccgtccaacgccgcctcgcggccgtgccacctggacctctcggccgagctcttcggtggggtagccgcggcgtgcggcgccggcggggggccgggctcgctggaccgcggccgctgctgcccggtcctggcggcctggctcttcgcggcgcacgcgcgcaccgcgctgtccgtgcccccggcgcctccgccctcggcgctagtgggggacgagggaatggggcccgacggcgacgacgacgggcccatggtgccgtacgacaaccagaggtgtgtcgacacgctgggcgcagcgctggagcggcgcggggtggcgctgccccggcccaacgcgacgtgcgacacggtgctctgcttctgcggcatccggctccaccagatcggctcgctccgctgccccgccgcgttcgccgtcaaaactggcgccgcggccaggaacgccacgcccaccgccgcggtgaaggccctggagaagagctgccgcaacgcctcctacgccggctgctcgcgatgcgtgcagtccctgcaaaaggtaaacctttcttgctagctttctctcctaatgccattgcttttgctcatcttttccgttcttgtctcttttggcttgatctcgcattccctatataactaatgtttgaaatgttacaccacgcatatcttgccttcttggattccaaaccactgatcgatttctacccctgcttatatatagacgaaaaccttcaacaattttgtcagttatacgtaccactcctgcagagcaatagtgcggcgcttcaagcgacgccttcactccttctttgcttgtttttttatctagcaaaaggtggccatttcgatggtatcccctttcccacaaagggtttccactgcgctttctaaccgcatcattgtttcaactttcgaactgatctgcttgttcttgagcttaccatcaccactaatcatttcctacttgattgcctttctctctgaaagcaaccatgggaaagggcaatcccgccaggtaaccaccggataggaccattccttgaaagcttgaacacgcatttgtggggacaaacctccttctttcgagcaagggcaaaggcggggtattcgccttcgtattcgccttcggcattgccccccgcctttggctccgggaagctgatcatggagggctccctgggcttcttcgaaaaaagagaagctgacagtgtccagatgcagaacgtgctgtccatcaggaatcctaaacctcctgatagagaagcctgcagcagcgtcagtcccggtgctgcgacagctacttgtggctcaaggagaagacgatctttttaaagattttcatgttctttagcttttatcctctactaggtaaatacccaggagaacaagtacttggcattaacctgagggtttatcttgtcaagctgcaaaacgatctcacccaagaacttgtacccagaaccatctttcgcgtggaagttcacaggtcgaaagcagggtgagacagcagcttctgaacatttgcaacatttccaggaatctctgaagtagcttgaagagcaaacaacttgcttacaacctatcagagtaaaacaaagaaacaacagaaatccaagagggcatcatcacgaacttggcctggattttgggataatgctgctaatgcagcaaactgctctgtcatgttagtcgcagacttgtactcatgcagtgcaagctcaacgaaatctggctcattcaatgacgcaaggatgcttagtgggccaactgtagggatctttccttctacatacaacatgtgggactcgctttttggtaagtcaattatctgttaattcttctatttctgaatcctaaagaaaaatggtccctaatagcttatggtttacttgaaaagttcatgaatactccggtaacagaattcaaggtgatattacagaacaatcatatctaatcgctctttcgcatgctctatatgtattcttttagggagggcaaccatctttagagtagcaattagctgaacctgcaaaaaaaatctttttgttagccctgatttgggaggatttccccaaactagccaataatattatattggtaaaattaaaataaagtggacaaggaaaggcgccttgtcaggcaaagagaagagctgaagataggattagcttctatctatattgcagagtttgctggtaccaggaaacacaaaagaaatacaatactcctatctatcacctgtctagatctccttctagaaagaaaccataggatgaatggtgggaccaccagcatagcatgagtatacaatgaaagcagatcataaccaccagcattatagctgcttttaaaaagtaagtgttactctgaaagtttctccttttcaaggtcacaaatgattggatttttttggttatataccatttgtttgcttgcattatagttgcttttttgtggtttgaatctaacaggattttcctacttttgttgtattgtttgctttttttagaaaaaaacacagtaaaaatacgggcctctagtttataaacactcggcatgtagactagcgagatagtatatagattaaacaacagttaataaatgatattaggaagaagcttgtgtagcatcggtggccctatggggcatgctatgtcaacaatgcatcagtggccttgtcagttttattttgaccccctcaaggccttgcaaccatttcccaagccacagtatccaagagatggcagtgtcactcacagaagcagctgttcttagtatgtgatttaggaattcaatgaattatatctatgtatggttacacaagtcctatgctgacaatctgtaacatgtgtatgcttgtatttgaacctgaaacctgtgtaggctggtgtgagatctgtttgtggtatttttggtaacctgaaacctattttctatgttgtgtatgttgttttttggtaacctgaaacctgttgtgtatgttgtgcgtactactttgtagaaacctgaaatctgttttgtatacaacagcttctatgctggtacgagattgaaaccatagaaggtgttgttttgtatgctgcttgcatgcccaaggtcccacaaagcttctatggttcagactaaagaacctacagttttgtatggcatatggttccacaaggttacaaagaagttgatgttttgtatgtttaacctgaaacctgtgtttgcacaaggttccgacagcatcttccatggttcagacaacaacttctgcatcaaatagttttgttcagatttaacatagatttattcaaactaaaaacttttttcaacacatattctgtgttgtcctaatatggcgccggtaagggcgcctcgagttcta

SEQ ID NO: 19318 - DNA, 3677 bp, Zea Mays
aaagtcgctggggtttggcactccctccgcgtttcacgcggccggcagcgctggcgacggacccaatggtgttttcttcaattcgacgcagccgttcgcgtccacgtccgctcgccctctacagcctctcgccctctgcagcctcgtatatacatacaacaacacccggtccccaaagaaaggccacacacagtcgcactcgacagccgccaccaccaccacctggtccacgtcgccggcggcaatgtgggcgcaactggccgtcgcgctgttcgtggcgttagccgtggctcccccggcccgtggctccgacgtgccttcgttcccgctgtcgcaggcgcagtccccatccaactcctcgtccccgtccaacgccgcctcgcggccgtgccacctggacctctcggccgagctcttcggtggggtagccgcggcgtgcggcgccggcggggggccgggctcgctggaccgcggccgctgctgcccggtcctggcggcctggctcttcgcggcgcacgcgcgcaccgcgctgtccgtgcccccggcgcctccgccctcggcgctagtgggggacgagggaatggggcccgacggcgacgacgacgggcccatggtgccgtacgacaaccagaggtgtgtcgacacgctgggcgcagcgctggagcggcgcggggtggcgctgccccggcccaacgcgacgtgcgacacggtgctctgcttctgcggcatccggctccaccagatcggctcgctccgctgccccgccgcgttcgccgtcaaaactggcgccgcggccaggaacgccacgcccaccgccgcggtgaaggccctggagaagagctgccgcaacgcctcctacgccggctgctcgcgatgcgtgcagtccctgcaaaaggtaaacctttcttgctagctttctctcctaatgccattgcttttgctcatcttttccgttcttgtctcttttggcttgatctcgcattccctatataactaatgtttgaaatgttacaccacgcatatcttgccttcttggattccaaaccactgatcgatttctacccctgcttatatatagacgaaaaccttcaacaattttgtcagttatacgtaccactcctgcagagcaatagtgcggcgcttcaagcgacgccttcactccttctttgcttgtttttttatctagcaaaaggtggccatttcgatggtatcccctttcccacaaagggtttccactgcgctttctaaccgcatcattgtttcaactttcgaactgatctgcttgttcttgagcttaccatcaccactaatcatttcctacttgattgcctttctctctgaaagcaaccatgggaaagggcaatcccgccaggtaaccaccggataggaccattccttgaaagcttgaacacgcatttgtggggacaaacctccttctttcgagcaagggcaaaggcggggtattcgccttcgtattcgccttcggcattgccccccgcctttggctccgggaagctgatcatggagggctccctgggcttcttcgaaaaaagagaagctgacagtgtccagatgcagaacgtgctgtccatcaggaatcctaaacctcctgatagagaagcctgcagcagcgtcagtcccggtgctgcgacagctacttgtggctcaaggagaagacgatctttttaaagattttcatgttctttagcttttatcctctactaggtaaatacccaggagaacaagtacttggcattaacctgagggtttatcttgtcaagctgcaaaacgatctcacccaagaacttgtacccagaaccatctttcgcgtggaagttcacaggaatctctgaagtagcttgaagagcaaacaacttgcttacaacctatcagagtaaaacaaagaaacaacagaaatccaagagggcatcatcacgaacttggcctggattttgggataatgctgctaatgcagcaaactgctctgtcatgttagtcgcagacttgtactcatgcagtgcaagctcaacgaaatctggctcattcaatgacgcaaggatgcttagtgggccaactgtagggatctttccttctacatacaacatgtgggactcgctttttggtaagtcaattatctgttaattcttctatttctgaatcctaaagaaaaatggtccctaatagcttatggtttacttgaaaagttcatgaatactccggtaacagaattcaaggtgatattacagaacaatcatatctaatcgctctttcgcatgctctatatgtattcttttagggagggcaaccatctttagagtagcaattagctgaacctgcaaaaaaaatctttttgttagccctgatttgggaggatttccccaaactagccaataatattatattggtaaaattaaaataaagtggacaaggaaaggcgccttgtcaggcaaagagaagagctgaagataggattagcttctatctatattgcagagtttgctggtaccaggaaacacaaaagaaatacaatactcctatctatcacctgtctagatctccttctagaaagaaaccataggatgaatggtgggaccaccagcatagcatgagtatacaatgaaagcagatcataaccaccagcattatagctgcttttaaaaagtaagtgttactctgaaagtttctccttttcaaggtcacaaatgattggatttttttggttatataccatttgtttgcttgcattatagttgcttttttgtggtttgaatctaacaggattttcctacttttgttgtattgtttgctttttttagaaaaaaacacagtaaaaatacgggcctctagtttataaacactcggcatgtagactagcgagatagtatatagattaaacaacagttaataaatgatattaggaagaagcttgtgtagcatcggtggccctatggggcatgctatgtcaacaatgcatcagtggccttgtcagttttattttgaccccctcaaggccttgcaaccatttcccaagccacagtatccaagagatggcagtgtcactcacagaagcagctgttcttagtatgtgatttaggaattcaatgaattatatctatgtatggttacacaagtcctatgctgacaatctgtaacatgtgtatgcttgtatttgaacctgaaacctgtgtaggctggtgtgagatctgtttgtggtatttttggtaacctgaaacctattttctatgttgtgtatgttgttttttggtaacctgaaacctgttgtgtatgttgtgcgtactactttgtagaaacctgaaatctgttttgtatacaacagcttctatgctggtacgagattgaaaccatagaaggtgttgttttgtatgctgcttgcatgcccaaggtcccacaaagcttctatggttcagactaaagaacctacagttttgtatggcatatggttccacaaggttacaaagaagttgatgttttgtatgtttaacctgaaacctgtgtttgcacaaggttccgacagcatcttccatggttcagacaacaacttctgcatcaaatagttttgttcagatttaacatagatttattcaaactaaaaacttttttcaacacatattctgtgttgtcctaatatggcgccggtaagggcgcctcgagttcta

SEQ ID NO: 19319 - DNA, 2320 bp, Zea Mays
gtcgcactcgacagccgccaccaccaccacctggtccacgtcgccggcggcaatgtgggcgcaactggccgtcgcgctgttcgtggcgttagccgtggctcccccggcccgtggctccgacgtgccttcgttcccgctgtcgcaggcgcagtccccatccaactcctcgtccccgtccaacgccgcctcgcggccgtgccacctggacctctcggccgagctcttcggtggggtagccgcggcgtgcggcgccggcggggggccgggctcgctggaccgcggccgctgctgcccggtcctggcggcctggctcttcgcggcgcacgcgcgcaccgcgctgtccgtgcccccggcgcctccgccctcggcgctagtgggggacgagggaatggggcccgacggcgacgacgacgggcccatggtgccgtacgacaaccagaggtgtgtcgacacgctgggcgcagcgctggagcggcgcggggtggcgctgccccggcccaacgcgacgtgcgacacggtgctctgcttctgcggcatccggctccaccagatcggctcgctccgctgccccgccgcgttcgccgtcaaaactggcgccgcggccaggaacgccacgcccaccgccgcggtgaaggccctggagaagagctgccgcaacgcctcctacgccggctgctcgcgatgcgtgcagtccctgcaaaaggtaaacctttcttgctagctttctctcctaatgccattgcttttgctcatcttttccgttcttgtctcttttggcttgatctcgcattccctatataactaatgtttgaaatgttacaccacgcatatcttgccttcttggattccaaaccactgatcgatttctacccctgcttatatatagacgaaaaccttcaacaattttgtcagttatacgtaccactcctgcagagcaatagtgcggcgcttcaagcgacgccttcactccttctttgcttgtttttttatctagcaaaaggtggccatttcgatggtatcccctttcccacaaagggtttccactgcgctttctaaccgcatcattgtttcaactttcgaactgatctgcttgttcttgagcttaccatcaccactaatcatttcctacttgattgcctttctctctgaaagcaaccatgggaaagggcaatcccgccaggtaaccaccggataggaccattccttgaaagcttgaacacgcatttgtggggacaaacctccttctttcgagcaagggcaaaggcggggtattcgccttcgtattcgccttcggcattgccccccgcctttggctccgggaagctgatcatggagggctccctgggcttcttcgaaaaaagagaagctgacagtgtccagatgcagaacgtgctgtccatcaggaatcctaaacctcctgatagagaagcctgcagcagcgtcagtcccggtgctgcgacagctacttgtggctcaaggagaagacgatctttttaaagattttcatgttctttagcttttatcctctactaggtaaatacccaggagaacaagtacttggcattaacctgagggtttatcttgtcaagctgcaaaacgatctcacccaagaacttgtacccagaaccatctttcgcgtggaagttcacaggtcgaaagcagggtgagacagcagcttctgaacatttgcaacatttccaggaatctctgaagtagcttgaagagcaaacaacttgcttacaacctatcagagtaaaacaaagaaacaacagaaatccaagagggcatcatcacgaacttggcctggattttgggataatgctgctaatgcagcaaactgctctgtcatgttagtcgcagacttgtactcatgcagtgcaagctcaacgaaatctggctcattcaatgacgcaaggatgcttagtgggccaactgtagggatctttccttctacatacaacatgtgggactcgctttttgcttctatgctggtacgagattgaaaccatagaaggtgttgttttgtatgctgcttgcatgcccaaggtcccacaaagcttctatggttcagactaaagaacctacagttttgtatggcatatggttccacaaggttacaaagaagttgatgttttgtatgtttaacctgaaacctgtgtttgcacaaggttccgacagcatcttccatggttcagacaacaacttctgcatcaaatagttttgttcagatttaacatagatttattcaaactaaaaacttttttcaacacatattctgtgttgtcctaatatggcgccggtaagggcgcctcgagttcta

SEQ ID NO: 19320 - DNA, 2732 bp, Zea Mays
tcgacagccgccaccaccaccacctggtccacgtcgccggcggcaatgtgggcgcaactggccgtcgcgctgttcgtggcgttagccgtggctcccccggcccgtggctccgacgtgccttcgttcccgctgtcgcaggcgcagtccccatccaactcctcgtccccgtccaacgccgcctcgcggccgtgccacctggacctctcggccgagctcttcggtggggtagccgcggcgtgcggcgccggcggggggccgggctcgctggaccgcggccgctgctgcccggtcctggcggcctggctcttcgcggcgcacgcgcgcaccgcgctgtccgtgcccccggcgcctccgccctcggcgctagtgggggacgagggaatggggcccgacggcgacgacgacgggcccatggtgccgtacgacaaccagaggtgtgtcgacacgctgggcgcagcgctggagcggcgcggggtggcgctgccccggcccaacgcgacgtgcgacacggtgctctgcttctgcggcatccggctccaccagatcggctcgctccgctgccccgccgcgttcgccgtcaaaactggcgccgcggccaggaacgccacgcccaccgccgcggtgaaggccctggagaagagctgccgcaacgcctcctacgccggctgctcgcgatgcgtgcagtccctgcaaaaggtaaacctttcttgctagctttctctcctaatgccattgcttttgctcatcttttccgttcttgtctcttttggcttgatctcgcattccctatataactaatgtttgaaatgttacaccacgcatatcttgccttcttggattccaaaccactgatcgatttctacccctgcttatatatagacgaaaaccttcaacaattttgtcagttatacgtaccactcctgcagagcaatagtgcggcgcttcaagcgacgccttcactccttctttgcttgtttttttatctagcaaaaggtggccatttcgatggtatcccctttcccacaaagggtttccactgcgctttctaaccgcatcattgtttcaactttcgaactgatctgcttgttcttgagcttaccatcaccactaatcatttcctacttgattgcctttctctctgaaagcaaccatgggaaagggcaatcccgccaggtaaccaccggataggaccattccttgaaagcttgaacacgcatttgtggggacaaacctccttctttcgagcaagggcaaaggcggggtattcgccttcgtattcgccttcggcattgccccccgcctttggctccgggaagctgatcatggagggctccctgggcttcttcgaaaaaagagaagctgacagtgtccagatgcagaacgtgctgtccatcaggaatcctaaacctcctgatagagaagcctgcagcagcgtcagtcccggtgctgcgacagctacttgtggctcaaggagaagacgatctttttaaagattttcatgttctttagcttttatcctctactaggtaaatacccaggagaacaagtacttggcattaacctgagggtttatcttgtcaagctgcaaaacgatctcacccaagaacttgtacccagaaccatctttcgcgtggaagttcacaggtcgaaagcagggtgagacagcagcttctgaacatttgcaacatttccaggaatctctgaagtagcttgaagagcaaacaacttgcttacaacctatcagagtaaaacaaagaaacaacagaaatccaagagggcatcatcacgaacttggcctggattttgggataatgctgctaatgcagcaaactgctctgtcatgttagtcgcagacttgtactcatgcagtgcaagctcaacgaaatctggctcattcaatgacgcaaggatgcttagtgggccaactgtagggatctttccttctacatacaacatgtgggactcgctttttggaagaagcttgtgtagcatcggtggccctatggggcatgctatgtcaacaatgcatcagtggccttgtcagttttattttgaccccctcaaggccttgcaaccatttcccaagccacagtatccaagagatggcagtgtcactcacagaagcagctgttcttagtatgtgatttaggaattcaatgaattatatctatgtatggttacacaagtcctatgctgacaatctgtaacatgtgtatgcttgtatttgaacctgaaacctgtgtaggctggtgtgagatctgtttgtggtatttttggtaacctgaaacctattttctatgttgtgtatgttgttttttggtaacctgaaacctgttgtgtatgttgtgcgtactactttgtagaaacctgaaatctgttttgtatacaacagcttctatgctggtacgagattgaaaccatagaaggtgttgttttgtatgctgcttgcatgcccaaggtcccacaaagcttctatggttcagactaaagaacctacagttttgtatggcatatggttccacaaggttacaaagaagttgatgttttgtatgtttaacctgaaacctgtgtttgcacaaggttccgacagcatcttccatggttcagacaacaacttctgcatcaaatagttttgttcagatttaacatagatttattcaaactaaaaacttttttcaacacatattctgtgttgtcctaatatggcgccggtaagggcgcctcgagttcta

SEQ ID NO: 19321 - DNA, 3132 bp, Zea Mays
ctacccaatcgccgcacccgcaccacatcgccccgaccaaagcttccccagacggcaggagacagcagcaggccggacgccggactcctcctccctcccccgtacgcatccactgagatccttcctgtgcgaaggaaatctccagttcttcggccccggccaggttttcaagtgttgcttgccccgccggagttttcctctaacccgcaagtccaattggctaagaagttgatgggatcggggggacactggaaggctgtgtgagatcgcgaaggggaccgtgaattccttgcagggctgcggcgattcggctgcgctgctgtatgaactgtttcgtgaacctgggactcaactcgaactcgaaccactacgtcgcctgcctcctcatcttcctgctgcatttctccccccagttgttaaatccatccaattctaattcaaatagtaattgtgaaggagttcaacagagctgcacagatggcgaacaacatgttggaggagtcaagagtgaactgtcttctgccagagcatctgcgattaatacagaccaaggacactacattggcccaaatttagttgttgagaggctaactgaaaatcttaaactgtcctgtcttacctcaccatcattgttctgagacaggggaacatgcctcactactaaccctccatggtggagggggtagaggagggttgatgtgagaacaacaggcgatctcggcaatttcacaacttggtaggcttctttatgttacttctgtatgaactggtcttttatcatttggaggtactctgctctctggagcaaaatatcagtcttatgctaaacccatccatattagcaaccacacaattgcatcaaaatttgcagaagattaaacttgagcaggttttgtatgtcatccaaacactacagcagtaacggacatgtgaatgtttcaggaagtttcttttatggatatagttaaaaaagcaggagtcatccacctttatttccttcatttctctgtgtgcaaatcgtgatactgctggaataacaaatttgattagaaatgtctttgaaccttacctttccttctcaatacgatcaatagaactaaacttgttcttctgaacacattttgtacttaaacattttatttcctgtgttacatgtactgagataaagcatattttgtccatgtcaggctcatatggtgaaaatgctaggagaaagccacacacaccatctgctattgttattggtggtgggtttgctggtcttgctgctgctgatgctctcagaaatgcatccttccaggttattctactggaatcccgtgataggattggtggcagagttcacactgactactcttttgggtttccggtcgatttgggagcatcttggcttcatggggtctgtgaagaaaatcccttggcaccaataattggaaggcttggacttccactgtaccgcacaagtggtgatgattctgtgctgtttgatcatgatctagagagttatgcactctatgacactaacggacgccaagtaccacaagagttggtagaaaagcttgggaaggtgtttgagaagatactggaagagactggcaaattgagggaagaaatcaatgaagatatgtctatcgcaaaagccatcgcaattgttatggctagaaatccgcacttgaggcaagaagggattgctcatgaggttcttcagtggtatttgtgccgtatggagggttggtttgccaccgacgctgattcaatttcactacagggttgggatcaggaggtgctgcttccaggtggccatggcctcatggttcgtgggtatcgtccggttataaatactctcgcaaaaggcttagatatacgcctcaaccataaggttgtggaaattgttcgccataggaacagggtagaggttaccgtaagcagcggccaaacgtttgttgcggatgctgctgtggtcactgttccgttgggtgtcctgaaagcgaaaaccattaaattcgagccgaggctgccagagtggaaagaggaagcgatcagagaacttacggttggagttgagaacaagatcgttcttcacttcgggcaggttttctggcctaacgtggagttcctcggcgtcgtttcctctagcacctacggttgcagctatttcctcaaccttcacaaggcaacaggccacccagtccttgtctacatgcccgccggccgccttgctcgtgacatcgagaagacgtcggacgaggctgctgcccagttcgccttttctcagctgaagaagatccttcccaatgcagctgagccgataaactacctggtgtcgcgctggggctcggacgagaacacgcttggttcgtacacgttcgatggggtgaacaaaccccgtgacctgtacgagaagctgcgcatccccgtggacaacctgttcttcgcgggagaggccacgagcgtcaagtacacgggcacggtgcacggcgccttctccacgggtgtcatggcggccgaggagtgcaagatgcgggttctggagcggttcagggagctcgacatgctggagatgtgccaccctgccatgggcgaggacagccctgtgtctgtcccgctgctcatctctcggctctaaaagcagacgagtagtagttgtgtatgggatggatcggcacctgagagtaggctgggacatcccactgattgccggagggaagcagggaggaagaagctcccctcgcttcgcttctcctcggcatgaggcatgtgcctggcgttacttgtggcgtgccaagtgccatatttccctaaacttattctgcgtgggaaccctctattatgtatgtatactgtgaatttgtgactgttcaggtaacacgagttatcgtgacatcttcgtagagaaagataccgtatgtatgatgtatgtatgatatacatatgatattatgatcaacaattgtagtagtagtaataataaataatacatatatgtgacttaactgtttggagtattgagtgattgtgacatgtaacacccttacatctaagcaagtataaagcaagtagtataagagcatctccaataaattagttaaatggctcgccgagccaaatttttgctactcaacaaaaaaataa

SEQ ID NO: 19322 - DNA, 2508 bp, Zea Mays
caccacatcgccccgaccaaagcttccccagacggcaggagacagcagcaggccggacgccggactcctcctccctcccccgtacgcatccactgagatccttcctgtgcgaaggaaatctccagttcttcggccccggccaggttttcaagtgttgcttgccccgccggagttttcctctaacccgcaagtccaattggctaagaagttgatgggatcggggggacactggaaggctgtgtgagatcgcgaaggggaccgtgaattccttgcagggctgcggcgattcggctgcgctgctgtatgaactgtttcgtgaacctgggactcaactcgaactcgaaccactacgtcgcctgcctcctcatcttcctgctgcatttctccccccagttgttaaatccatccaattctaattcaaatagtaattgtgaaggagttcaacagagctgcacagatggcgaacaacagggaacatgcctcactactaaccctccatggtggagggggtagaggagggttgatgtgagaacaacaggcgatctcggcaatttcacaacttggctcatatggtgaaaatgctaggagaaagccacacacaccatctgctattgttattggtggtgggtttgctggtcttgctgctgctgatgctctcagaaatgcatccttccaggttattctactggaatcccgtgataggattggtggcagagttcacactgactactcttttgggtttccggtcgatttgggagcatcttggcttcatggggtctgtgaagaaaatcccttggcaccaataattggaaggcttggacttccactgtaccgcacaagtggtgatgattctgtgctgtttgatcatgatctagagagttatgcactctatgacactaacggacgccaagtaccacaagagttggtagaaaagcttgggaaggtgtttgagaagatactggaagagactggcaaattgagggaagaaatcaatgaagatatgtctatcgcaaaagccatcgcaattgttatggctagaaatccgcacttgaggcaagaagggattgctcatgaggttcttcagtggtatttgtgccgtatggagggttggtttgccaccgacgctgattcaatttcactacagggttgggatcaggaggtgctgcttccaggtggccatggcctcatggttcgtgggtatcgtccggttataaatactctcgcaaaaggcttagatatacgcctcaaccataaggttgtggaaattgttcgccataggaacagggtagaggttaccgtaagcagcggccaaacgtttgttgcggatgctgctgtggtcactgttccgttgggtgtcctgaaagcgaaaaccattaaattcgagccgaggctgccagagtggaaagaggaagcgatcagagaacttacggttggagttgagaacaagatcgttcttcacttcgggcaggttttctggcctaacgtggagttcctcggcgtcgtttcctctagcacctacggttgcagctatttcctcaaccttcacaaggcaacaggccacccagtccttgtctacatgcccgccggccgccttgctcgtgacatcgagaagacgtcggacgaggctgctgcccagttcgccttttctcagctgaagaagatccttcccaatgcagctgagccgataaactacctggtgtcgcgctggggctcggacgagaacacgcttggttcgtacacgttcgatggggtgaacaaaccccgtgacctgtacgagaagctgcgcatccccgtggacaacctgttcttcgcgggagaggccacgagcgtcaagtacacgggcacggtgcacggcgccttctccacgggtgtcatggcggccgaggagtgcaagatgcgggttctggagcggttcagggagctcgacatgctggagatgtgccaccctgccatgggcgaggacagccctgtgtctgtcccgctgctcatctctcggctctaaaagcagacgagtagtagttgtgtatgggatggatcggcacctgagagtaggctgggacatcccactgattgccggagggaagcagggaggaagaagctcccctcgcttcgcttctcctcggcatgaggcatgtgcctggcgttacttgtggcgtgccaagtgccatatttccctaaacttattctgcgtgggaaccctctattatgtatgtatactgtgaatttgtgactgttcaggtaacacgagttatcgtgacatcttcgtagagaaagataccgtatgtatgatgtatgtatgatatacatatgatattatgatcaacaattgtagtagtagtaataataaataatacatatatgtgacttaactgtttggagtattgagtgattgtgacatgtaacacccttacatctaagcaagtataaagcaagtagtataagagcatctccaataaattagttaaatggctcgccgagccaaatttttgctactcaacaaaaaaataa

SEQ ID NO: 19323 - DNA, 4293 bp, Zea Mays
acatcgccccgaccaaagcttccccagacggcaggagacagcagcaggccggacgccggactcctcctccctcccccgtacgcatccactgagatccttcctgtgcgaaggaaatctccagttcttcggccccggccaggttttcaagtgttgcttgccccgccggagttttcctctaacccgcaagtccaattggctaagaagttgatgggatcggggggacactggaaggctgtgtgagatcgcgaaggggaccgtgaattccttgcagggctgcggcgattcggctgcgctgctgtatgaactgtttcgtgaacctgggactcaactcgaactcgaaccactacgtcgcctgcctcctcatcttcctgctgcatttctccccccagttgttaaatccatccaattctaattcaaatagtaattgtgaaggagttcaacagagctgcacagatggcgaacaacagtaagtcctgctgcttctccgggagctctttgagttttgagcttacagttggcagatcggttcttccaatttaaaagatatatcttataatcgatgtgaattattaaagctactcaggtgaggaagaatcgattggcatactttattaggttgttgattaggtattcgtttggtggatctgacgcagcttccgtggcaaatttgaaattttccaacttaactttttgatagtggtttcgaatttttttcgttcgataaccaaaaaaatcggaggttcttatggttgttgggaggcacgcatgggcccgatggatggaagggccatggaccatgaagtcccatattcatttgtcggtggaaggaagaaaaagaaaagtagattacaagcacttggtagctgtttacagttcacacttgttatacctaacatctcacgcaaggggaccgaccacttggaagcttctccgatttgaccccatgtggatttgtggactcctgtgcttcattttttagtactggggaccttcgttcactaaaatagttactctcacaagcctgccactgttgcacgataagggaaaaaatagcttatcccgattgctacaaaacctgactacagaaaagcatatgccgtcaagtgctatgctgtctgtgttaagtgcttagtaccatgcatgtgcgatccacattgttgtcatgctgatgaacacgagcaggcaaatgtatggtaatattggctagtggatatagctgtcttgttaactatattccaatgctgcaatttgcatttatttgttatgtctcggtatatactaatgcatggttttgctttagtgtgtcttgttgtggctgctagcattaggtgataaatgcttggtgaccaatgaagttgggcagcttttttagtgtcctcagcatatctgatagagaggtttgctaaagaggtttcttccacgatcctacagactaccagtgctaccaaggcaaacattagccaccagacatgacatgcttattccttatagtctggtgcccatcttgtccaaacataatctagaagagtgtacaaccactaatgaccttgtgtcacgtccatgctctggccttttaaaaaaaagataaataaaaagttattcccacccctgtgatcttctgaaaaaaaccctaatctatatgctttaatagtgttggaggagtcaagagtgaactgtcttctgccagagcatctgcgattaatacagaccaaggacactacattggcccaaatttagttgttgagaggctaactgaaaatcttaaactgtcctgtcttacctcaccatcattgttctgagacaggggaacatgcctcactactaaccctccatggtggagggggtagaggagggttgatgtgagaacaacaggcgatctcggcaatttcacaacttggtaggcttctttatgttacttctgtatgaactggtcttttatcatttggaggtactctgctctctggagcaaaatatcagtcttatgctaaacccatccatattagcaaccacacaattgcatcaaaatttgcagaagattaaacttgagcaggttttgtatgtcatccaaacactacagcagtaacggacatgtgaatgtttcaggaagtttcttttatggatatagttaaaaaagcaggagtcatccacctttatttccttcatttctctgtgtgcaaatcgtgatactgctggaataacaaatttgattagaaatgtctttgaaccttacctttccttctcaatacgatcaatagaactaaacttgttcttctgaacacattttgtacttaaacattttatttcctgtgttacatgtactgagataaagcatattttgtccatgtcaggctcatatggtgaaaatgctaggagaaagccacacacaccatctgctattgttattggtggtgggtttgctggtcttgctgctgctgatgctctcagaaatgcatccttccaggttattctactggaatcccgtgataggattggtggcagagttcacactgactactcttttgggtttccggtcgatttgggagcatcttggcttcatggggtctgtgaagaaaatcccttggcaccaataattggaaggcttggacttccactgtaccgcacaagtggtgatgattctgtgctgtttgatcatgatctagagagttatgcactctatgacactaacggacgccaagtaccacaagagttggtagaaaagcttgggaaggtgtttgagaagatactggaagagactggcaaattgagggaagaaatcaatgaagatatgtctatcgcaaaagccatcgcaattgttatggctagaaatccgcacttgaggcaagaagggattgctcatgaggttcttcagtggtatttgtgccgtatggagggttggtttgccaccgacgctgattcaatttcactacagggttgggatcaggaggtgctgcttccaggtggccatggcctcatggttcgtgggtatcgtccggttataaatactctcgcaaaaggcttagatatacgcctcaaccataaggttgtggaaattgttcgccataggaacagggtagaggttaccgtaagcagcggccaaacgtttgttgcggatgctgctgtggtcactgttccgttgggtgtcctgaaagcgaaaaccattaaattcgagccgaggctgccagagtggaaagaggaagcgatcagagaacttacggttggagttgagaacaagatcgttcttcacttcgggcaggttttctggcctaacgtggagttcctcggcgtcgtttcctctagcacctacggttgcagctatttcctcaaccttcacaaggcaacaggccacccagtccttgtctacatgcccgccggccgccttgctcgtgacatcgagaagacgtcggacgaggctgctgcccagttcgccttttctcagctgaagaagatccttcccaatgcagctgagccgataaactacctggtgtcgcgctggggctcggacgagaacacgcttggttcgtacacgttcgatggggtgaacaaaccccgtgacctgtacgagaagctgcgcatccccgtggacaacctgttcttcgcgggagaggccacgagcgtcaagtacacgggcacggtgcacggcgccttctccacgggtgtcatggcggccgaggagtgcaagatgcgggttctggagcggttcagggagctcgacatgctggagatgtgccaccctgccatgggcgaggacagccctgtgtctgtcccgctgctcatctctcggctctaaaagcagacgagtagtagttgtgtatgggatggatcggcacctgagagtaggctgggacatcccactgattgccggagggaagcagggaggaagaagctcccctcgcttcgcttctcctcggcatgaggcatgtgcctggcgttacttgtggcgtgccaagtgccatatttccctaaacttattctgcgtgggaaccctctattatgtatgtatactgtgaatttgtgactgttcaggtaacacgagttatcgtgacatcttcgtagagaaagataccgtatgtatgatgtatgtatgatatacatatgatattatgatcaacaattgtagtagtagtaataataaataatacatatatgtgacttaactgtttggagtattgagtgattgtgacatgtaacacccttacatctaagcaagtataaagcaagtagtataagagcatctccaataaattagttaaatggctcgccgagccaaatttttgctactcaacaaaaaaataa

SEQ ID NO: 19324 - DNA, 2657 bp, Zea Mays
acatcgccccgaccaaagcttccccagacggcaggagacagcagcaggccggacgccggactcctcctccctcccccgtacgcatccactgagatccttcctgtgcgaaggaaatctccagttcttcggccccggccaggttttcaagtgttgcttgccccgccggagttttcctctaacccgcaagtccaattggctaagaagttgatgggatcggggggacactggaaggctgtgtgagatcgcgaaggggaccgtgaattccttgcagggctgcggcgattcggctgcgctgctgtatgaactgtttcgtgaacctgggactcaactcgaactcgaaccactacgtcgcctgcctcctcatcttcctgctgcatttctccccccagttgttaaatccatccaattctaattcaaatagtaattgtgaaggagttcaacagagctgcacagatggcgaacaacatgttggaggagtcaagagtgaactgtcttctgccagagcatctgcgattaatacagaccaaggacactacattggcccaaatttagttgttgagaggctaactgaaaatcttaaactgtcctgtcttacctcaccatcattgttctgagacaggggaacatgcctcactactaaccctccatggtggagggggtagaggagggttgatgtgagaacaacaggcgatctcggcaatttcacaacttggctcatatggtgaaaatgctaggagaaagccacacacaccatctgctattgttattggtggtgggtttgctggtcttgctgctgctgatgctctcagaaatgcatccttccaggttattctactggaatcccgtgataggattggtggcagagttcacactgactactcttttgggtttccggtcgatttgggagcatcttggcttcatggggtctgtgaagaaaatcccttggcaccaataattggaaggcttggacttccactgtaccgcacaagtggtgatgattctgtgctgtttgatcatgatctagagagttatgcactctatgacactaacggacgccaagtaccacaagagttggtagaaaagcttgggaaggtgtttgagaagatactggaagagactggcaaattgagggaagaaatcaatgaagatatgtctatcgcaaaagccatcgcaattgttatggctagaaatccgcacttgaggcaagaagggattgctcatgaggttcttcagtggtatttgtgccgtatggagggttggtttgccaccgacgctgattcaatttcactacagggttgggatcaggaggtgctgcttccaggtggccatggcctcatggttcgtgggtatcgtccggttataaatactctcgcaaaaggcttagatatacgcctcaaccataaggttgtggaaattgttcgccataggaacagggtagaggttaccgtaagcagcggccaaacgtttgttgcggatgctgctgtggtcactgttccgttgggtgtcctgaaagcgaaaaccattaaattcgagccgaggctgccagagtggaaagaggaagcgatcagagaacttacggttggagttgagaacaagatcgttcttcacttcgggcaggttttctggcctaacgtggagttcctcggcgtcgtttcctctagcacctacggttgcagctatttcctcaaccttcacaaggcaacaggccacccagtccttgtctacatgcccgccggccgccttgctcgtgacatcgagaagacgtcggacgaggctgctgcccagttcgccttttctcagctgaagaagatccttcccaatgcagctgagccgataaactacctggtgtcgcgctggggctcggacgagaacacgcttggttcgtacacgttcgatggggtgaacaaaccccgtgacctgtacgagaagctgcgcatccccgtggacaacctgttcttcgcgggagaggccacgagcgtcaagtacacgggcacggtgcacggcgccttctccacgggtgtcatggcggccgaggagtgcaagatgcgggttctggagcggttcagggagctcgacatgctggagatgtgccaccctgccatgggcgaggacagccctgtgtctgtcccgctgctcatctctcggctctaaaagcagacgagtagtagttgtgtatgggatggatcggcacctgagagtaggctgggacatcccactgattgccggagggaagcagggaggaagaagctcccctcgcttcgcttctcctcggcatgaggcatgtgcctggcgttacttgtggcgtgccaagtgccatatttccctaaacttattctgcgtgggaaccctctattatgtatgtatactgtgaatttgtgactgttcaggtaacacgagttatcgtgacatcttcgtagagaaagataccgtatgtatgatgtatgtatgatatacatatgatattatgatcaacaattgtagtagtagtaataataaataatacatatatgtgacttaactgtttggagtattgagtgattgtgacatgtaacacccttacatctaagcaagtataaagcaagtagtataagagcatctccaataaattagttaaatggctcgccgagccaaatttttgctactcaacaaaaaaataa

SEQ ID NO: 19325 - DNA, 2004 bp, Zea Mays
gtcaaaccgaagcgtactgggccacgcaaacgcaacgacgctcgcagtcgcagaagaaactgtccagccatcccatccgttccacccaagcacaccaacggtgctgatcccgtcctctctcggcgccgaccagactcgcccgctactcttccgaaaaaaatatcccaaatagttactccactcccctcacccctcccgactcccgtgctctctctctctctctctctcggatccgaattgccagcgcaccagtcgagctcgcgggaactcgccggcaccggcgatggcctccgccctactggccggacagggcggggcgcgccaccacggctggggggagacgcgcgccccactcgcgcccatacctcccaaccctaaccccagccagccccacccgcgcgccgacgggtccaagtccaagccgcgggcggcagcctcctcgccggcggccggatacgtgacgttccgcccggcgtccctgggcccgcgcgaggcccgcgcgctccgggaccgcctcgcgggggagctcacccaggtgcgcgccctcctctcccgcatcgacacctggcagcagcagggcccgccgcccgcggggctccgcggcgaggtgcggaagcggtgcgggcagatcctcaccaggctgcgcaaggacaagcggagcgtgtggttcaacgcgcccgtcgaggtggagcgcctcggcctccacgactaccacgccgtcatcaagcgccccatggacctcggcaccgtcaaggagggcctcgccgccgggaggtacgcctcgcacgacgacttcgcggccgacgtccgcctcaccttcaccaacgcgctgcggtacaacccggtcggccacgaggtccacaccttcgctggcgccctcctcgcctacttcgagaggatgtacaaggaggcgctcgcctgcttcgaggaagactgcaaacgccctgagccgccaaggccagtgccgcctgaattgacacctccacccgcagctgagcctgttgaggccaaggttaagccgagggcagggaatgtgaggatgcggaagcccaaggccagggagcctaacaagagggagatgagcctggaggagaagaacatgctcagggtggggctggagagtttgcccgaagagaagatgcataatgtgctacagattgtgcgcaagaggaacaacaatccggagatgctgggggatgagatcgagcttgatattgatgagatggatgttgagacacagtgggagcttgatcgtttcgtagctaacttcaacaaagcgctcaagaaatctcagcgtgctgtggtgatgaatggtggcgccgctgatgtaaccagtgctgctgtggctgagaatgacactgcacctgtcagcaatgtgcttacgttggttgacaatgatgatgtggagagagagaaacctgtgaggagcgctacaatggctgagcaggtggatgagtatgttgatattggggatgagatgccaacagccacttaccaatccatggaaatcgagaaggacgctgaaggttctgagtcgaggagctcaggggacagtgcctcaggagctggcaatgctcattctttggcttaacactaggatttgaaaatttggatgatctgagttctgttgttgggtgatttacgtagagctagtggtaattgtaagtatgtagctgtttctgagacgtgggtgtgcgtaggcttcgattacacagttagtagtagataacaaactggctttgtgggtgtctgttagcaccatgtgtatgtaagctggtggtggaaggtattggggtgttaaaagtagttgatcgaccttctggtatggagggggccagggctagtgtttgtgttctttgtagtacaattgttctggtgcagacctcttatgtaattaatgatttgtgcatgacattaaagtatggttgtataagtaacaatgcagtatcttttgttcggtgatggtttttgacctttttcggataggcctatgcaagatagttt

SEQ ID NO: 19326 - DNA, 2468 bp, Zea Mays
ctcgacatcctcgcaacagccaagtccgcgcccgccgccacgcaacagacactccgctccgcgttgtgatgggatgaggattcctctcatcggacaaggattcccctcccccgtaccacccaccttcctcccgatctcctcgcagagttcaccgctactcgcgccctctcctaggctcctagctcccttctgaggtagaccgcgcacgggaatggaaaggcatcagcgaaggagcgatggctgcgcccacggaggaggagaggaggaggtccaggactccaggacgaggatactgctgaacttacgaattaccagcacaagaatgaggtgatcaattcatctgagagattaacatatggtggacacgaagattgtaatgcatactgtttgtatgcaacaaaaaaatataaaaaaggggagcaggtccttgcttatggaacatacacaaacatgaaactccttgaacgctatagcatcatatgtgtttggattgttttgatttagttgtttgattgcttctgtgtttgccgctcccaagttttatgctggttaataaaactttgtaattctttaggtctagcccctcttgctgtttttggatatgttatggccacacacctccctctttatcctgcaattcacatcctacccgataagtaccacaacttatgtttgtgttttctatttcaatttaaatgttcaatcacattgctactaacctgcatagttgtctagtaaagatacaactctgtttcaggtcattctgttgctgggttatggtccagattctcctccaccaaaattatttcttataaaatggtcaagcgccagtgaaagttatgtgtcagacaatgataaaacaatacagttattcagcagttttcgcggaaaccagtatttcactgtatatttttgttgttcatctagtggtgccatttgttggtattgagcagcatgattttgaagaaagttggtggccttgagatgtttgaaaagtaagatgttataggctccttatccagccttcagtgggatgtgtttcgagtaagtcacctaattcatctcaaattgtgcagtaagagcaggtgtgggtggtgacgaagttaggatttgggctggtgaccttgtaggtagatgatgattttattcagatgagtgcaatttagcaaatggtatacaattgtttttttaatgttttcccaggcacatcaattgtgatgttgtttgaaagggccaaattatcaaagtcaccaaatagtttgaaaacaaagaggattatagcaattagtgctgcttctgagagttatatggccctgagcacaattgtttttttttataatctcaactaggacctacctcatacctgtcagtacttgttacctagatcttttacttatgatcttctagcaccgaatctaattcgaagtatttgacagcatatattcaaagtgtggtcactgatgagccatgatgatgagatgaaatctgccctgtttcttcaaatgagcatgattaaccatgcagtccatgctatcggactttttgcacgatcatttgatggctacttaatagatcgtcttagatctcttggaacgacttcttttgttatatctcaatcggcctgtttctgctgctccgttatatgcatagtttccttctgcatcttttcattatataaatagcggtttagatatttcttgctgattatcaatctcaagtaggcttgtaatacttttgtttgttatgcccgcagccacatatcatgatgtcaaattaaaagatgtgttctgctaaattttctgatgtttgtgctcgttgtcactgtcccagtcttattgtaataatgttgtgatgttttggacattagcaagctgcaaattgaaatatttaagtcttttgtaatttgtgtgtgtactggcattgtactagttactatatatagagcggggagcaatcctcgtcgatcagcccatctcgtggctattcttatgggtcacaggatcttcatcgaacggacacggagcggtcttcccacgtataattcctgtattttctgaatagtttgagtggcaattgatgccctctttcattctagcatccgaggcaatatctatacaaactcttttttttttatttttccctccagtaaatggatattagtctgatttggaatttacttttcccttcatataggcaatagctgcattttagacagctttgcagcacaattcacaaactacagacgtctcaagaaaaatcaacatgttatctcagttagccagggaaaagaagtgagcctttgaagtagagaacatgtgttcaaatgttgacattgtcgtcctgacttgtcaggacaggttttacttttttaatgttcgatggcactgtgtctgaaattgccttgacaagaagctatatttagcatccatctagacttgcatatgtaacttgattttctttcatcattg

SEQ ID NO: 19327 - DNA, 2201 bp, Zea Mays
cagcaagtcagcaggttcacggctgtgacatgtaccaaaggtcgtttatattataacaaatgaattatgcattaagtacctggaaaaaaatagaaactatattctttagtttacacaaatttgaaacaagttctaaatatgccaacaatcgactgcatttgagccaaaattttcgtacaaatagcatcacctattcacctatcagttatttacctgggtcacaactagaaccccgaaaggacaaggaagactactttcagaattttgcgtctcgatgtagcccagactataggcacataacaataaccaccaccaaatcatgttacacatctatccatcagacaagttgaatctttgaggctccatcagatgcacggtccgggaccaccttcaagtgtacaacagagaactcacatatgatcctcagactgcttgtgcaataatggtctgaccagttccaagtgcttcctctgaaattctgctcctctgaaattcacttcatatgccaagctcatcactcttcttttcctctcctaactttgcatcgcaaagcataacatcatccatggaatccagctgcttctcattttcaacctcaatatcaggaactgcggtatccttctcggcaatatcaccaggttcagcttcttcctccttccattcaacaaactcaggttgactctcttttacatccggagttggtggtctgatatcatcttcgaatttgtcaacggtaccatttgccaagccggtggaaccagattctttgtttgcatctttgttgaagactggtagagttggttcagaaccttttatttcatctataatttcgccaagaatgacttcatcatgttcatcatcctcttttagtgcggatatttccgaatttggagatggggatgcttctgagctaaccaaaccatcattcagtgccttgtcctcgtcaaatgcaaaccaattggaatttgtaaagagcgaaccactgcaaacggcatcttcattagtccattcttattgcaaacatcaaatgtgcttacaaaaggaagaacagtaatcatattaaatagtaaagaataaacctttcttggtcgtctccaaggcgaagggaggagattacaacctctgcagattcatcatcaaaatatacatcctcatcatcccgctcaagtgatgcttgagcctgcatgtataaacaaaagttactaaataaattttaaaaactgttaatgtgttggcatgttgcaactacagaacttggctgtttaggtccatcaaaattaaggatatcttttaatgtaattcggcattttggatctcagaaaaaaaattattcaatcttttaatttaaatcaatatgcctatttataaagcactaaagtatgctaatagaccaaacgagaaacaactgcactaatcaagagaaactgacctcgtcaatatcctcactactgtaaataccatatttaaatgcttggcttaaattgctagcaagtgcagccacatcgtagtccctatctcggaagtcttcatcatcgctatccctaccacgatcctgcagtgatgttggtcgactataaccagagaataaagcagaattcagcatatgacctttcatcccagtaagccaaagcagctgaagtctgtactctgtagtaacttcatacacttcatgtgaacatgcaagacatacagactggcctttgaaagtattaaataattgatagatacaagagctatgacatttggcattaacatcctagacaggcagaactgcagaagtccacatctggaccaagccgatagcgcaacatgagggaaactctgaaacatcgcaatgttgttattggtgattcgttatatgtcaatgatttcctattccatcgtatatgcatttaatatgtcaatgacatatggactacagacccgcatacctacggcattaaaggaaattttcaaatccctcgtcacataagagaaattagctcttgttcatccatgcgaaaaaagagaacacatcccagtgtataaagaacatcttcctcctcatttttttgtaggatatggacataacttgtttgtaatggatttgttactccacaaacatctgttcactgtagttccttccaaatccagcaagaagtctaggggtaatgcaggatgcacatttggatatcaaagcagcacagttgtggttaacagat

SEQ ID NO: 19328 - DNA, 1406 bp, Zea Mays
tttcttttataagggggttccccatttctattactttcataatagaaatacagcagaggttaaagtagcatagcaggattacaaatcagacttaaacgagacatgcagttgaacatgttgcgcaacctactggactaacaaacagtgtttccagccaggcacgcaggcctgattcagaaggcctggactaacaaacagaaatgatcaaatatttcggagaataataataccttgctgtatgtttagtattttctgcctcctcatacgatgcagcacgagcagcatattccttcctgatgcgctccaaatcagcgatgctcggtgccgcagagactagctctagctcctctttgctggcccacgtagcaatgttcatctttcctagctgtatgccaagcgcagcgatttcttgccttgttttaagcctcgtctcagtatctgacaattcatttgcatgtacgccgcatttcctgtggaaaaatgggccatcgtctgtgcagtcttctccaggaggagatgctattgacctcccccctacaggtgttgacggtactgaacagttagggcttcgagttggtgtccttgaccctagtggagttccagttcttgaaggttcctggctaggtattggagtcatctctgtgcccacatctctcacggacaccgacgactggactgttggaatatctgcacacgttcaaaccagtgtcagttccaagacagggcttcacttcaatcgatgaaccagtatcagttgccttgtgatgctctgagttagcaccagcgttactaactggacagacatctgcatgcctaaccaacttaggctgatacgaagcgaaggacaacctctccagtatgctgcgcggagcagacaaagctggattcactctcttcattttctgcacgggacgagcagagattttgggcacaacggcgcccctggctgcggcggagctcatctggtttactgtctggttctgcaacgcgcccttggcgacgttgttcttctgactgacattctggcggctcacgatccatttctctgcgtcattccacttggaggaaatggaagtctgcctggacaagtacccggctgctggattctgcgtcgccgccgccttctccactccgtggaactcgaagctgctagtgctggcgttgtcgagaccactgtcgcattcggtagtgctgtcttcttccgcgggtctcagtgggtgtatctgtatcatactcgagctgcctgtcgctggcttagcagccgaactggtggaagcgttctgcacttgactgatgtccactgctggatccttttgaaccttttctacggcttcggttttgttagttgccgacgggtgttttgtgctatctgcgctgtctgaaacttcttcaagaacatcacaaac

SEQ ID NO: 19329 - DNA, 1812 bp, Zea Mays
tgacagcacggtaacagtaatccagcagccaactctcggcattctccggtctgtactctatctgtctcttcaaagggttgggccttcaaagcccattgaagctcagcccatgaacaacaagtcctggagcatccgcttccaagttccaactgcctagcacttgaagatgaggtattggttgccaggacagtatggatggtaatagatcacgatctaaatgtctcttcacaatttatttaagtccataatcaattatggttcaaaataaatacaaatagagtctaattctaatctgatctttaaattttgttgtgtaaaacttagagcccattaccacccatagagcgaggaggattaacaagtctgttaaaaagaacacatgagaaattctgttagcaataggtattgcactaccgcttaggtgtccgacattacggtgtcacggtgctgtcaagctcagagcgacactgtcgtatataaacggactttttcaagggtaaattaaaaatatttgtcaatgaaaggtagatcgagtaaattactagctttctaggccatgatgatgagatattgtctatatatccgtacttgcttagggatttgactatatccttggtttagtcaattggaatactaatgatttattatctgacatgcttagggatttttttttttgactgagcactccgttttcgtatagggatttgcttatcttcttcactgttgagagaaccgacaattactttaaatgtgtgttccagagttcgaggaaaaaaatgtgtgttccagactatcatgttactgagggcctattagtttccagaagtttgtgaaaagctgctaacagaagcagcatgggatggccaccaaagacgaaatatcttattgaatacgaatacgaaggagatttctcttccatagatcttctttaattctctgtccactaaaccaggctcgagtcaattttaagtgtttctatctatgcttgtcctgtccatgcccatcctagtatcagagattaataactagcgtcatttatatacttgtacctaggacggtgaccttgttggatagtgacatttttttagctgctaatttatgtactagtagcaatggtactagcatgatttacctatataatcgaggttaggaagcgtggctggtttgctgtgatagtgctaccaccttgaacaatttcagttgcataggtatgatcatacatggatacattttttataaattgatccacaatttcagttgcatgatgatcatacatagttatatatcaccatttgattatcatagtagcgttatcacaagcaatatatatataattagtgtcagatagtttttaatctgtttttataataaacttatctagagataaatatattgctatttttatataaatttggctagatttaagaaaaatttaatcggtacgagtacgtagtgataactatttacttttgagagaaagggaatgctacttttctgattgatccttgtgaactgattcaatgcttggaggcccacttagcgagctggtttgatctctctgctggtgaagtggcgatacaaatgatgttctctttgactctggtcactgtcatgggctgctcctgctttgtagtaaaggcacgcaaactttcaggcagaacgagcgttggtctcagcttaaaagagcttttggcctgggaattcacctgctcctcgctcgtggatccgaggggcctctacatccaaagttacacacagtggtctgatgtatcccgtatttaattttgatacagagaaaatcgaaattagttt

SEQ ID NO: 19330 - DNA, 5908 bp, Zea Mays
gcactctgcaggcaggagatagcatcatcagtgacgaaaccagccatgcaagtactgtgtatgtgtagtacgtactattttatttctcgcccccgctgataacaaaaaaggccgatgataaaaaagagctcgtagtcgtagaagaatccaaatccagttaccccctccccacccaccccaaaagcccaaactccggtgccatcagtgtattctctaatcacctcctctcctccctccgctccttcgtcctccccgcgaagggaggggtgtgtcctgtgcccgccaccgcgtgggatgctcacgcttcgtctccgccaccgcctctccggttgatccgccgctgaggagaacatcagaactgattgaagaacagggttggtaagtggagggagcgagatggggttcgacccactggagtggtactgccagccggtcaaggatggtgtgtggtcgcatgtggttgagaatgcgttcggcgcctacactccatgtggcactgacacccttgtagtctgcatctcatacctcgcactctttggagtttgcttctatcgtatatggaggacgacgagggactacacagtgcagcggtacaagttacgttcaccatactacaactacctgcttggactgctcgtggtgtactgcatagcagagccgctttatcggatcatcactggtacctccatcatgaacttggatgggcagcctggccttgctccatttgagattgtctcattgatcattgagtctgttgcttggtgctgtatgcttgtaatgattctgcttgaaacaagaatttacatcaatgagttcagatggtacatccgatttgtggttatttacatgatggttggcgaagctgctatgttcaatcttgtgctctctgtgaggcagtactacagttcaagttcaatcttttacctatactgcagtgagattgtatgccagttcttgtttggaattctcatggtggtttatctgcctagcttggatccatatccgggttataccccgatcaggaatgaagtgttggttgataatactgattatgaacctcttcccggcggtgagcagatttgccctgagagacatgccaacatatttgccagaatattcttttcatggatgactcctttaatgcaacaaggatttagaaggcccattacagataaggatatctggaaattggatagctgggatgagactgaaactttgtatagccagttccagaaacgctggaatgatgagcttcaaaaaccaaacccttggctgttacgagctcttcatagtagtctttggggaaggttctggctgggtggatttttcaagattggcaatgatgcttctcaatttgttggtccacttgtattgaacctgttgttagagtctatgcaaaaaggtgatccatcttggagcgggtacatctatgctttctcaatctttgcaggagtgtcacttggggttcttgctgaggcacagtactttcagaacgtcatgcgtgtgggtttcaggttgaggtccacattgattgcagctgttttccgcaaatctttgcgactaactaatgatagtcgtagaaagtttgcttctgggaggattaccaatttgatttcaactgatgcggagtcccttcagcaagtgtgccagcagcttcacagcctatggtctgctcctttccgcattgttatttccatggtccttctatatgcacagcttggtcctgcagcattagtcggtgcactcatgctggttcttttgtttccaattcagactgtaatcatcagcaaaatgcaaaaacttactaaagaggggttgcaaaggaccgacaagcgaatcagtctcatgaatgaagtattagctgctatggatacagtcaagtgctatgcttgggagcaaagtttccagtcaaaagtgcaggacatccgtgatgatgaactttcttggttccgcagggctcagttgcttgctgcgctgaatagctttatcctgaacagtataccggtcgttgtcactgttgtttcatttggtgtatattctctactgggaggtgatttgacaccagcaaaggcgtttacttctctttcattatttgcagtcttaaggtttccacttttcatgctcccgaatctgataactcaggtggttaattgtaaggtgtcattgaagcgtctggaagatctcctgttggctgaagagagattacttctgccaaatccacctattgatcctgatcttccagccatttctatcaagaatgggtatttttcatgggaatcagaggctcagagaccaactttatcaaatgtcaatctggatgtacctgttggaagtttagttgcaatagtaggaagcactggtgagggtaaaacttctctcatatctgcaatgcttggagaaataccaccagtatctggatcaggtacctcagtggtcattcgtggatcggtggcttacgttcctcaagtttcctggatcttcaatgctactgtacgtgacaatattttgtttgggtctccctttcaacccccacgatacgagaaagcaattgatgccacttcattgcggcatgaccttgacctactcccaggaggcgatctgacagagattggtgaaagaggagttaatattagtggagggcagaagcaaagagtttcaatggcaagagctgtgtattctgattcagatgtgtacatatttgatgatccactcagtgcattagatgcccatgttggccggcaggtatttgataaatgtatcaaaggcgaactgcagcataaaacccgggttcttgttaccaatcagctgcattttctgccatatgtcgataaaatactgctaattcatgatggtgtaattaaagaggagggtacttttgatgaacttagcaacagtggggagctcttcaagaagctcatggaaaatgctggaaaaatggaggaacaggtggaagaggatgaaagtaaaccaaaggatgttgcaaaacaaactgtgaacggtgatgttacaatagctgatgaaggttcacagaagagccaggatagttctagtaaaacaaaaccaggaaaatctgtccttattaagcaagaggaaagggaaactggggttgtcagtgcgagggtcctttcacgttacaaaaatgcactgggagggatatgggtggtgtccatactcttcttttgctatgcactgactgaagttcttcgcatttcaagtagcacatggttgagcatttggactgatgagggttctctgaaaattcatggctctggttattataatttgatctatggaattctttcctttgggcaggttctagtcacactctcaaattcatactggttgattatatcaagtcttcgggcagccaaaaggcttcatgatgccatgctccgatcaatattgagagctcccatggtattttttcatacaaacccacttggacggatcatcaacagattttcgaaggatatgggtgacattgaccgaaatgtcgctgtatttgtcaatatgtttatggcacaaatatctcagttgctctcaactttcgttctcatcggctttgtcagcaccatgtctctttgggctatcatgccactcctgattttgttttatgcagcttacctctattaccaggcaacatctcgcgaggtgaagcgtctggattccattaccaggtctcctgtgtatgctcagttttcagaggctttgaatggtctgtccacaatccgtgcctataaagcctatgatagaatggcaaatatcaatgggagatcaatggacaacaacattaggttcacacttgtgaacatgggtgcaaataggtggctagctattcgtctggagacattgggtggcatcatgatatggtttacagcaacatttgctgttatgcaaaatcaacgagcagagaatcagaaggcctttgcttctacaatgggtcttcttcttacttacactctcaatattaccaatttactcacagctgttcttcgtcttgctagtcttgctgaaaatagtttaaatgctgttgaacgggtcggaacatacattgagttaccttcggaagctcctcctgtcattgaggatcataggccaccccctggttggccatcatcaggtgtcatcaagtttgaagacgttgtgcttcgatatcgaccagaacttcctcctgttcttcatggcatatcttttgttattaatggaagtgagaaggtaggaatagttggcagaacaggtgctggcaaatctagcatgcttaatgctttgttccgtatcgtggagcttgaacgagggagaatattaattgatgattgtgacacttctaagtttggaatttgggacttgcgcaaagttctaggaataataccacaggcaccagttctattctcaggttctgttcggtttaatctggatccctttaatgagcacaatgatgcggacctctgggaggctctggaaagggctcatctaaaagatgttataaggaggaattctttaggattggatgctgaggtttctgaagctggtgaaaatttcagtgttggacaacgacagctgttgagcttagctcgtgcgctgctgagaagagcaaagatacttgtccttgatgaggcaacagcagcagttgacgtgcggactgatgctcttattcagaaaacaatccgagaagaattcaagagttgcacaatgctcataattgcccaccgtttgaacacggtcattgactgtgacaggttgcttattctaagttctgggcaggttctggaattcgactctcctgagaatcttctaagcaacgaggggagtgctttctccaagatggtgcaaagtacaggacctagcaacgcagaatacctcaagagtcttgtatttgcaagtggagaagagaggtcccggagggaagaaatcaagctgcaagatatccaaaggagatgggttgcatctaaccgatgggctgaagctgcccagtttgcgcttgctagaagcctcacatcatcacatagtgacctccttgcattagaagctgccgagggaaataatattctgaggagaacaaaggatgctgtaatcactctgcaaagcgtactggaagggaagcacaatactgaaatcgatgaatctctaactcagtatcaggtcccagctgatcgatggtggtcttcactttacaaagtgatcgaaggcctcgccacaatgagcagattgggccgcaaccgtctgcagcaaccttcttataattttgagaacaacaattctattgactgggaccaaatgtagatgtagaattctggatcacaacagcattgtggagtaggctggaggtgtagttatttctggcggatttgattcctgcggtgtgtaaacgctgcagcaacacgtaacttgcgaataaggaacgagttttgccacagcaggacgatccttgtaccgtcgtccgcaagggttgtaatttctcagggaccgttacgacacgattgtatgtcaggttttgacagtttgagccaatgcaattcttctaatgaaaaagacaagtgcatgtgaatggttagcatctgcctatcgcctatcgggtatcatgtggagtcgtctggtataccgtcctacacggctacacctgagaacgaagcgaccttacccccaactatcaccttgtagcgatccgaagttgttcatcttcgagtttcagttctctaactccatcgtagctaagcgtttcagcaatgggtcaagagagagatttaactatttgtcaccgttaggaaggccacatatttgtttgcttgttttacgtggcaactgtacgattttttatcggaaacgctaactggtctattttattgatgtaccatgttaaattagcatgtcacggtggatcctagtcttttttccggagagacacctggaa

SEQ ID NO: 19331 - DNA, 5726 bp, Zea Mays
atgataaaaaagagctcgtagtcgtagaagaatccaaatccagttaccccctccccacccaccccaaaagcccaaactccggtgccatcagtgtattctctaatcacctcctctcctccctccgctccttcgtcctccccgcgaagggaggggtgtgtcctgtgcccgccaccgcgtgggatgctcacgcttcgtctccgccaccgcctctccggttgatccgccgctgaggagaacatcagaactgattgaagaacagggttggtaagtggagggagcgagatggggttcgacccactggagtggtactgccagccggtcaaggatggtgtgtggtcgcatgtggttgagaatgcgttcggcgcctacactccatgtggcactgacacccttgtagtctgcatctcatacctcgcactctttggagtttgcttctatcgtatatggaggacgacgagggactacacagtgcagcggtacaagttacgttcaccatactacaactacctgcttggactgctcgtggtgtactgcatagcagagccgctttatcggatcatcactggtacctccatcatgaacttggatgggcagcctggccttgctccatttgagaatttacatcaatgagttcagatggtacatccgatttgtggttatttacatgatggttggcgaagctgctatgttcaatcttgtgctctctgtgaggcagtactacagttcaagttcaatcttttacctatactgcagtgagattgtatgccagttcttgtttggaattctcatggtggtttatctgcctagcttggatccatatccgggttataccccgatcaggaatgaagtgttggttgataatactgattatgaacctcttcccggcggtgagcagatttgccctgagagacatgccaacatatttgccagaatattcttttcatggatgactcctttaatgcaacaaggatttagaaggcccattacagataaggatatctggaaattggatagctgggatgagactgaaactttgtatagccagttccagaaacgctggaatgatgagcttcaaaaaccaaacccttggctgttacgagctcttcatagtagtctttggggaaggttctggctgggtggatttttcaagattggcaatgatgcttctcaatttgttggtccacttgtattgaacctgttgttagagtctatgcaaaaaggtgatccatcttggagcgggtacatctatgctttctcaatctttgcaggagtgtcacttggggttcttgctgaggcacagtactttcagaacgtcatgcgtgtgggtttcaggttgaggtccacattgattgcagctgttttccgcaaatctttgcgactaactaatgatagtcgtagaaagtttgcttctgggaggattaccaatttgatttcaactgatgcggagtcccttcagcaagtgtgccagcagcttcacagcctatggtctgctcctttccgcattgttatttccatggtccttctatatgcacagcttggtcctgcagcattagtcggtgcactcatgctggttcttttgtttccaattcagactgtaatcatcagcaaaatgcaaaaacttactaaagaggggttgcaaaggaccgacaagcgaatcagtctcatgaatgaagtattagctgctatggatacagtcaagtgctatgcttgggagcaaagtttccagtcaaaagtgcaggacatccgtgatgatgaactttcttggttccgcagggctcagttgcttgctgcgctgaatagctttatcctgaacagtataccggtcgttgtcactgttgtttcatttggtgtatattctctactgggaggtgatttgacaccagcaaaggcgtttacttctctttcattatttgcagtcttaaggtttccacttttcatgctcccgaatctgataactcaggtggttaattgtaaggtgtcattgaagcgtctggaagatctcctgttggctgaagagagattacttctgccaaatccacctattgatcctgatcttccagccatttctatcaagaatgggtatttttcatgggaatcagaggctcagagaccaactttatcaaatgtcaatctggatgtacctgttggaagtttagttgcaatagtaggaagcactggtgagggtaaaacttctctcatatctgcaatgcttggagaaataccaccagtatctggatcaggtacctcagtggtcattcgtggatcggtggcttacgttcctcaagtttcctggatcttcaatgctactgtacgtgacaatattttgtttgggtctccctttcaacccccacgatacgagaaagcaattgatgccacttcattgcggcatgaccttgacctactcccaggaggcgatctgacagagattggtgaaagaggagttaatattagtggagggcagaagcaaagagtttcaatggcaagagctgtgtattctgattcagatgtgtacatatttgatgatccactcagtgcattagatgcccatgttggccggcaggtatttgataaatgtatcaaaggcgaactgcagcataaaacccgggttcttgttaccaatcagctgcattttctgccatatgtcgataaaatactgctaattcatgatggtgtaattaaagaggagggtacttttgatgaacttagcaacagtggggagctcttcaagaagctcatggaaaatgctggaaaaatggaggaacaggtggaagaggatgaaagtaaaccaaaggatgttgcaaaacaaactgtgaacggtgatgttacaatagctgatgaaggttcacagaagagccaggatagttctagtaaaacaaaaccaggaaaatctgtccttattaagcaagaggaaagggaaactggggttgtcagtgcgagggtcctttcacgttacaaaaatgcactgggagggatatgggtggtgtccatactcttcttttgctatgcactgactgaagttcttcgcatttcaagtagcacatggttgagcatttggactgatgagggttctctgaaaattcatggctctggttattataatttgatctatggaattctttcctttgggcaggttctagtcacactctcaaattcatactggttgattatatcaagtcttcgggcagccaaaaggcttcatgatgccatgctccgatcaatattgagagctcccatggtattttttcatacaaacccacttggacggatcatcaacagattttcgaaggatatgggtgacattgaccgaaatgtcgctgtatttgtcaatatgtttatggcacaaatatctcagttgctctcaactttcgttctcatcggctttgtcagcaccatgtctctttgggctatcatgccactcctgattttgttttatgcagcttacctctattaccaggcaacatctcgcgaggtgaagcgtctggattccattaccaggtctcctgtgtatgctcagttttcagaggctttgaatggtctgtccacaatccgtgcctataaagcctatgatagaatggcaaatatcaatgggagatcaatggacaacaacattaggttcacacttgtgaacatgggtgcaaataggtggctagctattcgtctggagacattgggtggcatcatgatatggtttacagcaacatttgctgttatgcaaaatcaacgagcagagaatcagaaggcctttgcttctacaatgggtcttcttcttacttacactctcaatattaccaatttactcacagctgttcttcgtcttgctagtcttgctgaaaatagtttaaatgctgttgaacgggtcggaacatacattgagttaccttcggaagctcctcctgtcattgaggatcataggccaccccctggttggccatcatcaggtgtcatcaagtttgaagacgttgtgcttcgatatcgaccagaacttcctcctgttcttcatggcatatcttttgttattaatggaagtgagaaggtaggaatagttggcagaacaggtgctggcaaatctagcatgcttaatgctttgttccgtatcgtggagcttgaacgagggagaatattaattgatgattgtgacacttctaagtttggaatttgggacttgcgcaaagttctaggaataataccacaggcaccagttctattctcaggttctgttcggtttaatctggatccctttaatgagcacaatgatgcggacctctgggaggctctggaaagggctcatctaaaagatgttataaggaggaattctttaggattggatgctgaggtttctgaagctggtgaaaatttcagtgttggacaacgacagctgttgagcttagctcgtgcgctgctgagaagagcaaagatacttgtccttgatgaggcaacagcagcagttgacgtgcggactgatgctcttattcagaaaacaatccgagaagaattcaagagttgcacaatgctcataattgcccaccgtttgaacacggtcattgactgtgacaggttgcttattctaagttctgggcaggttctggaattcgactctcctgagaatcttctaagcaacgaggggagtgctttctccaagatggtgcaaagtacaggacctagcaacgcagaatacctcaagagtcttgtatttgcaagtggagaagagaggtcccggagggaagaaatcaagctgcaagatatccaaaggagatgggttgcatctaaccgatgggctgaagctgcccagtttgcgcttgctagaagcctcacatcatcacatagtgacctccttgcattagaagctgccgagggaaataatattctgaggagaacaaaggatgctgtaatcactctgcaaagcgtactggaagggaagcacaatactgaaatcgatgaatctctaactcagtatcaggtcccagctgatcgatggtggtcttcactttacaaagtgatcgaaggcctcgccacaatgagcagattgggccgcaaccgtctgcagcaaccttcttataattttgagaacaacaattctattgactgggaccaaatgtagatgtagaattctggatcacaacagcattgtggagtaggctggaggtgtagttatttctggcggatttgattcctgcggtgtgtaaacgctgcagcaacacgtaacttgcgaataaggaacgagttttgccacagcaggacgatccttgtaccgtcgtccgcaagggttgtaatttctcagggaccgttacgacacgattgtatgtcaggttttgacagtttgagccaatgcaattcttctaatgaaaaagacaagtgcatgtgaatggttagcatctgcctatcgcctatcgggtatcatgtggagtcgtctggtataccgtcctacacggctacacctgagaacgaagcgaccttacccccaactatcaccttgtagcgatccgaagttgttcatcttcgagtttcagttctctaactccatcgtagctaagcgtttcagcaatgggtcaagagagagatttaactatttgtcaccgttaggaaggccacatatttgtttgcttgttttacgtggcaactgtacgattttttatcggaaacgctaactggtctattttattgatgtaccatgttaaattagcatgtcacggtggatcctagtcttttttccggagagacacctggaa

SEQ ID NO: 19332 - DNA, 5777 bp, Zea Mays
agagctcgtagtcgtagaagaatccaaatccagttaccccctccccacccaccccaaaagcccaaactccggtgccatcagtgtattctctaatcacctcctctcctccctccgctccttcgtcctccccgcgaagggaggggtgtgtcctgtgcccgccaccgcgtgggatgctcacgcttcgtctccgccaccgcctctccggttgatccgccgctgaggagaacatcagaactgattgaagaacagggttggtaagtggagggagcgagatggggttcgacccactggagtggtactgccagccggtcaaggatggtgtgtggtcgcatgtggttgagaatgcgttcggcgcctacactccatgtggcactgacacccttgtagtctgcatctcatacctcgcactctttggagtttgcttctatcgtatatggaggacgacgagggactacacagtgcagcggtacaagttacgttcaccatactacaactacctgcttggactgctcgtggtgtactgcatagcagagccgctttatcggatcatcactggtacctccatcatgaacttggatgggcagcctggccttgctccatttgagattgtctcattgatcattgagtctgttgcttggtgctgtatgcttgtaatgattctgcttgaaacaagaatttacatcaatgagttcagatggtacatccgatttgtggttatttacatgatggttggcgaagctgctatgttcaatcttgtgctctctgtgaggcagtactacagttcaagttcaatcttttacctatactgcagtgagattgtatgccagttcttgtttggaattctcatggtggtttatctgcctagcttggatccatatccgggttataccccgatcaggaatgaagtgttggttgataatactgattatgaacctcttcccggcggtgagcagatttgccctgagagacatgccaacatatttgccagaatattcttttcatggatgactcctttaatgcaacaaggatttagaaggcccattacagataaggatatctggaaattggatagctgggatgagactgaaactttgtatagccagttccagaaacgctggaatgatgagcttcaaaaaccaaacccttggctgttacgagctcttcatagtagtctttggggaaggttctggctgggtggatttttcaagattggcaatgatgcttctcaatttgttggtccacttgtattgaacctgttgttagagtctatgcaaaaaggtgatccatcttggagcgggtacatctatgctttctcaatctttgcaggagtgtcacttggggttcttgctgaggcacagtactttcagaacgtcatgcgtgtgggtttcaggttgaggtccacattgattgcagctgttttccgcaaatctttgcgactaactaatgatagtcgtagaaagtttgcttctgggaggattaccaatttgatttcaactgatgcggagtcccttcagcaagtgtgccagcagcttcacagcctatggtctgctcctttccgcattgttatttccatggtccttctatatgcacagcttggtcctgcagcattagtcggtgcactcatgctggttcttttgtttccaattcagactgtaatcatcagcaaaatgcaaaaacttactaaagaggggttgcaaaggaccgacaagcgaatcagtctcatgaatgaagtattagctgctatggatacagtcaagtgctatgcttgggagcaaagtttccagtcaaaagtgcaggacatccgtgatgatgaactttcttggttccgcagggctcagttgcttgctgcgctgaatagctttatcctgaacagtataccggtcgttgtcactgttgtttcatttggtgtatattctctactgggaggtgatttgacaccagcaaaggcgtttacttctctttcattatttgcagtcttaaggtttccacttttcatgctcccgaatctgataactcaggtggttaattgtaaggtgtcattgaagcgtctggaagatctcctgttggctgaagagagattacttctgccaaatccacctattgatcctgatcttccagccatttctatcaagaatgggtatttttcatgggaatcagaggctcagagaccaactttatcaaatgtcaatctggatgtacctgttggaagtttagttgcaatagtaggaagcactggtgagggtaaaacttctctcatatctgcaatgcttggagaaataccaccagtatctggatcaggtacctcagtggtcattcgtggatcggtggcttacgttcctcaagtttcctggatcttcaatgctactgtacgtgacaatattttgtttgggtctccctttcaacccccacgatacgagaaagcaattgatgccacttcattgcggcatgaccttgacctactcccaggaggcgatctgacagagattggtgaaagaggagttaatattagtggagggcagaagcaaagagtttcaatggcaagagctgtgtattctgattcagatgtgtacatatttgatgatccactcagtgcattagatgcccatgttggccggcaggtatttgataaatgtatcaaaggcgaactgcagcataaaacccgggttcttgttaccaatcagctgcattttctgccatatgtcgataaaatactgctaattcatgatggtgtaattaaagaggagggtacttttgatgaacttagcaacagtggggagctcttcaagaagctcatggaaaatgctggaaaaatggaggaacaggtggaagaggatgaaagtaaaccaaaggatgttgcaaaacaaactgtgaacggtgatgttacaatagctgatgaaggttcacagaagagccaggatagttctagtaaaacaaaaccaggaaaatctgtccttattaagcaagaggaaagggaaactggggttgtcagtgcgagggtcctttcacgttacaaaaatgcactgggagggatatgggtggtgtccatactcttcttttgctatgcactgactgaagttcttcgcatttcaagtagcacatggttgagcatttggactgatgagggttctctgaaaattcatggctctggttattataatttgatctatggaattctttcctttgggcagtcacactctcaaattcatactggttgattatatcaagtcttcgggcagccaaaaggcttcatgatgccatgctccgatcaatattgagagctcccatggtattttttcatacaaacccacttggacggatcatcaacagattttcgaaggatatgggtgacattgaccgaaatgtcgctgtatttgtcaatatgtttatggcacaaatatctcagttgctctcaactttcgttctcatcggctttgtcagcaccatgtctctttgggctatcatgccactcctgattttgttttatgcagcttacctctattaccaggcaacatctcgcgaggtgaagcgtctggattccattaccaggtctcctgtgtatgctcagttttcagaggctttgaatggtctgtccacaatccgtgcctataaagcctatgatagaatggcaaatatcaatgggagatcaatggacaacaacattaggttcacacttgtgaacatgggtgcaaataggtggctagctattcgtctggagacattgggtggcatcatgatatggtttacagcaacatttgctgttatgcaaaatcaacgagcagagaatcagaaggcctttgcttctacaatgggtcttcttcttacttacactctcaatattaccaatttactcacagctgttcttcgtcttgctagtcttgctgaaaatagtttaaatgctgttgaacgggtcggaacatacattgagttaccttcggaagctcctcctgtcattgaggatcataggccaccccctggttggccatcatcaggtgtcatcaagtttgaagacgttgtgcttcgatatcgaccagaacttcctcctgttcttcatggcatatcttttgttattaatggaagtgagaaggtaggaatagttggcagaacaggtgctggcaaatctagcatgcttaatgctttgttccgtatcgtggagcttgaacgagggagaatattaattgatgattgtgacacttctaagtttggaatttgggacttgcgcaaagttctaggaataataccacaggcaccagttctattctcaggttctgttcggtttaatctggatccctttaatgagcacaatgatgcggacctctgggaggctctggaaagggctcatctaaaagatgttataaggaggaattctttaggattggatgctgaggtttctgaagctggtgaaaatttcagtgttggacaacgacagctgttgagcttagctcgtgcgctgctgagaagagcaaagatacttgtccttgatgaggcaacagcagcagttgacgtgcggactgatgctcttattcagaaaacaatccgagaagaattcaagagttgcacaatgctcataattgcccaccgtttgaacacggtcattgactgtgacaggttgcttattctaagttctgggcaggttctggaattcgactctcctgagaatcttctaagcaacgaggggagtgctttctccaagatggtgcaaagtacaggacctagcaacgcagaatacctcaagagtcttgtatttgcaagtggagaagagaggtcccggagggaagaaatcaagctgcaagatatccaaaggagatgggttgcatctaaccgatgggctgaagctgcccagtttgcgcttgctagaagcctcacatcatcacatagtgacctccttgcattagaagctgccgagggaaataatattctgaggagaacaaaggatgctgtaatcactctgcaaagcgtactggaagggaagcacaatactgaaatcgatgaatctctaactcagtatcaggtcccagctgatcgatggtggtcttcactttacaaagtgatcgaaggcctcgccacaatgagcagattgggccgcaaccgtctgcagcaaccttcttataattttgagaacaacaattctattgactgggaccaaatgtagatgtagaattctggatcacaacagcattgtggagtaggctggaggtgtagttatttctggcggatttgattcctgcggtgtgtaaacgctgcagcaacacgtaacttgcgaataaggaacgagttttgccacagcaggacgatccttgtaccgtcgtccgcaagggttgtaatttctcagggaccgttacgacacgattgtatgtcaggttttgacagtttgagccaatgcaattcttctaatgaaaaagacaagtgcatgtgaatggttagcatctgcctatcgcctatcgggtatcatgtggagtcgtctggtataccgtcctacacggctacacctgagaacgaagcgaccttacccccaactatcaccttgtagcgatccgaagttgttcatcttcgagtttcagttctctaactccatcgtagctaagcgtttcagcaatgggtcaagagagagatttaactatttgtcaccgttaggaaggccacatatttgtttgcttgttttacgtggcaactgtacgattttttatcggaaacgctaactggtctattttattgatgtaccatgttaaattagcatgtcacggtggatcctagtcttttttccggagagacacctggaa

SEQ ID NO: 19333 - DNA, 5641 bp, Zea Mays
caaaagcccaaactccggtgccatcagtgtattctctaatcacctcctctcctccctccgctccttcgtcctccccgcgaagggaggggtgtgtcctgtgcccgccaccgcgtgggatgctcacgcttcgtctccgccaccgcctctccggttgatccgccgctgaggagaacatcagaactgattgaagaacagggttggtaagtggagggagcgagatggggttcgacccactggagtggtactgccagccggtcaaggatggtgtgtggtcgcatgtggttgagaatgcgttcggcgcctacactccatgtggcactgacacccttgtagtctgcatctcatacctcgcactctttggagtttgcttctatcgtatatggaggacgacgagggactacacagtgcagcggtacaagttacgttcaccatactacaactacctgcttggactgctcgtggtgtactgcatagcagagccgctttatcggatcatcactggtacctccatcatgaacttggatgggcagcctggccttgctccatttgagatggtacatccgatttgtggttatttacatgatggttggcgaagctgctatgttcaatcttgtgctctctgtgaggcagtactacagttcaagttcaatcttttacctatactgcagtgagattgtatgccagttcttgtttggaattctcatggtggtttatctgcctagcttggatccatatccgggttataccccgatcaggaatgaagtgttggttgataatactgattatgaacctcttcccggcggtgagcagatttgccctgagagacatgccaacatatttgccagaatattcttttcatggatgactcctttaatgcaacaaggatttagaaggcccattacagataaggatatctggaaattggatagctgggatgagactgaaactttgtatagccagttccagaaacgctggaatgatgagcttcaaaaaccaaacccttggctgttacgagctcttcatagtagtctttggggaaggttctggctgggtggatttttcaagattggcaatgatgcttctcaatttgttggtccacttgtattgaacctgttgttagagtctatgcaaaaaggtgatccatcttggagcgggtacatctatgctttctcaatctttgcaggagtgtcacttggggttcttgctgaggcacagtactttcagaacgtcatgcgtgtgggtttcaggttgaggtccacattgattgcagctgttttccgcaaatctttgcgactaactaatgatagtcgtagaaagtttgcttctgggaggattaccaatttgatttcaactgatgcggagtcccttcagcaagtgtgccagcagcttcacagcctatggtctgctcctttccgcattgttatttccatggtccttctatatgcacagcttggtcctgcagcattagtcggtgcactcatgctggttcttttgtttccaattcagactgtaatcatcagcaaaatgcaaaaacttactaaagaggggttgcaaaggaccgacaagcgaatcagtctcatgaatgaagtattagctgctatggatacagtcaagtgctatgcttgggagcaaagtttccagtcaaaagtgcaggacatccgtgatgatgaactttcttggttccgcagggctcagttgcttgctgcgctgaatagctttatcctgaacagtataccggtcgttgtcactgttgtttcatttggtgtatattctctactgggaggtgatttgacaccagcaaaggcgtttacttctctttcattatttgcagtcttaaggtttccacttttcatgctcccgaatctgataactcaggtggttaattgtaaggtgtcattgaagcgtctggaagatctcctgttggctgaagagagattacttctgccaaatccacctattgatcctgatcttccagccatttctatcaagaatgggtatttttcatgggaatcagaggctcagagaccaactttatcaaatgtcaatctggatgtacctgttggaagtttagttgcaatagtaggaagcactggtgagggtaaaacttctctcatatctgcaatgcttggagaaataccaccagtatctggatcaggtacctcagtggtcattcgtggatcggtggcttacgttcctcaagtttcctggatcttcaatgctactgtacgtgacaatattttgtttgggtctccctttcaacccccacgatacgagaaagcaattgatgccacttcattgcggcatgaccttgacctactcccaggaggcgatctgacagagattggtgaaagaggagttaatattagtggagggcagaagcaaagagtttcaatggcaagagctgtgtattctgattcagatgtgtacatatttgatgatccactcagtgcattagatgcccatgttggccggcaggtatttgataaatgtatcaaaggcgaactgcagcataaaacccgggttcttgttaccaatcagctgcattttctgccatatgtcgataaaatactgctaattcatgatggtgtaattaaagaggagggtacttttgatgaacttagcaacagtggggagctcttcaagaagctcatggaaaatgctggaaaaatggaggaacaggtggaagaggatgaaagtaaaccaaaggatgttgcaaaacaaactgtgaacggtgatgttacaatagctgatgaaggttcacagaagagccaggatagttctagtaaaacaaaaccaggaaaatctgtccttattaagcaagaggaaagggaaactggggttgtcagtgcgagggtcctttcacgttacaaaaatgcactgggagggatatgggtggtgtccatactcttcttttgctatgcactgactgaagttcttcgcatttcaagtagcacatggttgagcatttggactgatgagggttctctgaaaattcatggctctggttattataatttgatctatggaattctttcctttgggcaggttctagtcacactctcaaattcatactggttgattatatcaagtcttcgggcagccaaaaggcttcatgatgccatgctccgatcaatattgagagctcccatggtattttttcatacaaacccacttggacggatcatcaacagattttcgaaggatatgggtgacattgaccgaaatgtcgctgtatttgtcaatatgtttatggcacaaatatctcagttgctctcaactttcgttctcatcggctttgtcagcaccatgtctctttgggctatcatgccactcctgattttgttttatgcagcttacctctattaccaggcaacatctcgcgaggtgaagcgtctggattccattaccaggtctcctgtgtatgctcagttttcagaggctttgaatggtctgtccacaatccgtgcctataaagcctatgatagaatggcaaatatcaatgggagatcaatggacaacaacattaggttcacacttgtgaacatgggtgcaaataggtggctagctattcgtctggagacattgggtggcatcatgatatggtttacagcaacatttgctgttatgcaaaatcaacgagcagagaatcagaaggcctttgcttctacaatgggtcttcttcttacttacactctcaatattaccaatttactcacagctgttcttcgtcttgctagtcttgctgaaaatagtttaaatgctgttgaacgggtcggaacatacattgagttaccttcggaagctcctcctgtcattgaggatcataggccaccccctggttggccatcatcaggtgtcatcaagtttgaagacgttgtgcttcgatatcgaccagaacttcctcctgttcttcatggcatatcttttgttattaatggaagtgagaaggtaggaatagttggcagaacaggtgctggcaaatctagcatgcttaatgctttgttccgtatcgtggagcttgaacgagggagaatattaattgatgattgtgacacttctaagtttggaatttgggacttgcgcaaagttctaggaataataccacaggcaccagttctattctcaggttctgttcggtttaatctggatccctttaatgagcacaatgatgcggacctctgggaggctctggaaagggctcatctaaaagatgttataaggaggaattctttaggattggatgctgaggtttctgaagctggtgaaaatttcagtgttggacaacgacagctgttgagcttagctcgtgcgctgctgagaagagcaaagatacttgtccttgatgaggcaacagcagcagttgacgtgcggactgatgctcttattcagaaaacaatccgagaagaattcaagagttgcacaatgctcataattgcccaccgtttgaacacggtcattgactgtgacaggttgcttattctaagttctgggcaggttctggaattcgactctcctgagaatcttctaagcaacgaggggagtgctttctccaagatggtgcaaagtacaggacctagcaacgcagaatacctcaagagtcttgtatttgcaagtggagaagagaggtcccggagggaagaaatcaagctgcaagatatccaaaggagatgggttgcatctaaccgatgggctgaagctgcccagtttgcgcttgctagaagcctcacatcatcacatagtgacctccttgcattagaagctgccgagggaaataatattctgaggagaacaaaggatgctgtaatcactctgcaaagcgtactggaagggaagcacaatactgaaatcgatgaatctctaactcagtatcaggtcccagctgatcgatggtggtcttcactttacaaagtgatcgaaggcctcgccacaatgagcagattgggccgcaaccgtctgcagcaaccttcttataattttgagaacaacaattctattgactgggaccaaatgtagatgtagaattctggatcacaacagcattgtggagtaggctggaggtgtagttatttctggcggatttgattcctgcggtgtgtaaacgctgcagcaacacgtaacttgcgaataaggaacgagttttgccacagcaggacgatccttgtaccgtcgtccgcaagggttgtaatttctcagggaccgttacgacacgattgtatgtcaggttttgacagtttgagccaatgcaattcttctaatgaaaaagacaagtgcatgtgaatggttagcatctgcctatcgcctatcgggtatcatgtggagtcgtctggtataccgtcctacacggctacacctgagaacgaagcgaccttacccccaactatcaccttgtagcgatccgaagttgttcatcttcgagtttcagttctctaactccatcgtagctaagcgtttcagcaatgggtcaagagagagatttaactatttgtcaccgttaggaaggccacatatttgtttgcttgttttacgtggcaactgtacgattttttatcggaaacgctaactggtctattttattgatgtaccatgttaaattagcatgtcacggtggatcctagtcttttttccggagagacacctggaa

SEQ ID NO: 19334 - DNA, 5605 bp, Zea Mays
aaaagcccaaactccggtgccatcagtgtattctctaatcacctcctctcctccctccgctccttcgtcctccccgcgaagggaggggtgtgtcctgtgcccgccaccgcgtgggatgctcacgcttcgtctccgccaccgcctctccggttgatccgccgctgaggagaacatcagaactgattgaagaacagggttggtaagtggagggagcgagatggggttcgacccactggagtggtactgccagccggtcaaggatggtgtgtggtcgcatgtggttgagaatgcgttcggcgcctacactccatgtggcactgacacccttgtagtctgcatctcatacctcgcactctttggagtttgcttctatcgtatatggaggacgacgagggactacacagtgcagcggtacaagttacgttcaccatactacaactacctgcttggactgctcgtggtgtactgcatagcagagccgctttatcggatcatcactggtacctccatcatgaacttggatgggcagcctggccttgctccatttgagattgtctcattgatcattgagtctgttgcttggtgctgtatgcttgtaatgattctgcttgaaacaagaatttacatcaatgagttcagatggtacatccgatttgtggttatttacatgatggttggcgaagctgctatgttcaatcttgtgctctctgtgaggcagtactacagttcaagttcaatcttttacctatactgcagtgagattgtatgccagttcttgtttggaattctcatggtggtttatctgcctagcttggatccatatccgggttataccccgatcaggaatgaagtgttggttgataatactgattatgaacctcttcccggcggtgagcagatttgccctgagagacatgccaacatatttgccagaatattcttttcatggatgactcctttaatgcaacaaggatttagaaggcccattacagataaggatatctggaaattggatagctgggatgagactgaaactttgtatagccagttccagaaacgctggaatgatgagcttcaaaaaccaaacccttggctgttacgagctcttcatagtagtctttggggaaggttctggctgggtggatttttcaagattggcaatgatgcttctcaatttgttggtccacttgtattgaacctgttgttagagtctatgcaaaaaggtgatccatcttggagcgggtacatctatgctttctcaatctttgcaggagtgtcacttggggttcttgctgaggcacagtactttcagaacgtcatgcgtgtgggtttcaggttgaggtccacattgattgcagctgttttccgcaaatctttgcgactaactaatgatagtcgtagaaagtttgcttctgggaggattaccaatttgatttcaactgatgcggagtcccttcagcaagtgtgccagcagcttcacagcctatggtctgctcctttccgcattgttatttccatggtccttctatatgcacagcttggtcctgcagcattagtcggtgcactcatgctggttcttttgtttccaattcagactgtaatcatcagcaaaatgcaaaaacttactaaagaggggttgcaaaggaccgacaagcgaatcagtctcatgaatgaagtattagctgctatggatacagtcaagtgctatgcttgggagcaaagtttccagtcaaaagtgcaggacatccgtgatgatgaactttcttggttccgcagggctcagttgcttgctgcgtcttaaggtttccacttttcatgctcccgaatctgataactcaggtggttaattgtaaggtgtcattgaagcgtctggaagatctcctgttggctgaagagagattacttctgccaaatccacctattgatcctgatcttccagccatttctatcaagaatgggtatttttcatgggaatcagaggctcagagaccaactttatcaaatgtcaatctggatgtacctgttggaagtttagttgcaatagtaggaagcactggtgagggtaaaacttctctcatatctgcaatgcttggagaaataccaccagtatctggatcaggtacctcagtggtcattcgtggatcggtggcttacgttcctcaagtttcctggatcttcaatgctactgtacgtgacaatattttgtttgggtctccctttcaacccccacgatacgagaaagcaattgatgccacttcattgcggcatgaccttgacctactcccaggaggcgatctgacagagattggtgaaagaggagttaatattagtggagggcagaagcaaagagtttcaatggcaagagctgtgtattctgattcagatgtgtacatatttgatgatccactcagtgcattagatgcccatgttggccggcaggtatttgataaatgtatcaaaggcgaactgcagcataaaacccgggttcttgttaccaatcagctgcattttctgccatatgtcgataaaatactgctaattcatgatggtgtaattaaagaggagggtacttttgatgaacttagcaacagtggggagctcttcaagaagctcatggaaaatgctggaaaaatggaggaacaggtggaagaggatgaaagtaaaccaaaggatgttgcaaaacaaactgtgaacggtgatgttacaatagctgatgaaggttcacagaagagccaggatagttctagtaaaacaaaaccaggaaaatctgtccttattaagcaagaggaaagggaaactggggttgtcagtgcgagggtcctttcacgttacaaaaatgcactgggagggatatgggtggtgtccatactcttcttttgctatgcactgactgaagttcttcgcatttcaagtagcacatggttgagcatttggactgatgagggttctctgaaaattcatggctctggttattataatttgatctatggaattctttcctttgggcaggttctagtcacactctcaaattcatactggttgattatatcaagtcttcgggcagccaaaaggcttcatgatgccatgctccgatcaatattgagagctcccatggtattttttcatacaaacccacttggacggatcatcaacagattttcgaaggatatgggtgacattgaccgaaatgtcgctgtatttgtcaatatgtttatggcacaaatatctcagttgctctcaactttcgttctcatcggctttgtcagcaccatgtctctttgggctatcatgccactcctgattttgttttatgcagcttacctctattaccaggcaacatctcgcgaggtgaagcgtctggattccattaccaggtctcctgtgtatgctcagttttcagaggctttgaatggtctgtccacaatccgtgcctataaagcctatgatagaatggcaaatatcaatgggagatcaatggacaacaacattaggttcacacttgtgaacatgggtgcaaataggtggctagctattcgtctggagacattgggtggcatcatgatatggtttacagcaacatttgctgttatgcaaaatcaacgagcagagaatcagaaggcctttgcttctacaatgggtcttcttcttacttacactctcaatattaccaatttactcacagctgttcttcgtcttgctagtcttgctgaaaatagtttaaatgctgttgaacgggtcggaacatacattgagttaccttcggaagctcctcctgtcattgaggatcataggccaccccctggttggccatcatcaggtgtcatcaagtttgaagacgttgtgcttcgatatcgaccagaacttcctcctgttcttcatggcatatcttttgttattaatggaagtgagaaggtaggaatagttggcagaacaggtgctggcaaatctagcatgcttaatgctttgttccgtatcgtggagcttgaacgagggagaatattaattgatgattgtgacacttctaagtttggaatttgggacttgcgcaaagttctaggaataataccacaggcaccagttctattctcaggttctgttcggtttaatctggatccctttaatgagcacaatgatgcggacctctgggaggctctggaaagggctcatctaaaagatgttataaggaggaattctttaggattggatgctgaggtttctgaagctggtgaaaatttcagtgttggacaacgacagctgttgagcttagctcgtgcgctgctgagaagagcaaagatacttgtccttgatgaggcaacagcagcagttgacgtgcggactgatgctcttattcagaaaacaatccgagaagaattcaagagttgcacaatgctcataattgcccaccgtttgaacacggtcattgactgtgacaggttgcttattctaagttctgggcaggttctggaattcgactctcctgagaatcttctaagcaacgaggggagtgctttctccaagatggtgcaaagtacaggacctagcaacgcagaatacctcaagagtcttgtatttgcaagtggagaagagaggtcccggagggaagaaatcaagctgcaagatatccaaaggagatgggttgcatctaaccgatgggctgaagctgcccagtttgcgcttgctagaagcctcacatcatcacatagtgacctccttgcattagaagctgccgagggaaataatattctgaggagaacaaaggatgctgtaatcactctgcaaagcgtactggaagggaagcacaatactgaaatcgatgaatctctaactcagtatcaggtcccagctgatcgatggtggtcttcactttacaaagtgatcgaaggcctcgccacaatgagcagattgggccgcaaccgtctgcagcaaccttcttataattttgagaacaacaattctattgactgggaccaaatgtagatgtagaattctggatcacaacagcattgtggagtaggctggaggtgtagttatttctggcggatttgattcctgcggtgtgtaaacgctgcagcaacacgtaacttgcgaataaggaacgagttttgccacagcaggacgatccttgtaccgtcgtccgcaagggttgtaatttctcagggaccgttacgacacgattgtatgtcaggttttgacagtttgagccaatgcaattcttctaatgaaaaagacaagtgcatgtgaatggttagcatctgcctatcgcctatcgggtatcatgtggagtcgtctggtataccgtcctacacggctacacctgagaacgaagcgaccttacccccaactatcaccttgtagcgatccgaagttgttcatcttcgagtttcagttctctaactccatcgtagctaagcgtttcagcaatgggtcaagagagagatttaactatttgtcaccgttaggaaggccacatatttgtttgcttgttttacgtggcaactgtacgattttttatcggaaacgctaactggtctattttattgatgtaccatgttaaattagcatgtcacggtggatcctagtcttttttccggagagacacctggaa

SEQ ID NO: 19335 - DNA, 5787 bp, Zea Mays
ggattctcgattctgtcgagatgataaagccccgttgtttatatcctcttttgccttttttgtgcggtcgtgcctggcgtgtcttagtggactagtggagtgggcatgtggcgccgcttccgccgccgccgctgcagcactactcgttcgtcagaatagtatagggtgcagttgcgtggagatccacccgctcgtggattggcttctcctgcgggttgcaactggagaacatcagaactgattgaagaacagggttggtaagtggagggagcgagatggggttcgacccactggagtggtactgccagccggtcaaggatggtgtgtggtcgcatgtggttgagaatgcgttcggcgcctacactccatgtggcactgacacccttgtagtctgcatctcatacctcgcactctttggagtttgcttctatcgtatatggaggacgacgagggactacacagtgcagcggtacaagttacgttcaccatactacaactacctgcttggactgctcgtggtgtactgcatagcagagccgctttatcggatcatcactggtacctccatcatgaacttggatgggcagcctggccttgctccatttgagattgtctcattgatcattgagtctgttgcttggtgctgtatgcttgtaatgattctgcttgaaacaagaatttacatcaatgagttcagatggtacatccgatttgtggttatttacatgatggttggcgaagctgctatgttcaatcttgtgctctctgtgaggcagtactacagttcaagttcaatcttttacctatactgcagtgagattgtatgccagttcttgtttggaattctcatggtggtttatctgcctagcttggatccatatccgggttataccccgatcaggaatgaagtgttggttgataatactgattatgaacctcttcccggcggtgagcagatttgccctgagagacatgccaacatatttgccagaatattcttttcatggatgactcctttaatgcaacaaggatttagaaggcccattacagataaggatatctggaaattggatagctgggatgagactgaaactttgtatagccagttccagaaacgctggaatgatgagcttcaaaaaccaaacccttggctgttacgagctcttcatagtagtctttggggaaggttctggctgggtggatttttcaagattggcaatgatgcttctcaatttgttggtccacttgtattgaacctgttgttagagtctatgcaaaaaggtgatccatcttggagcgggtacatctatgctttctcaatctttgcaggagtgtcacttggggttcttgctgaggcacagtactttcagaacgtcatgcgtgtgggtttcaggttgaggtccacattgattgcagctgttttccgcaaatctttgcgactaactaatgatagtcgtagaaagtttgcttctgggaggattaccaatttgatttcaactgatgcggagtcccttcagcaagtgtgccagcagcttcacagcctatggtctgctcctttccgcattgttatttccatggtccttctatatgcacagcttggtcctgcagcattagtcggtgcactcatgctggttcttttgtttccaattcagactgtaatcatcagcaaaatgcaaaaacttactaaagaggggttgcaaaggaccgacaagcgaatcagtctcatgaatgaagtattagctgctatggatacagtcaagtgctatgcttgggagcaaagtttccagtcaaaagtgcaggacatccgtgatgatgaactttcttggttccgcagggctcagttgcttgctgcgctgaatagctttatcctgaacagtataccggtcgttgtcactgttgtttcatttggtgtatattctctactgggaggtgatttgacaccagcaaaggcgtttacttctctttcattatttgcagtcttaaggtttccacttttcatgctcccgaatctgataactcaggtggttaattgtaaggtgtcattgaagcgtctggaagatctcctgttggctgaagagagattacttctgccaaatccacctattgatcctgatcttccagccatttctatcaagaatgggtatttttcatgggaatcagaggctcagagaccaactttatcaaatgtcaatctggatgtacctgttggaagtttagttgcaatagtaggaagcactggtgagggtaaaacttctctcatatctgcaatgcttggagaaataccaccagtatctggatcaggtacctcagtggtcattcgtggatcggtggcttacgttcctcaagtttcctggatcttcaatgctactgtacgtgacaatattttgtttgggtctccctttcaacccccacgatacgagaaagcaattgatgccacttcattgcggcatgaccttgacctactcccaggaggcgatctgacagagattggtgaaagaggagttaatattagtggagggcagaagcaaagagtttcaatggcaagagctgtgtattctgattcagatgtgtacatatttgatgatccactcagtgcattagatgcccatgttggccggcaggtatttgataaatgtatcaaaggcgaactgcagcataaaacccgggttcttgttaccaatcagctgcattttctgccatatgtcgataaaatactgctaattcatgatggtgtaattaaagaggagggtacttttgatgaacttagcaacagtggggagctcttcaagaagctcatggaaaatgctggaaaaatggaggaacaggtggaagaggatgaaagtaaaccaaaggatgttgcaaaacaaactgtgaacggtgatgttacaatagctgatgaaggttcacagaagagccaggatagttctagtaaaacaaaaccaggaaaatctgtccttattaagcaagaggaaagggaaactggggttgtcagtgcgagggtcctttcacgttacaaaaatgcactgggagggatatgggtggtgtccatactcttcttttgctatgcactgactgaagttcttcgcatttcaagtagcacatggttgagcatttggactgatgagggttctctgaaaattcatggctctggttattataatttgatctatggaattctttcctttgggcaggttctagtcacactctcaaattcatactggttgattatatcaagtcttcgggcagccaaaaggcttcatgatgccatgctccgatcaatattgagagctcccatggtattttttcatacaaacccacttggacggatcatcaacagattttcgaaggatatgggtgacattgaccgaaatgtcgctgtatttgtcaatatgtttatggcacaaatatctcagttgctctcaactttcgttctcatcggctttgtcagcaccatgtctctttgggctatcatgccactcctgattttgttttatgcagcttacctctattaccaggcaacatctcgcgaggtgaagcgtctggattccattaccaggtctcctgtgtatgctcagttttcagaggctttgaatggtctgtccacaatccgtgcctataaagcctatgatagaatggcaaatatcaatgggagatcaatggacaacaacattaggttcacacttgtgaacatgggtgcaaataggtggctagctattcgtctggagacattgggtggcatcatgatatggtttacagcaacatttgctgttatgcaaaatcaacgagcagagaatcagaaggcctttgcttctacaatgggtcttcttcttacttacactctcaatattaccaatttactcacagctgttcttcgtcttgctagtcttgctgaaaatagtttaaatgctgttgaacgggtcggaacatacattgagttaccttcggaagctcctcctgtcattgaggatcataggccaccccctggttggccatcatcaggtgtcatcaagtttgaagacgttgtgcttcgatatcgaccagaacttcctcctgttcttcatggcatatcttttgttattaatggaagtgagaaggtaggaatagttggcagaacaggtgctggcaaatctagcatgcttaatgctttgttccgtatcgtggagcttgaacgagggagaatattaattgatgattgtgacacttctaagtttggaatttgggacttgcgcaaagttctaggaataataccacaggcaccagttctattctcaggttctgttcggtttaatctggatccctttaatgagcacaatgatgcggacctctgggaggctctggaaagggctcatctaaaagatgttataaggaggaattctttaggattggatgctgaggtttctgaagctggtgaaaatttcagtgttggacaacgacagctgttgagcttagctcgtgcgctgctgagaagagcaaagatacttgtccttgatgaggcaacagcagcagttgacgtgcggactgatgctcttattcagaaaacaatccgagaagaattcaagagttgcacaatgctcataattgcccaccgtttgaacacggtcattgactgtgacaggttgcttattctaagttctgggcaggttctggaattcgactctcctgagaatcttctaagcaacgaggggagtgctttctccaagatggtgcaaagtacaggacctagcaacgcagaatacctcaagagtcttgtatttgcaagtggagaagagaggtcccggagggaagaaatcaagctgcaagatatccaaaggagatgggttgcatctaaccgatgggctgaagctgcccagtttgcgcttgctagaagcctcacatcatcacatagtgacctccttgcattagaagctgccgagggaaataatattctgaggagaacaaaggatgctgtaatcactctgcaaagcgtactggaagggaagcacaatactgaaatcgatgaatctctaactcagtatcaggtcccagctgatcgatggtggtcttcactttacaaagtgatcgaaggcctcgccacaatgagcagattgggccgcaaccgtctgcagcaaccttcttataattttgagaacaacaattctattgactgggaccaaatgtagatgtagaattctggatcacaacagcattgtggagtaggctggaggtgtagttatttctggcggatttgattcctgcggtgtgtaaacgctgcagcaacacgtaacttgcgaataaggaacgagttttgccacagcaggacgatccttgtaccgtcgtccgcaagggttgtaatttctcagggaccgttacgacacgattgtatgtcaggttttgacagtttgagccaatgcaattcttctaatgaaaaagacaagtgcatgtgaatggttagcatctgcctatcgcctatcgggtatcatgtggagtcgtctggtataccgtcctacacggctacacctgagaacgaagcgaccttacccccaactatcaccttgtagcgatccgaagttgttcatcttcgagtttcagttctctaactccatcgtagctaagcgtttcagcaatgggtcaagagagagatttaactatttgtcaccgttaggaaggccacatatttgtttgcttgttttacgtggcaactgtacgattttttatcggaaacgctaactggtctattttattgatgtaccatgttaaattagcatgtcacggtggatcctagtcttttttccggagagacacctggaa

SEQ ID NO: 19336 - DNA, 5672 bp, Zea Mays
cttttgccttttttgtgcggtcgtgcctggcgtgtcttagtggactagtggagtgggcatgtggcgccgcttccgccgccgccgctgcagcactactcgttcgtcagaatagtatagggtgcagttgcgtggagatccacccgctcgtggattggcttctcctgcgggttgcaactggagaacatcagaactgattgaagaacagggttggtaagtggagggagcgagatggggttcgacccactggagtggtactgccagccggtcaaggatggtgtgtggtcgcatgtggttgagaatgcgttcggcgcctacactccatgtggcactgacacccttgtagtctgcatctcatacctcgcactctttggagtttgcttctatcgtatatggaggacgacgagggactacacagtgcagcggtacaagttacgttcaccatactacaactacctgcttggactgctcgtggtgtactgcatagcagagccgctttatcggatcatcactggtacctccatcatgaacttggatgggcagcctggccttgctccatttgagaatttacatcaatgagttcagatggtacatccgatttgtggttatttacatgatggttggcgaagctgctatgttcaatcttgtgctctctgtgaggcagtactacagttcaagttcaatcttttacctatactgcagtgagattgtatgccagttcttgtttggaattctcatggtggtttatctgcctagcttggatccatatccgggttataccccgatcaggaatgaagtgttggttgataatactgattatgaacctcttcccggcggtgagcagatttgccctgagagacatgccaacatatttgccagaatattcttttcatggatgactcctttaatgcaacaaggatttagaaggcccattacagataaggatatctggaaattggatagctgggatgagactgaaactttgtatagccagttccagaaacgctggaatgatgagcttcaaaaaccaaacccttggctgttacgagctcttcatagtagtctttggggaaggttctggctgggtggatttttcaagattggcaatgatgcttctcaatttgttggtccacttgtattgaacctgttgttagagtctatgcaaaaaggtgatccatcttggagcgggtacatctatgctttctcaatctttgcaggagtgtcacttggggttcttgctgaggcacagtactttcagaacgtcatgcgtgtgggtttcaggttgaggtccacattgattgcagctgttttccgcaaatctttgcgactaactaatgatagtcgtagaaagtttgcttctgggaggattaccaatttgatttcaactgatgcggagtcccttcagcaagtgtgccagcagcttcacagcctatggtctgctcctttccgcattgttatttccatggtccttctatatgcacagcttggtcctgcagcattagtcggtgcactcatgctggttcttttgtttccaattcagactgtaatcatcagcaaaatgcaaaaacttactaaagaggggttgcaaaggaccgacaagcgaatcagtctcatgaatgaagtattagctgctatggatacagtcaagtgctatgcttgggagcaaagtttccagtcaaaagtgcaggacatccgtgatgatgaactttcttggttccgcagggctcagttgcttgctgcgctgaatagctttatcctgaacagtataccggtcgttgtcactgttgtttcatttggtgtatattctctactgggaggtgatttgacaccagcaaaggcgtttacttctctttcattatttgcagtcttaaggtttccacttttcatgctcccgaatctgataactcaggtggttaattgtaaggtgtcattgaagcgtctggaagatctcctgttggctgaagagagattacttctgccaaatccacctattgatcctgatcttccagccatttctatcaagaatgggtatttttcatgggaatcagaggctcagagaccaactttatcaaatgtcaatctggatgtacctgttggaagtttagttgcaatagtaggaagcactggtgagggtaaaacttctctcatatctgcaatgcttggagaaataccaccagtatctggatcaggtacctcagtggtcattcgtggatcggtggcttacgttcctcaagtttcctggatcttcaatgctactgtacgtgacaatattttgtttgggtctccctttcaacccccacgatacgagaaagcaattgatgccacttcattgcggcatgaccttgacctactcccaggaggcgatctgacagagattggtgaaagaggagttaatattagtggagggcagaagcaaagagtttcaatggcaagagctgtgtattctgattcagatgtgtacatatttgatgatccactcagtgcattagatgcccatgttggccggcaggtatttgataaatgtatcaaaggcgaactgcagcataaaacccgggttcttgttaccaatcagctgcattttctgccatatgtcgataaaatactgctaattcatgatggtgtaattaaagaggagggtacttttgatgaacttagcaacagtggggagctcttcaagaagctcatggaaaatgctggaaaaatggaggaacaggtggaagaggatgaaagtaaaccaaaggatgttgcaaaacaaactgtgaacggtgatgttacaatagctgatgaaggttcacagaagagccaggatagttctagtaaaacaaaaccaggaaaatctgtccttattaagcaagaggaaagggaaactggggttgtcagtgcgagggtcctttcacgttacaaaaatgcactgggagggatatgggtggtgtccatactcttcttttgctatgcactgactgaagttcttcgcatttcaagtagcacatggttgagcatttggactgatgagggttctctgaaaattcatggctctggttattataatttgatctatggaattctttcctttgggcaggttctagtcacactctcaaattcatactggttgattatatcaagtcttcgggcagccaaaaggcttcatgatgccatgctccgatcaatattgagagctcccatggtattttttcatacaaacccacttggacggatcatcaacagattttcgaaggatatgggtgacattgaccgaaatgtcgctgtatttgtcaatatgtttatggcacaaatatctcagttgctctcaactttcgttctcatcggctttgtcagcaccatgtctctttgggctatcatgccactcctgattttgttttatgcagcttacctctattaccaggcaacatctcgcgaggtgaagcgtctggattccattaccaggtctcctgtgtatgctcagttttcagaggctttgaatggtctgtccacaatccgtgcctataaagcctatgatagaatggcaaatatcaatgggagatcaatggacaacaacattaggttcacacttgtgaacatgggtgcaaataggtggctagctattcgtctggagacattgggtggcatcatgatatggtttacagcaacatttgctgttatgcaaaatcaacgagcagagaatcagaaggcctttgcttctacaatgggtcttcttcttacttacactctcaatattaccaatttactcacagctgttcttcgtcttgctagtcttgctgaaaatagtttaaatgctgttgaacgggtcggaacatacattgagttaccttcggaagctcctcctgtcattgaggatcataggccaccccctggttggccatcatcaggtgtcatcaagtttgaagacgttgtgcttcgatatcgaccagaacttcctcctgttcttcatggcatatcttttgttattaatggaagtgagaaggtaggaatagttggcagaacaggtgctggcaaatctagcatgcttaatgctttgttccgtatcgtggagcttgaacgagggagaatattaattgatgattgtgacacttctaagtttggaatttgggacttgcgcaaagttctaggaataataccacaggcaccagttctattctcaggttctgttcggtttaatctggatccctttaatgagcacaatgatgcggacctctgggaggctctggaaagggctcatctaaaagatgttataaggaggaattctttaggattggatgctgaggtttctgaagctggtgaaaatttcagtgttggacaacgacagctgttgagcttagctcgtgcgctgctgagaagagcaaagatacttgtccttgatgaggcaacagcagcagttgacgtgcggactgatgctcttattcagaaaacaatccgagaagaattcaagagttgcacaatgctcataattgcccaccgtttgaacacggtcattgactgtgacaggttgcttattctaagttctgggcaggttctggaattcgactctcctgagaatcttctaagcaacgaggggagtgctttctccaagatggtgcaaagtacaggacctagcaacgcagaatacctcaagagtcttgtatttgcaagtggagaagagaggtcccggagggaagaaatcaagctgcaagatatccaaaggagatgggttgcatctaaccgatgggctgaagctgcccagtttgcgcttgctagaagcctcacatcatcacatagtgacctccttgcattagaagctgccgagggaaataatattctgaggagaacaaaggatgctgtaatcactctgcaaagcgtactggaagggaagcacaatactgaaatcgatgaatctctaactcagtatcaggtcccagctgatcgatggtggtcttcactttacaaagtgatcgaaggcctcgccacaatgagcagattgggccgcaaccgtctgcagcaaccttcttataattttgagaacaacaattctattgactgggaccaaatgtagatgtagaattctggatcacaacagcattgtggagtaggctggaggtgtagttatttctggcggatttgattcctgcggtgtgtaaacgctgcagcaacacgtaacttgcgaataaggaacgagttttgccacagcaggacgatccttgtaccgtcgtccgcaagggttgtaatttctcagggaccgttacgacacgattgtatgtcaggttttgacagtttgagccaatgcaattcttctaatgaaaaagacaagtgcatgtgaatggttagcatctgcctatcgcctatcgggtatcatgtggagtcgtctggtataccgtcctacacggctacacctgagaacgaagcgaccttacccccaactatcaccttgtagcgatccgaagttgttcatcttcgagtttcagttctctaactccatcgtagctaagcgtttcagcaatgggtcaagagagagatttaactatttgtcaccgttaggaaggccacatatttgtttgcttgttttacgtggcaactgtacgattttttatcggaaacgctaactggtctattttattgatgtaccatgttaaattagcatgtcacggtggatcctagtcttttttccggagagacacctggaa

SEQ ID NO: 19337 - DNA, 5669 bp, Zea Mays
gtcttagtggactagtggagtgggcatgtggcgccgcttccgccgccgccgctgcagcactactcgttcgtcagaatagtatagggtgcagttgcgtggagatccacccgctcgtggattggcttctcctgcgggttgcaactggagaacatcagaactgattgaagaacagggttggtaagtggagggagcgagatggggttcgacccactggagtggtactgccagccggtcaaggatggtgtgtggtcgcatgtggttgagaatgcgttcggcgcctacactccatgtggcactgacacccttgtagtctgcatctcatacctcgcactctttggagtttgcttctatcgtatatggaggacgacgagggactacacagtgcagcggtacaagttacgttcaccatactacaactacctgcttggactgctcgtggtgtactgcatagcagagccgctttatcggatcatcactggtacctccatcatgaacttggatgggcagcctggccttgctccatttgagattgtctcattgatcattgagtctgttgcttggtgctgtatgcttgtaatgattctgcttgaaacaagaatttacatcaatgagttcagatggtacatccgatttgtggttatttacatgatggttggcgaagctgctatgttcaatcttgtgctctctgtgaggcagtactacagttcaagttcaatcttttacctatactgcagtgagattgtatgccagcttggatccatatccgggttataccccgatcaggaatgaagtgttggttgataatactgattatgaacctcttcccggcggtgagcagatttgccctgagagacatgccaacatatttgccagaatattcttttcatggatgactcctttaatgcaacaaggatttagaaggcccattacagataaggatatctggaaattggatagctgggatgagactgaaactttgtatagccagttccagaaacgctggaatgatgagcttcaaaaaccaaacccttggctgttacgagctcttcatagtagtctttggggaaggttctggctgggtggatttttcaagattggcaatgatgcttctcaatttgttggtccacttgtattgaacctgttgttagagtctatgcaaaaaggtgatccatcttggagcgggtacatctatgctttctcaatctttgcaggagtgtcacttggggttcttgctgaggcacagtactttcagaacgtcatgcgtgtgggtttcaggttgaggtccacattgattgcagctgttttccgcaaatctttgcgactaactaatgatagtcgtagaaagtttgcttctgggaggattaccaatttgatttcaactgatgcggagtcccttcagcaagtgtgccagcagcttcacagcctatggtctgctcctttccgcattgttatttccatggtccttctatatgcacagcttggtcctgcagcattagtcggtgcactcatgctggttcttttgtttccaattcagactgtaatcatcagcaaaatgcaaaaacttactaaagaggggttgcaaaggaccgacaagcgaatcagtctcatgaatgaagtattagctgctatggatacagtcaagtgctatgcttgggagcaaagtttccagtcaaaagtgcaggacatccgtgatgatgaactttcttggttccgcagggctcagttgcttgctgcgctgaatagctttatcctgaacagtataccggtcgttgtcactgttgtttcatttggtgtatattctctactgggaggtgatttgacaccagcaaaggcgtttacttctctttcattatttgcagtcttaaggtttccacttttcatgctcccgaatctgataactcaggtggttaattgtaaggtgtcattgaagcgtctggaagatctcctgttggctgaagagagattacttctgccaaatccacctattgatcctgatcttccagccatttctatcaagaatgggtatttttcatgggaatcagaggctcagagaccaactttatcaaatgtcaatctggatgtacctgttggaagtttagttgcaatagtaggaagcactggtgagggtaaaacttctctcatatctgcaatgcttggagaaataccaccagtatctggatcaggtacctcagtggtcattcgtggatcggtggcttacgttcctcaagtttcctggatcttcaatgctactgtacgtgacaatattttgtttgggtctccctttcaacccccacgatacgagaaagcaattgatgccacttcattgcggcatgaccttgacctactcccaggaggcgatctgacagagattggtgaaagaggagttaatattagtggagggcagaagcaaagagtttcaatggcaagagctgtgtattctgattcagatgtgtacatatttgatgatccactcagtgcattagatgcccatgttggccggcaggtatttgataaatgtatcaaaggcgaactgcagcataaaacccgggttcttgttaccaatcagctgcattttctgccatatgtcgataaaatactgctaattcatgatggtgtaattaaagaggagggtacttttgatgaacttagcaacagtggggagctcttcaagaagctcatggaaaatgctggaaaaatggaggaacaggtggaagaggatgaaagtaaaccaaaggatgttgcaaaacaaactgtgaacggtgatgttacaatagctgatgaaggttcacagaagagccaggatagttctagtaaaacaaaaccaggaaaatctgtccttattaagcaagaggaaagggaaactggggttgtcagtgcgagggtcctttcacgttacaaaaatgcactgggagggatatgggtggtgtccatactcttcttttgctatgcactgactgaagttcttcgcatttcaagtagcacatggttgagcatttggactgatgagggttctctgaaaattcatggctctggttattataatttgatctatggaattctttcctttgggcaggttctagtcacactctcaaattcatactggttgattatatcaagtcttcgggcagccaaaaggcttcatgatgccatgctccgatcaatattgagagctcccatggtattttttcatacaaacccacttggacggatcatcaacagattttcgaaggatatgggtgacattgaccgaaatgtcgctgtatttgtcaatatgtttatggcacaaatatctcagttgctctcaactttcgttctcatcggctttgtcagcaccatgtctctttgggctatcatgccactcctgattttgttttatgcagcttacctctattaccaggcaacatctcgcgaggtgaagcgtctggattccattaccaggtctcctgtgtatgctcagttttcagaggctttgaatggtctgtccacaatccgtgcctataaagcctatgatagaatggcaaatatcaatgggagatcaatggacaacaacattaggttcacacttgtgaacatgggtgcaaataggtggctagctattcgtctggagacattgggtggcatcatgatatggtttacagcaacatttgctgttatgcaaaatcaacgagcagagaatcagaaggcctttgcttctacaatgggtcttcttcttacttacactctcaatattaccaatttactcacagctgttcttcgtcttgctagtcttgctgaaaatagtttaaatgctgttgaacgggtcggaacatacattgagttaccttcggaagctcctcctgtcattgaggatcataggccaccccctggttggccatcatcaggtgtcatcaagtttgaagacgttgtgcttcgatatcgaccagaacttcctcctgttcttcatggcatatcttttgttattaatggaagtgagaaggtaggaatagttggcagaacaggtgctggcaaatctagcatgcttaatgctttgttccgtatcgtggagcttgaacgagggagaatattaattgatgattgtgacacttctaagtttggaatttgggacttgcgcaaagttctaggaataataccacaggcaccagttctattctcaggttctgttcggtttaatctggatccctttaatgagcacaatgatgcggacctctgggaggctctggaaagggctcatctaaaagatgttataaggaggaattctttaggattggatgctgaggtttctgaagctggtgaaaatttcagtgttggacaacgacagctgttgagcttagctcgtgcgctgctgagaagagcaaagatacttgtccttgatgaggcaacagcagcagttgacgtgcggactgatgctcttattcagaaaacaatccgagaagaattcaagagttgcacaatgctcataattgcccaccgtttgaacacggtcattgactgtgacaggttgcttattctaagttctgggcaggttctggaattcgactctcctgagaatcttctaagcaacgaggggagtgctttctccaagatggtgcaaagtacaggacctagcaacgcagaatacctcaagagtcttgtatttgcaagtggagaagagaggtcccggagggaagaaatcaagctgcaagatatccaaaggagatgggttgcatctaaccgatgggctgaagctgcccagtttgcgcttgctagaagcctcacatcatcacatagtgacctccttgcattagaagctgccgagggaaataatattctgaggagaacaaaggatgctgtaatcactctgcaaagcgtactggaagggaagcacaatactgaaatcgatgaatctctaactcagtatcaggtcccagctgatcgatggtggtcttcactttacaaagtgatcgaaggcctcgccacaatgagcagattgggccgcaaccgtctgcagcaaccttcttataattttgagaacaacaattctattgactgggaccaaatgtagatgtagaattctggatcacaacagcattgtggagtaggctggaggtgtagttatttctggcggatttgattcctgcggtgtgtaaacgctgcagcaacacgtaacttgcgaataaggaacgagttttgccacagcaggacgatccttgtaccgtcgtccgcaagggttgtaatttctcagggaccgttacgacacgattgtatgtcaggttttgacagtttgagccaatgcaattcttctaatgaaaaagacaagtgcatgtgaatggttagcatctgcctatcgcctatcgggtatcatgtggagtcgtctggtataccgtcctacacggctacacctgagaacgaagcgaccttacccccaactatcaccttgtagcgatccgaagttgttcatcttcgagtttcagttctctaactccatcgtagctaagcgtttcagcaatgggtcaagagagagatttaactatttgtcaccgttaggaaggccacatatttgtttgcttgttttacgtggcaactgtacgattttttatcggaaacgctaactggtctattttattgatgtaccatgttaaattagcatgtcacggtggatcctagtcttttttccggagagacacctggaa

SEQ ID NO: 19338 - DNA, 5486 bp, Zea Mays
ggactagtggagtgggcatgtggcgccgcttccgccgccgccgctgcagcactactcgttcgtcagaatagtatagggtgcagttgcgtggagatccacccgctcgtggattggcttctcctgcgggttgcaactggagaacatcagaactgattgaagaacagggttggtaagtggagggagcgagatggggttcgacccactggagtggtactgccagccggtcaaggatggtgtgtggtcgcatgtggttgagaatgcgttcggcgcctacactccatgtggcactgacacccttgtagtctgcatctcatacctcgcactctttggagtttgcttctatcgtatatggaggacgacgagggactacacagtgcagcggtacaagttacgttcaccatactacaactacctgcttggactgctcgtggtgtactgcatagcagagccgctttatcggatcatcactggtacctccatcatgaacttggatgggcagcctggccttgctccatttgagatggtacatccgatttgtggttatttacatgatggttggcgaagctgctatgttcaatcttgtgctctctgtgaggcagtactacagttcaagttcaatcttttacctatactgcagtgagattgtatgccagttcttgtttggaattctcatggtggtttatctgcctagcttggatccatatccgggttataccccgatcaggaatgaagtgttggttgataatactgattatgaacctcttcccggcggtgagcagatttgccctgagagacatgccaacatatttgccagaatattcttttcatggatgactcctttaatgcaacaaggatttagaaggcccattacagataaggatatctggaaattggatagctgggatgagactgaaactttgtatagccagttccagaaacgctggaatgatgagcttcaaaaaccaaacccttggctgttacgagctcttcatagtagtctttggggaaggttctggctgggtggatttttcaagattggcaatgatgcttctcaatttgttggtccacttgtattgaacctgttgttagagtctatgcaaaaaggtgatccatcttggagcgggtacatctatgctttctcaatctttgcaggagtgtcacttggggttcttgctgaggcacagtactttcagaacgtcatgcgtgtgggtttcaggttgaggtccacattgattgcagctgttttccgcaaatctttgcgactaactaatgatagtcgtagaaagtttgcttctgggaggattaccaatttgatttcaactgatgcggagtcccttcagcaagtgtgccagcagcttcacagcctatggtctgctcctttccgcattgttatttccatggtccttctatatgcacagcttggtcctgcagcattagtcggtgcactcatgctggttcttttgtttccaattcagactgtaatcatcagcaaaatgcaaaaacttactaaagaggggttgcaaaggaccgacaagcgaatcagtctcatgaatgaagtattagctgctatggatacagtcaagtgctatgcttgggagcaaagtttccagtcaaaagtgcaggacatccgtgatgatgaactttcttggttccgcagggctcagttgcttgctgcgtcttaaggtttccacttttcatgctcccgaatctgataactcaggtggttaattgtaaggtgtcattgaagcgtctggaagatctcctgttggctgaagagagattacttctgccaaatccacctattgatcctgatcttccagccatttctatcaagaatgggtatttttcatgggaatcagaggctcagagaccaactttatcaaatgtcaatctggatgtacctgttggaagtttagttgcaatagtaggaagcactggtgagggtaaaacttctctcatatctgcaatgcttggagaaataccaccagtatctggatcaggtacctcagtggtcattcgtggatcggtggcttacgttcctcaagtttcctggatcttcaatgctactgtacgtgacaatattttgtttgggtctccctttcaacccccacgatacgagaaagcaattgatgccacttcattgcggcatgaccttgacctactcccaggaggcgatctgacagagattggtgaaagaggagttaatattagtggagggcagaagcaaagagtttcaatggcaagagctgtgtattctgattcagatgtgtacatatttgatgatccactcagtgcattagatgcccatgttggccggcaggtatttgataaatgtatcaaaggcgaactgcagcataaaacccgggttcttgttaccaatcagctgcattttctgccatatgtcgataaaatactgctaattcatgatggtgtaattaaagaggagggtacttttgatgaacttagcaacagtggggagctcttcaagaagctcatggaaaatgctggaaaaatggaggaacaggtggaagaggatgaaagtaaaccaaaggatgttgcaaaacaaactgtgaacggtgatgttacaatagctgatgaaggttcacagaagagccaggatagttctagtaaaacaaaaccaggaaaatctgtccttattaagcaagaggaaagggaaactggggttgtcagtgcgagggtcctttcacgttacaaaaatgcactgggagggatatgggtggtgtccatactcttcttttgctatgcactgactgaagttcttcgcatttcaagtagcacatggttgagcatttggactgatgagggttctctgaaaattcatggctctggttattataatttgatctatggaattctttcctttgggcaggttctagtcacactctcaaattcatactggttgattatatcaagtcttcgggcagccaaaaggcttcatgatgccatgctccgatcaatattgagagctcccatggtattttttcatacaaacccacttggacggatcatcaacagattttcgaaggatatgggtgacattgaccgaaatgtcgctgtatttgtcaatatgtttatggcacaaatatctcagttgctctcaactttcgttctcatcggctttgtcagcaccatgtctctttgggctatcatgccactcctgattttgttttatgcagcttacctctattaccaggcaacatctcgcgaggtgaagcgtctggattccattaccaggtctcctgtgtatgctcagttttcagaggctttgaatggtctgtccacaatccgtgcctataaagcctatgatagaatggcaaatatcaatgggagatcaatggacaacaacattaggttcacacttgtgaacatgggtgcaaataggtggctagctattcgtctggagacattgggtggcatcatgatatggtttacagcaacatttgctgttatgcaaaatcaacgagcagagaatcagaaggcctttgcttctacaatgggtcttcttcttacttacactctcaatattaccaatttactcacagctgttcttcgtcttgctagtcttgctgaaaatagtttaaatgctgttgaacgggtcggaacatacattgagttaccttcggaagctcctcctgtcattgaggatcataggccaccccctggttggccatcatcaggtgtcatcaagtttgaagacgttgtgcttcgatatcgaccagaacttcctcctgttcttcatggcatatcttttgttattaatggaagtgagaaggtaggaatagttggcagaacaggtgctggcaaatctagcatgcttaatgctttgttccgtatcgtggagcttgaacgagggagaatattaattgatgattgtgacacttctaagtttggaatttgggacttgcgcaaagttctaggaataataccacaggcaccagttctattctcaggttctgttcggtttaatctggatccctttaatgagcacaatgatgcggacctctgggaggctctggaaagggctcatctaaaagatgttataaggaggaattctttaggattggatgctgaggtttctgaagctggtgaaaatttcagtgttggacaacgacagctgttgagcttagctcgtgcgctgctgagaagagcaaagatacttgtccttgatgaggcaacagcagcagttgacgtgcggactgatgctcttattcagaaaacaatccgagaagaattcaagagttgcacaatgctcataattgcccaccgtttgaacacggtcattgactgtgacaggttgcttattctaagttctgggcaggttctggaattcgactctcctgagaatcttctaagcaacgaggggagtgctttctccaagatggtgcaaagtacaggacctagcaacgcagaatacctcaagagtcttgtatttgcaagtggagaagagaggtcccggagggaagaaatcaagctgcaagatatccaaaggagatgggttgcatctaaccgatgggctgaagctgcccagtttgcgcttgctagaagcctcacatcatcacatagtgacctccttgcattagaagctgccgagggaaataatattctgaggagaacaaaggatgctgtaatcactctgcaaagcgtactggaagggaagcacaatactgaaatcgatgaatctctaactcagtatcaggtcccagctgatcgatggtggtcttcactttacaaagtgatcgaaggcctcgccacaatgagcagattgggccgcaaccgtctgcagcaaccttcttataattttgagaacaacaattctattgactgggaccaaatgtagatgtagaattctggatcacaacagcattgtggagtaggctggaggtgtagttatttctggcggatttgattcctgcggtgtgtaaacgctgcagcaacacgtaacttgcgaataaggaacgagttttgccacagcaggacgatccttgtaccgtcgtccgcaagggttgtaatttctcagggaccgttacgacacgattgtatgtcaggttttgacagtttgagccaatgcaattcttctaatgaaaaagacaagtgcatgtgaatggttagcatctgcctatcgcctatcgggtatcatgtggagtcgtctggtataccgtcctacacggctacacctgagaacgaagcgaccttacccccaactatcaccttgtagcgatccgaagttgttcatcttcgagtttcagttctctaactccatcgtagctaagcgtttcagcaatgggtcaagagagagatttaactatttgtcaccgttaggaaggccacatatttgtttgcttgttttacgtggcaactgtacgattttttatcggaaacgctaactggtctattttattgatgtaccatgttaaattagcatgtcacggtggatcctagtcttttttccggagagacacctggaa

SEQ ID NO: 19339 - DNA, 5614 bp, Zea Mays
cttcgtgctgttgctgtggtccactatccatccccatccttgcttgatgaggagaacatcagaactgattgaagaacagggttggtaagtggagggagcgagatggggttcgacccactggagtggtactgccagccggtcaaggatggtgtgtggtcgcatgtggttgagaatgcgttcggcgcctacactccatgtggcactgacacccttgtagtctgcatctcatacctcgcactctttggagtttgcttctatcgtatatggaggacgacgagggactacacagtgcagcggtacaagttacgttcaccatactacaactacctgcttggactgctcgtggtgtactgcatagcagagccgctttatcggatcatcactggtacctccatcatgaacttggatgggcagcctggccttgctccatttgagattgtctcattgatcattgagtctgttgcttggtgctgtatgcttgtaatgattctgcttgaaacaagaatttacatcaatgagttcagatggtacatccgatttgtggttatttacatgatggttggcgaagctgctatgttcaatcttgtgctctctgtgaggcagtactacagttcaagttcaatcttttacctatactgcagtgagattgtatgccagttcttgtttggaattctcatggtggtttatctgcctagcttggatccatatccgggttataccccgatcaggaatgaagtgttggttgataatactgattatgaacctcttcccggcggtgagcagatttgccctgagagacatgccaacatatttgccagaatattcttttcatggatgactcctttaatgcaacaaggatttagaaggcccattacagataaggatatctggaaattggatagctgggatgagactgaaactttgtatagccagttccagaaacgctggaatgatgagcttcaaaaaccaaacccttggctgttacgagctcttcatagtagtctttggggaaggttctggctgggtggatttttcaagattggcaatgatgcttctcaatttgttggtccacttgtattgaacctgttgttagagtctatgcaaaaaggtgatccatcttggagcgggtacatctatgctttctcaatctttgcaggagtgtcacttggggttcttgctgaggcacagtactttcagaacgtcatgcgtgtgggtttcaggttgaggtccacattgattgcagctgttttccgcaaatctttgcgactaactaatgatagtcgtagaaagtttgcttctgggaggattaccaatttgatttcaactgatgcggagtcccttcagcaagtgtgccagcagcttcacagcctatggtctgctcctttccgcattgttatttccatggtccttctatatgcacagcttggtcctgcagcattagtcggtgcactcatgctggttcttttgtttccaattcagactgtaatcatcagcaaaatgcaaaaacttactaaagaggggttgcaaaggaccgacaagcgaatcagtctcatgaatgaagtattagctgctatggatacagtcaagtgctatgcttgggagcaaagtttccagtcaaaagtgcaggacatccgtgatgatgaactttcttggttccgcagggctcagttgcttgctgcgctgaatagctttatcctgaacagtataccggtcgttgtcactgttgtttcatttggtgtatattctctactgggaggtgatttgacaccagcaaaggcgtttacttctctttcattatttgcagtcttaaggtttccacttttcatgctcccgaatctgataactcaggtggttaattgtaaggtgtcattgaagcgtctggaagatctcctgttggctgaagagagattacttctgccaaatccacctattgatcctgatcttccagccatttctatcaagaatgggtatttttcatgggaatcagaggctcagagaccaactttatcaaatgtcaatctggatgtacctgttggaagtttagttgcaatagtaggaagcactggtgagggtaaaacttctctcatatctgcaatgcttggagaaataccaccagtatctggatcaggtacctcagtggtcattcgtggatcggtggcttacgttcctcaagtttcctggatcttcaatgctactgtacgtgacaatattttgtttgggtctccctttcaacccccacgatacgagaaagcaattgatgccacttcattgcggcatgaccttgacctactcccaggaggcgatctgacagagattggtgaaagaggagttaatattagtggagggcagaagcaaagagtttcaatggcaagagctgtgtattctgattcagatgtgtacatatttgatgatccactcagtgcattagatgcccatgttggccggcaggtatttgataaatgtatcaaaggcgaactgcagcataaaacccgggttcttgttaccaatcagctgcattttctgccatatgtcgataaaatactgctaattcatgatggtgtaattaaagaggagggtacttttgatgaacttagcaacagtggggagctcttcaagaagctcatggaaaatgctggaaaaatggaggaacaggtggaagaggatgaaagtaaaccaaaggatgttgcaaaacaaactgtgaacggtgatgttacaatagctgatgaaggttcacagaagagccaggatagttctagtaaaacaaaaccaggaaaatctgtccttattaagcaagaggaaagggaaactggggttgtcagtgcgagggtcctttcacgttacaaaaatgcactgggagggatatgggtggtgtccatactcttcttttgctatgcactgactgaagttcttcgcatttcaagtagcacatggttgagcatttggactgatgagggttctctgaaaattcatggctctggttattataatttgatctatggaattctttcctttgggcaggttctagtcacactctcaaattcatactggttgattatatcaagtcttcgggcagccaaaaggcttcatgatgccatgctccgatcaatattgagagctcccatggtattttttcatacaaacccacttggacggatcatcaacagattttcgaaggatatgggtgacattgaccgaaatgtcgctgtatttgtcaatatgtttatggcacaaatatctcagttgctctcaactttcgttctcatcggctttgtcagcaccatgtctctttgggctatcatgccactcctgattttgttttatgcagcttacctctattaccaggcaacatctcgcgaggtgaagcgtctggattccattaccaggtctcctgtgtatgctcagttttcagaggctttgaatggtctgtccacaatccgtgcctataaagcctatgatagaatggcaaatatcaatgggagatcaatggacaacaacattaggttcacacttgtgaacatgggtgcaaataggtggctagctattcgtctggagacattgggtggcatcatgatatggtttacagcaacatttgctgttatgcaaaatcaacgagcagagaatcagaaggcctttgcttctacaatgggtcttcttcttacttacactctcaatattaccaatttactcacagctgttcttcgtcttgctagtcttgctgaaaatagtttaaatgctgttgaacgggtcggaacatacattgagttaccttcggaagctcctcctgtcattgaggatcataggccaccccctggttggccatcatcaggtgtcatcaagtttgaagacgttgtgcttcgatatcgaccagaacttcctcctgttcttcatggcatatcttttgttattaatggaagtgagaaggtaggaatagttggcagaacaggtgctggcaaatctagcatgcttaatgctttgttccgtatcgtggagcttgaacgagggagaatattaattgatgattgtgacacttctaagtttggaatttgggacttgcgcaaagttctaggaataataccacaggcaccagttctattctcaggttctgttcggtttaatctggatccctttaatgagcacaatgatgcggacctctgggaggctctggaaagggctcatctaaaagatgttataaggaggaattctttaggattggatgctgaggtttctgaagctggtgaaaatttcagtgttggacaacgacagctgttgagcttagctcgtgcgctgctgagaagagcaaagatacttgtccttgatgaggcaacagcagcagttgacgtgcggactgatgctcttattcagaaaacaatccgagaagaattcaagagttgcacaatgctcataattgcccaccgtttgaacacggtcattgactgtgacaggttgcttattctaagttctgggcaggttctggaattcgactctcctgagaatcttctaagcaacgaggggagtgctttctccaagatggtgcaaagtacaggacctagcaacgcagaatacctcaagagtcttgtatttgcaagtggagaagagaggtcccggagggaagaaatcaagctgcaagatatccaaaggagatgggttgcatctaaccgatgggctgaagctgcccagtttgcgcttgctagaagcctcacatcatcacatagtgacctccttgcattagaagctgccgagggaaataatattctgaggagaacaaaggatgctgtaatcactctgcaaagcgtactggaagggaagcacaatactgaaatcgatgaatctctaactcagtatcaggtcccagctgatcgatggtggtcttcactttacaaagtgatcgaaggcctcgccacaatgagcagattgggccgcaaccgtctgcagcaaccttcttataattttgagaacaacaattctattgactgggaccaaatgtagatgtagaattctggatcacaacagcattgtggagtaggctggaggtgtagttatttctggcggatttgattcctgcggtgtgtaaacgctgcagcaacacgtaacttgcgaataaggaacgagttttgccacagcaggacgatccttgtaccgtcgtccgcaagggttgtaatttctcagggaccgttacgacacgattgtatgtcaggttttgacagtttgagccaatgcaattcttctaatgaaaaagacaagtgcatgtgaatggttagcatctgcctatcgcctatcgggtatcatgtggagtcgtctggtataccgtcctacacggctacacctgagaacgaagcgaccttacccccaactatcaccttgtagcgatccgaagttgttcatcttcgagtttcagttctctaactccatcgtagctaagcgtttcagcaatgggtcaagagagagatttaactatttgtcaccgttaggaaggccacatatttgtttgcttgttttacgtggcaactgtacgattttttatcggaaacgctaactggtctattttattgatgtaccatgttaaattagcatgtcacggtggatcctagtcttttttccggagagacacctggaa

SEQ ID NO: 19340 - DNA, 3988 bp, Zea Mays
gtatattccttttttgcaataatttcaagacttttttgtacataagatgacttgtgcgaagttctgtcgtgcaccattataccggtcgttgtcactgttgtttcatttggtgtatattctctactgggaggtgatttgacaccagcaaaggcgtttacttctctttcattatttgcagtcttaaggtttccacttttcatgctcccgaatctgataactcaggtggttaattgtaaggtgtcattgaagcgtctggaagatctcctgttggctgaagagagattacttctgccaaatccacctattgatcctgatcttccagccatttctatcaagaatgggtatttttcatgggaatcagaggctcagagaccaactttatcaaatgtcaatctggatgtacctgttggaagtttagttgcaatagtaggaagcactggtgagggtaaaacttctctcatatctgcaatgcttggagaaataccaccagtatctggatcaggtacctcagtggtcattcgtggatcggtggcttacgttcctcaagtttcctggatcttcaatgctactgtacgtgacaatattttgtttgggtctccctttcaacccccacgatacgagaaagcaattgatgccacttcattgcggcatgaccttgacctactcccaggaggcgatctgacagagattggtgaaagaggagttaatattagtggagggcagaagcaaagagtttcaatggcaagagctgtgtattctgattcagatgtgtacatatttgatgatccactcagtgcattagatgcccatgttggccggcaggtatttgataaatgtatcaaaggcgaactgcagcataaaacccgggttcttgttaccaatcagctgcattttctgccatatgtcgataaaatactgctaattcatgatggtgtaattaaagaggagggtacttttgatgaacttagcaacagtggggagctcttcaagaagctcatggaaaatgctggaaaaatggaggaacaggtggaagaggatgaaagtaaaccaaaggatgttgcaaaacaaactgtgaacggtgatgttacaatagctgatgaaggttcacagaagagccaggatagttctagtaaaacaaaaccaggaaaatctgtccttattaagcaagaggaaagggaaactggggttgtcagtgcgagggtcctttcacgttacaaaaatgcactgggagggatatgggtggtgtccatactcttcttttgctatgcactgactgaagttcttcgcatttcaagtagcacatggttgagcatttggactgatgagggttctctgaaaattcatggctctggttattataatttgatctatggaattctttcctttgggcaggttctagtcacactctcaaattcatactggttgattatatcaagtcttcgggcagccaaaaggcttcatgatgccatgctccgatcaatattgagagctcccatggtattttttcatacaaacccacttggacggatcatcaacagattttcgaaggatatgggtgacattgaccgaaatgtcgctgtatttgtcaatatgtttatggcacaaatatctcagttgctctcaactttcgttctcatcggctttgtcagcaccatgtctctttgggctatcatgccactcctgattttgttttatgcagcttacctctattaccaggcaacatctcgcgaggtgaagcgtctggattccattaccaggtctcctgtgtatgctcagttttcagaggctttgaatggtctgtccacaatccgtgcctataaagcctatgatagaatggcaaatatcaatgggagatcaatggacaacaacattaggttcacacttgtgaacatgggtgcaaataggtggctagctattcgtctggagacattgggtggcatcatgatatggtttacagcaacatttgctgttatgcaaaatcaacgagcagagaatcagaaggcctttgcttctacaatgggtcttcttcttacttacactctcaatattaccaatttactcacagctgttcttcgtcttgctagtcttgctgaaaatagtttaaatgctgttgaacgggtcggaacatacattgagttaccttcggaagctcctcctgtcattgaggatcataggccaccccctggttggccatcatcaggtgtcatcaagtttgaagacgttgtgcttcgatatcgaccagaacttcctcctgttcttcatggcatatcttttgttattaatggaagtgagaaggtaggaatagttggcagaacaggtgctggcaaatctagcatgcttaatgctttgttccgtatcgtggagcttgaacgagggagaatattaattgatgattgtgacacttctaagtttggaatttgggacttgcgcaaagttctaggaataataccacaggcaccagttctattctcaggttctgttcggtttaatctggatccctttaatgagcacaatgatgcggacctctgggaggctctggaaagggctcatctaaaagatgttataaggaggaattctttaggattggatgctgaggtttctgaagctggtgaaaatttcagtgttggacaacgacagctgttgagcttagctcgtgcgctgctgagaagagcaaagatacttgtccttgatgaggcaacagcagcagttgacgtgcggactgatgctcttattcagaaaacaatccgagaagaattcaagagttgcacaatgctcataattgcccaccgtttgaacacggtcattgactgtgacaggttgcttattctaagttctgggcaggttctggaattcgactctcctgagaatcttctaagcaacgaggggagtgctttctccaagatggtgcaaagtacaggacctagcaacgcagaatacctcaagagtcttgtatttgcaagtggagaagagaggtcccggagggaagaaatcaagctgcaagatatccaaaggagatgggttgcatctaaccgatgggctgaagctgcccagtttgcgcttgctagaagcctcacatcatcacatagtgacctccttgcattagaagctgccgagggaaataatattctgaggagaacaaaggatgctgtaatcactctgcaaagcgtactggaagggaagcacaatactgaaatcgatgaatctctaactcagtatcaggtcccagctgatcgatggtggtcttcactttacaaagtgatcgaaggcctcgccacaatgagcagattgggccgcaaccgtctgcagcaaccttcttataattttgagaacaacaattctattgactgggaccaaatgtagatgtagaattctggatcacaacagcattgtggagtaggctggaggtgtagttatttctggcggatttgattcctgcggtgtgtaaacgctgcagcaacacgtaacttgcgaataaggaacgagttttgccacagcaggacgatccttgtaccgtcgtccgcaagggttgtaatttctcagggaccgttacgacacgattgtatgtcaggttttgacagtttgagccaatgcaattcttctaatgaaaaagacaagtgcatgtgaatggttagcatctgcctatcgcctatcgggtatcatgtggagtcgtctggtataccgtcctacacggctacacctgagaacgaagcgaccttacccccaactatcaccttgtagcgatccgaagttgttcatcttcgagtttcagttctctaactccatcgtagctaagcgtttcagcaatgggtcaagagagagatttaactatttgtcaccgttaggaaggccacatatttgtttgcttgttttacgtggcaactgtacgattttttatcggaaacgctaactggtctattttattgatgtaccatgttaaattagcatgtcacggtggatcctagtcttttttccggagagacacctggaa

SEQ ID NO: 19341 - DNA, 3679 bp, Zea Mays
tgccgctcgggagtcgggtctcccccacacaccagtactagcgctctagcgattttccccacttggtttccctcctctttctgcctgtgcttctgtctctcttctgcccttctccaagaaaccggataatccatccatccatccgcgatccgccccgcccacccaaggaaggaaccgatcccgactcgccgcgggctcgaccccccgcgccgacggctacgcgtggcaggcacagcaagcgcgccgcttcgccgacgtccacgccgcctgctctggctgtgggcggaatgcgtcagctgtagaggacggccacggcacctttcagccttttcctcgtctgctcctcctctcggccgggctcagtcggtcggtaacgactcctgctgtgctgtgctccagcctccggcagcgcctgctccgcaaacagttgcctctcctgtgctcacccaagggtcaaggggccagtccatccatccgcccgtccaggaaggaaatcgttcatccccagaagacaaagcgatccacttggataccggataagccctgtcctggcggcgtcgcatcccctctcgattcccgcgacaggtcgcagtgaatgacgacggaaatcagcggcccttgaagcgaagactcccccccgccttcgctgctctccaccgatccgacgaaggcagcgctcgggcactgctgctggttccccttcgcccaattcggtctgacgcaggatctcagtttctgcggcggcggagtagtagggggcagacggtgattttctgattctctcaccttggctctgtggactaaatgtgacctgcaagagctaaaagtggcagcgattgactttcagatgagtccatttgtgctggccgtggtgagcgttgcattcctcagcttgcggtttttgcaggctcatggaagcgggttgcttctgagctgtggctcgaacagcactgtcgatgctgatgggcggagatggatcggcgacataacccctgaggggaattttaccttgagcagccctgggcttgcggcgtcactggtcgggaagagcagttctgatgagatattcggaccgctttacagctctgcccgtttcttcaacgcggcaacttggtataccattagtgtgctgcctggaagttactgtgtcaggttgcatttcttcccttcgaccttcgggaatttgagcgcgaacaactccgtgtttgatgtcacggcaaatgatttcaagcttgtttcaaaattcaatgcgtcagaggagattgcttggagagcctctgtgagcaattcggtcaccagcgcagttgtcaaggagtactttcttgtagtcggtgctcgtggcctgagtattgagtttgatccaagacctgggtcgtttgcctttgtgaatgcgattgaggtcatgctgaccccagataatttgttcaatgatacagtgagcaaagttggcagtccagtcacgcagcttcctcttggtttgaggggcagaggtgttgagacaatgtaccggctgaacattggaggtcctgcacttaaatcgcccagtgatcagtatctccacaggccatggtacactgacgaagcgttcatgttttctacaaatgctgctcagactgtgtctaatgcttcaagcatagtgtatgtatcaagcaacgagtcgacaattgcgccgattgatgtttacgagaccgcaagaatcatgggcaataacatggttgtggacaagcggttcaacgtgtcgtggcggttctatgtccacccaaactttgattacttagtacgccttcatttctgtgagcttgtctatgacaagcccagccagaggatcttcaagatctacatcaataacaagactgctgctgagagctacgatgtgtatgctagggctgggggaattaacaaagcatatcatgaggacttctttgacaactcgacgcagcaggcagacacactttggcttcagctaggccctgactccatggccagcgcttcaggtgctgatgcacttctgaatggtgtggagatattcaagctcagcaaggattccgacctttcttatgtgcttggtcatattgacacgggcaaccagatggattcttcaaaaggggggaagattaaaggcctatgggaagaacttggtattggctcagcatcttttgttgcggttacaagcgttgttctgttctcatggtgttacataagaaagaaacgaaaagctgtcaacaaggaggcccctcccggctggcatccgttggttctccacgaggctatgaaaagcaccacagacgcccgtgcagccagtaaatcgtcatcggctcggaatgcctctcccattggtcataggatgggaagaaggttcggcattgcggagattagggctgccacgaagaacttcgatgagtccttagtcattggaacgggagggtttggaaaggtctacaaaggtgagattgacgagggcgctacagtggccatcaagcgcgctaacacattgtgtggccagggcctgaaagaattcgagacggagatcgagatgctttccaagcttcggcaccggcaccttgtggcgatgatcggctactgcgaagagcagaaggagatgattctggtctacgaatacatggcgaaggggacactgagaagccatctgtacgggagcagccttcctcctctgacatggaagcaacggatcgacgcgtgcattggcgcggcccgcggcctccactacctccacacaggagcggaccgaggcataatccaccgggacgtgaagaccaccaacattctgctggacgacagtttcgtcgccaagatagccgacttcgggctgtcaagaaccggaccaacgctggaccaaacccatgtcagcaccgcggtgaggggaagcttcggatacctagaccccgagtacttccggaggcagcagctgacgcagaagtccgacgtgtactcgttcggagtggtgctcttcgaagttgcctgcgcgaggccagtgatagaccccacgttgcccaaggaccagatcaacctggcggagtgggcgatgaggtggcagcggcagcggtcgctggaggcgatcctggaccctcgcctggacggcgacttctcgcccgagtccctgaagaagttcggcgagatcgcggagaaatgcctcgccgacgacggcaggagcaggccgtccatgggcgaggtcctgtggcacctcgagtacgtgctgcagctccacgaagcttacaggcggaatgtggtggagtccgaatcgttcgggagcggcgagctggggttcgctgatataccatccttcttcagccttccccacgtcatcagggagggggaggaggaacaccaccaccgatcgaagaagccgtcaagtatcagagaggaactagacacacattaccaaccccctcatccctcccaacagaaagaagacacagaggtgtcaagagtttccttgacaactgtatgatgcaatctgcatggccaccgttcatgcaccgctgcctgtgtgacctgtataaatggcactgatataattactgcctttgaggttttgatgtagcaaacgggattgagaaaggtggtatggtagtgcagctcgagaatgtgtggtactctgttttgcgcgcgctacggaacggtatgtgtgcgagacatctgttttgcagtgaagtgaacc

SEQ ID NO: 19342 - DNA, 3815 bp, Zea Mays
cgattttccccacttggtttccctcctctttctgcctgtgcttctgtctctcttctgcccttctccaagaaaccggataatccatccatccatccgcgatccgccccgcccacccaaggaaggaaccgatcccgactcgccgcgggctcgaccccccgcgccgacggctacgcgtggcaggcacagcaagcgcgccgcttcgccgacgtccacgccgcctgctctggctgtgggcggaatgcgtcagctgtagaggacggccacggcacctttcagccttttcctcgtctgctcctcctctcggccgggctcagtcggtcggtaacgactcctgctgtgctgtgctccagcctccggcagcgcctgctccgcaaacagttgcctctcctgtgctcacccaagggtcaaggggccagtccatccatccgcccgtccaggaaggaaatcgttcatccccagaagacaaagcgatccacttggataccggataagccctgtcctggcggcgtcgcatcccctctcgattcccgcgacaggtcgcagtgaatgacgacggaaatcagcggcccttgaagcgaagactcccccccgccttcgctgctctccaccgatccgacgaaggcagcgctcgggcactgctgctggttccccttcgcccaattcggtctgacgcagagtttctgcggcggcggagtagtagggggcagacggtgattttctgattctctcaccttggctctgtggactaaatgtgacctgcaagagctaaaagtggcagcgattgactttcagatgagtccatttgtgctggccgtggtgagcgttgcattcctcagcttgcggtttttgcaggctcatggaagcgggttgcttctgagctgtggctcgaacagcactgtcgatgctgatgggcggagatggatcggcgacataacccctgaggggaattttaccttgagcagccctgggcttgcggcgtcactggtcgggaagagcagttctgatgagatattcggaccgctttacagctctgcccgtttcttcaacgcggcaacttggtataccattagtgtgctgcctggaagttactgtgtcaggttgcatttcttcccttcgaccttcgggaatttgagcgcgaacaactccgtgtttgatgtcacggcaaatgatttcaagcttgtttcaaaattcaatgcgtcagaggagattgcttggagagcctctgtgagcaattcggtcaccagcgcagttgtcaaggagtactttcttgtagtcggtgctcgtggcctgagtattgagtttgatccaagacctgggtcgtttgcctttgtgaatgcgattgaggtcatgctgaccccagataatttgttcaatgatacagtgagcaaagttggcagtccagtcacgcagcttcctcttggtttgaggggcagaggtgttgagacaatgtaccggctgaacattggaggtcctgcacttaaatcgcccagtgatcagtatctccacaggccatggtacactgacgaagcgttcatgttttctacaaatgctgctcagactgtgtctaatgcttcaagcatagtgtatgtatcaagcaacgagtcgacaattgcgccgattgatgtttacgagaccgcaagaatcatgggcaataacatggttgtggacaagcggttcaacgtgtcgtggcggttctatgtccacccaaactttgattacttagtacgccttcatttctgtgagcttgtctatgacaagcccagccagaggatcttcaagatctacatcaataacaagactgctgctgagagctacgatgtgtatgctagggctgggggaattaacaaagcatatcatgaggacttctttgacaactcgacgcagcaggcagacacactttggcttcagctaggccctgactccatggccagcgcttcaggtgctgatgcacttctgaatggtgtggagatattcaagctcagcaaggattccgacctttcttatgtgcttggtcatattgacacgggcaaccagatggattcttcaaaaggggggaagattaaaggcctatgggaagaacttggtattggctcagcatcttttgttgcggttacaagcgttgttctgttctcatggtgttacataagaaagaaacgaaaagctgtcaacaaggaggcccctcccggctggcatccgttggttctccacgaggctatgaaaagcaccacagacgcccgtgcagccagtaaatcgtcatcggctcggaatgcctctcccattggtcataggatgggaagaaggttcggcattgcggagattagggctgccacgaagaacttcgatgagtccttagtcattggaacgggagggtttggaaaggtctacaaaggtgagattgacgagggcgctacagtggccatcaagcgcgctaacacattgtgtggccagggcctgaaagaattcgagacggagatcgagatgctttccaagcttcggcaccggcaccttgtggcgatgatcggctactgcgaagagcagaaggagatgattctggtctacgaatacatggcgaaggggacactgagaagccatctgtacgggagcagccttcctcctctgacatggaagcaacggatcgacgcgtgcattggcgcggcccgcggcctccactacctccacacaggagcggaccgaggcataatccaccgggacgtgaagaccaccaacattctgctggacgacagtttcgtcgccaagatagccgacttcgggctgtcaagaaccggaccaacgctggaccaaacccatgtcagcaccgcggtgaggggaagcttcggatacctagaccccgagtacttccggaggcagcagctgacgcagaagtccgacgtgtactcgttcggagtggtgctcttcgaagttgcctgcgcgaggccagtgatagaccccacgttgcccaaggaccagatcaacctggcggagtgggcgatgaggtggcagcggcagcggtcgctggaggcgatcctggaccctcgcctggacggcgacttctcgcccgagtccctgaagaagttcggcgagatcgcggagaaatgcctcgccgacgacggcaggagcaggccgtccatgggcgaggtcctgtggcacctcgagtacgtgctgcagctccacgaagcttacaggcggaatgtggtggagtccgaatcgttcgggagcggcgagctggggttcgctgatataccatccttcttcagccttccccacgtcatcagggagggggaggaggaacaccaccaccgatcgaagaagccgtcaagtatcagagaggaactagacacacgtgagaacttctgacttcagcaaaacaaaaacaaaaaaaaatcttgctttgtagccatgatcatgatgtaaagttgtgttacatcgttctctttaggttttttttttttttgcttcttattccattggggcgttctcttgcttgacaagagtagcataatagatttttttttcttctccttgtgtgtgtagattaccaaccccctcatccctcccaacagaaagaagacacagaggtgtcaagagtttccttgacaactgtatgatgcaatctgcatggccaccgttcatgcaccgctgcctgtgtgacctgtataaatggcactgatataattactgcctttgaggttttgatgtagcaaacgggattgagaaaggtggtatggtagtgcagctcgagaatgtgtggtactctgttttgcgcgcgctacggaacggtatgtgtgcgagacatctgttttgcagtgaagtgaacc

SEQ ID NO: 19343 - DNA, 3813 bp, Zea Mays
cgattttccccacttggtttccctcctctttctgcctgtgcttctgtctctcttctgcccttctccaagaaaccggataatccatccatccatccgcgatccgccccgcccacccaaggaaggaaccgatcccgactcgccgcgggctcgaccccccgcgccgacggctacgcgtggcaggcacagcaagcgcgccgcttcgccgacgtccacgccgcctgctctggctgtgggcggaatgcgtcagctgtagaggacggccacggcacctttcagccttttcctcgtctgctcctcctctcggccgggctcagtcggtcggtaacgactcctgctgtgctgtgctccagcctccggcagcgcctgctccgcaaacagttgcctctcctgtgctcacccaagggtcaaggggccagtccatccatccgcccgtccaggaaggaaatcgttcatccccagaagacaaagcgatccacttggataccggataagccctgtcctggcggcgtcgcatcccctctcgattcccgcgacaggtcgcagtgaatgacgacggaaatcagcggcccttgaagcgaagactcccccccgccttcgctgctctccaccgatccgacgaaggcagcgctcgggcactgctgctggttccccttcgcccaattcggtctgacgcagtttctgcggcggcggagtagtagggggcagacggtgattttctgattctctcaccttggctctgtggactaaatgtgacctgcaagagctaaaagtggcagcgattgactttcagatgagtccatttgtgctggccgtggtgagcgttgcattcctcagcttgcggtttttgcaggctcatggaagcgggttgcttctgagctgtggctcgaacagcactgtcgatgctgatgggcggagatggatcggcgacataacccctgaggggaattttaccttgagcagccctgggcttgcggcgtcactggtcgggaagagcagttctgatgagatattcggaccgctttacagctctgcccgtttcttcaacgcggcaacttggtataccattagtgtgctgcctggaagttactgtgtcaggttgcatttcttcccttcgaccttcgggaatttgagcgcgaacaactccgtgtttgatgtcacggcaaatgatttcaagcttgtttcaaaattcaatgcgtcagaggagattgcttggagagcctctgtgagcaattcggtcaccagcgcagttgtcaaggagtactttcttgtagtcggtgctcgtggcctgagtattgagtttgatccaagacctgggtcgtttgcctttgtgaatgcgattgaggtcatgctgaccccagataatttgttcaatgatacagtgagcaaagttggcagtccagtcacgcagcttcctcttggtttgaggggcagaggtgttgagacaatgtaccggctgaacattggaggtcctgcacttaaatcgcccagtgatcagtatctccacaggccatggtacactgacgaagcgttcatgttttctacaaatgctgctcagactgtgtctaatgcttcaagcatagtgtatgtatcaagcaacgagtcgacaattgcgccgattgatgtttacgagaccgcaagaatcatgggcaataacatggttgtggacaagcggttcaacgtgtcgtggcggttctatgtccacccaaactttgattacttagtacgccttcatttctgtgagcttgtctatgacaagcccagccagaggatcttcaagatctacatcaataacaagactgctgctgagagctacgatgtgtatgctagggctgggggaattaacaaagcatatcatgaggacttctttgacaactcgacgcagcaggcagacacactttggcttcagctaggccctgactccatggccagcgcttcaggtgctgatgcacttctgaatggtgtggagatattcaagctcagcaaggattccgacctttcttatgtgcttggtcatattgacacgggcaaccagatggattcttcaaaaggggggaagattaaaggcctatgggaagaacttggtattggctcagcatcttttgttgcggttacaagcgttgttctgttctcatggtgttacataagaaagaaacgaaaagctgtcaacaaggaggcccctcccggctggcatccgttggttctccacgaggctatgaaaagcaccacagacgcccgtgcagccagtaaatcgtcatcggctcggaatgcctctcccattggtcataggatgggaagaaggttcggcattgcggagattagggctgccacgaagaacttcgatgagtccttagtcattggaacgggagggtttggaaaggtctacaaaggtgagattgacgagggcgctacagtggccatcaagcgcgctaacacattgtgtggccagggcctgaaagaattcgagacggagatcgagatgctttccaagcttcggcaccggcaccttgtggcgatgatcggctactgcgaagagcagaaggagatgattctggtctacgaatacatggcgaaggggacactgagaagccatctgtacgggagcagccttcctcctctgacatggaagcaacggatcgacgcgtgcattggcgcggcccgcggcctccactacctccacacaggagcggaccgaggcataatccaccgggacgtgaagaccaccaacattctgctggacgacagtttcgtcgccaagatagccgacttcgggctgtcaagaaccggaccaacgctggaccaaacccatgtcagcaccgcggtgaggggaagcttcggatacctagaccccgagtacttccggaggcagcagctgacgcagaagtccgacgtgtactcgttcggagtggtgctcttcgaagttgcctgcgcgaggccagtgatagaccccacgttgcccaaggaccagatcaacctggcggagtgggcgatgaggtggcagcggcagcggtcgctggaggcgatcctggaccctcgcctggacggcgacttctcgcccgagtccctgaagaagttcggcgagatcgcggagaaatgcctcgccgacgacggcaggagcaggccgtccatgggcgaggtcctgtggcacctcgagtacgtgctgcagctccacgaagcttacaggcggaatgtggtggagtccgaatcgttcgggagcggcgagctggggttcgctgatataccatccttcttcagccttccccacgtcatcagggagggggaggaggaacaccaccaccgatcgaagaagccgtcaagtatcagagaggaactagacacacgtgagaacttctgacttcagcaaaacaaaaacaaaaaaaaatcttgctttgtagccatgatcatgatgtaaagttgtgttacatcgttctctttaggttttttttttttttgcttcttattccattggggcgttctcttgcttgacaagagtagcataatagatttttttttcttctccttgtgtgtgtagattaccaaccccctcatccctcccaacagaaagaagacacagaggtgtcaagagtttccttgacaactgtatgatgcaatctgcatggccaccgttcatgcaccgctgcctgtgtgacctgtataaatggcactgatataattactgcctttgaggttttgatgtagcaaacgggattgagaaaggtggtatggtagtgcagctcgagaatgtgtggtactctgttttgcgcgcgctacggaacggtatgtgtgcgagacatctgttttgcagtgaagtgaacc

SEQ ID NO: 19344 - DNA, 1536 bp, Zea Mays
tttgcattcgttccatcgtcgtcggacggttatcgcaagcaagcaagcaaccaggaggaggaaaactgcttccaagtctctagctctctgcgggtgcatctgcggttgtatttgtaaagatgggttgctgctttatgttcggaaagaaagctaagcaggccgttgaaggcgatgaagatctacatagcgtcaaggtgttttcttacaacgacttgaggaaggctacacaagatttcagtgacgcaaacaagattggcgagggcggtttcggttctgtcttccggggagtgcttaaagatgggacactagtggcagtgaaagttctatctgctacttcaaggcaaggcgtccgcgagtttctgactgaacttacagcaatatctgatatcaagcatgcaaatctcgtcactcttatcggttgctgcgctgaaggctctcacagaatcctggtttacaattacctcgagaacaacagccttgcgcagacattgctagatacagtaacattcggttcaattggcgggctcgtgtcaaaattgcagttggcattgcctgtggacttgcgtttctccatgaggaaatccgtcctcacattatccatagggacataaaggcaagcaacattcttcttgacaaggacctgaccccgaaaatttcggatttcgggttggcaaggctcctaccacccaacgcgacgcatgtgagcacccgagtagcaggcacattaggatacttggctcctgaatacgcaatccgtggtcaagtgacaaagaaatccgatatctatagttatggtgttcttcttttagaaattgttagtgggagatgcaacaccaacacaagattacctagtgaagatcaattcctccttgagaggacatgggcactctatgaggaagggcgtttagaagacatcatagatattgacatcggcgatgacctggatgttgatgaggcatgcaggttcatgaagattggcctgctatgcacacaagatgcgatggcgcgtcgtcccagcatgaccaatgtcgttcggatgctctcaggggagaagagaatcaacgtagaccagatcactaggcctgccatgatcactgattttgctgatctcaagatcagcaacaaggagcaaagaccaggcgagacacgctctcccacgacaactcctacgacgaaatcattcaccaccaccgaaccattctcgtcgtcagagacgcccacgcagtcatccatgtgaaagtgtgggcgtaagaagcagttttttttgttgttgtttttagtttgtatagtgtgtgaatgtggtagatgggccaggttacatgaattttttttgaagagtttattgtttgttttgttatgaggaaacatctcataggtctcttattgcatctttgttgctgtaaatatttgaaaatgaagatggtcaagataagctttgcacgattctcattcttgaactcctgcaactgccgtgattatttggatcagttcaccttgtatctgacttttgtcccagagaatacgaaggagagctgc

SEQ ID NO: 19345 - DNA, 244 bp, Zea Mays
tgatgattattgatctcttggatttcagatctcaccaaagtttccctggaatttctcttgttctgatcctacaactgaactaaacactgggagttggcgttatattacaacgatcggaaacaacaacaacaacaacaacaaaaaaaaaaaagagacaaggagaatccaatgcatcattatcgcacaagcgtggccgctaatcctgtggatctctcagcaccatggccagcttctccggcctgtt

SEQ ID NO: 19346 - DNA, 1104 bp, Zea Mays
atgcccctcggccgcggccggcgcggcgcggcgcccgccgacgccggcgtgctcgagcagcgctccaggccgcggaacaccacgcgtccggacgcgctcacgcgcgggctctccgcggccaccgcgggccgggacggacgagaggggccgcgcggccgccacggccccgcgcccgcgcgagggttcctgcaggagtccgaggaggacgccgaggacgaagaagacgaggctcgggccaggagcgggtgcgcgcccgccggctcctgccgcttcgggcgcggcggcgcgtccgggccggcgccggccttgtcgccgccggtaggtttcgtcctggacgacatgaggtggagcaggttcgccacgggcgccgaccgcgtccgaagcggggaacacgacggcggcgcgcggcgcgcgttctttcccgagtcggccgaggacgccgaggacgaggacgaggacgagtcccgcgagaggagcggccggaaatgcgtctcccgtaccgcgtgcagatacccacccgccgcgcggttgctggcgtcggcggcggtagccttgggtttcctggagccggagacgaggaggaggaggtcgcgccagcggcgcccggcgcatcgcggggcgcgaggcgacgtcggctcggaggacgcgggctccacgtccaggcacggcggaggggagcagggcgccgatgcgggcgccggccggtgcaaaggcacgagcttcccgccggagaagagctcgtcggcggccgagagcgctgccgcggcggctggcacgacgtggaactcgaactcgccgacgtcggcctcggccggagcgacggggcagtggaacgcgaaggggtccggcgacgtcaccgctgcggctgccattgccgggggtaccggggcatggacgcgtgaggcgaggccgcgaggtggcgagcggcaactttaaactcgcgagaggcaagagccgatcgagtacgtacgagagtggagagcagttggttttggttcggcgacggcggtgcctgccggtggcgtgccagcgcggaagtagttcggttcgatccaccgtgtactgaaaagttcccatgatatacgggcggtttcgggctaccgg

SEQ ID NO: 19347 - DNA, 4383 bp, Zea Mays
cacacatggtgccttggagatagaagaaaaaaaaattgcaagtggaatggcatcctggaagaacacttgctcttactcttacactccagtgtcaaatgccgttgcgatgctagctctagcgttgctggtcctggcggcgccggcggcgtccgcagtccccgacgcgtccgcgtccgtgcacctcgaggcgctgctggcgttcaagaaggccgtcaccgccgaccccaacggcacgctgaccagctggacggtggggtccggcggcggcggcggcggcggccgctacccacagcactgcaactggaccggcgtggcctgcgacggcgccggccacgtcacgtccatcgagctggtggacaccgggctccggggcacgctgacgccgttcctgggcaacatatcgacgctccagctgctggacctcacgtcgaaccgcttcggcggcggcatcccgccgcagctcgggcgcctcgacgggctcgaggggctcgtcctcggcgccaacaacctcaccggcgccatccctccggagctcggcggcctcgggagcctccagttgctggacctcagcaacaacacgctccgcggaggcatcccgcgccgcctctgcaactgctcggcgatggcagggttgagcgtcttcaacaacgacctcaccggcgcagtccccgactgcatcggtgacctgaccaacctcaacgagctggtactctcgctcaacagtctcgacggcgagctgccgccgtccttcgcgaggctcacgcggctcgagacgttggacctcagcggcaaccagttctccggcccgatcccgccggggatcggcaacttctcgcgtctcaatatcgtccacatgttcgagaaccggttctccggcgccatcccgccggagattggccgctgcaagaacctgaccacgctcaacgtgtacagcaaccgcctcaccggcgcgattccaagcgagctcggggagctcgccagcctcaaggtgctgctcctgtacggcaacgcgctctcgtcggagattccccgctcgctcggccggtgcgcgtcgctggtttcgctccagctgtccatgaaccagctcaccgggtccatcccggccgagctcggagagctacggtcgcttcggaaactgatgctccacgccaacaggctcaccggagaggtgccggcgtcgctgatggatctcgtcaacctgacatacctgagtttcagctacaactctctctccggacctcttccggcgaacattggatcgctccagaatcttcaagtgctcgtcattcagaacaactcgctctccggccccattccggcgagcattgccaactgcacttcgctgtacaacgcgagcatggggttcaacgagttctccgggcctttgcctgccggccttggtcagctacagaacctacacttcctgtccttggcggacaacgacaagctgtccggcgacataccagaggaccttttcgactgcagcaacctcaggacgttaaccctggccgggaacagcttcaccggcagcttgagccctcgcgtcggcaggctcagcgagctcagcttgctgcagttgcagggtaacgctctgtccggggcgataccggaggagatgggcaacctgacgaagctcatcgccctgcagctcgggggaaacgggtttgtcgggcgcgtcccgaagagcatctccaacttgtcgtccctgcagaagctcacgctgcagcagaaccgcctagacggcgccctgcccgacgagatcttcggcctgcggcagctcactgtcctcagcgtcgcgtcgaacaggttcgtaggcccgatccccgacgccgtgtccaacctgcggtccctctccttcctcgacatgtcgaacaatgcgctgaacggcacggtacctgccgcggtgggaagcctcgaccatctcctcacgctggacctctcccacaaccgcctcgccggcgccatccccagcgcgctgatcgcgaaactgagcgccctgcagatgtacctcaacctgtcgaacaacgggttcacgggcccgataccgaccgagatcggcgccctcacgatggtccagtccatcgatctgtccaacaaccgcttatccggtggtgtcccgtcgacgctggcagggtgcaagaacctctactcgctcgacctctctgccaacaatctcaccggcgccctgcctgccggcctcttccctcacctcgacgtcctcacaagcctgaacatctccggcaacgagctagacggcgacatcccttcaaacatcggcgcactgaagaacatacagacgctggacgcgtcacggaacgcgttcacgggggccctaccgtcggcactggcgaacctgaccagtttgaggtcgctgaacctctcctggaaccaatttgagggtcccgtgccggactccggcgtgttctcgaacctgagcatgtcgagcctgcagggcaatgctggcctctgcggctggaagcttctcgctccctgccgccacggcggaaagaaggggttctcgaggacagggctcgcggtcctagtggtgctgctggtgctggccgtgctgttactactggtgcttgtgacgatcctctttctcggataccggaggtacaagaagaagggaggctctaccggtgcaaacagtttcgcggaggacttcgtcgtgccggagctgaggaagttcacttgcagcgagttggatgccgccaccagttcattcgacgaaggcaacgtcatcggtagcagcaacctgagcacggtctacaagggcgtgctcgtggagcccgacggcaaggtggtcgccgtgaagcggctcaacctagcgcagttcccggccaagtccgacaagtgcttcctcaccgagcttgcgactctgagccgcctgaggcacaagaacctggcgcgcgtagtcgggtacgcgtgcgagcccggcaagatcaaggctgtggtcctcgagttcatggacaacggcgacctcgacggcgcgatacacggcccggggagggacgcgcagcggtggacggtcccggagcggctgcgcgcgtgcgtctcggtggcgcacggactggcgtacctgcacaccgggtacgactttcccatcgtgcactgcgacgtcaagccgtcgaacgttctcctcgacagcgactgggaggcgcgcgtcagcgacttcggcactgcgaggatgctgggcgtccatctgacggacgccgccgcgcagtcggcgacgtcgtcggcgttcaggggcaccatcgggtacatggcgccagaattcgcgtacatgaggacggtctcggcgaaggtggacgtgttcagcttcggcgtcttgatgatggaactgttcaccaagcgacgcccgaccgggatgatcgaggaggagggcgtgccactgacactgcagcagtatgtggacaacgcgatctcgaggggcctcgacggggtgctcgacgtcctggaccccgacctgaaggtggtcaccgagggcgacctgtccacggtggcggacgtgctgagcctggccctgtcgtgcgccgcgtccgatccggcggaccggcctgacatggacagcgtgctttcagccttgctgaagatgagcaaggtctgtggaagagactagatgcctgctgcaaaaacgcgaactgaaattcgtgctgcaagatctgttcaagcaaagggagaaccctgcttctgatgagtaccacccggacgccggacgggacgccaaagtgtcatagattcgggctgctcctgtttgcacgtgtaatgagttcaatctgttcagagccagcatggagctagattccaggctatagtgacttttatgtgccctatgaatggttcgctgaaaccagtctagcccatgctgcctgacggaatgggcctgaagtggtagtactgtaggccttttgactgttgattttctttgccgcaacatacctgcatacgcagaagaatggaagctgaaagatttggccaagttgtgggggaggatatattattcatctcattggattggatgcaaacaacagtgtccatcaatcacatcagacatgataatgtgaattctagtcccaacgcagatgtctctcaaatttacagcaatggcttattggtggggagaaggaataatgtccctgaaaacactctctcatgttgtggctagcaaatcatgtatatgcaaaacactatttatactctacattatactgtacattatattatttatatatttgatgtaaaagagggtcacaactataagttaattacgcctccatcagaacgcgggagttaaaggtagatgcgatcaatctaacaagtagtagcatactgctgcacagataaattcagacgccacctgtcagcctttgcatgaacatggag

SEQ ID NO: 19348 - DNA, 1947 bp, Zea Mays
ctttccactaccatatccctactactattaagaagctaaggtgggcgcagggcgacaccacggctccgcctccaccgtgcaccctgccatcgcaagcctgccaccaccacccgcctcacacgcgcgacccgcctgtcccccaccacctccccgacccaagccccatccaccgcacgcctgcccccgcgcctcccccgtcctgccccaccgccgcacaatccgccatgcctcagcctcgcaatatcctccatgccagcgtctctgcttctcctccgtgcaaccgcccgacccgccgccttcccctccgcaaaacagccatgcccccgcctcggctaaccctacgcgcagatccgcagccgcctgacccgccaggaccccgcctctccttccccttcgcgctcaaacaaccaagccgaggtccgcgcagccacacgaactgccatgacctcgcacgatccgtcatgcccccgcctcgcacaatccatcgtgccttcccctccgtgcaaccgcccgacccgccaggaacccgcctctccttccccctccgcgctcaagccgaggaaatgcacccacaaatttggaagccgcggcaatggcgcccgatttggctatggcgtgcatgatctccatcggctgatttggaaaccgcgcaatctacgtcggcgatttggaaaccacgatctcggtaccgcaatcacaacaattgtcccccaaatgtcgcgaccaccgacgtccagctgacttaggaacgaccaagcaggagcctactcctcatttgcccctgttcagaggtaaagacaattacttccctctacaatccaagtatatagagagatcgacgtcaaaaggaacctcgggctttgtattcaagtcggcgagatttccttatgtgaaaacgaagaaccaacagaaacgaatctaatggggcataatgctggtcgcacaccattaatagacatctcaaacacaagcgttacaggtgatcaaataggatcaaactcgcttggaccaatagacgatgctaatgaacgtaagaggcaaagggatagagaaagatatgccacgatgtccattgaacaaaagaatgagaaaaataggaagcgtcgtgaagcacgtcaacgaaatacaggactacccctaaagtctgagtcatctagaggtcctattaaaaacactccattggctggtaattctatcgaacgaaagaggcaaagggatagagaaaggcgtgcaacaatgtcggttgaacaaaggaatgagtacaataacaagcgtcgtcaaatgcgacgacgaaataagggacaaaatgtgatgcccgatgtttcaggagatggcgacaacaaagtaaatgtggatctagatgatgatagcgactggctgcatcggaacgagacattccagacaaacgactatgtcgcaacgacagaccttctgtcaccagatgctgagacagtgcttgatgatctagacatgtcgaaaatatacatcatcggtggcctggtggatcgaaacagatggaagggcataacactgaagaagtcagctgagcagggaattcaatctgcaaagcttcctattggaaactacctaaaaatgtcaagttctcaggttcttacagttaaccaagtgtttgagataatgttgaagtttgtggaaacaagggactggaagacggcattcttccatgtgattccacaaaggaagcgaggagaagctgagaccggagattaatggtgaaagcattcctttaaagacttctcaaatcctaatgtgcaatttcactgatgaacatgtgcacagttttgcctcctcgcctttcttgtcaacctactaatattaggagctatgcaaaaatgttcttcatgctctgaatgactaaaccctgcatttctatgcaacgccatgctcagttttagatgagatccacttctccgtgttttcggctcc

SEQ ID NO: 19349 - DNA, 1650 bp, Zea Mays
cctactactattaagaagctaaggtgggcgcagggcgacaccacggctccgcctccaccgtgcaccctgccatcgcaagcctgccaccaccacccgcctcacacgcgcgacccgcctgtcccccaccacctccccgacccaagccccatccaccgcacgcctgcccccgcgcctcccccgtcctgccccaccgccgcacaatccgccatgcctcagcctcgcaatatcctccatgccagcgtctctgcttctcctccgtgcaaccgcccgacccgccgccttcccctccgcaaaacagccatgcccccgcctcggctaaccctacgcgcagatccgcagccgcctgacccgccaggaccccgcctctccttccccttcgcgctcaaacaaccaagccgaggtccgcgcagccacacgaactgccatgacctcgcacgatccgtcatgcccccgcctcgcacaatccatcgtgccttcccctccgtgcaaccgcccgacccgccaggaacccgcctctccttccccctccgcgctcaagccgaggaaatgcacccacaaatttggaagccgcggcaatggcgcccgatttggctatggcgtgcatgatctccatcggctgatttggaaaccgcgcaatctacgtcggcgatttggaaaccacgatctcggtaccgcaatcacaacaattgtcccccaaatgtcgcgaccaccgacgtccagctgacttaggaacgaccaagcaggagcctactcctcatttgcccctgttcagaggtaaagacaattacttccctctacaatccaagtatatagagagatcgacgtcaaaaggaacctcgggctttgtattcaagtcggcgaggtcctattaaaaacactccattggctggtaattctatcgaacgaaagaggcaaagggatagagaaaggcgtgcaacaatgtcggttgaacaaaggaatgagtacaataacaagcgtcgtcaaatgcgacgacgaaataagggacaaaatgtgatgcccgatgtttcaggagatggcgacaacaaagtaaatgtggatctagatgatgatagcgactggctgcatcggaacgagacattccagacaaacgactatgtcgcaacgacagaccttctgtcaccagatgctgagacagtgcttgatgatctagacatgtcgaaaatatacatcatcggtggcctggtggatcgaaacagatggaagggcataacactgaagaagtcagctgagcagggaattcaatctgcaaagcttcctattggaaactacctaaaaatgtcaagttctcaggttcttacagttaaccaagtgtttgagataatgttgaagtttgtggaaacaagggactggaagacggcattcttccatgtgattccacaaaggaagcgaggagaagctgagaccggagattaatggtgaaagcattcctttaaagacttctcaaatcctaatgtgcaatttcactgatgaacatgtgcacagttttgcctcctcgcctttcttgtcaacctactaatattaggagctatgcaaaaatgttcttcatgctctgaatgactaaaccctgcatttctatgcaacgccatgctcagttttagatgagatccacttctccgtgttttcggctcc

SEQ ID NO: 19350 - DNA, 1359 bp, Zea Mays
attaagaagctaaggtgggcgcagggcgacaccacggctccgcctccaccgtgcaccctgccatcgcaagcctgccaccaccacccgcctcacacgcgcgacccgcctgtcccccaccacctccccgacccaagccccatccaccgcacgcctgcccccgcgcctcccccgtcctgccccaccgccgcacaatccgccatgcctcagcctcgcaatatcctccatgccagcgtctctgcttctcctccgtgcaaccgcccgacccgccgccttcccctccgcaaaacagccatgcccccgcctcggctaaccctacgcgcagatccgcagccgcctgacccgccaggaccccgcctctccttccccttcgcgctcaaacaaccaagccgaggtccgcgcagccacacgaactgccatgacctcgcacgatccgtcatgcccccgcctcgcacaatccatcgtgccttcccctccgtgcaaccgcccgacccgccaggaacccgcctctccttccccctccgcgctcaagccgaggaaatgcacccacaaatttggaagccgcggcaatggcgcccgatttggctatggcgtgcatgatctccatcggctgatttggaaaccgcgcaatctacgtcggcgatttggaaaccacgatctcggtaccgcaatcacaacaattgtcccccaaatgtcgcgaccaccgacgtccagctgacttaggaacgaccaagcaggagcctactcctcatttgcccctgttcagaggtaaagacaattacttccctctacaatccaagtatatagagagatcgacgtcaaaaggaacctcgggctttgtattcaagtcggcgagatgctgagacagtgcttgatgatctagacatgtcgaaaatatacatcatcggtggcctggtggatcgaaacagatggaagggcataacactgaagaagtcagctgagcagggaattcaatctgcaaagcttcctattggaaactacctaaaaatgtcaagttctcaggttcttacagttaaccaagtgtttgagataatgttgaagtttgtggaaacaagggactggaagacggcattcttccatgtgattccacaaaggaagcgaggagaagctgagaccggagattaatggtgaaagcattcctttaaagacttctcaaatcctaatgtgcaatttcactgatgaacatgtgcacagttttgcctcctcgcctttcttgtcaacctactaatattaggagctatgcaaaaatgttcttcatgctctgaatgactaaaccctgcatttctatgcaacgccatgctcagttttagatgagatccacttctccgtgttttcggctcc

SEQ ID NO: 19351 - DNA, 885 bp, Zea Mays
atgtccattgaacaaaagaatgagaaaaataggaagcgtcgtgaagcacgtcaacgaaatacaggactacccctaaagtctgagtcatctagaggtcctattaaaaacactccattggctggtaattctatcgaacgaaagaggcaaagggatagagaaaggcgtgcaacaatgtcggttgaacaaaggaatgagtacaataacaagcgtcgtcaaatgcgacgacgaaataagggacaaaatgtgatgcccgatgtttcaggagatggcgacaacaaagtaaatgtggatctagatgatgatagcgactggctgcatcggaacgagacattccagacaaacgactatgtcgcaacgacagaccttctgtcaccagcagatgctgagacagtgcttgatgatctagacatgtcgaaaatatacatcatcggtggcctggtggatcgaaacagatggaagggcataacactgaagaagtcagctgagcagggaattcaatctgcaaagcttcctattggaaactacctaaaaatgtcaagttctcaggttcttacagttaaccaagtgtttgagataatgttgaagtttgtggaaacaagggactggaagacggcattcttccatgtgattccacaaaggaagcgaggagaagctgagaccggagattaatggtgaaagcattcctttaaagacttctcaaatcctaatgtgcaatttcactgatgaacatgtgcacagttttgcctcctcgcctttcttgtcaacctactaatattaggagctatgcaaaaatgttcttcatgctctgaatgactaaaccctgcatttctatgcaacgccatgctcagttttagatgagatccacttctccgtgttttcggctcc

SEQ ID NO: 19352 - DNA, 1179 bp, Zea Mays
atgccaattaataacgcaccccttgggtggagtatattcattgacctgcctgtccctggcctgcggggcccacgtgtctgccagggcggcggcccggcggtatatatacccaccgcttcgttcctccacccgcagccgcagtccaccagagcgcacgcgcaaacaagaggaggagagaagctgccattgccgacgaccgccaaggaagggattccggaaggagggggaacccacgggaggcccagcgctgggatgttggccgcggacgtcagctccgtcgcgaggctgctccgcggggaggcggtgaagaagggcgggccggagatcgtgacgatggatcttctcggcggttgtggcggcggcgtggcagcggaggacgaggtcgtggacctcgatgtcacggtgcctgccggctgggagcgacggcttgacctcttgtccggcaagacgttcctgacccctcgccaccagagcgtgcaaggcggtcaccaagacctcaaccttcctcctccggcggcaggatccgcgtcggcgccaaacaccaacaactcgtcagcagcggtctgtaccctcgacatggtccgctccgccctcgagcgcgcgactgccggaaggaccgccgcgtcgcctgcaacgtcttccaccgctccgcggtaaggccgccggcgccgctaccgtaggtagtggcaagaagccgaggattgacctgaatgcggctgctgatgagatggagtgaacggagaaaaagattagaggaaattggaacaggaaatataatcaggaaacgggtttcttttcggcaaaacctttgtctgatagaaccgtctgatcatagtatagggggcctctatgtttatatttattaaagttcgatcatagatagaaaaaaactggtgggttacagagtataggagcagattttatttagtttattccagttttgttggttataacgttgtgcttatgctgctatattaaagcatcaattgcatcagttttatgcgcgtaggttttttatcttctccactaatcacataactatagaccatgcaccacatatccaagcaaccaagctcaacacatgaaagaagccacattcaatgtagcgttctcgtatattactacgtcgctagccgaaggctagaacttttttttgtttctatataaaataagttgaag

SEQ ID NO: 19353 - DNA, 1963 bp, Zea Mays
agattacgcgtggaattgtggcggcggcggctgtatcctcccgagctgctccctagacggcggccggtcctctacaggcggctccccagcggctacccagtcggcggtcgggactcccaagacgccgctcgtcttgctccccaggcgctaggcggccgcggctcgtgttcgtccccaggcagccacgcctcctgttcctccccaggcgtcaggcggccgtgtcctccccagccgtcggttcttgacttcgacaggttgaaaaaatttggttacaaagtatgaagaaaaaacaggcctaaagctaacaaagaaacaattgaagaataagttggacaacatgaaaaaggagtatacatggttcatggagttcaagaatgcgaccactggtcttggatggattgaggcaaaacaaactgttgactgctccaaagattggtgggatgaacacctagcaagatgtaacaatccggataaaggtatcaaatgcaaccatgttaggttcagaaaacaaggaccaaaacatcttgatgatctacatatgttgtttgataagatacatgttagcgggacaagtgcatcatgtcctggagatatttcatctgatgactcaagtgatgatgtgctagagatagaaagaactccagaaaatgatgaagtcaaagtggctgtttcgaaaagatccaaaccagtgaaaaggaaacgcaaggcctcatgtactgctgctgaggagaaggaagagaagagtccattctttcgactatataagaacacatgtttgaagatagaaacagcagcagagaagatatccacaagtgttgaagcatcatcaacacatccaacaagccaagtgcctagcattgcagagactatgaagatggtgaaagattgtggggttaaagagaaaacagctctaatgcatacaactacatttttgattgtgaagcctgaatttagagaggtcttctgcatgctggaaacaaatgaaggaaggtttgacttacttgagagggagcatgcaaaggaaatgatgaggcacatgtagaagattttgaattatttatttatattaatgtgttgtgagaactatttgtttgcttgctatgtaagcaccatttggaatgatgatattgtgtccataatctttgttttctgtgcacagtttgctttgttgtgtgcaattttgtttgttgtctacatattcatttgctattcaatttttgttataaatattaatatattaatatattgtgtagatggctgacaacatggcaactttggccaaacaagcaaacaagggtctattgtatcttgctgaactgtcccagcaagcagttgttattggtgaaatgggtgaagagtacaatcagagatacttgcacaaaggagagtacagggaaaccccagaaactggaatacaatgggttacgaattgcatgggtcgtccaaggtacttttataagatgtttcgcatgagcacagatgttttcatggcactacatgacttgctcgtctctagttacgacttaacatcaactaataatgtatcatcaatggagtcactagcaatgtttttgtggatcgttggaggaccacaatcattttcacaagctgaaaatcgttttacccgatcactatggacagtgcacaccaaatttcatgaagtactaaaatgtttgcgcaagttatcgaaagataatattaaaccaagatatcctactttcaaaactgagcatgatagaatcaaagaggaacgtttctggccgtatttccaaggagctatcggagctattgacggttcacatgttcctgtcacagtgccagcagctgaagtgcttaactatacatgtcgacatgggtatacatctcagaatgtgttagcaatttgtgattttgacatgagatttatctttgtcgttgctgggtggccgggttctgcacatgacacacggatcctgaatcatgc

SEQ ID NO: 19354 - DNA, 3555 bp, Zea Mays
agattacgcgtggaattgtggcggcggcggctgtatcctcccgagctgctccctagacggcggccggtcctctacaggcggctccccagcggctacccagtcggcggtcgggactcccaagacgccgctcgtcttgctccccaggcgctaggcggccgcggctcgtgttcgtccccaggcagccacgcctcctgttcctccccaggcgtcaggcggccgtgtcctccccagccgtcggttcttgacttcgtaggtttcctctggacctcatgtgcatggctgcttgctgatttttagatagcatcacgttctgtcccctagcaaattagtctttatgcctatgtgtcacaaggaggaacaaagggctttaaggggaatcagctttagatttgcttattcgttgccttcattgtttggtgcctggaaaaaggaagtgtgcctccattattagctagcacttattctgttaagattcgaaatggattcaattgaaaatattggacgcatagcagaaaccgtcagtataaggaatcatggaatatggtgcagcaaaaagataaataggaactcgttattctctagctctaagcttggtagatgaatgggagatttgagctcaattaattgatttgtggcctgtaaagctcatcattagctatctgttatttatgatggttatgacaaccagcttctcagccatttatagcaattagagcagtttgatgtttgtgtgggggtggtggtggggaggggcattgtcttgctttgcagtctacatatgaatcctggtacagcttattaaggaaaaacccaggggcgtctcccccctgtgttctaggttttttatgatgattgtaccagaatatatttatatagcctatatggatgcaaccactaagagtaattaattgctaattttctgcatccatgaagctgtcatctgaattgttctaagccatgtcatattcagagaaatatcaaacccatatgatgttgtttcaaacattaatagtgtaactttcttttttaaagaaaaaacagacactattacgtcatttgttgaacacattataatctagtagggtatttgacactggaccaagattgtttgaggaactattggtgtgatgcaaatgttacatatctcattaatatctgcaaaaaagagatagaagatgacaataggcccatgggagttttcactaggacaggttgaaaaaatttggttacaaagtatgaagaaaaaacaggcctaaagctaacaaagaaacaattgaagaataagttggacaacatgaaaaaggagtatacatggttcatggagttcaagaatgcgaccactggtcttggatggattgaggcaaaacaaactgttgactgctccaaagattggtgggatgaacacctagcaagatgtaacaatccggataaaggtatcaaatgcaaccatgttaggttcagaaaacaaggaccaaaacatcttgatgatctacatatgttgtttgataagatacatgttagcgggacaagtgcatcatgtcctggagatatttcatctgatgactcaagtgatgatgtgctagagatagaaagaactccagaaaatgatgaagtcaaagtggctgtttcgaaaagatccaaaccagtgaaaaggaaacgcaaggcctcatgtactgctgctgaggagaaggaagagaagagtccattctttcgactatataagaacacatgtttgaagatagaaacagcagcagagaagatatccacaagtgttgaagcatcatcaacacatccaacaagccaagtgcctagcattgcagagactatgaagatggtgaaagattgtggggttaaagagaaaacagctctaatgcatacaactacatttttgattgtgaagcctgaatttagagaggtcttctgcatgctggaaacaaatgaaggaaggtttgacttacttgagagggagcatgcaaaggaaatgatgaggcacatgtagaagattttgaattatttatttatattaatgtgttgtgagaactatttgtttgcttgctatgtaagcaccatttggaatgatgatattgtgtccataatctttgttttctgtgcacagtttgctttgttgtgtgcaattttgtttgttgtctacatattcatttgctattcaatttttgttataaatattaatatattaatatattgtgtagatggctgacaacatggcaactttggccaaacaagcaaacaagggtctattgtatcttgctgaactgtcccagcaagcagttgttattggtgaaatgggtgaagagtacaatcagagatacttgcacaaaggagagtacagggaaaccccagaaactggaatacaatgggttacgaattgcatgggtcgtccaaggtacttttataagatgtttcgcatgagcacagatgttttcatggcactacatgacttgctcgtctctagttacgacttaacatcaactaataatgtatcatcaatggagtcactagcaatgtttttgtggatcgttggaggaccacaatcattttcacaagctgaaaatcgttttacccgatcactatggacagtgcacaccaaatttcatgaagtactaaaatgtttgcgcaagttatcgaaagataatattaaaccaagatatcctactttcaaaactgagcatgatagaatcaaagaggaacgtttctggccgtatttccaaggagctatcggagctattgacggttcacatgttcctgtcacagtgccagcagctgaagtgcttaactatacatgtcgacatgggtatacatctcagaatgtgttagcaatttgtgattttgacatgagatttatctttgtcgttgctgggtggccgggttctgcacatgacacacggatcctgaatcatgctttagcaaatttcccttcatttccggtgcctccaaaaggtaagtattatctcgtcgactctggttatccaaatcgacaaggatatctagcccctttcaaaggaagcacataccatatactagaatttcgacttcgtaatggacgtcctcctcaagggaagtatgagatattcaatttcttacattcatctcttcgaaatgttattgagagggcttttggagtcttgaagcagaagtggcgtattttgaaaggcattccaagtttttctacacgtacacagaaacatataataatagcttgcatggcgttgcgtaattttattcgtgacagcaattcagaagataagttgtttgatagatgtgatgctgatgaggagtacttggtacaacagagtttcacgtcacaagcacaaggagatgacaatccagagggagagaatgagaatacaatgaataccattcgcattaagatagctgatgctttgagtagtgcgagagggagatagttatgttgaagtaggatattctgaatcatcagtttatttatgtgtctcctacaatgtagggctattacacacattttgtaccaaacctacaatttcacagttgttcgaaccaaacagctttctgcttttt

SEQ ID NO: 19355 - DNA, 2703 bp, Zea Mays
agattacgcgtggaattgtggcggcggcggctgtatcctcccgagctgctccctagacggcggccggtcctctacaggcggctccccagcggctacccagtcggcggtcgggactcccaagacgccgctcgtcttgctccccaggcgctaggcggccgcggctcgtgttcgtccccaggcagccacgcctcctgttcctccccaggcgtcaggcggccgtgtcctccccagccgtcggttcttgacttcaatggctgataaggcaaattggtgtgatgcaaatgttacatatctcattaatatctgcaaaaaagagatagaagatgacaataggcccatgggagttttcactaggacaggttgaaaaaatttggttacaaagtatgaagaaaaaacaggcctaaagctaacaaagaaacaattgaagaataagttggacaacatgaaaaaggagtatacatggttcatggagttcaagaatgcgaccactggtcttggatggattgaggcaaaacaaactgttgactgctccaaagattggtgggatgaacacctagcaagatgtaacaatccggataaaggtatcaaatgcaaccatgttaggttcagaaaacaaggaccaaaacatcttgatgatctacatatgttgtttgataagatacatgttagcgggacaagtgcatcatgtcctggagatatttcatctgatgactcaagtgatgatgtgctagagatagaaagaactccagaaaatgatgaagtcaaagtggctgtttcgaaaagatccaaaccagtgaaaaggaaacgcaaggcctcatgtactgctgctgaggagaaggaagagaagagtccattctttcgactatataagaacacatgtttgaagatagaaacagcagcagagaagatatccacaagtgttgaagcatcatcaacacatccaacaagccaagtgcctagcattgcagagactatgaagatggtgaaagattgtggggttaaagagaaaacagctctaatgcatacaactacatttttgattgtgaagcctgaatttagagaggtcttctgcatgctggaaacaaatgaaggaaggtttgacttacttgagagggagcatgcaaaggaaatgatgaggcacatgtagaagattttgaattatttatttatattaatgtgttgtgagaactatttgtttgcttgctatgtaagcaccatttggaatgatgatattgtgtccataatctttgttttctgtgcacagtttgctttgttgtgtgcaattttgtttgttgtctacatattcatttgctattcaatttttgttataaatattaatatattaatatattgtgtagatggctgacaacatggcaactttggccaaacaagcaaacaagggtctattgtatcttgctgaactgtcccagcaagcagttgttattggtgaaatgggtgaagagtacaatcagagatacttgcacaaaggagagtacagggaaaccccagaaactggaatacaatgggttacgaattgcatgggtcgtccaaggtacttttataagatgtttcgcatgagcacagatgttttcatggcactacatgacttgctcgtctctagttacgacttaacatcaactaataatgtatcatcaatggagtcactagcaatgtttttgtggatcgttggaggaccacaatcattttcacaagctgaaaatcgttttacccgatcactatggacagtgcacaccaaatttcatgaagtactaaaatgtttgcgcaagttatcgaaagataatattaaaccaagatatcctactttcaaaactgagcatgatagaatcaaagaggaacgtttctggccgtatttccaaggagctatcggagctattgacggttcacatgttcctgtcacagtgccagcagctgaagtgcttaactatacatgtcgacatgggtatacatctcagaatgtgttagcaatttgtgattttgacatgagatttatctttgtcgttgctgggtggccgggttctgcacatgacacacggatcctgaatcatgctttagcaaatttcccttcatttccggtgcctccaaaaggtaagtattatctcgtcgactctggttatccaaatcgacaaggatatctagcccctttcaaaggaagcacataccatatactagaatttcgacttcgtaatggacgtcctcctcaagggaagtatgagatattcaatttcttacattcatctcttcgaaatgttattgagagggcttttggagtcttgaagcagaagtggcgtattttgaaaggcattccaagtttttctacacgtacacagaaacatataataatagcttgcatggcgttgcgtaattttattcgtgacagcaattcagaagataagttgtttgatagatgtgatgctgatgaggagtacttggtacaacagagtttcacgtcacaagcacaaggagatgacaatccagagggagagaatgagaatacaatgaataccattcgcattaagatagctgatgctttgagtagtgcgagagggagatagttatgttgaagtaggatattctgaatcatcagtttatttatgtgtctcctacaatgtagggctattacacacattttgtaccaaacctacaatttcacagttgttcgaaccaaacagctttctgcttttt

SEQ ID NO: 19356 - DNA, 904 bp, Zea Mays
ccaggctccgctgctcgagcaggcggagagagaaagaagaagggagctaacgatgcggcctggatcgacctccagaccttctccgcgccggtgcctctatgtctatggctccgcctccgcgctcccgaagctgctgctgctgcttctagctgcatcatcatccgcgcaagcccagcaagcggcgaggatgaagaccgatccagtcgaagcggcggcggtgaacgcggtgttcgccaagctccgccagacagcgtcgtcggaatggaacatcagcggcgacccctgcaccggcatcgccacggacggcaccgtcatcgaagacaacggcaacttcaacccgggcatcaagtgcgagtgctccgaccagaacaacatcaccgtctgccacgtcaccaagctgaagatatacgcgctcaatgccgttggccccataccacaggaactgcagaatcttacgcgcttgatcaatctggatttaagcaagaattacttaacaggttctttgccatctttcctcgggaatttgactgctatgcagtacatgactttgggcaccaatgcattgtctggatctgttccaaaggagcttgggaaccttgtgaatcttgtatctctaggctttggctcgaactacttaaatggcccccttccttgggagttgggaaacctggcaaaactggagcaattgtatattgatagtgccggcctaagtggtctcctaccatcatcgctttctaggctaacaagaatgaacatactgtgggcatcagataatgattttactgggcaaataccagattatattgggagctggactaatttgacagatctgcggtttcaaggcaattcgtttcaaggtccacttccagccagtttttctaatctcgttcaactaacaaacttg

SEQ ID NO: 19357 - DNA, 3648 bp, Zea Mays
ccggtgcgctagaccagagcatccttcggttttctttgctcctttcttttgaaccctttcttttaactttgtattcgtttgttgtgaacctttggcacctgtagaacatatattctagagcaaactagttaatccaattatttgtattgggtaattcaaccaccaaaattatttaggaaaaggtttgaccctatttccctttcagttagttagcaaggagcgaatgaaactcggtatcagggacgacaccgtcaaagaggcaatagtggtgagggcaagtagatcgggtagcatccggaagccggccttggcacgtgtgaccatcgggtaatgacatcagcgacgatacaacgatatccctggctggtcggcgcaccggtgtcgctagtgcaggagccaggggtgctgaagttgtggccagcgtgggtgacgaatacagacgatcggtgaggatagctacatgtcggccgccggtgccacacgtggtgcagtaggaagcgctggtgttgcgcacgaagggatagggggtgctgatgccatgcacggttcggctggcacaggagctgcgcagggcgcagcaggagtcggcggcaccgcacggggcagaaatctagaagggaccgtaggtgcgggcaggggcgtggtaggaggctcgaacccgaggggtaccccctttgtggacaaggagccgacatggtggtagtgtctgcaagaggggttccaatggtggaaactgaggaacttgactcacataaaaaaatctaggttaattacaatgaatgaggcagcgagtgggaatctgtcctcatcaaaacccacatgacgagatatgagcatgcggttggaagataggtcaagacactggtagcctttgtgatcggagagtagctgagaaagacaccaaatagatcgaggagcaagcttgtgcggagcaatagcggcagtgttagggtaacacgcacaaccaaaaactcacaggtggtcgaatgaaggtgctgaaccaaatgtagctacatgaggacagacaacgttgatcgtctttgtgaggagaccgttaagcaggtaagtggcagtgtggagcttcttatcccgatatcgtctatgaagggatgcctggatcaacaatgagcgaacaacattgttaatggaacgaacaatatgctcgactttactgttttgaggggtcgtgtaagggcagaacatccgcagctgagtgcctttggagagcagaaaagtttgggtagaagaattatctaattcacgctcgttgtcgcattggatcgccttgatagtgcaactaaactgagtaacagtgatgccttctaattatatttcctgtgtttcattctacatagggacttggtggcgaacaattttgcgacgaatagcggaccttgggggctgccgtgtcttcagagagacacaccctgtttccttggctctccacaatctgcctctcttgctgtggactgtgggagcagtagatctatatctggctctgataagtccatgtatcaacgtgatgatgccaatcttggagctgcatcctattatgttacaggagcacagacatggggtgttagcaatgtgggcaagttcacggaggcagtatacgaaagttacataatctccagctcacgccaattctacaatactctagatccagaactattccagacagcaaggatgtcggcatcatctttgagatactatggtattggactccagaacggaaattataccgtcgcacttcaatttgcagattttgactttgaagattcacagacttggcagagtgttgggagaaggatttttgatatctatctccagggtgagcgtaaggagaagaactttgacataatgaaggcagcagggggaaaatcttacactgctgttgagaagcagtatattgttcctgtcactagaaacttccttgagattcatcttttctgggccggcaagggcacttgttgcattccctttcgaggctactatgggcctgcaatctcagctttcagtgtaacgccaaattttaaccctacagtgcagaccagtaggaaaacaggtataattgttggagtcgtggttggtgcagcagttttgggagtactagcacttgctggactctgtatgaggaggcagaaaaggagaaaattattattggagcaacaggaactttacagtattgttggaagacctaatgtattcacttatggtgaactaaggacgtctactgaaaattttagttccaataaccttctgggtgaaggaggatatgggtcagtttataagggtaaattagctgaaggaagggtggtggctgtaaaacagttatctgaaacatctcatcaaggaaaacaacaatttgctgccgaaataggaactatttctcgagtgcaacaccgtaatcttgtgaagttgtacggttgctgccttgagggaaataaaccactgttggtttatgagtatctggagaatggaagccttgataaagcattatttggaagtgggagactgaacctagactggccaacacgctttgagatatgtttgggcattgcaagaggcatcgcttatctccatgaagagtctagcatccgtattgtgcatagggacataaaggctagcaatatcttgcttgacgcaaatttcaaccctaagatctcagattttgggctcgccaaactttatgacgacaagaagactcatgtcagcacaaaagttgcgggtacatttggttatcttgcacctgagtacgccatgagaggtcatatgaccgagaaagttgatgtgtttgcatttggcatggtcatattggagaccttagccggaagaccaaattttgacaatatgctagatgaaattaaggtttatatattagaatgggtctggcaactgtacgaagataagcaccctctggacatggtcgaccccaagctcgaagaattcaacagtggcgaggtgatccgtgccatccacgtggccctcctctgcacccagggctcgccacaccagcgtccttccatgtcacgagcggtgtcgatgctggcgggagacgtggaggtgggcgaggtggtgaacaaacccagttacatcacggagtggcagatcaagggtggcaacaccagcagcttcatgagcaacaatgtcagtggacagtcgagcatggcaccaaggtcgtcagcctcgcacacctcgtcgccgttcttgaactctgtcatcgaagaaggctggtgattattaccaagttctgtcaagcgaacggactgctgcttataaatgcacgctacagaatgctctctggtctctgcctctgcacatatgctgtgtaggttctatgttccattttttatacaaatgatagatatattgattgctaggtccatttgcaagaactaaggtggtgtttgtttaaggttataatttgtcaatattatataatccaacaacttttaaactaaagattagttcaaaagttgttgaattatataatctagacagattataatctaaaacaaacacccctaagtcacgttagatatataattttccgctatatcaaacagatccttacgttgtctccattggctttctattttctattccatcttctaattcaaacttcactttatgcagtttacattgtag

SEQ ID NO: 19358 - DNA, 3851 bp, Zea Mays
cttctgttcggttcgacaactcgatttcgatcccccacttgtttcagagatatctgaagggagcagaagcaggagcagcagagcgagcaggcagagaagggacgatcgagcaagcaagctccgggcagggagagatgaggaagcccaggctgagtgtcggcggcggcggcggcctcctccatggctttccctcccccgtgctgctgttcttgctgctgctgctgctgagttcttggagggtggctgcccaggcgcagcaggcgcctcagactgatccggtggaagcggcggcggtgaacgcgatcctgagcaagctgaggctgagcgcgccgccgtcgtggaacatcagcgggaacccctgcagcggcgccgcgacggacgacacgtccatcgacgacaaccctgcgttcaacccggccatcaagtgcgactgttccgaccaaaacaacacgctctgccatgtcactagactgaagataaacacactggacgcagttggccccatacctgaggagctgcggaacctcactcacctcgttaaactgaccgtgggcatcaatgcactatctggacctgtcccaaaggagcttggaaatcttaccaatctcttatcactggcattgggctcaaataattttaacggcacacttcctgatgagctggggaaactgacaaaacttcgacaaatatacattgatagtaacgacttcagtggttctctaccatcgacattgtcccagctgaagaacctgtcaatcttgtgggcatcagacaataatttcagtgggcagattcctgattatcttgggagtttgactaacttgacccaactgaggctccaagggaactcttttcaaggtcccattcccacaagtctttctaatcttgtcaacttaaaaaaattaaggataggcgatatagtgaatggaagctcttcgctgtcattcattggcaatttgacatctttgggtgaactagtgttgaggaacagcattatatctgatacactagcatcggtagacttctccaactttgtaaatttatacttattggacctgagtttcaacaatatcacaggacaaatacctcaatcaattttgaatcttacatctcttagttatttatttctagggaataatagcctttcgggaagtctgcctgccacaaaaagtcccttagtgaccaatatagatttttcatacaaccatatctcaggaaactttccttcttgggctactgacaaaaatttacaattgaatttggtagcaaacgactttgtgatggatagctccaataacagtgttttgccatggggattggagtgtcttcagcatagtactccctgtttcctcggttctccaaagtctgcgtcctttgcggtggactgtggtggtagtagagcaatatcaggttcagataattctgtctatcaagctgataatgccaaccttagtgctgcatcgtactatgttgcgggtgcacctacatgggccgttagcagcgttgggttattcttggacgcagatgcacccaatgcaagttacatcatctacagttcacgccagttcgagaacaccctagactctgcactgttccaaacagcaaggatgtcgccatcatccctgagatactatggcattggacttgagaatggaaattacacggtcacacttcaatttgcagaggttgactttccagacatgcagtcttggagaagctgagggaggagggttttcgatatctatgtccagggagagcgcaaggagcagaactttgacattagaaaggcagctggagggaaatctttcactgctgttaagaagcagtatgttgttccagtaaccaaaaacttccttgagattcatctcttctgggctggcaagggcacttgttgcattccttataagggatactatggtcctgcaatatcagccctgagtgcaactccaaatttcgttcctacagtccgtagttctgaagacagcaagagcagccataaaactggtgtgatcgctggggttgcagttggtgtttcagtttttgcattgatcgcactggccggaatcttcttgtggtgtcagaaaaggagaaagctattgttagagctagaagaattgtataccatagttggaaggccaaatgtcttcagttacagtgagcttaggtcagctacagagaacttttgttctagtaacctacttggtgaaggaggatatggatcagtttacaagggtaagttgagtgatggaaaagtggtggcagtgaagcagctctctcagtcctctaaccagggaaagatgcagtttgcggcagaaatcgaaaccatttcccgagtgcagcaccgtaacctcgtgaggttgtatggctgctgccttgagagcaaaacaccattgttggtctacgagtacctggagaatggaagcctcgatcatgctttgtttggaaaggggagcttgaatctagactggccaacacgattcgagatatgtttgggcgtagcaagaggtatagcttatctccacgaggagtcaaccatccgcattgtgcacagggacataaaggccagtaacgtgttgatcgacgccgatcttaacccgaagatctccgatttcggccttgccaagctctacgacgacaagaagactcacgtcatcacaaatgttgctggcacgtttggttatctcgcgcctgagtacgctatgagagggcatatgactgagaaggttgatgtgttcgcgtttggcgtggtcgcgctggagattgtcgctggtgaatcaaactatcagaatgctctggacgaaggcacgacctatatctttgaaagggtgtgggaactgtacgagaacgggcggccgctggagttcgtggacccgaagctgacggagtacgacgcgtacgaggtgctgcgggtgatccgcgtggcgctccactgcacccagggctcgccccacaagcggccgtccatgtcgagggtggtcgccatgctcaacggggacgccgacgcggccgaggacgttgcgaagccgagctacatcacggagtggcaggtgatggcggccgacgtcagcggcagcttcgcgagcagccacgtcgggtcgtcgtcgacgcagacgcagccaacgtcttcgtccggcggccacggcggcgcccaggcgagccctgagcccggggacctgacgcccgcggtcccgtcgccgctctacacctccatcatcgaggagggcaggtgacagctagcttgcctcggaatcgcgaatgcctggcagtggcatgcatgcttgcctcggaatcgcgaatgcgttgctgtgctctccagttttgtggctaatacaatactgatgtcgggtcgccatggttgatgttgttgtgaggaatttacttgaatgtgaggccgcaagcagcagatttgatttgggaggcacactgaaatggcagccgacgcagattttgggatggcgtgcgcgtccctgtcaagaatgggatggcgtgtgcgccggcgccaggcctgcctcgccttgcttgccggcggcagcgtgacacgtctggagggtggagaccccgacgaacgttccaagggatgtttctcctgaattcggcatgcatcacctggctggtagatggtcacgtctccccctcctatgatttaagtgtgtgaaacgtggtatatatatgcattagttgtgcaatgtgttgcagacatccacatacaagtcttcccacatattttgattttgttattatatactccctccgttataaatatagtagaaagtaaaacaaatttaaatttgagacagaaagtatgttttatttttcgttgaacgcttaaaataattaagcaccactttaat

SEQ ID NO: 19359 - DNA, 3923 bp, Zea Mays
cttctgttcggttcgacaactcgatttcgatcccccacttgtttcagagatatctgaagggagcagaagcaggagcagcagagcgagcaggcagagaagggacgatcgagcaagcaagctccgggcagggagagatgaggaagcccaggctgagtgtcggcggcggcggcggcctcctccatggctttccctcccccgtgctgctgttcttgctgctgctgctgctgagttcttggagggtggctgcccaggcgcagcaggcgcctcagactgatccggtggaagcggcggcggtgaacgcgatcctgagcaagctgaggctgagcgcgccgccgtcgtggaacatcagcgggaacccctgcagcggcgccgcgacggacgacacgtccatcgacgacaaccctgcgttcaacccggccatcaagtgcgactgttccgaccaaaacaacacgctctgccatgtcactagactgaagataaacacactggacgcagttggccccatacctgaggagctgcggaacctcactcacctcgttaaactggacttcagaaaaaattacttctacgggccattaccagcattcattggagaactaactgctctggaatcaatgaccgtgggcatcaatgcactatctggacctgtcccaaaggagcttggaaatcttaccaatctcttatcactggcattgggctcaaataattttaacggcacacttcctgatgagctggggaaactgacaaaacttcgacaaatatacattgatagtaacgacttcagtggttctctaccatcgacattgtcccagctgaagaacctgtcaatcttgtgggcatcagacaataatttcagtgggcagattcctgattatcttgggagtttgactaacttgacccaactgaggctccaagggaactcttttcaaggtcccattcccacaagtctttctaatcttgtcaacttaaaaaaattaaggataggcgatatagtgaatggaagctcttcgctgtcattcattggcaatttgacatctttgggtgaactagtgttgaggaacagcattatatctgatacactagcatcggtagacttctccaactttgtaaatttatacttattggacctgagtttcaacaatatcacaggacaaatacctcaatcaattttgaatcttacatctcttagttatttatttctagggaataatagcctttcgggaagtctgcctgccacaaaaagtcccttagtgaccaatatagatttttcatacaaccatatctcaggaaactttccttcttgggctactgacaaaaatttacaattgaatttggtagcaaacgactttgtgatggatagctccaataacagtgttttgccatggggattggagtgtcttcagcatagtactccctgtttcctcggttctccaaagtctgcgtcctttgcggtggactgtggtggtagtagagcaatatcaggttcagataattctgtctatcaagctgataatgccaaccttagtgctgcatcgtactatgttgcgggtgcacctacatgggccgttagcagcgttgggttattcttggacgcagatgcacccaatgcaagttacatcatctacagttcacgccagttcgagaacaccctagactctgcactgttccaaacagcaaggatgtcgccatcatccctgagatactatggcattggacttgagaatggaaattacacggtcacacttcaatttgcagaggttgactttccagacatgcagtcttggagaagctgagggaggagggttttcgatatctatgtccagggagagcgcaaggagcagaactttgacattagaaaggcagctggagggaaatctttcactgctgttaagaagcagtatgttgttccagtaaccaaaaacttccttgagattcatctcttctgggctggcaagggcacttgttgcattccttataagggatactatggtcctgcaatatcagccctgagtgcaactccaaatttcgttcctacagtccgtagttctgaagacagcaagagcagccataaaactggtgtgatcgctggggttgcagttggtgtttcagtttttgcattgatcgcactggccggaatcttcttgtggtgtcagaaaaggagaaagctattgttagagctagaagaattgtataccatagttggaaggccaaatgtcttcagttacagtgagcttaggtcagctacagagaacttttgttctagtaacctacttggtgaaggaggatatggatcagtttacaagggtaagttgagtgatggaaaagtggtggcagtgaagcagctctctcagtcctctaaccagggaaagatgcagtttgcggcagaaatcgaaaccatttcccgagtgcagcaccgtaacctcgtgaggttgtatggctgctgccttgagagcaaaacaccattgttggtctacgagtacctggagaatggaagcctcgatcatgctttgtttggaaaggggagcttgaatctagactggccaacacgattcgagatatgtttgggcgtagcaagaggtatagcttatctccacgaggagtcaaccatccgcattgtgcacagggacataaaggccagtaacgtgttgatcgacgccgatcttaacccgaagatctccgatttcggccttgccaagctctacgacgacaagaagactcacgtcatcacaaatgttgctggcacgtttggttatctcgcgcctgagtacgctatgagagggcatatgactgagaaggttgatgtgttcgcgtttggcgtggtcgcgctggagattgtcgctggtgaatcaaactatcagaatgctctggacgaaggcacgacctatatctttgaaagggtgtgggaactgtacgagaacgggcggccgctggagttcgtggacccgaagctgacggagtacgacgcgtacgaggtgctgcgggtgatccgcgtggcgctccactgcacccagggctcgccccacaagcggccgtccatgtcgagggtggtcgccatgctcaacggggacgccgacgcggccgaggacgttgcgaagccgagctacatcacggagtggcaggtgatggcggccgacgtcagcggcagcttcgcgagcagccacgtcgggtcgtcgtcgacgcagacgcagccaacgtcttcgtccggcggccacggcggcgcccaggcgagccctgagcccggggacctgacgcccgcggtcccgtcgccgctctacacctccatcatcgaggagggcaggtgacagctagcttgcctcggaatcgcgaatgcctggcagtggcatgcatgcttgcctcggaatcgcgaatgcgttgctgtgctctccagttttgtggctaatacaatactgatgtcgggtcgccatggttgatgttgttgtgaggaatttacttgaatgtgaggccgcaagcagcagatttgatttgggaggcacactgaaatggcagccgacgcagattttgggatggcgtgcgcgtccctgtcaagaatgggatggcgtgtgcgccggcgccaggcctgcctcgccttgcttgccggcggcagcgtgacacgtctggagggtggagaccccgacgaacgttccaagggatgtttctcctgaattcggcatgcatcacctggctggtagatggtcacgtctccccctcctatgatttaagtgtgtgaaacgtggtatatatatgcattagttgtgcaatgtgttgcagacatccacatacaagtcttcccacatattttgattttgttattatatactccctccgttataaatatagtagaaagtaaaacaaatttaaatttgagacagaaagtatgttttatttttcgttgaacgcttaaaataattaagcaccactttaat

SEQ ID NO: 19360 - DNA, 3847 bp, Zea Mays
gttcgacaactcgatttcgatcccccacttgtttcagagatatctgaagggagcagaagcaggagcagcagagcgagcaggcagagaagggacgatcgagcaagcaagctccgggcagggagagatgaggaagcccaggctgagtgtcggcggcggcggcggcctcctccatggctttccctcccccgtgctgctgttcttgctgctgctgctgctgagttcttggagggtggctgcccaggcgcagcaggcgcctcagactgatccggtggaagcggcggcggtgaacgcgatcctgagcaagctgaggctgagcgcgccgccgtcgtggaacatcagcgggaacccctgcagcggcgccgcgacggacgacacgtccatcgacgacaaccctgcgttcaacccggccatcaagtgcgactgttccgaccaaaacaacacgctctgccatgtcactagactgaagataaacacactggacgcagttggccccatacctgaggagctgcggaacctcactcacctcgttaaactggacttcagaaaaaattacttctacgggccattaccagcattcattggagaactaactgctctggaatcaatgaccgtgggcatcaatgcactatctggacctgtcccaaaggagcttggaaatcttaccaatctcttatcactggcattgggctcaaataattttaacggcacacttcctgatgagctggggaaactgacaaaacttcgacaaatatacattgatagtaacgacttcagtggttctctaccatcgacattgtcccagctgaagaacctgtcaatcttgtgggcatcagacaataatttcagtgggcagattcctgattatcttgggagtttgactaacttgacccaactgaggctccaagggaactcttttcaaggtcccattcccacaagtctttctaatcttgtcaacttaaaaaaattaaggataggcgatatagtgaatggaagctcttcgctgtcattcattggcaatttgacatctttgggtgaactagtgttgaggaacagcattatatctgatacactagcatcggtagacttctccaactttgtaaatttatacttattggacctgagtttcaacaatatcacaggacaaatacctcaatcaattttgaatcttacatctcttagttatttatttctagggaataatagcctttcgggaagtctgcctgccacaaaaagtcccttagtgaccaatatagatttttcatacaaccatatctcaggaaactttccttcttgggctactgacaaaaatttacaattgaatttggtagcaaacgactttgtgatggatagctccaataacagtgttttgccatggggattggagtgtcttcagcatagtactccctgtttcctcggttctccaaagtctgcgtcctttgcggtggactgtggtggtagtagagcaatatcaggttcagataattctgtctatcaagctgataatgccaaccttagtgctgcatcgtactatgttgcgggtgcacctacatgggccgttagcagcgttgggttattcttggacgcagatgcacccaatgcaagttacatcatctacagttcacgccagttcgagaacaccctagactctgcactgttccaaacagcaaggatgtcgccatcatccctgagatactatggcattggacttgagaatggaaattacacggtcacacttcaatttgcagagggagagcgcaaggagcagaactttgacattagaaaggcagctggagggaaatctttcactgctgttaagaagcagtatgttgttccagtaaccaaaaacttccttgagattcatctcttctgggctggcaagggcacttgttgcattccttataagggatactatggtcctgcaatatcagccctgagtgcaactccaaatttcgttcctacagtccgtagttctgaagacagcaagagcagccataaaactggtgtgatcgctggggttgcagttggtgtttcagtttttgcattgatcgcactggccggaatcttcttgtggtgtcagaaaaggagaaagctattgttagagctagaagaattgtataccatagttggaaggccaaatgtcttcagttacagtgagcttaggtcagctacagagaacttttgttctagtaacctacttggtgaaggaggatatggatcagtttacaagggtaagttgagtgatggaaaagtggtggcagtgaagcagctctctcagtcctctaaccagggaaagatgcagtttgcggcagaaatcgaaaccatttcccgagtgcagcaccgtaacctcgtgaggttgtatggctgctgccttgagagcaaaacaccattgttggtctacgagtacctggagaatggaagcctcgatcatgctttgtttggaaaggggagcttgaatctagactggccaacacgattcgagatatgtttgggcgtagcaagaggtatagcttatctccacgaggagtcaaccatccgcattgtgcacagggacataaaggccagtaacgtgttgatcgacgccgatcttaacccgaagatctccgatttcggccttgccaagctctacgacgacaagaagactcacgtcatcacaaatgttgctggcacgtttggttatctcgcgcctgagtacgctatgagagggcatatgactgagaaggttgatgtgttcgcgtttggcgtggtcgcgctggagattgtcgctggtgaatcaaactatcagaatgctctggacgaaggcacgacctatatctttgaaagggtgtgggaactgtacgagaacgggcggccgctggagttcgtggacccgaagctgacggagtacgacgcgtacgaggtgctgcgggtgatccgcgtggcgctccactgcacccagggctcgccccacaagcggccgtccatgtcgagggtggtcgccatgctcaacggggacgccgacgcggccgaggacgttgcgaagccgagctacatcacggagtggcaggtgatggcggccgacgtcagcggcagcttcgcgagcagccacgtcgggtcgtcgtcgacgcagacgcagccaacgtcttcgtccggcggccacggcggcgcccaggcgagccctgagcccggggacctgacgcccgcggtcccgtcgccgctctacacctccatcatcgaggagggcaggtgacagctagcttgcctcggaatcgcgaatgcctggcagtggcatgcatgcttgcctcggaatcgcgaatgcgttgctgtgctctccagttttgtggctaatacaatactgatgtcgggtcgccatggttgatgttgttgtgaggaatttacttgaatgtgaggccgcaagcagcagatttgatttgggaggcacactgaaatggcagccgacgcagattttgggatggcgtgcgcgtccctgtcaagaatgggatggcgtgtgcgccggcgccaggcctgcctcgccttgcttgccggcggcagcgtgacacgtctggagggtggagaccccgacgaacgttccaagggatgtttctcctgaattcggcatgcatcacctggctggtagatggtcacgtctccccctcctatgatttaagtgtgtgaaacgtggtatatatatgcattagttgtgcaatgtgttgcagacatccacatacaagtcttcccacatattttgattttgttattatatactccctccgttataaatatagtagaaagtaaaacaaatttaaatttgagacagaaagtatgttttatttttcgttgaacgcttaaaataattaagcaccactttaat

SEQ ID NO: 19361 - DNA, 3936 bp, Zea Mays
ctcgatttcgatcccccacttgtttcagagatatctgaagggagcagaagcaggagcagcagagcgagcaggcagagaagggacgatcgagcaagcaagctccgggcagggagagatgaggaagcccaggctgagtgtcggcggcggcggcggcctcctccatggctttccctcccccgtgctgctgttcttgctgctgctgctgctgagttcttggagggtggctgcccaggcgcagcaggcgcctcagactgatccggtggaagcggcggcggtgaacgcgatcctgagcaagctgaggctgagcgcgccgccgtcgtggaacatcagcgggaacccctgcagcggcgccgcgacggacgacacgtccatcgacgacaaccctgcgttcaacccggccatcaagtgcgactgttccgaccaaaacaacacgctctgccatgtcactagactgaagataaacacactggacgcagttggccccatacctgaggagctgcggaacctcactcacctcgttaaactggacttcagaaaaaattacttctacgggccattaccagcattcattggagaactaactgctctggaatcaatgaccgtgggcatcaatgcactatctggacctgtcccaaaggagcttggaaatcttaccaatctcttatcactggcattgggctcaaataattttaacggcacacttcctgatgagctggggaaactgacaaaacttcgacaaatatacattgatagtaacgacttcagtggttctctaccatcgacattgtcccagctgaagaacctgtcaatcttgtgggcatcagacaataatttcagtgggcagattcctgattatcttgggagtttgactaacttgacccaactgaggctccaagggaactcttttcaaggtcccattcccacaagtctttctaatcttgtcaacttaaaaaaattaaggataggcgatatagtgaatggaagctcttcgctgtcattcattggcaatttgacatctttgggtgaactagtgttgaggaacagcattatatctgatacactagcatcggtagacttctccaactttgtaaatttatacttattggacctgagtttcaacaatatcacaggacaaatacctcaatcaattttgaatcttacatctcttagttatttatttctagggaataatagcctttcgggaagtctgcctgccacaaaaagtcccttagtgaccaatatagatttttcatacaaccatatctcaggaaactttccttcttgggctactgacaaaaatttacaattgaatttggtagcaaacgactttgtgatggatagctccaataacagtgttttgccatggggattggagtgtcttcagcatagtactccctgtttcctcggttctccaaagtctgcgtcctttgcggtggactgtggtggtagtagagcaatatcaggttcagataattctgtctatcaagctgataatgccaaccttagtgctgcatcgtactatgttgcgggtgcacctacatgggccgttagcagcgttgggttattcttggacgcagatgcacccaatgcaagttacatcatctacagttcacgccagttcgagaacaccctagactctgcactgttccaaacagcaaggatgtcgccatcatccctgagatactatggcattggacttgagaatggaaattacacggtcacacttcaatttgcagaggttgactttccagacatgcagtcttggagaagctgagggaggagggttttcgatatctatgtccagggagagcgcaaggagcagaactttgacattagaaaggcagctggagggaaatctttcactgctgttaagaagcagtatgttgttccagtaaccaaaaacttccttgagattcatctcttctgggctggcaagggcacttgttgcattccttataagggatactatggtcctgcaatatcagccctgagtgcaactccaaatttcgttcctacagtccgtagttctgaagacagcaagagcagccataaaactggtgtgatcgctggggttgcagttggtgtttcagtttttgcattgatcgcactggccggaatcttcttgtggtgtcagaaaaggagaaagctattgttagagctagaagaattgtataccatagttggaaggccaaatgtcttcagttacagtgagcttaggtcagctacagagaacttttgttctagtaacctacttggtgaaggaggatatggatcagtttacaagggtaagttgagtgatggaaaagtggtggcagtgaagcagctctctcagtcctctaaccagggaaagatgcagtttgcggcagaaatcgaaaccatttcccgagtgcagcaccgtaacctcgtgaggttgtatggctgctgccttgagagcaaaacaccattgttggtctacgagtacctggagaatggaagcctcgatcatgctttgtttggaaaggggagcttgaatctagactggccaacacgattcgagatatgtttgggcgtagcaagaggtatagcttatctccacgaggagtcaaccatccgcattgtgcacagggacataaaggccagtaacgtgttgatcgacgccgatcttaacccgaagatctccgatttcggccttgccaagctctacgacgacaagaagactcacgtcatcacaaatgttgctggcacgttttggttgtctcttcgactctactgtcatctagtggttatctcgcgcctgagtacgctatgagagggcatatgactgagaaggttgatgtgttcgcgtttggcgtggtcgcgctggagattgtcgctggtgaatcaaactatcagaatgctctggacgaaggcacgacctatatctttgaaagggtgtgggaactgtacgagaacgggcggccgctggagttcgtggacccgaagctgacggagtacgacgcgtacgaggtgctgcgggtgatccgcgtggcgctccactgcacccagggctcgccccacaagcggccgtccatgtcgagggtggtcgccatgctcaacggggacgccgacgcggccgaggacgttgcgaagccgagctacatcacggagtggcaggtgatggcggccgacgtcagcggcagcttcgcgagcagccacgtcgggtcgtcgtcgacgcagacgcagccaacgtcttcgtccggcggccacggcggcgcccaggcgagccctgagcccggggacctgacgcccgcggtcccgtcgccgctctacacctccatcatcgaggagggcaggtgacagctagcttgcctcggaatcgcgaatgcctggcagtggcatgcatgcttgcctcggaatcgcgaatgcgttgctgtgctctccagttttgtggctaatacaatactgatgtcgggtcgccatggttgatgttgttgtgaggaatttacttgaatgtgaggccgcaagcagcagatttgatttgggaggcacactgaaatggcagccgacgcagattttgggatggcgtgcgcgtccctgtcaagaatgggatggcgtgtgcgccggcgccaggcctgcctcgccttgcttgccggcggcagcgtgacacgtctggagggtggagaccccgacgaacgttccaagggatgtttctcctgaattcggcatgcatcacctggctggtagatggtcacgtctccccctcctatgatttaagtgtgtgaaacgtggtatatatatgcattagttgtgcaatgtgttgcagacatccacatacaagtcttcccacatattttgattttgttattatatactccctccgttataaatatagtagaaagtaaaacaaatttaaatttgagacagaaagtatgttttatttttcgttgaacgcttaaaataattaagcaccactttaat

SEQ ID NO: 19362 - DNA, 3724 bp, Zea Mays
agcagaagcaggagcagcagagcgagcaggcagagaagggacgatcgagcaagcaagctccgggcagggagagatgaggaagcccaggctgagtgtcggcggcggcggcggcctcctccatggctttccctcccccgtgctgctgttcttgctgctgctgctgctgagttcttggagggtggctgcccaggcgcagcaggcgcctcagactgatccggtggaagcggcggcggtgaacgcgatcctgagcaagctgaggctgagcgcgccgccgtcgtggaacatcagcgggaacccctgcagcggcgccgcgacggacgacacgtccatcgacgacaaccctgcgttcaacccggccatcaagtgcgactgttccgaccaaaacaacacgctctgccatgtcactagactgaagataaacacactggacgcagttggccccatacctgaggagctgcggaacctcactcacctcgttaaactgaccgtgggcatcaatgcactatctggacctgtcccaaaggagcttggaaatcttaccaatctcttatcactggcattgggctcaaataattttaacggcacacttcctgatgagctggggaaactgacaaaacttcgacaaatatacattgatagtaacgacttcagtggttctctaccatcgacattgtcccagctgaagaacctgtcaatcttgtgggcatcagacaataatttcagtgggcagattcctgattatcttgggagtttgactaacttgacccaactgaggctccaagggaactcttttcaaggtcccattcccacaagtctttctaatcttgtcaacttaaaaaaattaaggataggcgatatagtgaatggaagctcttcgctgtcattcattggcaatttgacatctttgggtgaactagtgttgaggaacagcattatatctgatacactagcatcggtagacttctccaactttgtaaatttatacttattggacctgagtttcaacaatatcacaggacaaatacctcaatcaattttgaatcttacatctcttagttatttagatttttcatacaaccatatctcaggaaactttccttcttgggctactgacaaaaatttacaattgaatttggtagcaaacgactttgtgatggatagctccaataacagtgttttgccatggggattggagtgtcttcagcatagtactccctgtttcctcggttctccaaagtctgcgtcctttgcggtggactgtggtggtagtagagcaatatcaggttcagataattctgtctatcaagctgataatgccaaccttagtgctgcatcgtactatgttgcgggtgcacctacatgggccgttagcagcgttgggttattcttggacgcagatgcacccaatgcaagttacatcatctacagttcacgccagttcgagaacaccctagactctgcactgttccaaacagcaaggatgtcgccatcatccctgagatactatggcattggacttgagaatggaaattacacggtcacacttcaatttgcagaggttgactttccagacatgcagtcttggagaagctgagggaggagggttttcgatatctatgtccagggagagcgcaaggagcagaactttgacattagaaaggcagctggagggaaatctttcactgctgttaagaagcagtatgttgttccagtaaccaaaaacttccttgagattcatctcttctgggctggcaagggcacttgttgcattccttataagggatactatggtcctgcaatatcagccctgagtgcaactccaaatttcgttcctacagtccgtagttctgaagacagcaagagcagccataaaactggtgtgatcgctggggttgcagttggtgtttcagtttttgcattgatcgcactggccggaatcttcttgtggtgtcagaaaaggagaaagctattgttagagctagaagaattgtataccatagttggaaggccaaatgtcttcagttacagtgagcttaggtcagctacagagaacttttgttctagtaacctacttggtgaaggaggatatggatcagtttacaagggtaagttgagtgatggaaaagtggtggcagtgaagcagctctctcagtcctctaaccagggaaagatgcagtttgcggcagaaatcgaaaccatttcccgagtgcagcaccgtaacctcgtgaggttgtatggctgctgccttgagagcaaaacaccattgttggtctacgagtacctggagaatggaagcctcgatcatgctttgtttggaaaggggagcttgaatctagactggccaacacgattcgagatatgtttgggcgtagcaagaggtatagcttatctccacgaggagtcaaccatccgcattgtgcacagggacataaaggccagtaacgtgttgatcgacgccgatcttaacccgaagatctccgatttcggccttgccaagctctacgacgacaagaagactcacgtcatcacaaatgttgctggcacgtttggttatctcgcgcctgagtacgctatgagagggcatatgactgagaaggttgatgtgttcgcgtttggcgtggtcgcgctggagattgtcgctggtgaatcaaactatcagaatgctctggacgaaggcacgacctatatctttgaaagggtgtgggaactgtacgagaacgggcggccgctggagttcgtggacccgaagctgacggagtacgacgcgtacgaggtgctgcgggtgatccgcgtggcgctccactgcacccagggctcgccccacaagcggccgtccatgtcgagggtggtcgccatgctcaacggggacgccgacgcggccgaggacgttgcgaagccgagctacatcacggagtggcaggtgatggcggccgacgtcagcggcagcttcgcgagcagccacgtcgggtcgtcgtcgacgcagacgcagccaacgtcttcgtccggcggccacggcggcgcccaggcgagccctgagcccggggacctgacgcccgcggtcccgtcgccgctctacacctccatcatcgaggagggcaggtgacagctagcttgcctcggaatcgcgaatgcctggcagtggcatgcatgcttgcctcggaatcgcgaatgcgttgctgtgctctccagttttgtggctaatacaatactgatgtcgggtcgccatggttgatgttgttgtgaggaatttacttgaatgtgaggccgcaagcagcagatttgatttgggaggcacactgaaatggcagccgacgcagattttgggatggcgtgcgcgtccctgtcaagaatgggatggcgtgtgcgccggcgccaggcctgcctcgccttgcttgccggcggcagcgtgacacgtctggagggtggagaccccgacgaacgttccaagggatgtttctcctgaattcggcatgcatcacctggctggtagatggtcacgtctccccctcctatgatttaagtgtgtgaaacgtggtatatatatgcattagttgtgcaatgtgttgcagacatccacatacaagtcttcccacatattttgattttgttattatatactccctccgttataaatatagtagaaagtaaaacaaatttaaatttgagacagaaagtatgttttatttttcgttgaacgcttaaaataattaagcaccactttaat

SEQ ID NO: 19363 - DNA, 3774 bp, Zea Mays
gcagaagcaggagcagcagagcgagcaggcagagaagggacgatcgagcaagcaagctccgggcagggagagatgaggaagcccaggctgagtgtcggcggcggcggcggcctcctccatggctttccctcccccgtgctgctgttcttgctgctgctgctgctgagttcttggagggtggctgcccaggcgcagcaggcgcctcagactgatccggtggaagcggcggcggtgaacgcgatcctgagcaagctgaggctgagcgcgccgccgtcgtggaacatcagcgggaacccctgcagcggcgccgcgacggacgacacgtccatcgacgacaaccctgcgttcaacccggccatcaagtgcgactgttccgaccaaaacaacacgctctgccatgtcactagactgaagataaacacactggacgcagttggccccatacctgaggagctgcggaacctcactcacctcgttaaactggacttcagaaaaaattacttctacgggccattaccagcattcattggagaactaactgctctggaatcaatgaccgtgggcatcaatgcactatctggacctgtcccaaaggagcttggaaatcttaccaatctcttatcactggcattgggctcaaataattttaacggcacacttcctgatgagctggggaaactgacaaaacttcgacaaatatacattgatagtaacgacttcagtggttctctaccatcgacattgtcccagctgaagaacctgtcaatcttgtgggcatcagacaataatttcagtgggcagattcctgattatcttgggagtttgactaacttgacccaactgaggctccaagggaactcttttcaaggtcccattcccacaagtctttctaatcttgtcaacttaaaaaaattaaggataggcgatatagtgaatggaagctcttcgctgtcattcattggcaatttgacatctttgggtgaactagtgttgaggaacagcattatatctgatacactagcatcggtagacttctccaactttgtaaatttatacttattggacctgagtttcaacaatatcacaggacaaatacctcaatcaattttgaatcttacatctcttagttatttagatttttcatacaaccatatctcaggaaactttccttcttgggctactgacaaaaatttacaattgaaaacatactgcttagttattgcacacaaaacctgccgattcaatataacaattccaattaaacagtactctgaaaatttggatgcagctgcgtcctttgcggtggactgtggtggtagtagagcaatatcaggttcagataattctgtctatcaagctgataatgccaaccttagtgctgcatcgtactatgttgcgggtgcacctacatgggccgttagcagcgttgggttattcttggacgcagatgcacccaatgcaagttacatcatctacagttcacgccagttcgagaacaccctagactctgcactgttccaaacagcaaggatgtcgccatcatccctgagatactatggcattggacttgagaatggaaattacacggtcacacttcaatttgcagaggttgactttccagacatgcagtcttggagaagctgagggaggagggttttcgatatctatgtccagggagagcgcaaggagcagaactttgacattagaaaggcagctggagggaaatctttcactgctgttaagaagcagtatgttgttccagtaaccaaaaacttccttgagattcatctcttctgggctggcaagggcacttgttgcattccttataagggatactatggtcctgcaatatcagccctgagtgcaactccaaatttcgttcctacagtccgtagttctgaagacagcaagagcagccataaaactggtgtgatcgctggggttgcagttggtgtttcagtttttgcattgatcgcactggccggaatcttcttgtggtgtcagaaaaggagaaagctattgttagagctagaagaattgtataccatagttggaaggccaaatgtcttcagttacagtgagcttaggtcagctacagagaacttttgttctagtaacctacttggtgaaggaggatatggatcagtttacaagggtaagttgagtgatggaaaagtggtggcagtgaagcagctctctcagtcctctaaccagggaaagatgcagtttgcggcagaaatcgaaaccatttcccgagtgcagcaccgtaacctcgtgaggttgtatggctgctgccttgagagcaaaacaccattgttggtctacgagtacctggagaatggaagcctcgatcatgctttgtttggaaaggggagcttgaatctagactggccaacacgattcgagatatgtttgggcgtagcaagaggtatagcttatctccacgaggagtcaaccatccgcattgtgcacagggacataaaggccagtaacgtgttgatcgacgccgatcttaacccgaagatctccgatttcggccttgccaagctctacgacgacaagaagactcacgtcatcacaaatgttgctggcacgtttggttatctcgcgcctgagtacgctatgagagggcatatgactgagaaggttgatgtgttcgcgtttggcgtggtcgcgctggagattgtcgctggtgaatcaaactatcagaatgctctggacgaaggcacgacctatatctttgaaagggtgtgggaactgtacgagaacgggcggccgctggagttcgtggacccgaagctgacggagtacgacgcgtacgaggtgctgcgggtgatccgcgtggcgctccactgcacccagggctcgccccacaagcggccgtccatgtcgagggtggtcgccatgctcaacggggacgccgacgcggccgaggacgttgcgaagccgagctacatcacggagtggcaggtgatggcggccgacgtcagcggcagcttcgcgagcagccacgtcgggtcgtcgtcgacgcagacgcagccaacgtcttcgtccggcggccacggcggcgcccaggcgagccctgagcccggggacctgacgcccgcggtcccgtcgccgctctacacctccatcatcgaggagggcaggtgacagctagcttgcctcggaatcgcgaatgcctggcagtggcatgcatgcttgcctcggaatcgcgaatgcgttgctgtgctctccagttttgtggctaatacaatactgatgtcgggtcgccatggttgatgttgttgtgaggaatttacttgaatgtgaggccgcaagcagcagatttgatttgggaggcacactgaaatggcagccgacgcagattttgggatggcgtgcgcgtccctgtcaagaatgggatggcgtgtgcgccggcgccaggcctgcctcgccttgcttgccggcggcagcgtgacacgtctggagggtggagaccccgacgaacgttccaagggatgtttctcctgaattcggcatgcatcacctggctggtagatggtcacgtctccccctcctatgatttaagtgtgtgaaacgtggtatatatatgcattagttgtgcaatgtgttgcagacatccacatacaagtcttcccacatattttgattttgttattatatactccctccgttataaatatagtagaaagtaaaacaaatttaaatttgagacagaaagtatgttttatttttcgttgaacgcttaaaataattaagcaccactttaat

SEQ ID NO: 19364 - DNA, 3368 bp, Zea Mays
gaagcaggagcagcagagcgagcaggcagagaagggacgatcgagcaagcaagctccgggcagggagagatgaggaagcccaggctgagtgtcggcggcggcggcggcctcctccatggctttccctcccccgtgctgctgttcttgctgctgctgctgctgagttcttggagggtggctgcccaggcgcagcaggcgcctcagactgatccggtggaagcggcggcggtgaacgcgatcctgagcaagctgaggctgagcgcgccgccgtcgtggaacatcagcgggaacccctgcagcggcgccgcgacggacgacacgtccatcgacgacaaccctgcgttcaacccggccatcaagtgcgactgttccgaccaaaacaacacgctctgccatgtcactagactgaagataaacacactggacgcagttggccccatacctgaggagctgcggaacctcactcacctcgttaaactgaccgtgggcatcaatgcactatctggacctgtcccaaaggagcttggaaatcttaccaatctcttatcactggcattgggctcaaataattttaacggcacacttcctgatgagctggggaaactgacaaaacttcgacaaatgtgggcatcagacaataatttcagtgggcagattcctgattatcttgggagtttgactaacttgacccaactgaggctccaagggaactcttttcaaggtcccattcccacaagtctttctaatcttgtcaacttaaaaaaattggacctgagtttcaacaatatcacaggacaaatacctcaatcaattttgaatcttacatctcttagttatttatttctagggaataatagcctttcgggaagtctgcctgccacaaaaagtcccttagtgaccaatatagatttttcatacaaccatatctcaggaaactttccttcttgggctactgacaaaaatttacaattgaatttggtagcaaacgactttgtgatggatagctccaataacagtgttttgccatggggattggagtgtcttcagcatagtactccctgtttcctcggttctccaaagtctgcgtcctttgcggtggactgtggtggtagtagagcaatatcaggttcagataattctgtctatcaagctgataatgccaaccttagtgctgcatcgtactatgttgcgggtgcacctacatgggccgttagcagcgttgggttattcttggacgcagatgcacccaatgcaagttacatcatctacagttcacgccagttcgagaacaccctagactctgcactgttccaaacagcaaggatgtcgccatcatccctgagatactatggcattggacttgagaatggaaattacacggtcacacttcaatttgcagaggttgactttccagacatgcagtcttggagaagctgagggaggagggttttcgatatctatgtccagatttcgttcctacagtccgtagttctgaagacagcaagagcagccataaaactggtgtgatcgctggggttgcagttggtgtttcagtttttgcattgatcgcactggccggaatcttcttgtggtgtcagaaaaggagaaagctattgttagagctagaagaattgtataccatagttggaaggccaaatgtcttcagttacagtgagcttaggtcagctacagagaacttttgttctagtaacctacttggtgaaggaggatatggatcagtttacaagggtaagttgagtgatggaaaagtggtggcagtgaagcagctctctcagtcctctaaccagggaaagatgcagtttgcggcagaaatcgaaaccatttcccgagtgcagcaccgtaacctcgtgaggttgtatggctgctgccttgagagcaaaacaccattgttggtctacgagtacctggagaatggaagcctcgatcatgctttgtttggaaaggggagcttgaatctagactggccaacacgattcgagatatgtttgggcgtagcaagaggtatagcttatctccacgaggagtcaaccatccgcattgtgcacagggacataaaggccagtaacgtgttgatcgacgccgatcttaacccgaagatctccgatttcggccttgccaagctctacgacgacaagaagactcacgtcatcacaaatgttgctggcacgtttggttatctcgcgcctgagtacgctatgagagggcatatgactgagaaggttgatgtgttcgcgtttggcgtggtcgcgctggagattgtcgctggtgaatcaaactatcagaatgctctggacgaaggcacgacctatatctttgaaagggtgtgggaactgtacgagaacgggcggccgctggagttcgtggacccgaagctgacggagtacgacgcgtacgaggtgctgcgggtgatccgcgtggcgctccactgcacccagggctcgccccacaagcggccgtccatgtcgagggtggtcgccatgctcaacggggacgccgacgcggccgaggacgttgcgaagccgagctacatcacggagtggcaggtgatggcggccgacgtcagcggcagcttcgcgagcagccacgtcgggtcgtcgtcgacgcagacgcagccaacgtcttcgtccggcggccacggcggcgcccaggcgagccctgagcccggggacctgacgcccgcggtcccgtcgccgctctacacctccatcatcgaggagggcaggtgacagctagcttgcctcggaatcgcgaatgcctggcagtggcatgcatgcttgcctcggaatcgcgaatgcgttgctgtgctctccagttttgtggctaatacaatactgatgtcgggtcgccatggttgatgttgttgtgaggaatttacttgaatgtgaggccgcaagcagcagatttgatttgggaggcacactgaaatggcagccgacgcagattttgggatggcgtgcgcgtccctgtcaagaatgggatggcgtgtgcgccggcgccaggcctgcctcgccttgcttgccggcggcagcgtgacacgtctggagggtggagaccccgacgaacgttccaagggatgtttctcctgaattcggcatgcatcacctggctggtagatggtcacgtctccccctcctatgatttaagtgtgtgaaacgtggtatatatatgcattagttgtgcaatgtgttgcagacatccacatacaagtcttcccacatattttgattttgttattatatactccctccgttataaatatagtagaaagtaaaacaaatttaaatttgagacagaaagtatgttttatttttcgttgaacgcttaaaataattaagcaccactttaat

SEQ ID NO: 19365 - DNA, 2838 bp, Zea Mays
aagcaagctccgggcagggagagatgaggaagcccaggctgagtgtcggcggcggcggcggcctcctccatggctttccctcccccgtgctgctgttcttgctgctgctgctgctgagttcttggagggtggctgcccaggcgcagcaggcgcctcagactgatccggtggaagcggcggcggtgaacgcgatcctgagcaagctgaggctgagcgcgccgccgtcgtggaacatcagcgggaacccctgcagcggcgccgcgacggacgacacgtccatcgacgacaaccctgcgttcaacccggccatcaagtgcgactgttccgaccaaaacaacacgctctgccatgtcactagactgaagataaacacactggacgcagttggccccatacctgaggagctgcggaacctcactcacctcgttaaactggacttcagaaaaaattacttctacgggccattaccagcattcattggagaactaactgctctggaatcaatgaccgtgggcatcaatgcactatctggacctgtcccaaaggagcttggaaatcttaccaatctcttatcactggcattgggctcaaataattttaacggcacacttcctgatgagctggggaaactgacaaaacttcgacaaatatacattgatagtaacgacttcagtggttctctaccatcgacattgtcccagctgaagaacctgtcaatcttgtgggcatcagacaataatttcagtgggcagattcctgattatcttgggagtttgactaacttgacccaactgaggctccaagggaactcttttcaaggtcccattcccacaagtctttctaatcttgtcaacttaaaaaaattggacctgagtttcaacaatatcacaggacaaatacctcaatcaattttgaatcttacatctcttagttatttatttcgttcctacagtccgtagttctgaagacagcaagagcagccataaaactggtgtgatcgctggggttgcagttggtgtttcagtttttgcattgatcgcactggccggaatcttcttgtggtgtcagaaaaggagaaagctattgttagagctagaagaattgtataccatagttggaaggccaaatgtcttcagttacagtgagcttaggtcagctacagagaacttttgttctagtaacctacttggtgaaggaggatatggatcagtttacaagggtaagttgagtgatggaaaagtggtggcagtgaagcagctctctcagtcctctaaccagggaaagatgcagtttgcggcagaaatcgaaaccatttcccgagtgcagcaccgtaacctcgtgaggttgtatggctgctgccttgagagcaaaacaccattgttggtctacgagtacctggagaatggaagcctcgatcatgctttgtttggaaaggggagcttgaatctagactggccaacacgattcgagatatgtttgggcgtagcaagaggtatagcttatctccacgaggagtcaaccatccgcattgtgcacagggacataaaggccagtaacgtgttgatcgacgccgatcttaacccgaagatctccgatttcggccttgccaagctctacgacgacaagaagactcacgtcatcacaaatgttgctggcacgtttggttatctcgcgcctgagtacgctatgagagggcatatgactgagaaggttgatgtgttcgcgtttggcgtggtcgcgctggagattgtcgctggtgaatcaaactatcagaatgctctggacgaaggcacgacctatatctttgaaagggtgtgggaactgtacgagaacgggcggccgctggagttcgtggacccgaagctgacggagtacgacgcgtacgaggtgctgcgggtgatccgcgtggcgctccactgcacccagggctcgccccacaagcggccgtccatgtcgagggtggtcgccatgctcaacggggacgccgacgcggccgaggacgttgcgaagccgagctacatcacggagtggcaggtgatggcggccgacgtcagcggcagcttcgcgagcagccacgtcgggtcgtcgtcgacgcagacgcagccaacgtcttcgtccggcggccacggcggcgcccaggcgagccctgagcccggggacctgacgcccgcggtcccgtcgccgctctacacctccatcatcgaggagggcaggtgacagctagcttgcctcggaatcgcgaatgcctggcagtggcatgcatgcttgcctcggaatcgcgaatgcgttgctgtgctctccagttttgtggctaatacaatactgatgtcgggtcgccatggttgatgttgttgtgaggaatttacttgaatgtgaggccgcaagcagcagatttgatttgggaggcacactgaaatggcagccgacgcagattttgggatggcgtgcgcgtccctgtcaagaatgggatggcgtgtgcgccggcgccaggcctgcctcgccttgcttgccggcggcagcgtgacacgtctggagggtggagaccccgacgaacgttccaagggatgtttctcctgaattcggcatgcatcacctggctggtagatggtcacgtctccccctcctatgatttaagtgtgtgaaacgtggtatatatatgcattagttgtgcaatgtgttgcagacatccacatacaagtcttcccacatattttgattttgttattatatactccctccgttataaatatagtagaaagtaaaacaaatttaaatttgagacagaaagtatgttttatttttcgttgaacgcttaaaataattaagcaccactttaat

SEQ ID NO: 19366 - DNA, 3768 bp, Zea Mays
aagcaagctccgggcagggagagatgaggaagcccaggctgagtgtcggcggcggcggcggcctcctccatggctttccctcccccgtgctgctgttcttgctgctgctgctgctgagttcttggagggtggctgcccaggcgcagcaggcgcctcagactgatccggtggaagcggcggcggtgaacgcgatcctgagcaagctgaggctgagcgcgccgccgtcgtggaacatcagcgggaacccctgcagcggcgccgcgacggacgacacgtccatcgacgacaaccctgcgttcaacccggccatcaagtgcgactgttccgaccaaaacaacacgctctgccatgtcactagactgaagataaacacactggacgcagttggccccatacctgaggagctgcggaacctcactcacctcgttaaactggacttcagaaaaaattacttctacgggccattaccagcattcattggagaactaactgctctggaatcaatgaccgtgggcatcaatgcactatctggacctgtcccaaaggagcttggaaatcttaccaatctcttatcactggcattgggctcaaataattttaacggcacacttcctgatgagctggggaaactgacaaaacttcgacaaatatacattgatagtaacgacttcagtggttctctaccatcgacattgtcccagctgaagaacctgtcaatcttgtgggcatcagacaataatttcagtgggcagattcctgattatcttgggagtttgactaacttgacccaactgaggctccaagggaactcttttcaaggtcccattcccacaagtctttctaatcttgtcaacttaaaaaaattaaggataggcgatatagtgaatggaagctcttcgctgtcattcattggcaatttgacatctttgggtgaactagtgttgaggaacagcattatatctgatacactagcatcggtagacttctccaactttgtaaatttatacttattggacctgagtttcaacaatatcacaggacaaatacctcaatcaattttgaatcttacatctcttagttatttatttctagggaataatagcctttcgggaagtctgcctgccacaaaaagtcccttagtgaccaatatagatttttcatacaaccatatctcaggaaactttccttcttgggctactgacaaaaatttacaattgaatttggtagcaaacgactttgtgatggatagctccaataacagtgttttgccatggggattggagtgtcttcagcatagtactccctgtttcctcggttctccaaagttactctgaaaatttggatgcagctgcgtcctttgcggtggactgtggtggtagtagagcaatatcaggttcagataattctgtctatcaagctgataatgccaaccttagtgctgcatcgtactatgttgcgggtgcacctacatgggccgttagcagcgttgggttattcttggacgcagatgcacccaatgcaagttacatcatctacagttcacgccagttcgagaacaccctagactctgcactgttccaaacagcaaggatgtcgccatcatccctgagatactatggcattggacttgagaatggaaattacacggtcacacttcaatttgcagagggagagcgcaaggagcagaactttgacattagaaaggcagctggagggaaatctttcactgctgttaagaagcagtatgttgttccagtaaccaaaaacttccttgagattcatctcttctgggctggcaagggcacttgttgcattccttataagggatactatggtcctgcaatatcagccctgagtgcaactccaaatttcgttcctacagtccgtagttctgaagacagcaagagcagccataaaactggtgtgatcgctggggttgcagttggtgtttcagtttttgcattgatcgcactggccggaatcttcttgtggtgtcagaaaaggagaaagctattgttagagctagaagaattgtataccatagttggaaggccaaatgtcttcagttacagtgagcttaggtcagctacagagaacttttgttctagtaacctacttggtgaaggaggatatggatcagtttacaagggtaagttgagtgatggaaaagtggtggcagtgaagcagctctctcagtcctctaaccagggaaagatgcagtttgcggcagaaatcgaaaccatttcccgagtgcagcaccgtaacctcgtgaggttgtatggctgctgccttgagagcaaaacaccattgttggtctacgagtacctggagaatggaagcctcgatcatgctttgtttggaaaggggagcttgaatctagactggccaacacgattcgagatatgtttgggcgtagcaagaggtatagcttatctccacgaggagtcaaccatccgcattgtgcacagggacataaaggccagtaacgtgttgatcgacgccgatcttaacccgaagatctccgatttcggccttgccaagctctacgacgacaagaagactcacgtcatcacaaatgttgctggcacgtttggttatctcgcgcctgagtacgctatgagagggcatatgactgagaaggttgatgtgttcgcgtttggcgtggtcgcgctggagattgtcgctggtgaatcaaactatcagaatgctctggacgaaggcacgacctatatctttgaaagggtgtgggaactgtacgagaacgggcggccgctggagttcgtggacccgaagctgacggagtacgacgcgtacgaggtgctgcgggtgatccgcgtggcgctccactgcacccagggctcgccccacaagcggccgtccatgtcgagggtggtcgccatgctcaacggggacgccgacgcggccgaggacgttgcgaagccgagctacatcacggagtggcaggtgatggcggccgacgtcagcggcagcttcgcgagcagccacgtcgggtcgtcgtcgacgcagacgcagccaacgtcttcgtccggcggccacggcggcgcccaggcgagccctgagcccggggacctgacgcccgcggtcccgtcgccgctctacacctccatcatcgaggagggcaggtgacagctagcttgcctcggaatcgcgaatgcctggcagtggcatgcatgcttgcctcggaatcgcgaatgcgttgctgtgctctccagttttgtggctaatacaatactgatgtcgggtcgccatggttgatgttgttgtgaggaatttacttgaatgtgaggccgcaagcagcagatttgatttgggaggcacactgaaatggcagccgacgcagattttgggatggcgtgcgcgtccctgtcaagaatgggatggcgtgtgcgccggcgccaggcctgcctcgccttgcttgccggcggcagcgtgacacgtctggagggtggagaccccgacgaacgttccaagggatgtttctcctgaattcggcatgcatcacctggctggtagatggtcacgtctccccctcctatgatttaagtgtgtgaaacgtggtatatatatgcattagttgtgcaatgtgttgcagacatccacatacaagtcttcccacatattttgattttgttattatatactccctccgttataaatatagtagaaagtaaaacaaatttaaatttgagacagaaagtatgttttatttttcgttgaacgcttaaaataattaagcaccactttaat

SEQ ID NO: 19367 - DNA, 3373 bp, Zea Mays
aagcaagctccgggcagggagagatgaggaagcccaggctgagtgtcggcggcggcggcggcctcctccatggctttccctcccccgtgctgctgttcttgctgctgctgctgctgagttcttggagggtggctgcccaggcgcagcaggcgcctcagactgatccggtggaagggacttcagaaaaaattacttctacgggccattaccagcattcattggagaactaactgctctggaatcaatgaccgtgggcatcaatgcactatctggacctgtcccaaaggagcttggaaatcttaccaatctcttatcactggcattgggctcaaataattttaacggcacacttcctgatgagctggggaaactgacaaaacttcgacaaatatacattgatagtaacgacttcagtggttctctaccatcgacattgtcccagctgaagaacctgtcaatcttgtgggcatcagacaataatttcagtgggcagattcctgattatcttgggagtttgactaacttgacccaactgaggctccaagggaactcttttcaaggtcccattcccacaagtctttctaatcttgtcaacttaaaaaaattaaggataggcgatatagtgaatggaagctcttcgctgtcattcattggcaatttgacatctttgggtgaactagtgttgaggaacagcattatatctgatacactagcatcggtagacttctccaactttgtaaatttatacttattggacctgagtttcaacaatatcacaggacaaatacctcaatcaattttgaatcttacatctcttagttatttatttctagggaataatagcctttcgggaagtctgcctgccacaaaaagtcccttagtgaccaatatagatttttcatacaaccatatctcaggaaactttccttcttgggctactgacaaaaatttacaattgaatttggtagcaaacgactttgtgatggatagctccaataacagtgttttgccatggggattggagtgtcttcagcatagtactccctgtttcctcggttctccaaagtctgcgtcctttgcggtggactgtggtggtagtagagcaatatcagatgcacccaatgcaagttacatcatctacagttcacgccagttcgagaacaccctagactctgcactgttccaaacagcaaggatgtcgccatcatccctgagatactatggcattggacttgagaatggaaattacacggtcacacttcaatttgcagagggagagcgcaaggagcagaactttgacattagaaaggcagctggagggaaatctttcactgctgttaagaagcagtatgttgttccagtaaccaaaaacttccttgagattcatctcttctgggctggcaagggcacttgttgcattccttataagggatactatggtcctgcaatatcagccctgagtgcaactccaaatttcgttcctacagtccgtagttctgaagacagcaagagcagccataaaactggtgtgatcgctggggttgcagttggtgtttcagtttttgcattgatcgcactggccggaatcttcttgtggtgtcagaaaaggagaaagctattgttagagctagaagaattgtataccatagttggaaggccaaatgtcttcagttacagtgagcttaggtcagctacagagaacttttgttctagtaacctacttggtgaaggaggatatggatcagtttacaagggtaagttgagtgatggaaaagtggtggcagtgaagcagctctctcagtcctctaaccagggaaagatgcagtttgcggcagaaatcgaaaccatttcccgagtgcagcaccgtaacctcgtgaggttgtatggctgctgccttgagagcaaaacaccattgttggtctacgagtacctggagaatggaagcctcgatcatgctttgtttggaaaggggagcttgaatctagactggccaacacgattcgagatatgtttgggcgtagcaagaggtatagcttatctccacgaggagtcaaccatccgcattgtgcacagggacataaaggccagtaacgtgttgatcgacgccgatcttaacccgaagatctccgatttcggccttgccaagctctacgacgacaagaagactcacgtcatcacaaatgttgctggcacgtttggttatctcgcgcctgagtacgctatgagagggcatatgactgagaaggttgatgtgttcgcgtttggcgtggtcgcgctggagattgtcgctggtgaatcaaactatcagaatgctctggacgaaggcacgacctatatctttgaaagggtgtgggaactgtacgagaacgggcggccgctggagttcgtggacccgaagctgacggagtacgacgcgtacgaggtgctgcgggtgatccgcgtggcgctccactgcacccagggctcgccccacaagcggccgtccatgtcgagggtggtcgccatgctcaacggggacgccgacgcggccgaggacgttgcgaagccgagctacatcacggagtggcaggtgatggcggccgacgtcagcggcagcttcgcgagcagccacgtcgggtcgtcgtcgacgcagacgcagccaacgtcttcgtccggcggccacggcggcgcccaggcgagccctgagcccggggacctgacgcccgcggtcccgtcgccgctctacacctccatcatcgaggagggcaggtgacagctagcttgcctcggaatcgcgaatgcctggcagtggcatgcatgcttgcctcggaatcgcgaatgcgttgctgtgctctccagttttgtggctaatacaatactgatgtcgggtcgccatggttgatgttgttgtgaggaatttacttgaatgtgaggccgcaagcagcagatttgatttgggaggcacactgaaatggcagccgacgcagattttgggatggcgtgcgcgtccctgtcaagaatgggatggcgtgtgcgccggcgccaggcctgcctcgccttgcttgccggcggcagcgtgacacgtctggagggtggagaccccgacgaacgttccaagggatgtttctcctgaattcggcatgcatcacctggctggtagatggtcacgtctccccctcctatgatttaagtgtgtgaaacgtggtatatatatgcattagttgtgcaatgtgttgcagacatccacatacaagtcttcccacatattttgattttgttattatatactccctccgttataaatatagtagaaagtaaaacaaatttaaatttgagacagaaagtatgttttatttttcgttgaacgcttaaaataattaagcaccactttaat

SEQ ID NO: 19368 - DNA, 3591 bp, Zea Mays
agaacaaatactaagcttttttggcatgagatttctgcggtacagagggcttgttttctcggggtagctgtcggctgtggactcttgttgggccaagcccattagcaagttgcaaattttctccggtctctgctgtttccgctccgcaccaatccacctcgaaatggccgagggatcgccggccgccgctgggcgcataccattgctcttcgacggcgcagacggccgtgtctcacttgcccgtcggagaaacgaggagtgctccgctcgtattccgatttcaaggacttcagaaaaaattacttctacgggccattaccagcattcattggagaactaactgctctggaatcaatgaccgtgggcatcaatgcactatctggacctgtcccaaaggagcttggaaatcttaccaatctcttatcactggcattgggctcaaataattttaacggcacacttcctgatgagctggggaaactgacaaaacttcgacaaatgtgggcatcagacaataatttcagtgggcagattcctgattatcttgggagtttgactaacttgacccaactgaggctccaagggaactcttttcaaggtcccattcccacaagtctttctaatcttgtcaacttaaaaaaattaaggataggcgatatagtgaatggaagctcttcgctgtcattcattggcaatttgacatctttgggtgaactagtgttgaggaacagcattatatctgatacactagcatcggtagacttctccaactttgtaaatttatacttattggacctgagtttcaacaatatcacaggacaaatacctcaatcaattttgaatcttacatctcttagttatttatttctagggaataatagcctttcgggaagtctgcctgccacaaaaagtcccttagtgaccaatatagatttttcatacaaccatatctcaggaaactttccttcttgggctactgacaaaaatttacaattgaatttggtagcaaacgactttgtgatggatagctccaataacagtgttttgccatggggattggagtgtcttcagcatagtactccctgtttcctcggttctccaaagtctgcgtcctttgcggtggactgtggtggtagtagagcaatatcaggttcagataattctgtctatcaagctgataatgccaaccttagtgctgcatcgtactatgttgcgggtgcacctacatgggccgttagcagcgttgggttattcttggacgcagatgcacccaatgcaagttacatcatctacagttcacgccagttcgagaacaccctagactctgcactgttccaaacagcaaggatgtcgccatcatccctgagatactatggcattggacttgagaatggaaattacacggtcacacttcaatttgcagaggttgactttccagacatgcagtcttggagaagctgagggaggagggttttcgatatctatgtccagggagagcgcaaggagcagaactttgacattagaaaggcagctggagggaaatctttcactgctgttaagaagcagtatgttgttccagtaaccaaaaacttccttgagattcatctcttctgggctggcaagggcacttgttgcattccttataagggatactatggtcctgcaatatcagccctgagtgcaactccaaatttcgttcctacagtccgtagttctgaagacagcaagagcagccataaaactggtgtgatcgctggggttgcagttggtgtttcagtttttgcattgatcgcactggccggaatcttcttgtggtgtcagaaaaggagaaagctattgttagagctagaagaattgtataccatagttggaaggccaaatgtcttcagttacagtgagcttaggtcagctacagagaacttttgttctagtaacctacttggtgaaggaggatatggatcagtttacaagggtaagttgagtgatggaaaagtggtggcagtgaagcagctctctcagtcctctaaccagggaaagatgcagtttgcggcagaaatcgaaaccatttcccgagtgcagcaccgtaacctcgtgaggttgtatggctgctgccttgagagcaaaacaccattgttggtctacgagtacctggagaatggaagcctcgatcatgctttgtttggaaaggggagcttgaatctagactggccaacacgattcgagatatgtttgggcgtagcaagaggtatagcttatctccacgaggagtcaaccatccgcattgtgcacagggacataaaggccagtaacgtgttgatcgacgccgatcttaacccgaagatctccgatttcggccttgccaagctctacgacgacaagaagactcacgtcatcacaaatgttgctggcacgtttggttatctcgcgcctgagtacgctatgagagggcatatgactgagaaggttgatgtgttcgcgtttggcgtggtcgcgctggagattgtcgctggtgaatcaaactatcagaatgctctggacgaaggcacgacctatatctttgaaagggtgtgggaactgtacgagaacgggcggccgctggagttcgtggacccgaagctgacggagtacgacgcgtacgaggtgctgcgggtgatccgcgtggcgctccactgcacccagggctcgccccacaagcggccgtccatgtcgagggtggtcgccatgctcaacggggacgccgacgcggccgaggacgttgcgaagccgagctacatcacggagtggcaggtgatggcggccgacgtcagcggcagcttcgcgagcagccacgtcgggtcgtcgtcgacgcagacgcagccaacgtcttcgtccggcggccacggcggcgcccaggcgagccctgagcccggggacctgacgcccgcggtcccgtcgccgctctacacctccatcatcgaggagggcaggtgacagctagcttgcctcggaatcgcgaatgcctggcagtggcatgcatgcttgcctcggaatcgcgaatgcgttgctgtgctctccagttttgtggctaatacaatactgatgtcgggtcgccatggttgatgttgttgtgaggaatttacttgaatgtgaggccgcaagcagcagatttgatttgggaggcacactgaaatggcagccgacgcagattttgggatggcgtgcgcgtccctgtcaagaatgggatggcgtgtgcgccggcgccaggcctgcctcgccttgcttgccggcggcagcgtgacacgtctggagggtggagaccccgacgaacgttccaagggatgtttctcctgaattcggcatgcatcacctggctggtagatggtcacgtctccccctcctatgatttaagtgtgtgaaacgtggtatatatatgcattagttgtgcaatgtgttgcagacatccacatacaagtcttcccacatattttgattttgttattatatactccctccgttataaatatagtagaaagtaaaacaaatttaaatttgagacagaaagtatgttttatttttcgttgaacgcttaaaataattaagcaccactttaat

SEQ ID NO: 19369 - DNA, 3169 bp, Zea Mays
ccggtctctgctgtttccgctccgcaccaatccacctcgaaatggccgagggatcgccggccgccgctgggcgcataccattgctcttcgacggcgcagacggccgtgtctcacttgcccgtcggagaaacgaggagtgctccgctcgtattccgatttcaaggacttcagaaaaaattacttctacgggccattaccagcattcattggagaactaactgctctggaatcaatgaccgtgggcatcaatgcactatctggacctgtcccaaaggagcttggaaatcttaccaatctcttatcactggcattgggctcaaataattttaacggcacacttcctgatgagctggggaaactgacaaaacttcgacaaatgtgggcatcagacaataatttcagtgggcagattcctgattatcttgggagtttgactaacttgacccaactgaggctccaagggaactcttttcaaggtcccattcccacaagtctttctaatcttgtcaacttaaaaaaattggacctgagtttcaacaatatcacaggacaaatacctcaatcaattttgaatcttacatctcttagttatttagatttttcatacaaccatatctcaggaaactttccttcttgggctactgacaaaaatttacaattgaaaacatactgcttagttattgcacacaaaacctgccgattcaatataacaattccaattaaacagtactctgaaaatttggatgcagctgcgtcctttgcggtggactgtggtggtagtagagcaatatcaggttcagataattctgtctatcaagctgataatgccaaccttagtgctgcatcgtactatgttgcgggtgcacctacatgggccgttagcagcgttgggttattcttggacgcagatgcacccaatgcaagttacatcatctacagttcacgccagttcgagaacaccctagactctgcactgttccaaacagcaaggatgtcgccatcatccctgagatactatggcattggacttgagaatggaaattacacggtcacacttcaatttgcagagggagagcgcaaggagcagaactttgacattagaaaggcagctggagggaaatctttcactgctgttaagaagcagtatgttgttccagtaaccaaaaacttccttgagattcatctcttctgggctggcaagggcacttgttgcattccttataagggatactatggtcctgcaatatcagccctgagtgcaactccaaatttcgttcctacagtccgtagttctgaagacagcaagagcagccataaaactggtgtgatcgctggggttgcagttggtgtttcagtttttgcattgatcgcactggccggaatcttcttgtggtgtcagaaaaggagaaagctattgttagagctagaagaattgtataccatagttggaaggccaaatgtcttcagttacagtgagcttaggtcagctacagagaacttttgttctagtaacctacttggtgaaggaggatatggatcagtttacaagggtaagttgagtgatggaaaagtggtggcagtgaagcagctctctcagtcctctaaccagggaaagatgcagtttgcggcagaaatcgaaaccatttcccgagtgcagcaccgtaacctcgtgaggttgtatggctgctgccttgagagcaaaacaccattgttggtctacgagtacctggagaatggaagcctcgatcatgctttgtttggaaaggggagcttgaatctagactggccaacacgattcgagatatgtttgggcgtagcaagaggtatagcttatctccacgaggagtcaaccatccgcattgtgcacagggacataaaggccagtaacgtgttgatcgacgccgatcttaacccgaagatctccgatttcggccttgccaagctctacgacgacaagaagactcacgtcatcacaaatgttgctggcacgtttggttatctcgcgcctgagtacgctatgagagggcatatgactgagaaggttgatgtgttcgcgtttggcgtggtcgcgctggagattgtcgctggtgaatcaaactatcagaatgctctggacgaaggcacgacctatatctttgaaagggtgtgggaactgtacgagaacgggcggccgctggagttcgtggacccgaagctgacggagtacgacgcgtacgaggtgctgcgggtgatccgcgtggcgctccactgcacccagggctcgccccacaagcggccgtccatgtcgagggtggtcgccatgctcaacggggacgccgacgcggccgaggacgttgcgaagccgagctacatcacggagtggcaggtgatggcggccgacgtcagcggcagcttcgcgagcagccacgtcgggtcgtcgtcgacgcagacgcagccaacgtcttcgtccggcggccacggcggcgcccaggcgagccctgagcccggggacctgacgcccgcggtcccgtcgccgctctacacctccatcatcgaggagggcaggtgacagctagcttgcctcggaatcgcgaatgcctggcagtggcatgcatgcttgcctcggaatcgcgaatgcgttgctgtgctctccagttttgtggctaatacaatactgatgtcgggtcgccatggttgatgttgttgtgaggaatttacttgaatgtgaggccgcaagcagcagatttgatttgggaggcacactgaaatggcagccgacgcagattttgggatggcgtgcgcgtccctgtcaagaatgggatggcgtgtgcgccggcgccaggcctgcctcgccttgcttgccggcggcagcgtgacacgtctggagggtggagaccccgacgaacgttccaagggatgtttctcctgaattcggcatgcatcacctggctggtagatggtcacgtctccccctcctatgatttaagtgtgtgaaacgtggtatatatatgcattagttgtgcaatgtgttgcagacatccacatacaagtcttcccacatattttgattttgttattatatactccctccgttataaatatagtagaaagtaaaacaaatttaaatttgagacagaaagtatgttttatttttcgttgaacgcttaaaataattaagcaccactttaat

SEQ ID NO: 19370 - DNA, 3424 bp, Zea Mays
cagacggccgtgtctcacttgcccgtcggagaaacgaggagtgctccgctcgtattccgatttcaaggacttcagaaaaaattacttctacgggccattaccagcattcattggagaactaactgctctggaatcaatgaccgtgggcatcaatgcactatctggacctgtcccaaaggagcttggaaatcttaccaatctcttatcactggcattgggctcaaataattttaacggcacacttcctgatgagctggggaaactgacaaaacttcgacaaatatacattgatagtaacgacttcagtggttctctaccatcgacattgtcccagctgaagaacctgtcaatcttgtgggcatcagacaataatttcagtgggcagattcctgattatcttgggagtttgactaacttgacccaactgaggctccaagggaactcttttcaaggtcccattcccacaagtctttctaatcttgtcaacttaaaaaaattaaggataggcgatatagtgaatggaagctcttcgctgtcattcattggcaatttgacatctttgggtgaactagtgttgaggaacagcattatatctgatacactagcatcggtagacttctccaactttgtaaatttatacttattggacctgagtttcaacaatatcacaggacaaatacctcaatcaattttgaatcttacatctcttagttatttatttctagggaataatagcctttcgggaagtctgcctgccacaaaaagtcccttagtgaccaatatagatttttcatacaaccatatctcaggaaactttccttcttgggctactgacaaaaatttacaattgaaaacatactgcttagttattgcacacaaaacctgccgattcaatataacaattccaattaaacagtactctgaaaatttggatgcagctgcgtcctttgcggtggactgtggtggtagtagagcaatatcaggttcagataattctgtctatcaagctgataatgccaaccttagtgctgcatcgtactatgttgcgggtgcacctacatgggccgttagcagcgttgggttattcttggacgcagatgcacccaatgcaagttacatcatctacagttcacgccagttcgagaacaccctagactctgcactgttccaaacagcaaggatgtcgccatcatccctgagatactatggcattggacttgagaatggaaattacacggtcacacttcaatttgcagaggttgactttccagacatgcagtcttggagaagctgagggaggagggttttcgatatctatgtccagggagagcgcaaggagcagaactttgacattagaaaggcagctggagggaaatctttcactgctgttaagaagcagtatgttgttccagtaaccaaaaacttccttgagattcatctcttctgggctggcaagggcacttgttgcattccttataagggatactatggtcctgcaatatcagccctgagtgcaactccaaatttcgttcctacagtccgtagttctgaagacagcaagagcagccataaaactggtgtgatcgctggggttgcagttggtgtttcagtttttgcattgatcgcactggccggaatcttcttgtggtgtcagaaaaggagaaagctattgttagagctagaagaattgtataccatagttggaaggccaaatgtcttcagttacagtgagcttaggtcagctacagagaacttttgttctagtaacctacttggtgaaggaggatatggatcagtttacaagggtaagttgagtgatggaaaagtggtggcagtgaagcagctctctcagtcctctaaccagggaaagatgcagtttgcggcagaaatcgaaaccatttcccgagtgcagcaccgtaacctcgtgaggttgtatggctgctgccttgagagcaaaacaccattgttggtctacgagtacctggagaatggaagcctcgatcatgctttgtttggaaaggggagcttgaatctagactggccaacacgattcgagatatgtttgggcgtagcaagaggtatagcttatctccacgaggagtcaaccatccgcattgtgcacagggacataaaggccagtaacgtgttgatcgacgccgatcttaacccgaagatctccgatttcggccttgccaagctctacgacgacaagaagactcacgtcatcacaaatgttgctggcacgtttggttatctcgcgcctgagtacgctatgagagggcatatgactgagaaggttgatgtgttcgcgtttggcgtggtcgcgctggagattgtcgctggtgaatcaaactatcagaatgctctggacgaaggcacgacctatatctttgaaagggtgtgggaactgtacgagaacgggcggccgctggagttcgtggacccgaagctgacggagtacgacgcgtacgaggtgctgcgggtgatccgcgtggcgctccactgcacccagggctcgccccacaagcggccgtccatgtcgagggtggtcgccatgctcaacggggacgccgacgcggccgaggacgttgcgaagccgagctacatcacggagtggcaggtgatggcggccgacgtcagcggcagcttcgcgagcagccacgtcgggtcgtcgtcgacgcagacgcagccaacgtcttcgtccggcggccacggcggcgcccaggcgagccctgagcccggggacctgacgcccgcggtcccgtcgccgctctacacctccatcatcgaggagggcaggtgacagctagcttgcctcggaatcgcgaatgcctggcagtggcatgcatgcttgcctcggaatcgcgaatgcgttgctgtgctctccagttttgtggctaatacaatactgatgtcgggtcgccatggttgatgttgttgtgaggaatttacttgaatgtgaggccgcaagcagcagatttgatttgggaggcacactgaaatggcagccgacgcagattttgggatggcgtgcgcgtccctgtcaagaatgggatggcgtgtgcgccggcgccaggcctgcctcgccttgcttgccggcggcagcgtgacacgtctggagggtggagaccccgacgaacgttccaagggatgtttctcctgaattcggcatgcatcacctggctggtagatggtcacgtctccccctcctatgatttaagtgtgtgaaacgtggtatatatatgcattagttgtgcaatgtgttgcagacatccacatacaagtcttcccacatattttgattttgttattatatactccctccgttataaatatagtagaaagtaaaacaaatttaaatttgagacagaaagtatgttttatttttcgttgaacgcttaaaataattaagcaccactttaat

SEQ ID NO: 19371 - DNA, 3029 bp, Zea Mays
aatcaatgaccgtgggcatcaatgcactatctggacctgtcccaaaggagcttggaaatcttaccaatctcttatcactggcattgggctcaaataattttaacggcacacttcctgatgagctggggaaactgacaaaacttcgacaaatgtgggcatcagacaataatttcagtgggcagattcctgattatcttgggagtttgactaacttgacccaactgaggctccaagggaactcttttcaaggtcccattcccacaagtctttctaatcttgtcaacttaaaaaaattggacctgagtttcaacaatatcacaggacaaatacctcaatcaattttgaatcttacatctcttagttatttagatttttcatacaaccatatctcaggaaactttccttcttgggctactgacaaaaatttacaattgaatttggtagcaaacgactttgtgatggatagctccaataacagtgttttgccatggggattggagtgtcttcagcatagtactccctgtttcctcggttctccaaagtctgcgtcctttgcggtggactgtggtggtagtagagcaatatcaggttcagataattctgtctatcaagctgataatgccaaccttagtgctgcatcgtactatgttgcgggtgcacctacatgggccgttagcagcgttgggttattcttggacgcagatgcacccaatgcaagttacatcatctacagttcacgccagttcgagaacaccctagactctgcactgttccaaacagcaaggatgtcgccatcatccctgagatactatggcattggacttgagaatggaaattacacggtcacacttcaatttgcagaggttgactttccagacatgcagtcttggagaagctgagggaggagggttttcgatatctatgtccagggagagcgcaaggagcagaactttgacattagaaaggcagctggagggaaatctttcactgctgttaagaagcagtatgttgttccagtaaccaaaaacttccttgagattcatctcttctgggctggcaagggcacttgttgcattccttataagggatactatggtcctgcaatatcagccctgagtgcaactccaaatttcgttcctacagtccgtagttctgaagacagcaagagcagccataaaactggtgtgatcgctggggttgcagttggtgtttcagtttttgcattgatcgcactggccggaatcttcttgtggtgtcagaaaaggagaaagctattgttagagctagaagaattgtataccatagttggaaggccaaatgtcttcagttacagtgagcttaggtcagctacagagaacttttgttctagtaacctacttggtgaaggaggatatggatcagtttacaagggtaagttgagtgatggaaaagtggtggcagtgaagcagctctctcagtcctctaaccagggaaagatgcagtttgcggcagaaatcgaaaccatttcccgagtgcagcaccgtaacctcgtgaggttgtatggctgctgccttgagagcaaaacaccattgttggtctacgagtacctggagaatggaagcctcgatcatgctttgtttggaaaggggagcttgaatctagactggccaacacgattcgagatatgtttgggcgtagcaagaggtatagcttatctccacgaggagtcaaccatccgcattgtgcacagggacataaaggccagtaacgtgttgatcgacgccgatcttaacccgaagatctccgatttcggccttgccaagctctacgacgacaagaagactcacgtcatcacaaatgttgctggcacgtttggttatctcgcgcctgagtacgctatgagagggcatatgactgagaaggttgatgtgttcgcgtttggcgtggtcgcgctggagattgtcgctggtgaatcaaactatcagaatgctctggacgaaggcacgacctatatctttgaaagggtgtgggaactgtacgagaacgggcggccgctggagttcgtggacccgaagctgacggagtacgacgcgtacgaggtgctgcgggtgatccgcgtggcgctccactgcacccagggctcgccccacaagcggccgtccatgtcgagggtggtcgccatgctcaacggggacgccgacgcggccgaggacgttgcgaagccgagctacatcacggagtggcaggtgatggcggccgacgtcagcggcagcttcgcgagcagccacgtcgggtcgtcgtcgacgcagacgcagccaacgtcttcgtccggcggccacggcggcgcccaggcgagccctgagcccggggacctgacgcccgcggtcccgtcgccgctctacacctccatcatcgaggagggcaggtgacagctagcttgcctcggaatcgcgaatgcctggcagtggcatgcatgcttgcctcggaatcgcgaatgcgttgctgtgctctccagttttgtggctaatacaatactgatgtcgggtcgccatggttgatgttgttgtgaggaatttacttgaatgtgaggccgcaagcagcagatttgatttgggaggcacactgaaatggcagccgacgcagattttgggatggcgtgcgcgtccctgtcaagaatgggatggcgtgtgcgccggcgccaggcctgcctcgccttgcttgccggcggcagcgtgacacgtctggagggtggagaccccgacgaacgttccaagggatgtttctcctgaattcggcatgcatcacctggctggtagatggtcacgtctccccctcctatgatttaagtgtgtgaaacgtggtatatatatgcattagttgtgcaatgtgttgcagacatccacatacaagtcttcccacatattttgattttgttattatatactccctccgttataaatatagtagaaagtaaaacaaatttaaatttgagacagaaagtatgttttatttttcgttgaacgcttaaaataattaagcaccactttaat

SEQ ID NO: 19372 - DNA, 850 bp, Zea Mays
gtcatacaacaatatgcatgctcaatttgtactgggtatttgtgcgcatggactggcagcacaagagtgtacatctgtcctcgagttggatacggagcatgctggagctctgatgttacgtgcccagactctcgtcactctgaaggattatcagtcagctctgtttgatgtcaacaggctcgttgagataaacccgtcgtctgaagtgtatcggaacctgcaggcacgattgaagacacagctatcactggccccaattcctgagtgcgaagaggagtccctttgtcgtgaagaggaagacgaagaacttcctccacgagttcagaagaccgacacttcttctatcgctaagcctgaccaaccagcaaccaaactggtcctcgagaacaaaccttcagctggaccaattctccacagaaaacctgcaactgaacctctaaaggctgtggttccgtccacttcgccttcaaaaccccagggttgggaagccatcccaaaaccgaagagtcattcaggccttgactactcaaaatgggacaaaattgaagaggattcaagtgaagacgaggacgatgaggaagatgagctgccacagtacaagtttaaagtcagaagtgttggtgtgcggtctgtaaagtgaacagggttagcaatagattcagagtgtggtctgtgtacagtctaatagatgcccactgactagggtgccacttattcctctttattagttgagttatttggaatgaacaactatatattggttgatatttgcttgaatcagagataagaggatctccaagagtctccctaattccctcgtaattgctataaatgggtattttgatgaaaa

SEQ ID NO: 19373 - DNA, 2634 bp, Zea Mays
ccattctagatcatatgggaggaatagagtgtagctcctaccaactcaccaataataatacggatgtaagaaacaaaagaatgtacaaagaaaatccaaatgaataaaaggagaaacaatgagtggaaaatgatatggagcacccaacagtatacgcatacgccaggcaccacatgtccatccgcgactccgcgtcggtatccgtcaagaaattttcaacaaaaaaaaaacttaattttccactcctattcttccccgacgccggggaccagcgccagcgccaccaagaagtgacccacccaggtagccaggtaggtaaccgcccgtgccccgtcgccggcgatggcgaggtacgaggcgtcggcggccgcgccgggcgtagactttcaccttcccgacgagatcctggccgtgatccccaccgacccgtacgagcaactggacgtggcgcgcaagatcacctccatggccatcacctcccgcgtctcccgcctcgaggccgactctgggcgcctccgccgtgacctagccgaccgcgaccacgccgaggccgagctccgtgcccgcctcgccgactccgacgcgcgcctggccgccgctctcgacgagaacgcgaagctagcgaaggaaagggactcgctcgccgcgacgaccaaaaagctgaccaggaatttggcgaagttggaggcttttaagaaacaactgatgaaatcgttaagtgaagataatctattgcaactgtctgaaaccagtcaagatcacaacggagaagatattttgacagctcgagtcccgtattggaaagatgaagtttgtagcagtaacacttcttcagatacctccatcagatctacaataactgaatccatccatggtggaggataccagttctcaatcaaaacatatgtgcctccaaaattaactcctggctcaacacctatgatttcgtcttctagtggttctccccgagcttattcaactggcccaccctctcccaacttcttctctggtccgacttctcctacaaaagctcgatctgagggccaattgacattttcgtcatggcaaggatcatcaagtcatcagtattcagcacctacctctcctcaacgccactcattcacagggcggccacgtatagatgggaaggaattcttccggcaagcacggacaagactttcttatgagcaatttggagcatttttggccaacatcaaggagttcaatgctcaaaaacaatcacgggaggacaccctgtcaaaagcagaagagatttttggaacagaacacaaagacttgtacatttctttccagaatatgcttagtcgcaaccagtcatgaaaaatatgtcagaagcggtattttctgtctctaaatcaagcagggaagaatttgttgcaataaacgaggcccttccatagtttttttaaaaaaaaaaatgctttcataggttctcaagatcacattgtagagatctgtatgttggcaatcttaatccgaggcgtccgttctcaatgatttggagcggtgacttgagaatgaaattctcataactgccggaaaattagcccgtttgatttagcatacatccaatcattccctggcattcaagacttcttgtttgtctttctgctgtaaaggtattcattgaaaaactgaaaaggggttcagcgtacattgtgcaaagcagtaccaggtgcttagctgaggaggcaccggctaaataaaaaaatgttgggttattatctcatcggacattttgttggtctggaattttcaccgtatccatgggtgcctggtagtactagttgcgagctttgtagtgcagttagtttttttttctcttccatggatgagaattttgataaacaattacagaaaagtggaaatgcaaaaatagagatagaaaagtttcaaggccaacactcccgttggcaggtgggtcttatgtaattcccctgatggactgatttcatgggctcgtatgacatttgcagtcacggcaagccagtcagataacctactaggttggtagtttgctactttgctttgctggcccggtagttggatggcgtcgtaaagtgagggaggttgtgtcatggcgtgtaacgatccacgtggataccatagtttgagtgtatttaaattttaaataagtcaaaatctcttatattttttttttctaattccatctaatccacatagactagaaataaccaaacaatggctaaatcggacggaatgggaactggaccggaatcctacttggcaggaaacaatcttacaatgtattgcgttcgattgcagatctttgagaatgaacggcgaacgaacttgaatttgcagagtgaagaccactccaagtcgagagagatcttgtaggcgtcggtcgcggtgggcacaggagatgtccgtagggagcttttggaggaccttctctttggaacaaacacaaaacatggtacacatttcaccaagcagcattggaagacggggctggctgctgcatctgcatgggtgtgttgttctctgtgcgcaacggcacaagacccatcctgaagcagagaaattcagctagaacctgcaatatctgtctgttgtactgcaacaagtatcttcacaactcaaacctgc

SEQ ID NO: 19374 - DNA, 2568 bp, Zea Mays
ccattctagatcatatgggaggaatagagtgtagctcctaccaactcaccaataataatacggatgtaagaaacaaaagaatgtacaaagaaaatccaaatgaataaaaggagaaacaatgagtggaaaatgatatggagcacccaacagtatacgcatacgccaggcaccacatgtccatccgcgactccgcgtcggtatccgtcaagaaattttcaacaaaaaaaaaacttaattttccactcctattcttccccgacgccggggaccagcgccagcgccaccaagaagtgacccacccaggtagccaggtaggtaaccgcccgtgccccgtcgccggcgatggcgaggtacgaggcgtcggcggccgcgccgggcgtagactttcaccttcccgacgagatcctggccgtgatccccaccgacccgtacgagcaactggacgtggcgcgcaagatcacctccatggccatcacctcccgcgtctcccgcctcgaggccgactctgggcgcctccgccgtgacctagccgaccgcgaccacgccgaggccgagctccgtgcccgcctcgccgactccgacgcgcgcctggccgccgctctcgacgagaacgcgaagctagcgaaggaaagggactcgctcgccgcgacgaccaaaaagctgaccaggaatttggcgaagttggaggcttttaagaaacaactgatgaaatcgttaagtgaagataatctattgcaactgtctgaaaccagtcaagatcacaacggagaagatattttgacagctcgagtcccgtattggaaagatgaagtttgtagcagtaacacttcttcagatacctccatcagatctacaataactgaatccatccatggtggaggataccagttctcaatcaaaacatatgtgcctccaaaattaactcctggctcaacacctatgatttcgtcttctagtggttctccccgagcttattcaactggcccaccctctcccaacttcttctctggtccgacttctcctacaaaagctcgatctgagggccaattgacattttcgtcatggcaaggatcatcaagtcatcagtattcagcacctacctctcctcaacgccactcattcacagggcggccacgtatagatgggaaggaattcttccggcaagcacggacaagactttcttatgagcaatttggagcatttttggccaacatcaaggagttcaatgctcaaaaacaatcacgggaggacaccctgtcaaaagcagaagagatttttggaacagaacacaaagacttgtacatttctttccagaatatgcttagtcgcaaccagtcatgaaaaatatgtcagaagcggtattttctgtctctaaatcaagcaggttctcaagatcacattgtagagatctgtatgttggcaatcttaatccgaggcgtccgttctcaatgatttggagcggtgacttgagaatgaaattctcataactgccggaaaattagcccgtttgatttagcatacatccaatcattccctggcattcaagacttcttgtttgtctttctgctgtaaaggtattcattgaaaaactgaaaaggggttcagcgtacattgtgcaaagcagtaccaggtgcttagctgaggaggcaccggctaaataaaaaaatgttgggttattatctcatcggacattttgttggtctggaattttcaccgtatccatgggtgcctggtagtactagttgcgagctttgtagtgcagttagtttttttttctcttccatggatgagaattttgataaacaattacagaaaagtggaaatgcaaaaatagagatagaaaagtttcaaggccaacactcccgttggcaggtgggtcttatgtaattcccctgatggactgatttcatgggctcgtatgacatttgcagtcacggcaagccagtcagataacctactaggttggtagtttgctactttgctttgctggcccggtagttggatggcgtcgtaaagtgagggaggttgtgtcatggcgtgtaacgatccacgtggataccatagtttgagtgtatttaaattttaaataagtcaaaatctcttatattttttttttctaattccatctaatccacatagactagaaataaccaaacaatggctaaatcggacggaatgggaactggaccggaatcctacttggcaggaaacaatcttacaatgtattgcgttcgattgcagatctttgagaatgaacggcgaacgaacttgaatttgcagagtgaagaccactccaagtcgagagagatcttgtaggcgtcggtcgcggtgggcacaggagatgtccgtagggagcttttggaggaccttctctttggaacaaacacaaaacatggtacacatttcaccaagcagcattggaagacggggctggctgctgcatctgcatgggtgtgttgttctctgtgcgcaacggcacaagacccatcctgaagcagagaaattcagctagaacctgcaatatctgtctgttgtactgcaacaagtatcttcacaactcaaacctgc

SEQ ID NO: 19375 - DNA, 1711 bp, Zea Mays
ccattctagatcatatgggaggaatagagtgtagctcctaccaactcaccaataataatacggatgtaagaaacaaaagaatgtacaaagaaaatccaaatgaataaaaggagaaacaatgagtggaaaatgatatggagcacccaacagtatacgcatacgccaggcaccacatgtccatccgcgactccgcgtcggtatccgtcaagaaattttcaacaaaaaaaaaacttaattttccactcctattcttccccgacgccggggaccagcgccagcgccaccaagaagtgacccacccaggtagccaggtaggtaaccgcccgtgccccgtcgccggcgatggcgaggtacgaggcgtcggcggccgcgccgggcgtagactttcaccttcccgacgagatcctggccgtgatccccaccgacccgtacgagcaactggacgtggcgcgcaagatcacctccatggccatcacctcccgcgtctcccgcctcgaggccgactctgggcgcctccgccgtgacctagccgaccgcgaccacgccgaggccgagctccgtgcccgcctcgccgactccgacgcgcgcctggccgccgctctcgacgagaacgcgaagctagcgaaggaaagggactcgctcgccgcgacgaccaaaaagctgaccaggaatttggcgaagttggaggcttttaagaaacaactgatgaaatcgttaagtgaagataatctattgcaactgtctgaaaccagtcaagatcacaacggagaagatattttgacagctcgagtcccgtattggaaagatgaagtttgtagcagtaacacttcttcagatacctccatcagatctacaataactgaatccatccatggtggaggataccagttctcaatcaaaacatatgtgcctccaaaattaactcctggctcaacacctatgatttcgtcttctagtggttctccccgagcttattcaactggcccaccctctcccaacttcttctctggtccgacttctcctacaaaagctcgatctgagggccaattgacattttcgtcatggcaaggatcatcaagtcatcagtattcagcacctacctctcctcaacgccactcattcacagggcggccacgtatagatgggaaggaattcttccggcaagcacggacaagactttcttatgagcaatttggagcatttttggccaacatcaaggagttcaatgctcaaaaacaatcacgggaggacaccctgtcaaaagcagaagagatttttggaacagaacacaaagacttgtacatttctttccagaatatgcttagtcgcaaccagtcatgaaaaatatgtcagaagcggtattttctgtctctaaatcaagcagatctttgagaatgaacggcgaacgaacttgaatttgcagagtgaagaccactccaagtcgagagagatcttgtaggcgtcggtcgcggtgggcacaggagatgtccgtagggagcttttggaggaccttctctttggaacaaacacaaaacatggtacacatttcaccaagcagcattggaagacggggctggctgctgcatctgcatgggtgtgttgttctctgtgcgcaacggcacaagacccatcctgaagcagagaaattcagctagaacctgcaatatctgtctgttgtactgcaacaagtatcttcacaactcaaacctgc

SEQ ID NO: 19376 - DNA, 3004 bp, Zea Mays
caatgatctacaaaaccaagacagagcaaatcataagatcatgcagttcgtgcacttcatagggggcttggatcaaagtcataatcaaatctctactactcttaagaggatagtgtaggcgtccacaacaccaacggtgcacggttctgccatctacggacgcgcccacctcacctctcgatcccagcttggaaggttcccgagatcgcagcctccctacgccgatctgcccctcgcgccgtgcttccatggatggatacaccacgatccgcgccgccgcatcctctctggtgccaagaatcgcggacgtcgcttcccacctcaccgaaccgtccgcaatctccgtctcctggccccgcgtcgttgcgtccgcgctctcctcctgccccgcgccgttgcgtccgtaatctcctcctccagccacgccgttgctctcgcgctccgctgctctcgcggaatcactcgcggaatcactgctccgctgctctatccgccatcagatttctggagtagtcatggaaggtgccgctcttgatttctaaacagtgcgccaccaatggcgcctgagcccccgccaccatttcatccccttcccgcccagtgtacacaccctacctcgccccgcgtctagatgcacgcgtgcccgcggatgtctctggtgcccccgctcccatcctcctcgcgtcccatccccgtcggcacgggcgcacgacccccatcctcgatgtcgtcctagctgctgcgtgtgcatctccacgcgaacccctaccatcctcgacgtcgtcccagttgcggctgtcgcatctccgtgtgcatctccacccaaacatgcaaggtcaccgggggcccaaacctcaggagcagcgccgcccgcggatcgtgtggattcctgtcgcgtctgcctcggcgaggcctgccgagggatacgacaacgaggattatccatgtcggggccggtcgctttgcctccctgctggccgtctctgccccgccagctccgccttaacgccggatttctccgtgtctgcctccgcatcagggcacgccacgcgcatcgcctcggcggtgggccgcgttgctctctctaccttgtcgcagcacccttggaggacggctacactggcatggaggttcatgtgcgtctgcttggtcgagcgagctccccatctttctccgtcaaccccgtcgtccattttgccccaccacgccacgcaatacgcagttgaagatgagacccaggtggtggcgctgaagcgactatcgcggcatcacggctcgaacgtgatgacgatttggcgttcttccctatgggccgatccctctggtcatcttctcgccgcactggcgatggagccgggcttgccgcgcctggtggttctcgtccgcccacggcccccgattagcatgagcctccgcgccagtatcattggtcttcctaatgttggcaagtcaaacctcttcaacgccattgttgtccgatgctttgaggatgacgatatagttcatgtcaatggaagggtcgagcccggatcagacattgatgtcattaacctagagctgatattttcagatctttaacagatagagaagaggttagataagcttaacaagagcgatacacaagtaaaagtgaaggaacaagcagagaaatcaggattggaaaaaattcagtaggcacttatggaaggaaagcctgcaagatcggtcgatttggctgagcatgagaaagaagttataaaacatctttatctgctaactatgaaacctgtcatttctgttgctaatgtaatagaatctgatcttgctgaacctgatatcaatcctcgtgtcaaagaggtggctaaagcagcatcatatttgcagtatggtatggttacaatactagctcaggtttgttgtatacatcgaagtacaagaacctttgaagaaatttctgctaaataattttatattttttatgttgcctacccatatgtgtccacctatgctaacaaaatcatggaatgtataaaaagattgaaactgaactcgctgagctaccattggaagagagagtagagtatttaaaatctcttggtgttgctgaaagtggactaggaaatttggtaaaagcaacatataatctattggggttaagaacttatttcacaaccggagacaaggtgcatcatttgtgctgttaaagttttttccccgtcagttaaaagaaactgacagacctttaactgtgtccttttaggaaacaaaagctcagactattttttcaggcccttcttcctcacaattatttctactgtaatatttgaagaggtttttgtaatcattataactgcatgtgattctacatataggcgtgactgcgccacaagcagctggagttattcatagcgactttcagaaaggatttattagagttgaaactgtatcctacgatgattttgttgcagctggttttcttggagtagcaagggagaaaggactggtaaaaatactttatttgctacaccttacattcaatgttttgaaacatgtagttaaaaagatgttttttgcttattttttgctactcaacacttagtgttagtttaacattaaacttgcatattgttggtgctcttctaaagatggccattctattggttaaacactgatactgaatgccctagaaatgatgctgcaaagtatatattttatattactttgttacctttatgtttgagaggtttgcaagttactgaaatattattttgtaattgattagtgcaggccaaaaccttgatgtggttgcttgttattctatgggttttggtttggttttacaagtgttattagcattataccttgtgctcgtgctcatgtacaaatttctcaaattgtaaccccgtcgatactcgcactcaaatattttatgcagtaacatgtataccgttttgggccatcgttgcatgcagattttttcccttggagactcaatatatgctgctagcagctgcattacctcctt

SEQ ID NO: 19377 - DNA, 2375 bp, Zea Mays
gttctgccatctacggacgcgcccacctcacctctcgatcccagcttggaaggttcccgagatcgcagcctccctacgccgatctgcccctcgcgccgtgcttccatggatggatacaccacgatccgcgccgccgcatcctctctggtgccaagaatcgcggacgtcgcttcccacctcaccgaaccgtccgcaatctccgtctcctggccccgcgtcgttgcgtccgcgctctcctcctgccccgcgccgttgcgtccgtaatctcctcctccagccacgccgttgctctcgcgctccgctgctctcgcggaatcactcgcggaatcactgctccgctgctctatccgccatcagatttctggagtagtcatggaaggtgccgctcttgatttctaaacagtgcgccaccaatggcgcctgagcccccgccaccatttcatccccttcccgcccagtgtacacaccctacctcgccccgcgtctagatgcacgcgtgcccgcggatgtctctggtgcccccgctcccatcctcctcgcgtcccatccccgtcggcacgggcgcacgacccccatcctcgatgtcgtcctagctgctgcgtgtgcatctccacgcgaacccctaccatcctcgacgtcgtcccagttgcggctgtcgcatctccgtgtgcatctccacccaaacatgcaaggtcaccgggggcccaaacctcaggagcagcgccgcccgcggatcgtgtggattcctgtcgcgtctgcctcggcgaggcctgccgagggatacgacaacgaggattatccatgtcggggccggtcgctttgcctccctgctggccgtctctgccccgccagctccgccttaacgccggatttctccgtgtctgcctccgcatcagggcacgccacgcgcatcgcctcggcggtgggccgcgttgctctctctaccttgtcgcagcacccttggaggacggctacactggcatggaggttcatgtgcgtctgcttggtcgagcgagctccccatctttctccgtcaaccccgtcgtccattttgccccaccacgccacgcaatacgcagttgaagatgagacccaggtggtggcgctgaagcgactatcgcggcatcacggctcgaacgtgatgacgatttggcgttcttccctatgggccgatccctctggtcatcttctcgccgcactggcgatggagccgggcttgccgcgcctggtggttctcgtccgcccacggcccccgattagcatgagcctccgcgccagtatcattggtcttcctaatgttggcaagtcaaacctcttcaacgccattgttgtccgatgctttgaggatgacgatatagttcatgtcaatggaagggtcgagcccggatcagacattgatgtcattaacctagagctgatattttcagatctttaacagatagagaagaggttagataagcttaacaagagcgatacacaagtaaaagtgaaggaacaagcagagaaatcaggattggaaaaaattcagtaggcacttatggaaggaaagcctgcaagatcggtcgatttggctgagcatgagaaagaagttataaaacatctttatctgctaactatgaaacctgtcatttctgttgctaatgtaatagaatctgatcttgctgaacctgatatcaatcctcgtgtcaaagaggtggctaaagcagcatcatatttgcagtatggtatggttacaatactagctcagattgaaactgaactcgctgagctaccattggaagagagagtagagtatttaaaatctcttggtgttgctgaaagtggactaggaaatttggtaaaagcaacatataatctattggggttaagaacttatttcacaaccggagacaaggaaacaaaagctcagactattttttcaggcccttcttcctcacaattatttctactgtaatatttgaagaggtttttgtaatcattataactgcatgtgattctacatataggcgtgactgcgccacaagcagctggagttattcatagcgactttcagaaaggatttattagagttgaaactgtatcctacgatgattttgttgcagctggttttcttggagtagcaagggagaaaggactggccaaaaccttgatgtggttgcttgttattctatgggttttggtttggttttacaagtgttattagcattataccttgtgctcgtgctcatgtacaaatttctcaaattgtaaccccgtcgatactcgcactcaaatattttatgcagtaacatgtataccgttttgggccatcgttgcatgcagattttttcccttggagactcaatatatgctgctagcagctgcattacctcctt

SEQ ID NO: 19378 - DNA, 2483 bp, Zea Mays
gatccgcgccgccgcatcctctctggtgccaagaatcgcggacgtcgcttcccacctcaccgaaccgtccgcaatctccgtctcctggccccgcgtcgttgcgtccgcgctctcctcctgccccgcgccgttgcgtccgtaatctcctcctccagccacgccgttgctctcgcgctccgctgctctcgcggaatcactcgcggaatcactgctccgctgctctatccgccatcagatttctggagtagtcatggaaggtgccgctcttgatttctaaacagtgcgccaccaatggcgcctgagcccccgccaccatttcatccccttcccgcccagtgtacacaccctacctcgccccgcgtctagatgcacgcgtgcccgcggatgtctctggtgcccccgctcccatcctcctcgcgtcccatccccgtcggcacgggcgcacgacccccatcctcgatgtcgtcctagctgctgcgtgtgcatctccacgcgaacccctaccatcctcgacgtcgtcccagttgcggctgtcgcatctccgtgtgcatctccacccaaacatgcaaggtcaccgggggcccaaacctcaggagcagcgccgcccgcggatcgtgtggattcctgtcgcgtctgcctcggcgaggcctgccgagggatacgacaacgaggattatccatgtcggggccggtcgctttgcctccctgctggccgtctctgccccgccagctccgccttaacgccggatttctccgtgtctgcctccgcatcagggcacgccacgcgcatcgcctcggcggtgggccgcgttgctctctctaccttgtcgcagcacccttggaggacggctacactggcatggaggttcatgtgcgtctgcttggtcgagcgagctccccatctttctccgtcaaccccgtcgtccattttgccccaccacgccacgcaatacgcagttgaagatgagacccaggtggtggcgctgaagcgactatcgcggcatcacggctcgaacgtgatgacgatttggcgttcttccctatgggccgatccctctggtcatcttctcgccgcactggcgatggagccgggcttgccgcgcctggtggttctcgtccgcccacggcccccgattagcatgagcctccgcgccagtatcattggtcttcctaatgttggcaagtcaaacctcttcaacgccattgttgtccgatgctttgaggatgacgatatagttcatgtcaatggaagggtcgagcccggatcagacattgatgtcattaacctagagctgatattttcagatctttaacaggaacaagcagagaaatcaggattggaaaaaattcagtaggcacttatggaaggaaagcctgcaagatcggtcgatttggctgagcatgagaaagaagttataaaacatctttatctgctaactatgaaacctgtcatttctgttgctaatgtaatagaatctgatcttgctgaacctgatatcaatcctcgtgtcaaagaggtggctaaagcagcatcatatttgcagtatggtatggttacaatactagctcagattgaaactgaactcgctgagctaccattggaagagagagtagagtatttaaaatctcttggtgttgctgaaagtggactaggaaatttggtaaaagcaacatataatctattggggttaagaacttatttcacaaccggagacaaggaaacaaaagctcagactattttttcaggcccttcttcctcacaattatttctactgtaatatttgaagaggtttttgtaatcattataactgcatgtgattctacatataggcgtgactgcgccacaagcagctggagttattcatagcgactttcagaaaggatttattagagttgaaactgtatcctacgatgattttgttgcagctggttttcttggagtagcaagggagaaaggactggtaaaaatactttatttgctacaccttacattcaatgttttgaaacatgtagttaaaaagatgttttttgcttattttttgctactcaacacttagtgttagtttaacattaaacttgcatattgttggtgctcttctaaagatggccattctattggttaaacactgatactgaatgccctagaaatgatgctgcaaagtatatattttatattactttgttacctttatgtttgagaggtttgcaagttactgaaatattattttgtaattgattagtgcaggccaaaaccttgatgtggttgcttgttattctatgggttttggtttggttttacaagtgttattagcattataccttgtgctcgtgctcatgtacaaatttctcaaattgtaaccccgtcgatactcgcactcaaatattttatgcagtaacatgtataccgttttgggccatcgttgcatgcagattttttcccttggagactcaatatatgctgctagcagctgcattacctcctt

SEQ ID NO: 19379 - DNA, 989 bp, Zea Mays
ttcaaaaggtgaaaacacaaggtttcccggaagctgatctagtgatcttgaaacaactccgttaatggttggacagagaaaactgatcaagaccactttatcgctacctgcattgttttgatatagggggattcagcattgtgcttgtgcatatcaagtctcacaacaaaactgcaggggataccacctaacatcctacaattgctgaatcaagttttaccatagtacatgataaggcttgtgccaggaaactgcagctacggctgcaggttcagtctgctgaaccacaggtcaccttcttcggactactttatgactcaatgcggagacgctgaaatgagtgcgtcacttctccaggtcaagctcggattctgtgtcagtgcgaagccgcttggcctcccggtcacctaggtgaagcgacatggcgagttcttcctctgacggattgttcaggttcgcgatttgcctcggagcatcctggtcgtcgcgtacaggggacatgccgacaaagtttgagatgaactggcgctcttccacattgatcacagctgcctcatccccttccgtcgtcgccgaaacgtcgtgccgaggcagctgctcgattttgatccccagaggctcgaagatctccaccttttcttctggggcaggaacagctgctgtcgacgactccccaacagcagagttagctgcagccaccaacgcgagcctttgctgctgcacggcatctttatcgaggataaattctgtcagttatctttgagtgattcattggttatgataaggtcaagttcaagacgatccagaaggcggccaagatcaactccactggtccaattttcagggccatggtcacacctaagctttagcctcccacggtttgctgtgccaccccatattatcccaatgggacacggcttctcattatcctggccagtcaggataataaggcttccactatcaccttctagatcaaaagtttggcggtt

SEQ ID NO: 19380 - DNA, 514 bp, Zea Mays
atcaaaatgaaggggcactttctgtattgtcttgtgctccatagtcctaacattgtctgactcaggaaccaggggaatcaaatcgttctaatatttctctcttcaaaatttgttggagccagtcttgacattatttttatctttttttcaggaagaacaggcttctgtgagggagataaagtgggacgcttttaggaagtactcggaggatcgtctggaagctgagcagcagcgtgctgaggagctggaactacaagtagcagctcttaaacaacagctccaagaagctgagatccattataagcaaaaggaagaacaagtttctctaagggaggttcaatgggaagcggatcaaaatcattccctggatgagcttaacgctcagcgtcagtatgccacggacttggagaaacaaatcgaagatctgacacagaagttaacatcagctgatgcacactacaagcagaagttttcccagctgttttttctcgtgttgaatttctccgagttctcc

SEQ ID NO: 19381 - DNA, 1236 bp, Zea Mays
catagtcctaacattgtctgactcaggaaccaggggaatcaaatcgttctaatatttctctcttcaaaatttgttggagccagtcttgacattatttttatctttttttcaggaagaacaggcttctgtgagggagataaagtgggacgcttttaggaagtactcggaggatcgtctggaagctgagcagcagcgtgctgaggagctggaactacaagtagcagctcttaaacaacagctccaagaagctgagatccattataagcaaaaggaagaacaagtttctctaagggaggttcaatgggaagcggatcaaaatcattccctggatgagcttaacgctcagcgtcagtatgccacggacttggagaaacaaatcgaagatctgacacagaagttaacatcagctgatgcacactacaagcagaagaagagagggacaaacttgccgaggtcaccaaagagttgagcgagttgaaacaaaaagtaagcgagagtgttgaattggagaggaaggtgcaggaccttgagcagaagctgcagctagcttattccaagtctgacgaacaggcagtggatactgtggagtcgagatcccgtgaattcagcctggattcatcaacgagttcaggcaagcagcaagacaaaactcaggctgtctcaccaaacccaaccctgcaaggagtgcaagaaccttccggcatcatggccttcaagttcatcctgggagttgccctgctgtctgtcctaatcggcgtgtttcttgggaagcggtactagcgctcaggtcgtgctgaaagggctcagccagcggcaagtttgaaaggattggtggccttgatggtaatggttcgacgacttcctgggagaagggctcatcggcgtgtttctttttgccgtaattttcacttttcgggtaagggtaggggggccaaggaatttgatttttgatcattcctaccctttcatgcaaatggccaactgcatgcgactggttttgcctacagcaagtttccgtatacatttcttgtccgtaaagatcacaagtccagcgacgaaacatgaagcatttgctactatatgtctgtctatatgctcgtatggagagagtgcaagttttgctaccttgtacagattccaccaatccagtgcttttgatgattcagattctttacttttgcagcaggcatttgttgtttgcaaactgcaacgcctacccagactcccagaggtcgg

SEQ ID NO: 19382 - DNA, 1233 bp, Zea Mays
cctaacattgtctgactcaggaaccaggggaatcaaatcgttctaatatttctctcttcaaaatttgttggagccagtcttgacattatttttatctttttttcaggaagaacaggcttctgtgagggagataaagtgggacgcttttaggaagtactcggaggatcgtctggaagctgagcagcagcgtgctgaggagctggaactacaagtagcagctcttaaacaacagctccaagaagctgagatccattataagcaaaaggaagaacaagtttctctaagggaggttcaatgggaagcggatcaaaatcattccctggatgagcttaacgctcagcgtcagtatgccacggacttggagaaacaaatcgaagatctgacacagaagttaacatcagctgatgcacactacaagcagaaggtgacagaagagagggacaaacttgccgaggtcaccaaagagttgagcgagttgaaacaaaaagtaagcgagagtgttgaattggagaggaaggtgcaggaccttgagcagaagctgcagctagcttattccaagtctgacgaacagtggatactgtggagtcgagatcccgtgaattcagcctggattcatcaacgagttcaggcaagcagcaagacaaaactcaggctgtctcaccaaacccaaccctgcaaggagtgcaagaaccttccggcatcatggccttcaagttcatcctgggagttgccctgctgtctgtcctaatcggcgtgtttcttgggaagcggtactagcgctcaggtcgtgctgaaagggctcagccagcggcaagtttgaaaggattggtggccttgatggtaatggttcgacgacttcctgggagaagggctcatcggcgtgtttctttttgccgtaattttcacttttcgggtaagggtaggggggccaaggaatttgatttttgatcattcctaccctttcatgcaaatggccaactgcatgcgactggttttgcctacagcaagtttccgtatacatttcttgtccgtaaagatcacaagtccagcgacgaaacatgaagcatttgctactatatgtctgtctatatgctcgtatggagagagtgcaagttttgctaccttgtacagattccaccaatccagtgcttttgatgattcagattctttacttttgcagcaggcatttgttgtttgcaaactgcaacgcctacccagactcccagaggtcgg

SEQ ID NO: 19383 - DNA, 1206 bp, Zea Mays
gggaatcaaatcgttctaatatttctctcttcaaaatttgttggagccagtcttgacattatttttatctttttttcaggaagaacaggcttctgtgagggagataaagtgggacgcttttaggaagtactcggaggatcgtctggaagctgagcagcagcgtgctgaggagctggaactacaagtagcagctcttaaacaacagctccaagaagctgagatccattataagcaaaagaacaagtttctctaagggaggttcaatgggaagcggatcaaaatcattccctggatgagcttaacgctcagcgtcagtatgccacggacttggagaaacaaatcgaagatctgacacagaagttaacatcagctgatgcacactacaagcagaaggtgacagaagagagggacaaacttgccgaggtcaccaaagagttgagcgagttgaaacaaaaagtaagcgagagtgttgaattggagaggaaggtgcaggaccttgagcagaagctgcagctagcttattccaagtctgacgaacaggcagtggatactgtggagtcgagatcccgtgaattcagcctggattcatcaacgagttcaggcaagcagcaagacaaaactcaggctgtctcaccaaacccaaccctgcaaggagtgcaagaaccttccggcatcatggccttcaagttcatcctgggagttgccctgctgtctgtcctaatcggcgtgtttcttgggaagcggtactagcgctcaggtcgtgctgaaagggctcagccagcggcaagtttgaaaggattggtggccttgatggtaatggttcgacgacttcctgggagaagggctcatcggcgtgtttctttttgccgtaattttcacttttcgggtaagggtaggggggccaaggaatttgatttttgatcattcctaccctttcatgcaaatggccaactgcatgcgactggttttgcctacagcaagtttccgtatacatttcttgtccgtaaagatcacaagtccagcgacgaaacatgaagcatttgctactatatgtctgtctatatgctcgtatggagagagtgcaagttttgctaccttgtacagattccaccaatccagtgcttttgatgattcagattctttacttttgcagcaggcatttgttgtttgcaaactgcaacgcctacccagactcccagaggtcgg

SEQ ID NO: 19384 - DNA, 797 bp, Zea Mays
tttcaggaagaacaggcttctgtgagggagataaagtgggacgcttttaggaagtactcggaggatcgtctggaagctgagcagcagcgtgctgaggagctggaactacaagtagcagctcttaaacaacagctccaagaagctgagatccattataagcaaaaggaagaacaagtttctctaagggaggttcaatgggaagcggatcaaaatcattccctggatgagcttaacgctcagcgtcagtatgccacggacttggagaaacaaatcgaagatctgacacagaagttaacatcagctgatgcacactacaagcagaaggtgacagaagagagggacaaacttgccgaggtcaccaaagagttgagcgagttgaaacaaaaagtaagcgagagtgttgaattggagaggaaggtgcaggaccttgagcagaagctgcagctagcttattccaagtctgacgaacaggcagtggatactgtggagtcgagatcccgtgaattcagcctggattcatcaacgagttcaggcaagcagcaagacaaaactcaggctgtctcaccaaacccaaccctgcaaggagtgcaagaaccttccggcatcatggccttcaagttcatcctgggagttgccctgctgtctgtcctaatcggcgtgtttcttgggaagcggtactagcgctcaggtcgtgctgaaagggctcagccagcggcaagtttgaaaggattggtggccttgatgcaggcatttgttgtttgcaaactgcaacgcctacccagactcccagaggtcgg

SEQ ID NO: 19385 - DNA, 1084 bp, Zea Mays
tttcaggaagaacaggcttctgtgagggagataaagtgggacgcttttaggaagtactcggaggatcgtctggaagctgagcagcagcgtgctgaggagctggaactacaagtagcagctcttaaacaacagctccaagaagctgagatccattataagcaaaaggaagaacaagtttctctaagggaggttcaatgggaagcggatcaaaatcattccctggatgagcttaacgctcagcgtcagtatgccacggacttggagaaacaaatcgaagatctgacacagaagttaacatcagctgatgcacactacaagcagaaggtgacagaagagagggacaaacttgccgaggtcaccaaagagttgagcgagttgaaacaaaaagtaagcgagagtgttgaattggagaggaaggtgcaggaccttgagcagaagctgcagctagcttattccaagtctgacgaacaggcagtggatactgtggagtcgagatcccgtgaattcagcctggattcatcaacgagttcaggcaagcagcaagacaaaactcaggctgtctcaccaaacccaaccctgcaaggagtgcaagaaccttccggcatcatggccttcaagttcatcctgggagttgccctgctgtctgtcctaatcggcgtgtttcttgggaagcggtactagcgctcaggtcgtgctgaaagggctcagccagcggcaagtttgaaaggattggtggccttgatggtaatggttcgacgacttcctgggagaagggctcatcggcgtgtttctttttgccgtaattttcacctttcatgcaaatggccaactgcatgcgactggttttgcctacagcaagtttccgtatacatttcttgtccgtaaagatcacaagtccagcgacgaaacatgaagcatttgctactatatgtctgtctatatgctcgtatggagagagtgcaagttttgctaccttgtacagattccaccaatccagtgcttttgatgattcagattctttacttttgcagcaggcatttgttgtttgcaaactgcaacgcctacccagactcccagaggtcgg

SEQ ID NO: 19386 - DNA, 393 bp, Zea Mays
tttcaggaagaacaggcttctgtgagggagataaagtgggacgcttttaggaagtactcggaggatcgtctggaagctgagcagcagcgtgctgaggagctggaactacaagtagcagctcttaaacaacagctccaagaagctgagatccattataagcaaaaggaagaacaagtttctctaagggaggttcaatgggaagcggatcaaaatcattccctggatgagcttaacgctcagcgtcagtatgccacggacttggagaaacaaatcgaagatctgacacagaagttaacatcagctgatgcacactacaagcagaaggtgacagaagagagggacaaacttgccgaggtcaccaaagagttgagcgacgaaccgggagcagcccag

SEQ ID NO: 19387 - DNA, 3091 bp, Zea Mays
aggctccgcgccgtaaaaaattggacgttcccgctccctccatctttttggttcgggtttcgttttcccactgccgctcccgcctcctctctgccctgtttccacatttgaccgatcctcttcgattcgatttctacacccccagagcttgccaaacccctcgtctcccaaccctagagagcagcagcagcagcagcagctaccgcatcccttgccatggcgccaagctccccgtcatccgctaggcccacgcgcgcctccggccggaagcgctccgccatggccgaggagatccaccagaaccaggaggaggaggaggaggttgtggctgcgtccaccgccaagcgcagacgcaaggcggcgtcttccgggaagaagcccaagccgacgcccaagcaggccaaaccggccgtggcggggatgaagaagaagggggagaccgagaagacggagcccgttgtggacgacgtgtgcgccgaggagcccgacgaggaggagttggccatgggcgaggaggaggcggaggccgaggagcaggccatgcaggaggtggtggccgcggtcgcggccgggtcgcccggtaagaagagggtggggagaaggagcgccgccgcctcgggcgaccacgtgcccgagttcatcggcagccccgttgctgcggccgaggcgcacagcaactggcccaagcgctacgagcgcagcactgccgcaaataaaccggaggaggacgatgagctcaaggccaggtgccactaccggagcgctaaggtggacaacattgtctactgcctcggggatgacgtttatgtcaaggctggagaaaatgaggctgattacattggtcgcattactgaattttttgagggcactgatcgatgccactattttacttgccgttggtttttccgtgcagaggacacggtcatcaattcgttggtgtcgattaatgttgatggccacaagcatgaccctagacgtgtttttctttccgaggaaaagaatgacaatgtgcttgattgcatcatctccaaggtcaagatagtccatgttgatccaaatcgatgggctgttgatcttaacagttttgcgtgccaaagtttaaaatacaatcatccacagactgaggtgcgaaatgagaaagctgatgagtttcttgctctccttaaggaatgggcagtcttatgtgaaaaatatgttcatcaagacgtggattcgaatttagcaggttcagaggatcaagaggatgctgacactcttgacaaggatgaatttgttgtacagaagcttattggaatacgctatgatggcactggaaggaaaaaaggcgtatattttaaggtccaatgggaaggatatggtcctgaagaggatacatgggaacctattgataacctgagtgactgtccgctgaaaattagagaatttgtacaagaagggcgcaaaagaaaaattctcccgcttcctggtgatgttgatgtcatttgtggaggcccaccatgtcaaggtataagtgggtttaatcggttcaggaaccgtgatgagccacttaaagatgagaaaaacaagcaaatggtgactttcatggatattgtggcatacttgaagcccaagtatgttctcatggaaaatgtcgtggacatactgaaatttgctgatggctacctaggaaaatatgctttgagctgcctagttgctatgaagtaccaagcacgccttggaatgatggtggcaggctgctatggtctgccacagttcaggatgcgtgtgttcctctggggtgctctttcttccatggtgctccctaagtatcctctgcctacatatgacgttgtagtacgtggaggagcacctaatgccttttcgcaatgtatggttgcatatgatgagacacaaaggccatccctgaagaaagctttgcttcttggtgatgcattttcagatttaccaaaggtcgaaaaccatcaacctaacgatgtaatggagtatggtggttcccccaagacagagttccagcgctacattcgacttggtcgtaaagacatgttggattggtcgtttggtgaggaggctggtccagatgaaggcaagctcttggatcaccagcccttacggcttaacaatgatgattatgagcgggttaagcaaattcctgtcaagaagggagccaacttccgtgacctaaagggtgtcaaggttggagcaaataatgttgttgagtgggatccagaagtcgaacgtgtgtacctttcgtctgggaaaccactggttcctgactatgcgatgtcattcatcaagggcaaatcactcaagccattcgggcgcctgtggtgggacgagacggttcctacagttgtgaccagagcagagcctcataaccaggttatattgcatccgactcaagcaagagtcttgactatccgggagaacgcaaggttacagggcttccccgattactaccgattgtttggaccgatcaaggagaagtatattcaagtcgggaacgcagtggcagtccctgttgcacgggcactgggctactgtctgggtcaagcctacctgggtgaatctgacgggagtcagcctctgtaccagctgcctgcaagttttacctctgtggggcgaaccgcggttcaggcgaatgccgtttctgttggcactcctgcgggggaggtagtcgagcagtaaaaggatagcggagcaaccctggttggtattttgattcgagcccatccagtagcatgtttaccaataaataatcattggtcgtgctgattcttatggttggagatgaatgtatgtagggtgtactcgagctcgagtgcttgttgtactgtaggttgaggtttctcatccattggcctgcctatttgtggatgacgtttcatttcagattagcaatgtgcttatttaaggtttcgtcatgtacctgtattctacaatccactattgtttccaaagacagcatttgatccttgttcaacgcgagcagattttcgtccaccaaagctgtgtagggatcgaaatgtcaacaatgaattgagtcattcaatcatttgtctaatgttaatgtgtcctttgcatttattttttt

SEQ ID NO: 19388 - DNA, 3206 bp, Zea Mays
gtttcgttttcccactgccgctcccgcctcctctctgccctgtttccacatttgaccgatcctcttcgattcgatttctacacccccagagcttgccaaacccctcgtctcccaaccctagagagcagcagcagcagcagcagctaccgcatcccttgccatggcgccaagctccccgtcatccgctaggcccacgcgcgcctccggccggaagcgctccgccatggccgaggagatccaccagaaccaggaggaggaggaggaggttgtggctgcgtccaccgccaagcgcagacgcaaggcggcgtcttccgggaagaagcccaagccgacgcccaagcaggccaaaccggccgtggcggggatgaagaagaagggggagaccgagaagacggagcccgttgtggacgacgtgtgcgccgaggagcccgacgaggaggagttggccatgggcgaggaggaggcggaggccgaggagcaggccatgcaggaggtggtggccgcggtcgcggccgggtcgcccggtaagaagagggtggggagaaggagcgccgccgcctcgggcgaccacgtgcccgagttcatcggcagccccgttgctgcggccgaggcgcacagcaactggcccaagcgctacgagcgcagcactgccgcaaataaaccggaggaggacgatgagctcaaggccaggtgccactaccggagcgctaaggtggacaacattgtctactgcctcggggatgacgtttatgtcaaggtcatcaattcgttggtgtcgattaatgttgatggccacaagcatgaccctagacgtgtttttctttccgaggaaaagaatgacaatgtgcttgattgcatcatctccaaggtcaagatagtccatgttgatccaaatatggatccaaaagctaaggcccaactgatagaacattgtgacctatactatgacatgtcttactctgttgcatattctacatttgctaatatctcatcagaaaatgggcagtcaggcagtgaaaccgcttcgggtatttcttctgatgatgcgggtttggagacgtcatctaatatgccagagaggacagcaacccttcttgacttgtattcgggctgtgggggcatgtccactggtctttgcttgggtgctgctctttctggcctgaaacttgaaactcgatgggctgttgatcttaacagttttgcgtgccaaagtttaaaatacaatcatccacagactgaggtgcgaaatgagaaagctgatgagtttcttgctctccttaaggaatgggcagtcttatgtgaaaaatatgttcatcaagacgtggattcgaatttagcaggttcagaggatcaagaggatgctgacactcttgacaaggatgaatttgttgtacagaagcttattggaatacgctatgatggcactggaaggaaaaaaggcgtatattttaaggtccaatgggaaggatatggtcctgaagaggatacatgggaacctattgataacctgagtgactgtccgctgaaaattagagaatttgtacaagaagggcgcaaaagaaaaattctcccgcttcctggtgatgttgatgtcatttgtggaggcccaccatgtcaaggtataagtgggtttaatcggttcaggaaccgtgatgagccacttaaagatgagaaaaacaagcaaatggtgactttcatggatattgtggcatacttgaagcccaagtatgttctcatggaaaatgtcgtggacatactgaaatttgctgatggctacctaggaaaatatgctttgagctgcctagttgctatgaagtaccaagcacgccttggaatgatggtggcaggctgctatggtctgccacagttcaggatgcgtgtgttcctctggggtgctctttcttccatggtgctccctaagtatcctctgcctacatatgacgttgtagtacgtggaggagcacctaatgccttttcgcaatgtatggttgcatatgatgagacacaaaggccatccctgaagaaagctttgcttcttggtgatgcattttcagatttaccaaaggtcgaaaaccatcaacctaacgatgtaatggagtatggtggttcccccaagacagagttccagcgctacattcgacttggtcgtaaagacatgttggattggtcgtttggtgaggaggctggtccagatgaaggcaagctcttggatcaccagcccttacggcttaacaatgatgattatgagcgggttaagcaaattcctgtcaagaagggagccaacttccgtgacctaaagggtgtcaaggttggagcaaataatgttgttgagtgggatccagaagtcgaacgtgtgtacctttcgtctgggaaaccactggttcctgactatgcgatgtcattcatcaagggcaaatcactcaagccattcgggcgcctgtggtgggacgagacggttcctacagttgtgaccagagcagagcctcataaccaggttatattgcatccgactcaagcaagagtcttgactatccgggagaacgcaaggttacagggcttccccgattactaccgattgtttggaccgatcaaggagaagtatattcaagtcgggaacgcagtggcagtccctgttgcacgggcactgggctactgtctgggtcaagcctacctgggtgaatctgacgggagtcagcctctgtaccagctgcctgcaagttttacctctgtggggcgaaccgcggttcaggcgaatgccgtttctgttggcactcctgcgggggaggtagtcgagcagtaaaaggatagcggagcaaccctggttggtattttgattcgagcccatccagtagcatgtttaccaataaataatcattggtcgtgctgattcttatggttggagatgaatgtatgtagggtgtactcgagctcgagtgcttgttgtactgtaggttgaggtttctcatccattggcctgcctatttgtggatgacgtttcatttcagattagcaatgtgcttatttaaggtttcgtcatgtacctgtattctacaatccactattgtttccaaagacagcatttgatccttgttcaacgcgagcagattttcgtccaccaaagctgtgtagggatcgaaatgtcaacaatgaattgagtcattcaatcatttgtctaatgttaatgtgtcctttgcatttattttttt

SEQ ID NO: 19389 - DNA, 3276 bp, Zea Mays
ttttcccactgccgctcccgcctcctctctgccctgtttccacatttgaccgatcctcttcgattcgatttctacacccccagagcttgccaaacccctcgtctcccaaccctagagagcagcagcagcagcagcagctaccgcatcccttgccatggcgccaagctccccgtcatccgctaggcccacgcgcgcctccggccggaagcgctccgccatggccgaggagatccaccagaaccaggaggaggaggaggaggttgtggctgcgtccaccgccaagcgcagacgcaaggcggcgtcttccgggaagaagcccaagccgacgcccaagcaggccaaaccggccgtggcggggatgaagaagaagggggagaccgagaagacggagcccgttgtggacgacgtgtgcgccgaggagcccgacgaggaggagttggccatgggcgaggaggaggcggaggccgaggagcaggccatgcaggaggtggtggccgcggtcgcggccgggtcgcccggtaagaagagggtggggagaaggagcgccgccgcctcgggcgaccacgtgcccgagttcatcggcagccccgttgctgcggccgaggcgcacagcaactggcccaagcgctacgagcgcagcactgccgcaaataaaccggaggaggacgatgagctcaaggccaggtgccactaccggagcgctaaggtggacaacattgtctactgcctcggggatgacgtttatgtcaaggctggagaaaatgaggctgattacattggtcgcattactgaattttttgagggcactgatcgatgccactattttacttgccgttggtttttccgtgcagaggacacggtcatcaattcgttggtgtcgattaatgttgatggccacaagcatgaccctagacgtgtttttctttccgaggaaaagaatgacaatgtgcttgattgcatcatctccaaggtcaagatagtccatgttgatccaaatatggatccaaaagctaaggcccaactgatagaacattgtgacctatactatgacatgtcttactctgttgcatattctacatttgctaatatctcatcagaaaatgggcagtcaggcagtgaaaccgcttcgggtatttcttctgatgatgcgggtttggagacgtcatctaatatgccagagaggacagcaacccttcttgacttgtattcgggctgtgggggcatgtccactggtctttgcttggcgatgggctgttgatcttaacagttttgcgtgccaaagtttaaaatacaatcatccacagactgaggtgcgaaatgagaaagctgatgagtttcttgctctccttaaggaatgggcagtcttatgtgaaaaatatgttcatcaagacgtggattcgaatttagcaggttcagaggatcaagaggatgctgacactcttgacaaggatgaatttgttgtacagaagcttattggaatacgctatgatggcactggaaggaaaaaaggcgtatattttaaggtccaatgggaaggatatggtcctgaagaggatacatgggaacctattgataacctgagtgactgtccgctgaaaattagagaatttgtacaagaagggcgcaaaagaaaaattctcccgcttcctggtgatgttgatgtcatttgtggaggcccaccatgtcaaggtataagtgggtttaatcggttcaggaaccgtgatgagccacttaaagatgagaaaaacaagcaaatggtgactttcatggatattgtggcatacttgaagcccaagtatgttctcatggaaaatgtcgtggacatactgaaatttgctgatggctacctaggaaaatatgctttgagctgcctagttgctatgaagtaccaagcacgccttggaatgatggtggcaggctgctatggtctgccacagttcaggatgcgtgtgttcctctggggtgctctttcttccatggtgctccctaagtatcctctgcctacatatgacgttgtagtacgtggaggagcacctaatgccttttcgcaatgtatggttgcatatgatgagacacaaaggccatccctgaagaaagctttgcttcttggtgatgcattttcagatttaccaaaggtcgaaaaccatcaacctaacgatgtaatggagtatggtggttcccccaagacagagttccagcgctacattcgacttggtcgtaaagacatgttggattggtcgtttggtgaggaggctggtccagatgaaggcaagctcttggatcaccagcccttacggcttaacaatgatgattatgagcgggttaagcaaattcctgtcaagaagggagccaacttccgtgacctaaagggtgtcaaggttggagcaaataatgttgttgagtgggatccagaagtcgaacgtgtgtacctttcgtctgggaaaccactggttcctgactatgcgatgtcattcatcaagggcaaatcactcaagccattcgggcgcctgtggtgggacgagacggttcctacagttgtgaccagagcagagcctcataaccaggttatattgcatccgactcaagcaagagtcttgactatccgggagaacgcaaggttacagggcttccccgattactaccgattgtttggaccgatcaaggagaagtatattcaagtcgggaacgcagtggcagtccctgttgcacgggcactgggctactgtctgggtcaagcctacctgggtgaatctgacgggagtcagcctctgtaccagctgcctgcaagttttacctctgtggggcgaaccgcggttcaggcgaatgccgtttctgttggcactcctgcgggggaggtagtcgagcagtaaaaggatagcggagcaaccctggttggtattttgattcgagcccatccagtagcatgtttaccaataaataatcattggtcgtgctgattcttatggttggagatgaatgtatgtagggtgtactcgagctcgagtgcttgttgtactgtaggttgaggtttctcatccattggcctgcctatttgtggatgacgtttcatttcagattagcaatgtgcttatttaaggtttcgtcatgtacctgtattctacaatccactattgtttccaaagacagcatttgatccttgttcaacgcgagcagattttcgtccaccaaagctgtgtagggatcgaaatgtcaacaatgaattgagtcattcaatcatttgtctaatgttaatgtgtcctttgcatttattttttt

SEQ ID NO: 19390 - DNA, 3189 bp, Zea Mays
ctctctgccctgtttccacatttgaccgatcctcttcgattcgatttctacacccccagagcttgccaaacccctcgtctcccaaccctagagagcagcagcagcagcagcagctaccgcatcccttgccatggcgccaagctccccgtcatccgctaggcccacgcgcgcctccggccggaagcgctccgccatggccgaggagatccaccagaaccaggaggaggaggaggaggttgtggctgcgtccaccgccaagcgcagacgcaaggcggcgtcttccgggaagaagcccaagccgacgcccaagcaggccaaaccggccgtggcggggatgaagaagaagggggagaccgagaagacggagcccgttgtggacgacgtgtgcgccgaggagcccgacgaggaggagttggccatgggcgaggaggaggcggaggccgaggagcaggccatgcaggaggtggtggccgcggtcgcggccgggtcgcccggtaagaagagggtggggagaaggagcgccgccgcctcgggcgaccacgtgcccgagttcatcggcagccccgttgctgcggccgaggcgcacagcaactggcccaagcgctacgagcgcagcactgccgcaaataaaccggaggaggacgatgagctcaaggccaggtgccactaccggagcgctaaggtggacaacattgtctactgcctcggggatgacgtttatgtcaaggctggagaaaatgaggctgattacattggtcgcattactgaattttttgagggcactgatcgatgccactattttacttgccgttggtttttccgtgcagaggacacggtcatcaattcgttggtgtcgattaatgttgatggccacaagcatgaccctagacgtgtttttctttccgaggaaaagaatgacaatgtgcttgattgcatcatctccaaggtcaagatagtccatgttgatccaaatatggatccaaaagctaaggcccaactgatagaacattgtgacctatactatgacatgtcttactctgttgcatattctacatttgctaatatctcatcagaaaatgggcagtcaggcagtgaaaccgcttcgggtatttcttctgatgatgcgggtttggagacgtcatctaatatgccagagaggacagcaacccttcttgacttgtattcgggctgtgggggcatgtccactggtctttgcttgggtgctgctctttctggcctgaaacttgaaactcgatgggctgttgatcttaacagttttgcgtgccaaagtttaaaatacaatcatccacagactgaggtgcgaaatgagaaagctgatgagtttcttgctctccttaaggaatgggcagtcttatgtgaaaaatatgttcatcaagacgtggattcgaatttagcaggttcagaggatcaagaggatgctgacactcttgacaaggatgaatttgttgtacagaagcttattggaatacgctatgatggcactggaaggaaaaaaggcgtatattttaaggtccaatgggaaggatatggtcctgaagaggatacatgggaacctattgataacctgagtgactgtccgctgaaaattagagaatttgtacaagaagggcgcaaaagaaaaattctcccgcttcctggtgatgttgatgtcatttgtggaggcccaccatgtcaaggtataagtgggtttaatcggttcaggaaccgtgatgagccacttaaagatgagaaaaacaagcaaatggtgactttcatggatattgtggcatacttgaagcccaagtatgttctcatggaaaatgtcgtggacatactgaaatttgctgatggctacctaggaaaatatgctttgagctgcctagttgctatgaagtaccaagcacgccttggaatgatggtggcaggctgctatggtctgccacagttcaggatgcgtgtgttcctctggggtgctctttcttccatggtgctccctaagtatcctctgcctacatatgacgttgtagtacgtggaggagcacctaatgccttttcgcaatgtatggttgcatatgatgagacacaaaggccatccctgaagaaagctttgcttcttggtgatgcattttcagatttaccaaaggtcgaaaaccatcaacctaacgatgtaatggagtatggtggttcccccaagacagagttccagcgctacattcgacttggtcgtaaagacatgttggattggtcgtttggtgaggaggctggtccagatgaaggcaagctcttggatcaccagcccttacggcttaacaatgatgattatgagcgggttaagcaaattcctgtcaagaagggagccaacttccgtgacctaaagggtgtcaaggttggagcaaataatgttgttgagtgggatccagaagtcgaacgtgtgtacctttcgtctgggaaaccactggttcctgactatgcgatgtcattcatcaagggcaaatcactcaagccattcgggcgcctgtggtgggacgagacggttcctacagttgtgaccagagcagagcctcataaccaggttatattgcatccgactcaagcaagagtcttgactatccgggagaacgcaaggttacagggcttccccgattactaccgattgtttggaccgatcaaggagaagtatattcaagtcgggaacgcagtggcagtccctgttgcacgggcactgggctactgtctgggtcaagcctacctgggtgaatctgacgggagtcagcctctgtaccagctgcctgcaagttttacctctgtggggcgaaccgcggttcaggcgaatgccgtttctgttggcactcctgcgggggaggtagtcgagcagtaaaaggatagcggagcaaccctgggtgtactcgagctcgagtgcttgttgtactgtaggttgaggtttctcatccattggcctgcctatttgtggatgacgtttcatttcagattagcaatgtgcttatttaaggtttcgtcatgtacctgtattctacaatccactattgtttccaaagacagcatttgatccttgttcaacgcgagcagattttcgtccaccaaagctgtgtagggatcgaaatgtcaacaatgaattgagtcattcaatcatttgtctaatgttaatgtgtcctttgcatttattttttt

SEQ ID NO: 19391 - DNA, 3234 bp, Zea Mays
cctgtttccacatttgaccgatcctcttcgattcgatttctacacccccagagcttgccaaacccctcgtctcccaaccctagagagcagcagcagcagcagcagctaccgcatcccttgccatggcgccaagctccccgtcatccgctaggcccacgcgcgcctccggccggaagcgctccgccatggccgaggagatccaccagaaccaggaggaggaggaggaggttgtggctgcgtccaccgccaagcgcagacgcaaggcggcgtcttccgggaagaagcccaagccgacgcccaagcaggccaaaccggccgtggcggggatgaagaagaagggggagaccgagaagacggagcccgttgtggacgacgtgtgcgccgaggagcccgacgaggaggagttggccatgggcgaggaggaggcggaggccgaggagcaggccatgcaggaggtggtggccgcggtcgcggccgggtcgcccggtaagaagagggtggggagaaggagcgccgccgcctcgggcgaccacgtgcccgagttcatcggcagccccgttgctgcggccgaggcgcacagcaactggcccaagcgctacgagcgcagcactgccgcaaataaaccggaggaggacgatgagctcaaggccaggtgccactaccggagcgctaaggtggacaacattgtctactgcctcggggatgacgtttatgtcaaggctggagaaaatgaggctgattacattggtcgcattactgaattttttgagggcactgatcgatgccactattttacttgccgttggtttttccgtgcagaggacacgcatgaccctagacgtgtttttctttccgaggaaaagaatgacaatgtgcttgattgcatcatctccaaggtcaagatagtccatgttgatccaaatatggatccaaaagctaaggcccaactgatagaacattgtgacctatactatgacatgtcttactctgttgcatattctacatttgctaatatctcatcagaaaatgggcagtcaggcagtgaaaccgcttcgggtatttcttctgatgatgcgggtttggagacgtcatctaatatgccagagaggacagcaacccttcttgacttgtattcgggctgtgggggcatgtccactggtctttgcttgggtgctgctctttctggcctgaaacttgaaactcgatgggctgttgatcttaacagttttgcgtgccaaagtttaaaatacaatcatccacagactgaggtgcgaaatgagaaagctgatgagtttcttgctctccttaaggaatgggcagtcttatgtgaaaaatatgttcatcaagacgtggattcgaatttagcaggttcagaggatcaagaggatgctgacactcttgacaaggatgaatttgttgtacagaagcttattggaatacgctatgatggcactggaaggaaaaaaggcgtatattttaaggtccaatgggaaggatatggtcctgaagaggatacatgggaacctattgataacctgagtgactgtccgctgaaaattagagaatttgtacaagaagggcgcaaaagaaaaattctcccgcttcctggtgatgttgatgtcatttgtggaggcccaccatgtcaaggtataagtgggtttaatcggttcaggaaccgtgatgagccacttaaagatgagaaaaacaagcaaatggtgactttcatggatattgtggcatacttgaagcccaagtatgttctcatggaaaatgtcgtggacatactgaaatttgctgatggctacctaggaaaatatgctttgagctgcctagttgctatgaagtaccaagcacgccttggaatgatggtggcaggctgctatggtctgccacagttcaggatgcgtgtgttcctctggggtgctctttcttccatggtgctccctaagtatcctctgcctacatatgacgttgtagtacgtggaggagcacctaatgccttttcgcaatgtatggttgcatatgatgagacacaaaggccatccctgaagaaagctttgcttcttggtgatgcattttcagatttaccaaaggtcgaaaaccatcaacctaacgatgtaatggagtatggtggttcccccaagacagagttccagcgctacattcgacttggtcgtaaagacatgttggattggtcgtttggtgaggaggctggtccagatgaaggcaagctcttggatcaccagcccttacggcttaacaatgatgattatgagcgggttaagcaaattcctgtcaagaagggagccaacttccgtgacctaaagggtgtcaaggttggagcaaataatgttgttgagtgggatccagaagtcgaacgtgtgtacctttcgtctgggaaaccactggttcctgactatgcgatgtcattcatcaagggcaaatcactcaagccattcgggcgcctgtggtgggacgagacggttcctacagttgtgaccagagcagagcctcataaccaggttatattgcatccgactcaagcaagagtcttgactatccgggagaacgcaaggttacagggcttccccgattactaccgattgtttggaccgatcaaggagaagtatattcaagtcgggaacgcagtggcagtccctgttgcacgggcactgggctactgtctgggtcaagcctacctgggtgaatctgacgggagtcagcctctgtaccagctgcctgcaagttttacctctgtggggcgaaccgcggttcaggcgaatgccgtttctgttggcactcctgcgggggaggtagtcgagcagtaaaaggatagcggagcaaccctggttggtattttgattcgagcccatccagtagcatgtttaccaataaataatcattggtcgtgctgattcttatggttggagatgaatgtatgtagggtgtactcgagctcgagtgcttgttgtactgtaggttgaggtttctcatccattggcctgcctatttgtggatgacgtttcatttcagattagcaatgtgcttatttaaggtttcgtcatgtacctgtattctacaatccactattgtttccaaagacagcatttgatccttgttcaacgcgagcagattttcgtccaccaaagctgtgtagggatcgaaatgtcaacaatgaattgagtcattcaatcatttgtctaatgttaatgtgtcctttgcatttattttttt

SEQ ID NO: 19392 - DNA, 3243 bp, Zea Mays
atttgaccgatcctcttcgattcgatttctacacccccagagcttgccaaacccctcgtctcccaaccctagagagcagcagcagcagcagcagctaccgcatcccttgccatggcgccaagctccccgtcatccgctaggcccacgcgcgcctccggccggaagcgctccgccatggccgaggagatccaccagaaccaggaggaggaggaggaggttgtggctgcgtccaccgccaagcgcagacgcaaggcggcgtcttccgggaagaagcccaagccgacgcccaagcaggccaaaccggccgtggcggggatgaagaagaagggggagaccgagaagacggagcccgttgtggacgacgtgtgcgccgaggagcccgacgaggaggagttggccatgggcgaggaggaggcggaggccgaggagcaggccatgcaggaggtggtggccgcggtcgcggccgggtcgcccggtaagaagagggtggggagaaggagcgccgccgcctcgggcgaccacgtgcccgagttcatcggcagccccgttgctgcggccgaggcgcacagcaactggcccaagcgctacgagcgcagcactgccgcaaataaaccggaggaggacgatgagctcaaggccaggtgccactaccggagcgctaaggtggacaacattgtctactgcctcggggatgacgtttatgtcaaggctggagaaaatgaggctgattacattggtcgcattactgaattttttgagggcactgatcgatgccactattttacttgccgttggtttttccgtgcagaggacacggtcatcaattcgttggtgtcgattaatgttgatggccacaagcatgaccctagacgtgtttttctttccgaggaaaagaatgacaatgtgcttgattgcatcatctccaaggtcaagatagtccatgttgatccaaatatggatccaaaagctaaggcccaactgatagaacattgtgacctatactatgacatgtcttactctgttgcatattctacatttgctaatatctcatcagaaaatgggcagtcaggcagtgaaaccgcttcgggtatttcttctgatgatgcgggtttggagacgtcatctaatatgccagagaggacagcaacccttcttgacttgtattcgggctgtgggggcatgtccactggtctttgcttgggtgctgctctttctggcctgaaacttgaaactcgatgggctgttgatcttaacagttttgcgtgccaaagtttaaaatacaatcatccacagactgaggtgcgaaatgagaaagctgatgagtttcttgctctccttaaggaatgggcagtcttatgtgaaaaatatgttcatcaagacgtggattcgaatttagcaggttcagaggatcaagaggatgctgacactcttgacaaggatgaatttgttgtacagaagcttattggaatacgctatgatggcactggaaggaaaaaaggcgtatattttaaggtccaatgggaaggatatggtcctgaagaggatacatgggaacctattgataacctgagtgactgtccgctgaaaattagagaatttgtacaagaagggcgcaaaagaaaaattctcccgcttcctggtgatgttgatgtcatttgtggaggcccaccatgtcaaggtataagtgggtttaatcggttcaggaaccgtgatgagccacttaaagatgagaaaaacaagcaaatggtgactttcatggatattgtggcatacttgaagcccaagtatgttctcatggaaaatgtcgtggacatactgaaatttgctgatggctacctaggaaaatatgctttgagctgcctagttgctatgaagtaccaagcacgccttggaatgatggtggcaggctgctatggtctgccacagttcaggatgcgtgtgttcctctggggtgctctttcttccatggtgctccctaagtatcctctgcctacatatgacgttgtagtacgtggaggagcacctaatgccttttcgcaatgtatggttgcatatgatgagacacaaaggccatccctgaagaaagctttgcttcttggtgatgcattttcagatttaccaaaggtcgaaaaccatcaacctaacgatgtaatggagtatggtggttcccccaagacagagttccagcgctacattcgacttggtcgtaaagacatgttggattggtcgtttggtgaggaggctggtccagatgaaggcaagctcttggatcaccagcccttacggcttaacaatgatgattatgagcgggttaagcaaattcctgtcaagaagggagccaacttccgtgacctaaagggtgtcaaggttggagcaaataatgttgttgagtgggatccagaagtcgaacgtgtgtacctttcgtctgggaaaccactggttcctgactatgcgatgtcattcatcaagggcaaatcactcaagccattcgggcgcctgtggtgggacgagacggttcctacagttgtgaccagagcagagcctcataaccagcaagagtcttgactatccgggagaacgcaaggttacagggcttccccgattactaccgattgtttggaccgatcaaggagaagtatattcaagtcgggaacgcagtggcagtccctgttgcacgggcactgggctactgtctgggtcaagcctacctgggtgaatctgacgggagtcagcctctgtaccagctgcctgcaagttttacctctgtggggcgaaccgcggttcaggcgaatgccgtttctgttggcactcctgcgggggaggtagtcgagcagtaaaaggatagcggagcaaccctggttggtattttgattcgagcccatccagtagcatgtttaccaataaataatcattggtcgtgctgattcttatggttggagatgaatgtatgtagggtgtactcgagctcgagtgcttgttgtactgtaggttgaggtttctcatccattggcctgcctatttgtggatgacgtttcatttcagattagcaatgtgcttatttaaggtttcgtcatgtacctgtattctacaatccactattgtttccaaagacagcatttgatccttgttcaacgcgagcagattttcgtccaccaaagctgtgtagggatcgaaatgtcaacaatgaattgagtcattcaatcatttgtctaatgttaatgtgtcctttgcatttattttttt

SEQ ID NO: 19393 - DNA, 3256 bp, Zea Mays
cctcgtctcccaaccctagagagcagcagcagcagcagcagctaccgcatcccttgccatggcgccaagctccccgtcatccgctaggcccacgcgcgcctccggccggaagcgctccgccatggccgaggagatccaccagaaccaggaggaggaggaggaggttgtggctgcgtccaccgccaagcgcagacgcaaggcggcgtcttccgggaagaagcccaagccgacgcccaagcaggccaaaccggccgtggcggggatgaagaagaagggggagaccgagaagacggagcccgttgtggacgacgtgtgcgccgaggagcccgacgaggaggagttggccatgggcgaggaggaggcggaggccgaggagcaggccatgcaggaggtggtggccgcggtcgcggccgggtcgcccggtaagaagagggtggggagaaggagcgccgccgcctcgggcgaccacgtgcccgagttcatcggcagccccgttgctgcggccgaggcgcacagcaactggcccaagcgctacgagcgcagcactgccgcaaataaaccggaggaggacgatgagctcaaggccaggtgccactaccggagcgctaaggtggacaacattgtctactgcctcggggatgacgtttatgtcaaggctggagaaaatgaggctgattacattggtcgcattactgaattttttgagggcactgatcgatgccactattttacttgccgttggtttttccgtgcagaggacacggtcatcaattcgttggtgtcgattaatgttgatggccacaagcatgaccctagacgtgtttttctttccgaggaaaagaatgacaatgtgcttgattgcatcatctccaaggtcaagatagtccatgttgatccaaatatggatccaaaagctaaggcccaactgatagaacattgtgacctatactatgacatgtcttactctgttgcatattctacatttgctaatatctcatcagaaaatgggcagtcaggcagtgaaaccgcttcgggtatttcttctgatgatgcgggtttggagacgtcatctaatatgccagagaggacagcaacccttcttgacttgtattcgggctgtgggggcatgtccactggtctttgcttgggtgctgctctttctggcctgaaacttgaaactcgatgggctgttgatcttaacagttttgcgtgccaaagtttaaaatacaatcatccacagactgaggttcagaggatcaagaggatgctgacactcttgacaaggatgaatttgttgtacagaagcttattggaatacgctatgatggcactggaaggaaaaaaggcgtatattttaaggtccaatgggaaggatatggtcctgaagaggatacatgggaacctattgataacctgagtgactgtccgctgaaaattagagaatttgtacaagaagggcgcaaaagaaaaattctcccgcttcctggtgatgttgatgtcatttgtggaggcccaccatgtcaaggtataagtgggtttaatcggttcaggaaccgtgatgagccacttaaagatgagaaaaacaagcaaatggtgactttcatggatattgtggcatacttgaagcccaagtatgttctcatggaaaatgtcgtggacatactgaaatttgctgatggctacctaggaaaatatgctttgagctgcctagttgctatgaagtaccaagcacgccttggaatgatggtggcaggctgctatggtctgccacagttcaggatgcgtgtgttcctctggggtgctctttcttccatggtgctccctaagtatcctctgcctacatatgacgttgtagtacgtggaggagcacctaatgccttttcgcaatgtatggttgcatatgatgagacacaaaggccatccctgaagaaagctttgcttcttggtgatgcattttcagatttaccaaaggtcgaaaaccatcaacctaacgatgtaatggagtatggtggttcccccaagacagagttccagcgctacattcgacttggtcgtaaagacatgttggattggtcgtttggtgaggaggctggtccagatgaaggcaagctcttggatcaccagcccttacggcttaacaatgatgattatgagcgggttaagcaaattcctgtcaagaagggagccaacttccgtgacctaaagggtgtcaaggttggagcaaataatgttgttgagtgggatccagaagtcgaacgtgtgtacctttcgtctgggaaaccactggtatgtgctgttcattgctgttgtttccacaacaatgcaacatttatgctacatgttcaaacttaaaacagatgagatggtgcaagtactgtgagattcatggttaagacatgctaagttattgcacaaatctttgtcatctaggttcctgactatgcgatgtcattcatcaagggcaaatcactcaagccattcgggcgcctgtggtgggacgagacggttcctacagttgtgaccagagcagagcctcataaccaggttatattgcatccgactcaagcaagagtcttgactatccgggagaacgcaaggttacagggcttccccgattactaccgattgtttggaccgatcaaggagaagtatattcaagtcgggaacgcagtggcagtccctgttgcacgggcactgggctactgtctgggtcaagcctacctgggtgaatctgacgggagtcagcctctgtaccagctgcctgcaagttttacctctgtggggcgaaccgcggttcaggcgaatgccgtttctgttggcactcctgcgggggaggtagtcgagcagtaaaaggatagcggagcaaccctggttggtattttgattcgagcccatccagtagcatgtttaccaataaataatcattggtcgtgctgattcttatggttggagatgaatgtatgtagggtgtactcgagctcgagtgcttgttgtactgtaggttgaggtttctcatccattggcctgcctatttgtggatgacgtttcatttcagattagcaatgtgcttatttaaggtttcgtcatgtacctgtattctacaatccactattgtttccaaagacagcatttgatccttgttcaacgcgagcagattttcgtccaccaaagctgtgtagggatcgaaatgtcaacaatgaattgagtcattcaatcatttgtctaatgttaatgtgtcctttgcatttattttttt

SEQ ID NO: 19394 - DNA, 2567 bp, Zea Mays
aggagtacaagttaacctaaactaacatattagctataaagtctacaaagaggataattcacattcactttaccatttaaaaagcaaaatagagtgctgaaccggtattgctctgactcaacatagggtgggagcagagagagcagcacctcctgggtctaggccgctctcgcagagagagcagagagggcgaggggagctggccgatgttggacggtgatggatggcgggggcagggtggaggggagctcgcggaggcagggccactgactgctgcaggagagagggaagaggcaggggcgcagggcggctaacatcgctgccgcctagaggcagtgaagaggtaggggatctcgcgggaggcagggccgctgctgccacctggagatcccgaatcccgaccgccgccgcctggagctcccaaccgctgacgcctggagtgtttcgcgtcaaaatgggcagtcaggcagtgaaaccgcttcgggtatttcttctgatgatgcgggtttggagacgtcatctaatatgccagagaggacagcaacccttcttgacttgtattcgggctgtgggggcatgtccactggtctttgcttgggtgctgctctttctggcctgaaacttgaaactcgatgggctgttgatcttaacagttttgcgtgccaaagtttaaaatacaatcatccacagactgaggtgcgaaatgagaaagctgatgagtttcttgctctccttaaggaatgggcagtcttatgtgaaaaatatgttcatcaagacgtggattcgaatttagcaggttcagaggatcaagaggatgctgacactcttgacaaggatgaatttgttgtacagaagcttattggaatacgctatgatggcactggaaggaaaaaaggcgtatattttaaggtccaatgggaaggatatggtcctgaagaggatacatgggaacctattgataacctgagtgactgtccgctgaaaattagagaatttgtacaagaagggcgcaaaagaaaaattctcccgcttcctggtgatgttgatgtcatttgtggaggcccaccatgtcaaggtataagtgggtttaatcggttcaggaaccgtgatgagccacttaaagatgagaaaaacaagcaaatggtgactttcatggatattgtggcatacttgaagcccaagtatgttctcatggaaaatgtcgtggacatactgaaatttgctgatggctacctaggaaaatatgctttgagctgcctagttgctatgaagtaccaagcacgccttggaatgatggtggcaggctgctatggtctgccacagttcaggatgcgtgtgttcctctggggtgctctttcttccatggtgctccctaagtatcctctgcctacatatgacgttgtagtacgtggaggagcacctaatgccttttcgcaatgtatggttgcatatgatgagacacaaaggccatccctgaagaaagctttgcttcttggtgatgcattttcagatttaccaaaggtcgaaaaccatcaacctaacgatgtaatggagtatggtggttcccccaagacagagttccagcgctacattcgacttggtcgtaaagacatgttggattggtcgtttggtgaggaggctggtccagatgaaggcaagctcttggatcaccagcccttacggcttaacaatgatgattatgagcgggttaagcaaattcctgtcaagaagggagccaacttccgtgacctaaagggtgtcaaggttggagcaaataatgttgttgagtgggatccagaagtcgaacgtgtgtacctttcgtctgggaaaccactggttcctgactatgcgatgtcattcatcaagggcaaatcactcaagccattcgggcgcctgtggtgggacgagacggttcctacagttgtgaccagagcagagcctcataaccaggttatattgcatccgactcaagcaagagtcttgactatccgggagaacgcaaggttacagggcttccccgattactaccgattgtttggaccgatcaaggagaagtatattcaagtcgggaacgcagtggcagtccctgttgcacgggcactgggctactgtctgggtcaagcctacctgggtgaatctgacgggagtcagcctctgtaccagctgcctgcaagttttacctctgtggggcgaaccgcggttcaggcgaatgccgtttctgttggcactcctgcgggggaggtagtcgagcagtaaaaggatagcggagcaaccctgggtgtactcgagctcgagtgcttgttgtactgtaggttgaggtttctcatccattggcctgcctatttgtggatgacgtttcatttcagattagcaatgtgcttatttaaggtttcgtcatgtacctgtattctacaatccactattgtttccaaagacagcatttgatccttgttcaacgcgagcagattttcgtccaccaaagctgtgtagggatcgaaatgtcaacaatgaattgagtcattcaatcatttgtctaatgttaatgtgtcctttgcatttattttttt

SEQ ID NO: 19395 - DNA, 2215 bp, Zea Mays
ggggagctcgcggaggcagggccactgactgctgcaggagagagggaagaggcaggggcgcagggcggctaacatcgctgccgcctagaggcagtgaagaggtaggggatctcgcgggaggcagggccgctgctgccacctggagatcccgaatcccgaccgccgccgcctggagctcccaaccgctgacgcctggagtgtttcgcgtccgatgggctgttgatcttaacagttttgcgtgccaaagtttaaaatacaatcatccacagactgaggtgcgaaatgagaaagctgatgagtttcttgctctccttaaggaatgggcagtcttatgtgaaaaatatgttcatcaagacgtggattcgaatttagcaggttcagaggatcaagaggatgctgacactcttgacaaggatgaatttgttgtacagaagcttattggaatacgctatgatggcactggaaggaaaaaaggcgtatattttaaggtccaatgggaaggatatggtcctgaagaggatacatgggaacctattgataacctgagtgactgtccgctgaaaattagagaatttgtacaagaagggcgcaaaagaaaaattctcccgcttcctggtgatgttgatgtcatttgtggaggcccaccatgtcaaggtataagtgggtttaatcggttcaggaaccgtgatgagccacttaaagatgagaaaaacaagcaaatggtgactttcatggatattgtggcatacttgaagcccaagtatgttctcatggaaaatgtcgtggacatactgaaatttgctgatggctacctaggaaaatatgctttgagctgcctagttgctatgaagtaccaagcacgccttggaatgatggtggcaggctgctatggtctgccacagttcaggatgcgtgtgttcctctggggtgctctttcttccatggtgctccctaagtatcctctgcctacatatgacgttgtagtacgtggaggagcacctaatgccttttcgcaatgtatggttgcatatgatgagacacaaaggccatccctgaagaaagctttgcttcttggtgatgcattttcagatttaccaaaggtcgaaaaccatcaacctaacgatgtaatggagtatggtggttcccccaagacagagttccagcgctacattcgacttggtcgtaaagacatgttggattggtcgtttggtgaggaggctggtccagatgaaggcaagctcttggatcaccagcccttacggcttaacaatgatgattatgagcgggttaagcaaattcctgtcaagaagggagccaacttccgtgacctaaagggtgtcaaggttggagcaaataatgttgttgagtgggatccagaagtcgaacgtgtgtacctttcgtctgggaaaccactggttcctgactatgcgatgtcattcatcaagggcaaatcactcaagccattcgggcgcctgtggtgggacgagacggttcctacagttgtgaccagagcagagcctcataaccagagtcttgactatccgggagaacgcaaggttacagggcttccccgattactaccgattgtttggaccgatcaaggagaagtatattcaagtcgggaacgcagtggcagtccctgttgcacgggcactgggctactgtctgggtcaagcctacctgggtgaatctgacgggagtcagcctctgtaccagctgcctgcaagttttacctctgtggggcgaaccgcggttcaggcgaatgccgtttctgttggcactcctgcgggggaggtagtcgagcagtaaaaggatagcggagcaaccctggttggtattttgattcgagcccatccagtagcatgtttaccaataaataatcattggtcgtgctgattcttatggttggagatgaatgtatgtagggtgtactcgagctcgagtgcttgttgtactgtaggttgaggtttctcatccattggcctgcctatttgtggatgacgtttcatttcagattagcaatgtgcttatttaaggtttcgtcatgtacctgtattctacaatccactattgtttccaaagacagcatttgatccttgttcaacgcgagcagattttcgtccaccaaagctgtgtagggatcgaaatgtcaacaatgaattgagtcattcaatcatttgtctaatgttaatgtgtcctttgcatttattttttt

SEQ ID NO: 19396 - DNA, 2364 bp, Zea Mays
ctgactgctgcaggagagagggaagaggcaggggcgcagggcggctaacatcgctgccgcctagaggcagtgaagaggtaggggatctcgcgggaggcagggccgctgctgccacctggagatcccgaatcccgaccgccgccgcctggagctcccaaccgctgacgcctggagtgtttcgcgtcaaaatgggcagtcaggcagtgaaaccgcttcgggtatttcttctgatgatgcgggtttggagacgtcatctaatatgccagagaggacagcaacccttcttgacttgtattcgggctgtgggggcatgtccactggtctttgcttggcgatgggctgttgatcttaacagttttgcgtgccaaagtttaaaatacaatcatccacagactgaggtgcgaaatgagaaagctgatgagtttcttgctctccttaaggaatgggcagtcttatgtgaaaaatatgttcatcaagacgtggattcgaatttagcaggttcagaggatcaagaggatgctgacactcttgacaaggatgaatttgttgtacagaagcttattggaatacgctatgatggcactggaaggaaaaaaggcgtatattttaaggtccaatgggaaggatatggtcctgaagaggatacatgggaacctattgataacctgagtgactgtccgctgaaaattagagaatttgtacaagaagggcgcaaaagaaaaattctcccgcttcctggtgatgttgatgtcatttgtggaggcccaccatgtcaaggtataagtgggtttaatcggttcaggaaccgtgatgagccacttaaagatgagaaaaacaagcaaatggtgactttcatggatattgtggcatacttgaagcccaagtatgttctcatggaaaatgtcgtggacatactgaaatttgctgatggctacctaggaaaatatgctttgagctgcctagttgctatgaagtaccaagcacgccttggaatgatggtggcaggctgctatggtctgccacagttcaggatgcgtgtgttcctctggggtgctctttcttccatggtgctccctaagtatcctctgcctacatatgacgttgtagtacgtggaggagcacctaatgccttttcgcaatgtatggttgcatatgatgagacacaaaggccatccctgaagaaagctttgcttcttggtgatgcattttcagatttaccaaaggtcgaaaaccatcaacctaacgatgtaatggagtatggtggttcccccaagacagagttccagcgctacattcgacttggtcgtaaagacatgttggattggtcgtttggtgaggaggctggtccagatgaaggcaagctcttggatcaccagcccttacggcttaacaatgatgattatgagcgggttaagcaaattcctgtcaagaagggagccaacttccgtgacctaaagggtgtcaaggttggagcaaataatgttgttgagtgggatccagaagtcgaacgtgtgtacctttcgtctgggaaaccactggttcctgactatgcgatgtcattcatcaagggcaaatcactcaagccattcgggcgcctgtggtgggacgagacggttcctacagttgtgaccagagcagagcctcataaccaggttatattgcatccgactcaagcaagagtcttgactatccgggagaacgcaaggttacagggcttccccgattactaccgattgtttggaccgatcaaggagaagtatattcaagtcgggaacgcagtggcagtccctgttgcacgggcactgggctactgtctgggtcaagcctacctgggtgaatctgacgggagtcagcctctgtaccagctgcctgcaagttttacctctgtggggcgaaccgcggttcaggcgaatgccgtttctgttggcactcctgcgggggaggtagtcgagcagtaaaaggatagcggagcaaccctggttggtattttgattcgagcccatccagtagcatgtttaccaataaataatcattggtcgtgctgattcttatggttggagatgaatgtatgtagggtgtactcgagctcgagtgcttgttgtactgtaggttgaggtttctcatccattggcctgcctatttgtggatgacgtttcatttcagattagcaatgtgcttatttaaggtttcgtcatgtacctgtattctacaatccactattgtttccaaagacagcatttgatccttgttcaacgcgagcagattttcgtccaccaaagctgtgtagggatcgaaatgtcaacaatgaattgagtcattcaatcatttgtctaatgttaatgtgtcctttgcatttattttttt

SEQ ID NO: 19397 - DNA, 2239 bp, Zea Mays
aacatcgctgccgcctagaggcagtgaagaggtaggggatctcgcgggaggcagggccgctgctgccacctggagatcccgaatcccgaccgccgccgcctggagctcccaaccgctgacgcctggagtgtttcgcgtccgatgggctgttgatcttaacagttttgcgtgccaaagtttaaaatacaatcatccacagactgaggtgcgaaatgagaaagctgatgagtttcttgctctccttaaggaatgggcagtcttatgtgaaaaatatgttcatcaagacgtggattcgaatttagcaggttcagaggatcaagaggatgctgacactcttgacaaggatgaatttgttgtacagaagcttattggaatacgctatgatggcactggaaggaaaaaaggcgtatattttaaggtccaatgggaaggatatggtcctgaagaggatacatgggaacctattgataacctgagtgactgtccgctgaaaattagagaatttgtacaagaagggcgcaaaagaaaaattctcccgcttcctggtgatgttgatgtcatttgtggaggcccaccatgtcaaggtataagtgggtttaatcggttcaggaaccgtgatgagccacttaaagatgagaaaaacaagcaaatggtgactttcatggatattgtggcatacttgaagcccaagtatgttctcatggaaaatgtcgtggacatactgaaatttgctgatggctacctaggaaaatatgctttgagctgcctagttgctatgaagtaccaagcacgccttggaatgatggtggcaggctgctatggtctgccacagttcaggatgcgtgtgttcctctggggtgctctttcttccatggtgctccctaagtatcctctgcctacatatgacgttgtagtacgtggaggagcacctaatgccttttcgcaatgtatggttgcatatgatgagacacaaaggccatccctgaagaaagctttgcttcttggtgatgcattttcagatttaccaaaggcaagtgttttgtcaagttcaagtatttctcaatgtgcatgcagtcttacacttactcctctctgcaggtcgaaaaccatcaacctaacgatgtaatggagtatggtggttcccccaagacagagttccagcgctacattcgacttggtcgtaaagacatgttggattggtcgtttggtgaggaggctggtccagatgaaggcaagctcttggatcaccagcccttacggcttaacaatgatgattatgagcgggttaagcaaattcctgtcaagaagggagccaacttccgtgacctaaagggtgtcaaggttggagcaaataatgttgttgagtgggatccagaagtcgaacgtgtgtacctttcgtctgggaaaccactggttcctgactatgcgatgtcattcatcaagggcaaatcactcaagccattcgggcgcctgtggtgggacgagacggttcctacagttgtgaccagagcagagcctcataaccaggttatattgcatccgactcaagcaagagtcttgactatccgggagaacgcaaggttacagggcttccccgattactaccgattgtttggaccgatcaaggagaagtatattcaagtcgggaacgcagtggcagtccctgttgcacgggcactgggctactgtctgggtcaagcctacctgggtgaatctgacgggagtcagcctctgtaccagctgcctgcaagttttacctctgtggggcgaaccgcggttcaggcgaatgccgtttctgttggcactcctgcgggggaggtagtcgagcagtaaaaggatagcggagcaaccctggttggtattttgattcgagcccatccagtagcatgtttaccaataaataatcattggtcgtgctgattcttatggttggagatgaatgtatgtagggtgtactcgagctcgagtgcttgttgtactgtaggttgaggtttctcatccattggcctgcctatttgtggatgacgtttcatttcagattagcaatgtgcttatttaaggtttcgtcatgtacctgtattctacaatccactattgtttccaaagacagcatttgatccttgttcaacgcgagcagattttcgtccaccaaagctgtgtagggatcgaaatgtcaacaatgaattgagtcattcaatcatttgtctaatgttaatgtgtcctttgcatttattttttt

SEQ ID NO: 19398 - DNA, 1878 bp, Zea Mays
cctggagctcccaaccgctgacgcctggagtgtttcgcgtccgatgggctgttgatcttaacagttttgcgtgccaaagtttaaaatacaatcatccacagactgaggttcagaggatcaagaggatgctgacactcttgacaaggatgaatttgttgtacagaagcttattggaatacgctatgatggcactggaaggaaaaaaggcgtatattttaaggtccaatgggaaggatatggtcctgaagaggatacatgggaacctattgataacctgagtgactgtccgctgaaaattagagaatttgtacaagaagggcgcaaaagaaaaattctcccgcttcctggtgatgttgatgtcatttgtggaggcccaccatgtcaaggtataagtgggtttaatcggttcaggaaccgtgatgagccacttaaagatgagaaaaacaagcaaatggtgactttcatggatattgtggcatacttgaagcccaagtatgttctcatggaaaatgtcgtggacatactgaaatttgctgatggctacctaggaaaatatgctttgagctgcctagttgctatgaagtaccaagcacgccttggaatgatggtggcaggctgctatggtctgccacagttcaggatgcgtgtgttcctctggggtgctctttcttccatggtgctccctaagtatcctctgcctacatatgacgttgtagtacgtggaggagcacctaatgccttttcgcaatgtatggttgcatatgatgagacacaaaggccatccctgaagaaagctttgcttcttggtgatgcattttcagatttaccaaaggtcgaaaaccatcaacctaacgatgtaatggagtatggtggttcccccaagacagagttccagcgctacattcgacttggtcgtaaagacatgttggattggtcgtttggtgaggaggctggtccagatgaaggcaagctcttggatcaccagcccttacggcttaacaatgatgattatgagcgggttaagcaaattcctgtcaagaagggagccaacttccgtgacctaaagggtgtcaaggttggagcaaataatgttgttgagtgggatccagaagtcgaacgtgtgtacctttcgtctgggaaaccactggttcctgactatgcgatgtcattcatcaagggcaaatcactcaagccattcgggcgcctgtggtgggacgagacggttcctacagttgtgaccagagcagagcctcataaccaggttatattgcatccgactcaagcaagagtcttgactatccgggagaacgcaaggttacagggcttccccgattactaccgattgtttggaccgatcaaggagaagtatattcaagtcgggaacgcagtggcagtccctgttgcacgggcactgggctactgtctgggtcaagcctacctgggtgaatctgacgggagtcagcctctgtaccagctgcctgcaagttttacctctgtggggcgaaccgcggttcaggcgaatgccgtttctgttggcactcctgcgggggaggtagtcgagcagtaaaaggatagcggagcaaccctgggtgtactcgagctcgagtgcttgttgtactgtaggttgaggtttctcatccattggcctgcctatttgtggatgacgtttcatttcagattagcaatgtgcttatttaaggtttcgtcatgtacctgtattctacaatccactattgtttccaaagacagcatttgatccttgttcaacgcgagcagattttcgtccaccaaagctgtgtagggatcgaaatgtcaacaatgaattgagtcattcaatcatttgtctaatgttaatgtgtcctttgcatttattttttt

SEQ ID NO: 19399 - DNA, 1304 bp, Zea Mays
gagctcccaaccgctgacgcctggagtgtttcgcgtccgatgggctgttgatcttaacagttttgcgtgccaaagtttaaaatacaatcatccacagactgaggtgcgaaatgagaaagctgatgagtttcttgctctccttaaggaatgggcagtcttatgtgaaaaatatgttcatcaagacgtggattcgaatttagcaggttcagaggatcaagaggatgctgacactcttgacaaggatgaatttgttgtacagaagcttattggaatacgctatgatggcactggaaggaaaaaaggcgtatattttaaggtccaatgggaaggatatggtcctgaagaggatacatgggaacctattgataacctgagtgactgtccgctgaaaattagagaatttgtacaagaagggcgcaaaagaaaaattctcccgcttcctggtgatgttgatgtcatttgtggaggcccaccatgtcaaggtataagtgggtttaatcggttcaggaaccgtgatgagccacttaaagatgagaaaaacaagcaaatggtgactttcatggatattgtggcatacttgaagcccaagtatgttctcatggaaaatgtcgtggacatactgaaatttgctgatggctacctaggaaaatatgctttgagctgcctagttgctatgaagtaccaagcacgccttggaatgatggtggcaggctgctatggtctgccacagttcaggatgcgtgtgttcctctggggtgctctttcttccatggtgctccctaagtatcctctgcctacatatgacgttgtagtacgtggaggagcacctaatgccttttcgcaatgtatggttgcatatgatgagacacaaaggccatccctgaagaaagctttgcttcttggtgatgcattttcagatttaccaaaggtcgaaaaccatcaacctaacgatgtaatggagtatggtggttcccccaagacagagttccagcgctacattcgacttggtcgtaaagacatgttggattggtcgtttggtgaggaggctggtccagatgaaggcaagctcttggatcaccagcccttacggcttaacaatgatgattatgagcgggttaagcaaattcctgtcaagaagggagccaacttccgtgacctaaagggtgtcaaggttggagcaaataatgttgttgagtgggatccagaagtcgaacgtgtgtacctttcgtctgggaaaccactgatgagatggtgcaagtactgtgagattcatggttaagacatgctaagttattgcacaaatc

SEQ ID NO: 19400 - DNA, 3551 bp, Zea Mays
ttttttttgtactagaccggatggctgacagtgacttgccatgtcatatggcagcatcagcactcgccgtggtttttacagtccggtactccggtctacagccagccataaacaccagcagtccccggccagcaagaagatgcacaaaacttctctgatctctctctcggtccctcgtcccctcggacccctccggcctccctatcatcttcttcctctctgttctccttgtctataagtaatgacaaacctgcaatcatccataaccgaaggcaaaagctctttgtcatttaattctagaccgaattcgtgggggcgccccacctgcctgcctgcctccgctccttgtccttgctgtgcctagacatctgcttctcctcatctcctgtcagtatttcttgccttgttttgctccactcggttgggtattgatgctgtcgcttcctccagtctgcacctcaacttctcgtcttccttctcctcgcgcagctctcgtgcttcgccttttcggagacggtcgtggcgccagcggcgttaaaattcgatttccggcgagcttgtcggaggaaaagttggttttttttttggttgggattgctcgtggctacaggaaaccgtggcccatttctgcttcttgatttcggtccgtgctgttagtttggcgtgatttttggccactaaactgttggaccgaagattccattttcgtttcttgcaaacaccaaagcggtgctagtggggagatttggctacaaggcttggtgtttgcaaacaccaagaagtcaagaaccgaatgcaccggcgctggtgacgagattcgaatccattttgagtgtgagatcaagcacctgtgaactctgaataccggttctaaagacaagattttccattcgaggaactgtcgctgaggggagatgagctcaatggcatcgctgtcagaaagtgagctgacaaaccggggaagcatgtgggagctagatcagaaccttgatcaacccatggatgaggaggcaggcaggctgaagaatatgtacagagaaaagaagttctcatcagctttgttactacggttggcatttcagagccttggggtggtctttggtgacttgggcacgtcacctttatatgtgttctataatatatttcctcgtggaataggtgagggtgaggatgaggatgttattggagctctttccttgattatttacaccctcactttcataccgcttctgaagtacgtttttgttgtcttgagggcaaatgacaacggtcaaggcggtacatttgctctttattccctgttatgccgtcatgcaaagatcaacaccatacctaatcaacacaggaccgatgaggaattaacgacgtatagccggcaaacatatgaagagaattcagttgcagcaaaaataaagagatggatagagtcacatgcatataagagaaacattcttcttgttcttgttttaattggtacttgtacagcaattggagatggaatccttacgcctgctatatctgttctttctgcatcaggtggcattagggtccagaatcagaatatgagcaccgatgttgttgtgctcgtcgccgtggtcatcttaattggattatttagcatgcaacactatggaacagataaagtgggactgctctttgcaccgatagttctcctatggttcatcttaattggaagcgtcggagctataaacatacacaagtataataactctgtgctaagagcatacaacccgatatctatataccgttttttccaacggagaagaaattatgacatatggacgtctcttggaggaatcatgcttagcatcacggattgctttcaccttgattgtgtttccatgccttctactggcgtacacaggacaggctgcctacataatttccaacaaaacacatgtggctgacgccttctatcgatcaattccagatgccatatactggcccgcctttgtcatagcaactgctgcagcaattgttgcaagtcaagctaccatatctgcaacctactcaatcataaagcaagctcttgcacttggttgcttcccccgcgtgaagatagtccacacctcgaagaaattccttgggcagatttacatgcctgacatcaattggatccttctggttctctgcattgccgtgactgcaggattcaagaaccagagccagataggaaatgcatatggtactgctgtggttatagtgatgctagttaccacattcctgatggtgccaataatgctgctggtatggaagagccactggatcctcgtggtgaccttcatcgtgctgtcgctcatggtggaggttccctacttcgtggcctgcatactgaagatcgaccagggtggctgggtcccactcgtcgtggcgacggccttcttcctcatcatgtacgtgtggcacttctgcacggtgaagcggtacgagttcgagatgcacagcaaggtgtccatggcgtggatcctggggctgggcccgagcctgggcctggtgagggtcccagggatcggcttcgtgtacacggagctggcgagcggcgtgccgcacatcttctcccacttcatcaccaacctccccgcgatccactcggtggtggtgttcgtctgcgtcaagtacctccccgtgtacaccgtgccgacggaggagcggttcctggtgcggaggatcgggcccaggagcttccacatgttccggtgcgtggcgaggtacgggtacaaggacctgcacaagagggacgaggacttcgagaaggtgctgttcgactgcgtcctcttcttcgtccggctggagagcatgatggagggctactccgactcggatgagttcagcgtgccggagcaggcgcccggcatcggccgcgcggcgttcttgagcgtgggcgagcggacctgcgcgactgtgtgctccagcggtgatctgagcttctcgtcacaggactcggtcgtgcccgccgccgcgcagtcgtcccgagcgccgacggggctgcgggtgctgcactactcggcgtcggcgtcggcggcggggcagggcagcagcggcggaacggtgggcgacgagctggagttcctgaaccggtgcaaggacgccggcgtggtgcacatcctcgggaacaccatcgtgcgcgcgcggcgggattcgggcgtcgtgaagaagctcgccgttgactacatgtacgctttcatgaggagggtgtgcagggagaacagcgtcatcttcaacgtgccccatgagagcctgctcaatgtcgggcagatattctacatctgaatatctgtctgatgagagatagatagccttgttcttcgtccttttgtgtcccgggtacggtaggatatgtacactattgtcttgtatcgtacacttgtacagaataaaacagtgagcttttagtggggccgtgggggtgacaaccgacaaggcgagtggcgtgcgacgcccggtgtgtcctctgtaaaaaaacaggataattgtgatttagacccgattagaaactctaaaactaataattagctgctgaaattagtttt

SEQ ID NO: 19401 - DNA, 3290 bp, Zea Mays
ctctcggtccctcgtcccctcggacccctccggcctccctatcatcttcttcctctctgttctccttgtctataagtaatgacaaacctgcaatcatccataaccgaaggcaaaagctctttgtcatttaattctagaccgaattcgtgggggcgccccacctgcctgcctgcctccgctccttgtccttgctgtgcctagacatctgcttctcctcatctcctctctcgtgcttcgccttttcggagacggtcgtggcgccagcggcgttaaaattcgatttccggcgagcttgtcggaggaaaagttggttttttttttggttgggattgctcgtggctacaggaaaccgtggcccatttctgcttcttgatttcggtccgtgctgttagtttggcgtgatttttggccactaaactgttggaccgaagattccattttcgtttcttgcaaacaccaaagcggtgctagtggggagatttggctacaaggcttggtgtttgcaaacaccaagaagtcaagaaccgaatgcaccggcgctggtgacgagattcgaatccattttgagtgtgagatcaagcacctgtgaactctgaataccggttctaaagacaagattttccattcgaggaactgtcgctgaggggagatgagctcaatggcatcgctgtcagaaagtgagctgacaaaccggggaagcatgtgggagctagatcagaaccttgatcaacccatggatgaggaggcaggcaggctgaagaatatgtacagagaaaagaagttctcatcagctttgttactacggttggcatttcagagccttggggtggtctttggtgacttgggcacgtcacctttatatgtgttctataatatatttcctcgtggaataggtgagggtgaggatgaggatgttattggagctctttccttgattatttacaccctcactttcataccgcttctgaagtacgtttttgttgtcttgagggcaaatgacaacggtcaaggcggtacatttgctctttattccctgttatgccgtcatgcaaagatcaacaccatacctaatcaacacaggaccgatgaggaattaacgacgtatagccggcaaacatatgaagagaattcagttgcagcaaaaataaagagatggatagagtcacatgcatataagagaaacattcttcttgttcttgttttaattggtacttgtacagcaattggagatggaatccttacgcctgctatatctgttctttctgcatcaggtggcattagggtccagaatcagaatatgagcaccgatgttgttgtgctcgtcgccgtggtcatcttaattggattatttagcatgcaacactatggaacagataaagtgggactgctctttgcaccgatagttctcctatggttcatcttaattggaagcgtcggagctataaacatacacaagtataataactctgtgctaagagcatacaacccgatatctatataccgttttttccaacggagaagaaattatgacatatggacgtctcttggaggaatcatgcttagcatcacgggaaccgaagcgttatttgctgatctctgtcactttcctgtattggcaattcaggacaggctgcctacataatttccaacaaaacacatgtggctgacgccttctatcgatcaattccagatgccatatactggcccgcctttgtcatagcaactgctgcagcaattgttgcaagtcaagctaccatatctgcaacctactcaatcataaagcaagctcttgcacttggttgcttcccccgcgtgaagatagtccacacctcgaagaaattccttgggcagatttacatgcctgacatcaattggatccttctggttctctgcattgccgtgactgcaggattcaagaaccagagccagataggaaatgcatatggtactgctgtggttatagtgatgctagttaccacattcctgatggtgccaataatgctgctggtatggaagagccactggatcctcgtggtgaccttcatcgtgctgtcgctcatggtggaggttccctacttcgtggcctgcatactgaagatcgaccagggtggctgggtcccactcgtcgtggcgacggccttcttcctcatcatgtacgtgtggcacttctgcacggtgaagcggtacgagttcgagatgcacagcaaggtgtccatggcgtggatcctggggctgggcccgagcctgggcctggtgagggtcccagggatcggcttcgtgtacacggagctggcgagcggcgtgccgcacatcttctcccacttcatcaccaacctccccgcgatccactcggtggtggtgttcgtctgcgtcaagtacctccccgtgtacaccgtgccgacggaggagcggttcctggtgcggaggatcgggcccaggagcttccacatgttccggtgcgtggcgaggtacgggtacaaggacctgcacaagagggacgaggacttcgagaaggtgctgttcgactgcgtcctcttcttcgtccggctggagagcatgatggagggctactccgactcggatgagttcagcgtgccggagcaggcgcccggcatcggccgcgcggcgttcttgagcgtgggcgagcggacctgcgcgactgtgtgctccagcggtgatctgagcttctcgtcacaggactcggtcgtgcccgccgccgcgcagtcgtcccgagcgccgacggggctgcgggtgctgcactactcggcgtcggcgtcggcggcggggcagggcagcagcggcggaacggtgggcgacgagctggagttcctgaaccggtgcaaggacgccggcgtggtgcacatcctcgggaacaccatcgtgcgcgcgcggcgggattcgggcgtcgtgaagaagctcgccgttgactacatgtacgctttcatgaggagggtgtgcagggagaacagcgtcatcttcaacgtgccccatgagagcctgctcaatgtcgggcagatattctacatctgaatatctgtctgatgagagatagatagccttgttcttcgtccttttgtgtcccgggtacggtaggatatgtacactattgtcttgtatcgtacacttgtacagaataaaacagtgagcttttagtggggccgtgggggtgacaaccgacaaggcgagtggcgtgcgacgcccggtgtgtcctctgtaaaaaaacaggataattgtgatttagacccgattagaaactctaaaactaataattagctgctgaaattagtttt

SEQ ID NO: 19402 - DNA, 3339 bp, Zea Mays
ctctcggtccctcgtcccctcggacccctccggcctccctatcatcttcttcctctctgttctccttgtctataagtaatgacaaacctgcaatcatccataaccgaaggcaaaagctctttgtcatttaattctagaccgaattcgtgggggcgccccacctgcctgcctgcctccgctccttgtccttgctgtgcctagacatctgcttctcctcatctcctctctcgtgcttcgccttttcggagacggtcgtggcgccagcggcgttaaaattcgatttccggcgagcttgtcggaggaaaagttggttttttttttggttgggattgctcgtggctacaggaaaccgtggcccatttctgcttcttgatttcggtccgtgctgttagtttggcgtgatttttggccactaaactgttggaccgaagattccattttcgtttcttgcaaacaccaaagcggtgctagtggggagatttggctacaaggcttggtgtttgcaaacaccaagaagtcaagaaccgaatgcaccggcgctggtgacgagattcgaatccattttgagtgtgagatcaagcacctgtgaactctgaataccggttctaaagacaagattttccattcgaggaactgtcgctgaggggagatgagctcaatggcatcgctgtcagaaagtgagctgacaaaccggggaagcatgtgggagctagatcagaaccttgatcaacccatggatgaggaggcaggcaggctgaagaatatgtacagagaaaagaagttctcatcagctttgttactacggttggcatttcagagccttggggtggtctttggtgacttgggcacgtcacctttatatgtgttctataatatatttcctcgtggaataggtgagggtgaggatgaggatgttattggagctctttccttgattatttacaccctcactttcataccgcttctgaagtacgtttttgttgtcttgagggcaaatgacaacggtcaaggcggtacatttgctctttattccctgttatgccgtcatgcaaagatcaacaccatacctaatcaacacaggaccgatgaggaattaacgacgtatagccggcaaacatatgaagagaattcagttgcagcaaaaataaagagatggatagagtcacatgcatataagagaaacattcttcttgttcttgttttaattggtacttgtacagcaattggagatggaatccttacgcctgctatatctgttctttctgcatcaggtggcattagggtccagaatcagaatatgagcaccgatgttgttgtgctcgtcgccgtggtcatcttaattggattatttagcatgcaacactatggaacagataaagtgggactgctctttgcaccgatagttctcctatggttcatcttaattggaagcgtcggagctataaacatacacaagtataataactctgtgctaagagcatacaacccgatatctatataccgttttttccaacggagaagaaattatgacatatggacgtctcttggaggaatcatgcttagcatcacgggaaccgaagcgttatttgctgatctctgtcactttcctgtattggcaattcagattgctttcaccttgattgtgtttccatgccttctactggcgtacacaggacaggctgcctacataatttccaacaaaacacatgtggctgacgccttctatcgatcaattccagatgccatatactggcccgcctttgtcatagcaactgctgcagcaattgttgcaagtcaagctaccatatctgcaacctactcaatcataaagcaagctcttgcacttggttgcttcccccgcgtgaagatagtccacacctcgaagaaattccttgggcagatttacatgcctgacatcaattggatccttctggttctctgcattgccgtgactgcaggattcaagaaccagagccagataggaaatgcatatggtactgctgtggttatagtgatgctagttaccacattcctgatggtgccaataatgctgctggtatggaagagccactggatcctcgtggtgaccttcatcgtgctgtcgctcatggtggaggttccctacttcgtggcctgcatactgaagatcgaccagggtggctgggtcccactcgtcgtggcgacggccttcttcctcatcatgtacgtgtggcacttctgcacggtgaagcggtacgagttcgagatgcacagcaaggtgtccatggcgtggatcctggggctgggcccgagcctgggcctggtgagggtcccagggatcggcttcgtgtacacggagctggcgagcggcgtgccgcacatcttctcccacttcatcaccaacctccccgcgatccactcggtggtggtgttcgtctgcgtcaagtacctccccgtgtacaccgtgccgacggaggagcggttcctggtgcggaggatcgggcccaggagcttccacatgttccggtgcgtggcgaggtacgggtacaaggacctgcacaagagggacgaggacttcgagaaggtgctgttcgactgcgtcctcttcttcgtccggctggagagcatgatggagggctactccgactcggatgagttcagcgtgccggagcaggcgcccggcatcggccgcgcggcgttcttgagcgtgggcgagcggacctgcgcgactgtgtgctccagcggtgatctgagcttctcgtcacaggactcggtcgtgcccgccgccgcgcagtcgtcccgagcgccgacggggctgcgggtgctgcactactcggcgtcggcgtcggcggcggggcagggcagcagcggcggaacggtgggcgacgagctggagttcctgaaccggtgcaaggacgccggcgtggtgcacatcctcgggaacaccatcgtgcgcgcgcggcgggattcgggcgtcgtgaagaagctcgccgttgactacatgtacgctttcatgaggagggtgtgcagggagaacagcgtcatcttcaacgtgccccatgagagcctgctcaatgtcgggcagatattctacatctgaatatctgtctgatgagagatagatagccttgttcttcgtccttttgtgtcccgggtacggtaggatatgtacactattgtcttgtatcgtacacttgtacagaataaaacagtgagcttttagtggggccgtgggggtgacaaccgacaaggcgagtggcgtgcgacgcccggtgtgtcctctgtaaaaaaacaggataattgtgatttagacccgattagaaactctaaaactaataattagctgctgaaattagtttt

SEQ ID NO: 19403 - DNA, 3278 bp, Zea Mays
gttctccttgtctataagtaatgacaaacctgcaatcatccataaccgaaggcaaaagctctttgtcatttaattctagaccgaattcgtgggggcgccccacctgcctgcctgcctccgctccttgtccttgctgtgcctagacatctgcttctcctcatctcctctctcgtgcttcgccttttcggagacggtcgtggcgccagcggcgttaaaattcgatttccggcgagcttgtcggaggaaaagttggttttttttttggttgggattgctcgtggctacaggaaaccgtggcccatttctgcttcttgatttcggtccgtgctgttagtttggcgtgatttttggccactaaactgttggaccgaagattccattttcgtttcttgcaaacaccaaagcggtgctagtggggagatttggctacaaggcttggtgtttgcaaacaccaagaagtcaagaaccgaatgcaccggcgctggtgacgagattcgaatccattttgagtgtgagatcaagcacctgtgaactctgaataccggttctaaagacaagattttccattcgaggaactgtcgctgaggggagatgagctcaatggcatcgctgtcagaaagtgagctgacaaaccggggaagcatgtgggagctagatcagaaccttgatcaacccatggatgaggaggcaggcaggctgaagaatatgtacagagaaaagttctcatcagctttgttactacggttggcatttcagagccttggggtggtctttggtgacttgggcacgtcacctttatatgtgttctataatatatttcctcgtggaataggtgagggtgaggatgaggatgttattggagctctttccttgattatttacaccctcactttcataccgcttctgaagtacgtttttgttgtcttgagggcaaatgacaacggtcaaggcggtacatttgctctttattccctgttatgccgtcatgcaaagatcaacaccatacctaatcaacacaggaccgatgaggaattaacgacgtatagccggcaaacatatgaagagaattcagttgcagcaaaaataaagagatggatagagtcacatgcatataagagaaacattcttcttgttcttgttttaattggtacttgtacagcaattggagatggaatccttacgcctgctatatctgttctttctgcatcaggtggcattagggtccagaatcagaatatgagcaccgatgttgttgtgctcgtcgccgtggtcatcttaattggattatttagcatgcaacactatggaacagataaagtgggactgctctttgcaccgatagttctcctatggttcatcttaattggaagcgtcggagctataaacatacacaagtataataactctgtgctaagagcatacaacccgatatctatataccgttttttccaacggagaagaaattatgacatatggacgtctcttggaggaatcatgcttagcatcacgggaaccgaagcgttatttgctgatctctgtcactttcctgtattggcaattcagattgctttcaccttgattgtgtttccatgccttctactggcgtacacaggacaggctgcctacataatttccaacaaaacacatgtggctgacgccttctatcgatcaattccagatgccatatactggcccgcctttgtcatagcaactgctgcagcaattgttgcaagtcaagctaccatatctgcaacctactcaatcataaagcaagctcttgcacttggttgcttcccccgcgtgaagatagtccacacctcgaagaaattccttgggcagatttacatgcctgacatcaattggatccttctggttctctgcattgccgtgactgcaggattcaagaaccagagccagataggaaatgcatatggtactgctgtggttatagtgatgctagttaccacattcctgatggtgccaataatgctgctggtatggaagagccactggatcctcgtggtgaccttcatcgtgctgtcgctcatggtggaggttccctacttcgtggcctgcatactgaagatcgaccagggtggctgggtcccactcgtcgtggcgacggccttcttcctcatcatgtacgtgtggcacttctgcacggtgaagcggtacgagttcgagatgcacagcaaggtgtccatggcgtggatcctggggctgggcccgagcctgggcctggtgagggtcccagggatcggcttcgtgtacacggagctggcgagcggcgtgccgcacatcttctcccacttcatcaccaacctccccgcgatccactcggtggtggtgttcgtctgcgtcaagtacctccccgtgtacaccgtgccgacggaggagcggttcctggtgcggaggatcgggcccaggagcttccacatgttccggtgcgtggcgaggtacgggtacaaggacctgcacaagagggacgaggacttcgagaaggtgctgttcgactgcgtcctcttcttcgtccggctggagagcatgatggagggctactccgactcggatgagttcagcgtgccggagcaggcgcccggcatcggccgcgcggcgttcttgagcgtgggcgagcggacctgcgcgactgtgtgctccagcggtgatctgagcttctcgtcacaggactcggtcgtgcccgccgccgcgcagtcgtcccgagcgccgacggggctgcgggtgctgcactactcggcgtcggcgtcggcggcggggcagggcagcagcggcggaacggtgggcgacgagctggagttcctgaaccggtgcaaggacgccggcgtggtgcacatcctcgggaacaccatcgtgcgcgcgcggcgggattcgggcgtcgtgaagaagctcgccgttgactacatgtacgctttcatgaggagggtgtgcagggagaacagcgtcatcttcaacgtgccccatgagagcctgctcaatgtcgggcagatattctacatctgaatatctgtctgatgagagatagatagccttgttcttcgtccttttgtgtcccgggtacggtaggatatgtacactattgtcttgtatcgtacacttgtacagaataaaacagtgagcttttagtggggccgtgggggtgacaaccgacaaggcgagtggcgtgcgacgcccggtgtgtcctctgtaaaaaaacaggataattgtgatttagacccgattagaaactctaaaactaataattagctgctgaaattagtttt

SEQ ID NO: 19404 - DNA, 2094 bp, Zea Mays
attcccctcggtgcgccgccgccagtccgccccgccccgccccgcccagcagacagcgcagccatgccgctccacctccacctgctgtcgtccccggccaccgctgccaagctcgcggcaggtctgcgcgcggcgcctctccgccggtgccacagcttggccccggcgccgcgccacacggatcgcgtggcccttgcgtcgtccctctcggcggtggcgcggtctgctggccccgccgtggcagcggcgcagaccaagcccagcgtttcaggaaagaaacaagtattgatatcgttgtcggataaaacggacttggcttatcttggcaatggtcttcagggtttggggtattccatcgtttccactggtggaacagcatccagcctggaagcagcaggagtcagtgtaacaaaagttgaagaaatcacacatttccctgaaatgcttgatggacgagtgaaaacattgcacccaagtatacatggtggtattcttgccaggagagaccaggagcatcatttgaaggcactaaaagatcatggaattgggacatttgatgtggttgtggtgaatttgtatcccttttatgacaaagtcacctctggtaacatctcttttgaggatggcattgaaaatattgatattggtgggcccacgatgatcagagctgcagccaagaaccataaggatgttcttattgtggtggatcataatgattatcctgctttactggagtaccttaaaggaaagcgagacgatcagcagttccccaggatgttggcatggaaagccatgcagcatgtcgcctcttatgattctgcagtgtcagaatggttgtggaagcaatcaaataaaggagagatgttccccccaagctttactgtgccactggagctgaagtctacactccggtatggcgaaaatcctcatcagagtgctgcattctatgctgacaagagcctttctcttgttggtgctggtggtattgccactgctattcaacaccatggaaaggaaatgtcttacaacaactacttggatgcggatgctgcatggaactgtgtatcggagtttgatagtcctacttgtgttgtggtgaagcacacaaatccatgtggtgttgcctcacgaaaggacattcttgaagcttacaggttagctgtaaggggagatgctgtcagtgcatttggtgggatagttgcattcaacacgactattgacgaggatcttgcgaaggaaattcgtgagttcaggagtcctacagatggtgagacgcggatgttctatgagatagtggttgctcccggctatacggagaagggtcttgaggttctcagaggcaagtccaaggcactgaggatactcgaggcgaagagaagtggaaaagggatgctttcacttaggcagaacaactgcatgctgggaatgggcagtggtcagccgaacaggcgagagagcgtccgaatcgccttcaggaaggcaggagaggaggccaagggagctgcattggccagcgacgccttctttccttttgcctggaatgatgccgtcgaggaggcgtgccagaacggcatcggcatcatcgcccagccaggaggcagtaagaaggacgaggacgccgtcgcgtgctgcaacaagtatggtgtgtcgctcgtcctcaccggcgtcaggcacttcaagcattagccgtcatgccccatggctggtcatcttagcttagggagttacggaaaaaaaacaaagcttcggaggctgcagcttgtggagctgccctgatgtttagctttctgcaaagtgcaaaaactgcaaattttggtttctgtaaggcgtaggctttgctgggtgagctcgtggggaaggtaatgtttctcctggagtcgaataagctgatgggtgtaccgcgagtgacaattgaacccaacctaaggactttcaggttggtacttttttctgtcacaaaatcagccgtgcgcctatgcaccaggagaaacatcgatgtgacctacacctcaacggccatcgatgtgacctacaatctttggactacaaaccattgaaaaataaaaagagaaaaggtgcctgggaatttctgtg

SEQ ID NO: 19405 - DNA, 2775 bp, Zea Mays
aaagaggcagagagcctgaacaattcgtttggcccttttcttgtgcttggcagcctgatcagatgccaatgcgatcccatatctccccatatctgatagggaaaataaaatctctccgcgtctgctgcactaccggctggtggttgtgctcgccagcgcggttgaatcccatctcacctcccctcatctgccgtcgtccggtgactgacaggacgaggctccttttccgcaccagcagcgccctctccacttgatgatggcctggcctgctagctcgagaagaagaaatgggcaagcagtggcaatgagatggatgttcttggtttagcagttcttggtcgttgcctgaatcctgcacattttactactacagttgtgagccagaatcgcacagatctgcctgaattcttcttctgaatatccacagcaatgcgaaattggacctgcggaaaaggaatgggcaactgattggccatgaacagtccaagggcgtttgctgtaatctgctcgcgtccaaattaatccaggaggatgagagtgtgagactgacacatgcacagggatcacgccaggtatataaacacgcaagtggcccacccaccggcgacggcttcgatccgagaacaatccgtcgtccgagttggcatctttggccagaccagtatcattgcccaatcacggatctctcggatctctccctcctctttctaatctctctctctctctctctcacacacacatttcccactacctgctcctgcttcttgcctgttcggtgtgcgctgcgcgaggtgaggagcggagcagggaggtgaaggggatgaaggaggagatgatggtcggcctgtcggcgccggagccggtggggaggtggggcgccgcgccgccgcaggcgatgctggagaggatgaaggactacggccaggagggcgccttcgcgctctgggacgatctctcgcccgaggaccaggagctcctcgtccgggacatcgagagcctagacctctcaaggatcgatcggatcatccggcgctcccttggatcacaaggcatcccattgcctgctgtcgagcccgtgccggaatctagtgtctccaaggtggagggcaggtctgcagaggacaaagaaagatggtggaagaaggggttgaaagccatctcggaggggaagctggccgttgtccttttggccggtggtcagggtactcgactgggaagctcagatcctaagggatgtttcaatatcggacttccatcaggaaagtcacttttccagctccaagctgaaaggattctgtgcgttcaaaagctggctgctcaatctagcgaaagcccgagtaacactgtgccgatccactggtacataatgacaagcccctttacagatgctgccaccgccaaattctttgaaacccgtagatattttggcttagaccctgaccaagtgacatttttccaacaaggcacacttccatgcgtttctgccgatggtagatttattatggagacaccatatagggtagcaaaggctcctgatggcaacggtggagtttatgctgcactgaagtccaagaagttgatggaagatatggccgcgcggggtgtgaaatacgtagattgctacggagttgacaacgcgctggttcgagttgcagatcctacgttcttagggtacttcattgacaagggcgcatcttctgccgccaaagtggttaggaaggcttatccgcaagagaacgttggggtgttcgttcaacgaggccgtggtggaccgctctcggtggttgagtacagcgaaatggatgcggctatggctaccgaaatgaatcagtcgacagggcgactccgttactgttggagcaacatctgcctgcacatgttcactctggacttcttgaaccaagtggcaaacagccttgagaaggacagtgtataccatctagctgagaagaagatcccttccatccatgggttcacgacgggcctgaagcttgaacagtttatattcgacgccttcacatactccccgtccacggcacttttcgaggtcatgcgggaggaggaattcgcgccggtaaagaacgccagcggcgcaacgtatgacacccctgatagcgcgaagctcatgctgctccgcctccacagcagatgggtagtcgctgctggcggcttcttgacgcactctgtgcccttgtatatgacaggcgtcgaagtttctccgctctcctcctacgccggagagaacctggaagccatctgccgtgggcgaacgttccatgcgccgagcgagatctcgttttaggaggtagacctgttcatgggactggagtagcagttgtgtgatcatctgtaaaacgagcgtaaaggatgggcaggctgttgtgtactgcgtgttgtagatgtaacatctcggacggacaccaaattcatctcgagttttctctccatctctgtgttgctcccccgtaggctgtagatcgtttcgacatttgagtcaccctattaaaaacagaaagaccgttcgtccaatttaatttgctaggctgaccagcaagttgaaacaagtcatacgagaggattgcagattggcaggtacaaatgatgaagaaccgtaaagcttcgttctcccatttcagcacatgatagtgttgacgtatgatcttaaacacagcgagaaacataacgaatcggtaaaactaatacaaggatcggccaaatcaacattgacccaattcttcgtcagtaagctctcgaatactactttctagaaagacc

SEQ ID NO: 19406 - DNA, 2639 bp, Zea Mays
gttgaatcccatctcacctcccctcatctgccgtcgtccggtgactgacaggacgaggctccttttccgcaccagcagcgccctctccacttgatgatggcctggcctgctagctcgagaagaagaaatgggcaagcagtggcaatgagatggatgttcttggtttagcagttcttggtcgttgcctgaatcctgcacattttactactacagttgtgagccagaatcgcacagatctgcctgaattcttcttctgaatatccacagcaatgcgaaattggacctgcggaaaaggaatgggcaactgattggccatgaacagtccaagggcgtttgctgtaatctgctcgcgtccaaattaatccaggaggatgagagtgtgagactgacacatgcacagggatcacgccaggtatataaacacgcaagtggcccacccaccggcgacggcttcgatccgagaacaatccgtcgtccgagttggcatctttggccagaccagtatcattgcccaatcacggatctctcggatctctccctcctctttctaatctctctctctctctctctcacacacacatttcccactacctgctcctgcttcttgcctgttcggtgtgcgctgcgcgaggtgaggagcggagcagggaggtgaaggggatgaaggaggagatgatggtcggcctgtcggcgccggagccggtggggaggtggggcgccgcgccgccgcaggcgatgctggagaggatgaaggactacggccaggagggcgccttcgcgctctgggacgatctctcgcccgaggaccaggagctcctcgtccgggacatcgagagcctagacctctcaaggatcgatcggatcatccggcgctcccttggatcacaaggcatcccattgcctgctgtcgagcccgtgccggaatctagtgtctccaaggtggagggcaggtctgcagaggacaaagaaagatggtggaagaaggggttgaaagccatctcggaggggaagctggccgttgtccttttggccggtggtcagggtactcgactgggaagctcagatcctaagggatgtttcaatatcggacttccatcaggaaagtcacttttccagctccaagctgaaaggattctgtgcgttcaaaagctggctgctcaatctagcgaaagcccgagtaacactgtgccgatccactggtacataatgacaagcccctttacagatgctgccaccgccaaattctttgaaacccgtagatattttggcttagaccctgaccaagtgacatttttccaacaaggcacacttccatgcgtttctgccgatggtagatttattatggagacaccatatagggtagcaaaggctcctgatggcaacggtggagtttatgctgcactgaagtccaagaagttgatggaagatatggccgcgcggggtgtgaaatacgtagattgctacggagttgacaacgcgctggttcgagttgcagatcctacgttcttagggtacttcattgacaagggcgcatcttctgccgccaaagtggttaggaagccgattgaacactcaacacaacaggcttatccgcaagagaacgttggggtgttcgttcaacgaggccgtggtggaccgctctcggtggttgagtacagcgaaatggatgcggctatggctaccgaaatgaatcagtcgacagggcgactccgttactgttggagcaacatctgcctgcacatgttcactctggacttcttgaaccaagtggcaaacagccttgagaaggacagtgtataccatctagctgagaagaagatcccttccatccatgggttcacgacgggcctgaagcttgaacagtttatattcgacgccttcacatactccccgtccacggcacttttcgaggtcatgcgggaggaggaattcgcgccggtaaagaacgccagcggcgcaacgtatgacacccctgatagcgcgaagctcatgctgctccgcctccacagcagatgggtagtcgctgctggcggcttcttgacgcactctgtgcccttgtatatgacaggcgtcgaagtttctccgctctcctcctacgccggagagaacctggaagccatctgccgtgggcgaacgttccatgcgccgagcgagatctcgttttaggaggtagacctgttcatgggactggagtagcagttgtgtgatcatctgtaaaacgagcgtaaaggatgggcaggctgttgtgtactgcgtgttgtagatgtaacatctcggacggacaccaaattcatctcgagttttctctccatctctgtgttgctcccccgtaggctgtagatcgtttcgacatttgagtcaccctattaaaaacagaaagaccgttcgtccaatttaatttgctaggctgaccagcaagttgaaacaagtcatacgagaggattgcagattggcaggtacaaatgatgaagaaccgtaaagcttcgttctcccatttcagcacatgatagtgttgacgtatgatcttaaacacagcgagaaacataacgaatcggtaaaactaatacaaggatcggccaaatcaacattgacccaattcttcgtcagtaagctctcgaatactactttctagaaagacc

SEQ ID NO: 19407 - DNA, 2405 bp, Zea Mays
catgaacagtccaagggcgtttgctgtaatctgctcgcgtccaaattaatccaggaggatgagagtgtgagactgacacatgcacagggatcacgccaggtatataaacacgcaagtggcccacccaccggcgacggcttcgatccgagaacaatccgtcgtccgagttggcatctttggccagaccagtatcattgcccaatcacggatctctcggatctctccctcctctttctaatctctctctctctctctctcacacacacatttcccactacctgctcctgcttcttgcctgttcggtgtgcgctgcgcgaggtgaggagcggagcagggaggtgaaggggatgaaggaggagatgatggtcggcctgtcggcgccggagccggtggggaggtggggcgccgcgccgccgcaggcgatgctggagaggatgaaggactacggccaggagggcgccttcgcgctctgggacgatctctcgcccgaggaccaggagctcctcgtccgggacatcgagagcctagacctctcaaggatcgatcggatcatccggcgctcccttggatcacaaggcatcccattgcctgctgtcgagcccgtgccggaatctagtgtctccaaggtggagggcaggtctgcagaggacaaagaaagatggtggaagaaggggttgaaagccatctcggaggggaagctggccgttgtccttttggccggtggtcagggtactcgactgggaagctcagatcctaagggatgtttcaatatcggacttccatcaggaaagtcacttttccagctccaagctgaaaggattctgtgcgttcaaaagctggctgctcaatctagcgaaagcccgagtaacactgtgccgatccactggtacataatgacaagcccctttacagatgctgccaccgccaaattctttgaaacccgtagatattttggcttagaccctgaccaagtgacatttttccaacaaggcacacttccatgcgtttctgccgatggtagatttattatggagacaccatatagggtagcaaaggctcctgatggcaacggtggagtttatgctgcactgaagtccaagaagttgatggaagatatggccgcgcggggtgtgaaatacgtagattgctacggagttgacaacgcgctggttcgagttgcagatcctacgttcttagggtacttcattgacaagggcgcatcttctgccgccaaagtggttaggaaggcttatccgcaagagaacgttggggtgttcgttcaacgaggccgtggtggaccgctctcggtggttgagtacagcgaaatggatgcggctatggctaccgaaatgaatcagtcgacagggcgactccgttactgttggagcaacgtatggttctatccttcgcttctcgttctctttcgccctccctccatccaaaaactgttctctccttttttttttttttgtagatctgcctgcacatgttcactctggacttcttgaaccaagtggcaaacagccttgagaaggacagtgtataccatctagctgagaagaagatcccttccatccatgggttcacgacgggcctgaagcttgaacagtttatattcgacgccttcacatactccccgtccacggcacttttcgaggggaaacaaaaaaacttcaggtcatgcgggaggaggaattcgcgccggtaaagaacgccagcggcgcaacgtatgacacccctgatagcgcgaagctcatgctgctccgcctccacagcagatgggtagtcgctgctggcggcttcttgacgcactctgtgcccttgtatatgacaggcgtcgaagtttctccgctctcctcctacgccggagagaacctggaagccatctgccgtgggcgaacgttccatgcgccgagcgagatctcgttttaggaggtagacctgttcatgggactggagtagcagttgtgtgatcatctgtaaaacgagcgtaaaggatgggcaggctgttgtgtactgcgtgttgtagatgtaacatctcggacggacaccaaattcatctcgagttttctctccatctctgtgttgctcccccgtaggctgtagatcgtttcgacatttgagtcaccctattaaaaacagaaagaccgttcgtccaatttaatttgctaggctgaccagcaagttgaaacaagtcatacgagaggattgcagattggcaggtacaaatgatgaagaaccgtaaagcttcgttctcccatttcagcacatgatagtgttgacgtatgatcttaaacacagcgagaaacataacgaatcggtaaaactaatacaaggatcggccaaatcaacattgacccaattcttcgtcagtaagctctcgaatactactttctagaaagacc

SEQ ID NO: 19408 - DNA, 2278 bp, Zea Mays
ggcgtttgctgtaatctgctcgcgtccaaattaatccaggaggatgagagtgtgagactgacacatgcacagggatcacgccaggtatataaacacgcaagtggcccacccaccggcgacggcttcgatccgagaacaatccgtcgtccgagttggcatctttggccagaccagtatcattgcccaatcacggatctctcggatctctccctcctctttctaatctctctctctctctctctcacacacacatttcccactacctgctcctgcttcttgcctgttcggtgtgcgctgcgcgaggtgaggagcggagcagggaggtgaaggggatgaaggaggagatgatggtcggcctgtcggcgccggagccggtggggaggtggggcgccgcgccgccgcaggcgatgctggagaggatgaaggactacggccaggagggcgccttcgcgctctgggacgatctctcgcccgaggaccaggagctcctcgtccgggacatcgagctgggtatcctcagacagagttatgtggtgttcatcccaatcacaggcatcccattgcctgctgtcgagcccgtgccggaatctagtgtctccaaggtggagggcaggtctgcagaggacaaagaaagatggtggaagaaggggttgaaagccatctcggaggggaagctggccgttgtccttttggccggtggtcagggtactcgactgggaagctcagatcctaagggatgtttcaatatcggacttccatcaggaaagtcacttttccagctccaagctgaaaggattctgtgcgttcaaaagctggctgctcaatctagcgaaagcccgagtaacactgtgccgatccactggtacataatgacaagcccctttacagatgctgccaccgccaaattctttgaaacccgtagatattttggcttagaccctgaccaagtgacatttttccaacaaggcacacttccatgcgtttctgccgatggtagatttattatggagacaccatatagggtagcaaaggctcctgatggcaacggtggagtttatgctgcactgaagtccaagaagttgatggaagatatggccgcgcggggtgtgaaatacgtagattgctacggagttgacaacgcgctggttcgagttgcagatcctacgttcttagggtacttcattgacaagggcgcatcttctgccgccaaagtggttaggaaggcttatccgcaagagaacgttggggtgttcgttcaacgaggccgtggtggaccgctctcggtggttgagtacagcgaaatggatgcggctatggctaccgaaatgaatcagtcgacagggcgactccgttactgttggagcaacatctgcctgcacatgttcactctggacttcttgaaccaagtggcaaacagccttgagaaggacagtgtataccatctagctgagaagaagatcccttccatccatgggttcacgacgggcctgaagcttgaacagtttatattcgacgccttcacatactccccgtccacggcacttttcgaggtcatgcgggaggaggaattcgcgccggtaaagaacgccagcggcgcaacgtatgacacccctgatagcgcgaagctcatgctgctccgcctccacagcagatgggtagtcgctgctggcggcttcttgacgcactctgtgcccttgtatatgacaggcgtcgaagtttctccgctctcctcctacgccggagagaacctggaagccatctgccgtgggcgaacgttccatgcgccgagcgagatctcgttttaggaggtagacctgttcatgggactggagtagcagttgtgtgatcatctgtaaaacgagcgtaaaggatgggcaggctgttgtgtactgcgtgttgtagatgtaacatctcggacggacaccaaattcatctcgagttttctctccatctctgtgttgctcccccgtaggctgtagatcgtttcgacatttgagtcaccctattaaaaacagaaagaccgttcgtccaatttaatttgctaggctgaccagcaagttgaaacaagtcatacgagaggattgcagattggcaggtacaaatgatgaagaaccgtaaagcttcgttctcccatttcagcacatgatagtgttgacgtatgatcttaaacacagcgagaaacataacgaatcggtaaaactaatacaaggatcggccaaatcaacattgacccaattcttcgtcagtaagctctcgaatactactttctagaaagacc

SEQ ID NO: 19409 - DNA, 1846 bp, Zea Mays
ctacagtctgttcgcagtgactccaacactggagccagtgcagagctatcgccacactgtccgatctcactggccgctcgatctcatccgtccgctggtaagccataagccaaagaccacaatagatctcgtctccctccgttcccctcctgtccgtcattttctcgtcacctacatatctccggctcgccgtcggcgtcgccgcctcctcctccttcgcccgctggaggcgcccatagcgacctcaccggtgggtttgctgaagtgacatcggccgaggtggaactggttggggggagtccatttcgggttcgagcagcctgagccggcgcgccggcagcgacggagtcgtgcagttgagttgagatggcaaacattccccactccttcgcaggggcctcgcctccgtccccctctccgatggctggcagcagcagcggccccgccccgggccaggcagccaaggacaagaagatggcgtccgcggaacagctggtcctggaactctgcgaccctgaactgcgcgagaacgctttacttgagctctccaagaaaagggagatttttcaagatcttgctccgctgctttggcactcatttggcacaattgctgcgttactccaggagattatatccatttacccgtcactatcaccccccacactgtcacctggagcatcaaaccgagtttgcaatgctcttgcacttctgcagtgtgttgcatcgcaccctgagaccaggatccttttcctaaatgctcatattccattgtacctgtaccctttcctcaacactaccagcaaaacgagaccttttgagtacctaaggcttactagcttgggggtcattggtgctcttgtcaaggttgatgatactgaagtcatcagttttttgctgcaaactgaaataattcctctgtgcttgcgaaccatggagatgggtagtgagctatccaaaactgtggcaactttcatcgtccaaaagattcttctagatgatgttgggctgcgctacatttgcgccactgctgagcgtttctttgccgtaggcagtgttttagcaaacatggttgtttcacttgctgatcagccctccacaaggctgctgaagcacatcattcgttgttacctccggctgtcagataaccctagggcttgtgctgcattgcagagctgccttccagacatgctcaaagatgggaccttcaataactgccttagggatgatccagcgacaaggcgctggctccaacagctcctgcacaatgtgactggcggaggcatgggaggtgctcctcaaccaggaatggatcccatgaacatgggaatgtgatgtgcattctagttgttgcaattcactgcaataacacatcacctctcagtgaattacaactagagaagatctggccactgtccagatgaaacttagtatggtgtagcctgactttctgccggggtaaaaataggaatgttgtttggtattgccataagctaagctgtagaaacaagatcggcaggcttctgttattgtgttcttgcaccggagctcttgtgcgttgacccttcagaacctgagaacaaaggaggaaacccccgtcccgtgaagctttgtcgcagtgccgatcgatcaagatcttgaattgcttcagatgatgccataagaaagcatactgaaaagaagtgtatgccgtgtgctatattttacgagtttatgggttgcttttgtctttctagtggcgtcgtgtaacaaagtccgctgttcttaatttgttcaggtaacaattaattaatccagcaatattttttcccaggttaccaataataatataaaaatatattctataaaa

SEQ ID NO: 19410 - DNA, 1675 bp, Zea Mays
gctcgatctcatccgtccgctggtaagccataagccaaagaccacaatagatctcgtctccctccgttcccctcctgtccgtcattttctcgtcacctacatatctccggctcgccgtcggcgtcgccgcctcctcctccttcgcccgctggaggcgcccatagcgacctcaccggtgggtttgctgaagtgacatcggccgaggtggaactggttggggggagtccatttcgggttcgagcagcctgagccggcgcgccggcagcgacggagtcgtgcagttgagttgagatggcaaacattccccactccttcgcaggggcctcgcctccgtccccctctccgatggctggcagcagcagcggccccgccccgggccaggcagccaaggacaagaagatggcgtccgcggaacagctggtcctggaactctgcgaccctgaactgcgcgagaacgctttacttgagctctccaagaaaagggagatttttcaagatcttgctccgctgctttggcactcatttggcacaattgctgcgttactccaggagattatatccatttacccgtcactatcaccccccacactgtcacctggagcatcaaaccgagtttgcaatgctcttgcacttctgcagtgtgttgcatcgcaccctgagaccaggatccttttcctaaatgctcatattccattgtacctgtaccctttcctcaacactaccagcaaaacgagaccttttgagtacctaaggcttactagcttgggggtcattggtgctcttgtcaaggtggcaactttcatcgtccaaaagattcttctagatgatgttgggctgcgctacatttgcgccactgctgagcgtttctttgccgtaggcagtgttttagcaaacatggttgtttcacttgctgatcagccctccacaaggctgctgaagcacatcattcgttgttacctccggctgtcagataaccctagggcttgtgctgcattgcagagctgccttccagacatgctcaaagatgggaccttcaataactgccttagggatgatccagcgacaaggcgctggctccaacagctcctgcacaatgtgactggcggaggcatgggaggtgctcctcaaccaggaatggatcccatgaacatgggaatgtgatgtgcattctagttgttgcaattcactgcaataacacatcacctctcagtgaattacaactagagaagatctggccactgtccagatgaaacttagtatggtgtagcctgactttctgccggggtaaaaataggaatgttgtttggtattgccataagctaagctgtagaaacaagatcggcaggcttctgttattgtgttcttgcaccggagctcttgtgcgttgacccttcagaacctgagaacaaaggaggaaacccccgtcccgtgaagctttgtcgcagtgccgatcgatcaagatcttgaattgcttcagatgatgccataagaaagcatactgaaaagaagtgtatgccgtgtgctatattttacgagtttatgggttgcttttgtctttctagtggcgtcgtgtaacaaagtccgctgttcttaatttgttcaggtaacaattaattaatccagcaatattttttcccaggttaccaataataatataaaaatatattctataaaa

SEQ ID NO: 19411 - DNA, 1725 bp, Zea Mays
gctcgatctcatccgtccgctggtaagccataagccaaagaccacaatagatctcgtctccctccgttcccctcctgtccgtcattttctcgtcacctacatatctccggctcgccgtcggcgtcgccgcctcctcctccttcgcccgctggaggcgcccatagcgacctcaccggtgggtttgctgaagtgacatcggccgaggtggaactggttggggggagtccatttcgggttcgagcagcctgagccggcgcgccggcagcgacggaggggcctcgcctccgtccccctctccgatggctggcagcagcagcggccccgccccgggccaggcagccaaggacaagaagatggcgtccgcggaacagctggtcctggaactctgcgaccctgaactgcgcgagaacgctttacttgagctctccaagaaaagggagatttttcaagatcttgctccgctgctttggcactcatttggcacaattgctgcgttactccaggagattatatccatttacccgtcactatcaccccccacactgtcacctggagcatcaaaccgagtttgcaatgctcttgcacttctgcagtgtgttgcatcgcaccctgagaccaggatccttttcctaaatgctcatattccattgtacctgtaccctttcctcaacactaccagcaaaacgagaccttttgagtacctaaggcttactagcttgggggtcattggtgctcttgtcaaggttgatgatactgaagtcatcagttttttgctgcaaactgaaataattcctctgtgcttgcgaaccatggagatgggtagtgagctatccaaaactgtggcaactttcatcgtccaaaagattcttctagatgatgttgggctgcgctacatttgcgccactgctgagcgtttctttgccgtaggcagtgttttagcaaacatggttgtttcacttgctgatcagccctccacaaggctgctgaagcacatcattcgttgttacctccggctgtcagataaccctagggcttgtgctgcattgcagagctgccttccagacatgctcaaagatgggaccttcaataactgccttagggatgatccagcgacaaggcgctggctccaacagctcctgcacaatgtgactggcggaggcatgggaggtgctcctcaaccaggaatggatcccatgaacatgggaatgtgatgtgcattctagttgttgcaattcactgcaataacacatcacctctcagtgaattacaactagagaagatctggccactgtccagatgaaacttagtatggtgtagcctgactttctgccggggtaaaaataggaatgttgtttggtattgccataagctaagctgtagaaacaagatcggcaggcttctgttattgtgttcttgcaccggagctcttgtgcgttgacccttcagaacctgagaacaaaggaggaaacccccgtcccgtgaagctttgtcgcagtgccgatcgatcaagatcttgaattgcttcagatgatgccataagaaagcatactgaaaagaagtgtatgccgtgtgctatattttacgagtttatgggttgcttttgtctttctagtggcgtcgtgtaacaaagtccgctgttcttaatttgttcaggtaacaattaattaatccagcaatattttttcccaggttaccaataataatataaaaatatattctataaaa

SEQ ID NO: 19412 - DNA, 1667 bp, Zea Mays
gctcgatctcatccgtccgctggtaagccataagccaaagaccacaatagatctcgtctccctccgttcccctcctgtccgtcattttctcgtcacctacatatctccggctcgccgtcggcgtcgccgcctcctcctccttcgcccgctggaggcgcccatagcgacctcaccggtgggtttgctgaagtgacatcggccgaggtggaactggttggggggagtccatttcgggttcgagcagcctgagccggcgcgccggcagcgacggagttgagttgagatggcaaacattccccactccttcgcaggggcctcgcctccgtccccctctccgatggctggcagcagcagcggccccgccccgggccaggcagccaaggacaagaagatggcgtccgcggaacagctggtcctggaactctgcgaccctgaactgcgcgagaacgctttacttgagctctccaagaaaagggagatttttcaagatcttgctccgctgctttggcactcatttggcacaattgctgcgttactccaggagattatatccatttacccgtcactatcaccccccacactgtcacctggagcatcaaaccgagtttgcaatgctcttgcacttctgcagtgtgttgcatcgcaccctgagaccaggatccttttcctaaatgctcatattccattgtacctgtaccctttcctcaacactaccagcaaaacgagaccttttgagtacctaaggcttactagcttgggggtcattggtgctcttgtcaaggtggcaactttcatcgtccaaaagattcttctagatgatgttgggctgcgctacatttgcgccactgctgagcgtttctttgccgtaggcagtgttttagcaaacatggttgtttcacttgctgatcagccctccacaaggctgctgaagcacatcattcgttgttacctccggctgtcagataaccctagggcttgtgctgcattgcagagctgccttccagacatgctcaaagatgggaccttcaataactgccttagggatgatccagcgacaaggcgctggctccaacagctcctgcacaatgtgactggcggaggcatgggaggtgctcctcaaccaggaatggatcccatgaacatgggaatgtgatgtgcattctagttgttgcaattcactgcaataacacatcacctctcagtgaattacaactagagaagatctggccactgtccagatgaaacttagtatggtgtagcctgactttctgccggggtaaaaataggaatgttgtttggtattgccataagctaagctgtagaaacaagatcggcaggcttctgttattgtgttcttgcaccggagctcttgtgcgttgacccttcagaacctgagaacaaaggaggaaacccccgtcccgtgaagctttgtcgcagtgccgatcgatcaagatcttgaattgcttcagatgatgccataagaaagcatactgaaaagaagtgtatgccgtgtgctatattttacgagtttatgggttgcttttgtctttctagtggcgtcgtgtaacaaagtccgctgttcttaatttgttcaggtaacaattaattaatccagcaatattttttcccaggttaccaataataatataaaaatatattctataaaa

SEQ ID NO: 19413 - DNA, 1629 bp, Zea Mays
gctcgatctcatccgtccgctggtaagccataagccaaagaccacaatagatctcgtctccctccgttcccctcctgtccgtcattttctcgtcacctacatatctccggctcgccgtcggcgtcgccgcctcctcctccttcgcccgctggaggcgcccatagcgacctcaccggtgggtttgctgaagtgacatcggccgaggtggaactggttggggggagtccatttcgggttcgagcagcctgagccggcgcgccggcagcgacggaggggcctcgcctccgtccccctctccgatggctggcagcagcagcggccccgccccgggccaggcagccaaggacaagaagatggcgtccgcggaacagctggtcctggaactctgcgaccctgaactgcgcgagaacgctttacttgagctctccaagaaaagggagatttttcaagatcttgctccgctgctttggcactcatttggcacaattgctgcgttactccaggagattatatccatttacccgtcactatcaccccccacactgtcacctggagcatcaaaccgagtttgcaatgctcttgcacttctgcagtgtgttgcatcgcaccctgagaccaggatccttttcctaaatgctcatattccattgtacctgtaccctttcctcaacactaccagcaaaacgagaccttttgagtacctaaggcttactagcttgggggtcattggtgctcttgtcaaggtggcaactttcatcgtccaaaagattcttctagatgatgttgggctgcgctacatttgcgccactgctgagcgtttctttgccgtaggcagtgttttagcaaacatggttgtttcacttgctgatcagccctccacaaggctgctgaagcacatcattcgttgttacctccggctgtcagataaccctagggcttgtgctgcattgcagagctgccttccagacatgctcaaagatgggaccttcaataactgccttagggatgatccagcgacaaggcgctggctccaacagctcctgcacaatgtgactggcggaggcatgggaggtgctcctcaaccaggaatggatcccatgaacatgggaatgtgatgtgcattctagttgttgcaattcactgcaataacacatcacctctcagtgaattacaactagagaagatctggccactgtccagatgaaacttagtatggtgtagcctgactttctgccggggtaaaaataggaatgttgtttggtattgccataagctaagctgtagaaacaagatcggcaggcttctgttattgtgttcttgcaccggagctcttgtgcgttgacccttcagaacctgagaacaaaggaggaaacccccgtcccgtgaagctttgtcgcagtgccgatcgatcaagatcttgaattgcttcagatgatgccataagaaagcatactgaaaagaagtgtatgccgtgtgctatattttacgagtttatgggttgcttttgtctttctagtggcgtcgtgtaacaaagtccgctgttcttaatttgttcaggtaacaattaattaatccagcaatattttttcccaggttaccaataataatataaaaatatattctataaaa

SEQ ID NO: 19414 - DNA, 1467 bp, Zea Mays
cttccataaaccttgtgttaaatggtggggctgacccaatgccgaaggctcccacatgagtgaagtccggggaagggataaaccgaggcaagcctttcccctgcaaatatgggaaggctgcttcaaaatcgcgacctggtgactcagttggacagctctcaccactgaaccagaaaagggagatttttcaagatcttgctccgctgctttggcactcatttggcacaattgctgcgttactccaggagattatatccatttacccgtcactatcaccccccacactgtcacctggagcatcaaaccgagtttgcaatgctcttgcacttctgcagtgtgttgcatcgcaccctgagaccaggatccttttcctaaatgctcatattccattgtacctgtaccctttcctcaacactaccagcaaaacgagaccttttgagtacctaaggcttactagcttgggggtcattggtgctcttgtcaaggttgatgatactgaagtcatcagttttttgctgcaaactgaaataattcctctgtgcttgcgaaccatggagatgggtagtgagctatccaaaactgtggcaactttcatcgtccaaaagattcttctagatgatgttgggctgcgctacatttgcgccactgctgagcgtttctttgccgtaggcagtgttttagcaaacatggttgtttcacttgctgatcagccctccacaaggctgctgaagcacatcattcgttgttacctccggctgtcagataaccctagggcttgtgctgcattgcagagctgccttccagacatgctcaaagatgggaccttcaataactgccttagggatgatccagcgacaaggcgctggctccaacagctcctgcacaatgtgactggcggaggcatgggaggtgctcctcaaccaggaatggatcccatgaacatgggaatgtgatgtgcattctagttgttgcaattcactgcaataacacatcacctctcagtgaattacaactagagaagatctggccactgtccagatgaaacttagtatggtgtagcctgactttctgccggggtaaaaataggaatgttgtttggtattgccataagctaagctgtagaaacaagatcggcaggcttctgttattgtgttcttgcaccggagctcttgtgcgttgacccttcagaacctgagaacaaaggaggaaacccccgtcccgtgaagctttgtcgcagtgccgatcgatcaagatcttgaattgcttcagatgatgccataagaaagcatactgaaaagaagtgtatgccgtgtgctatattttacgagtttatgggttgcttttgtctttctagtggcgtcgtgtaacaaagtccgctgttcttaatttgttcaggtaacaattaattaatccagcaatattttttcccaggttaccaataataatataaaaatatattctataaaa

SEQ ID NO: 19415 - DNA, 1344 bp, Zea Mays
gggctgacccaatgccgaaggctcccacatgagtgaagtccggggaagggataaaccgaggcaagcctttcccctgcaaatatgggaaggctgcttcaaaatcgcgacctggtgactcagttggacagctctcaccactgaaccagaaaagggagatttttcaagatcttgctccgctgctttggcactcatttggcacaattgctgcgttactccaggagattatatccatttacccgtcactatcaccccccacactgtcacctggagcatcaaaccgagtttgcaatgctcttgcacttctgcagtgtgttgcatcgcaccctgagaccaggatccttttcctaaatgctcatattccattgtacctgtaccctttcctcaacactaccagcaaaacgagaccttttgagtacctaaggcttactagcttgggggtcattggtgctcttgtcaaggtggcaactttcatcgtccaaaagattcttctagatgatgttgggctgcgctacatttgcgccactgctgagcgtttctttgccgtaggcagtgttttagcaaacatggttgtttcacttgctgatcagccctccacaaggctgctgaagcacatcattcgttgttacctccggctgtcagataaccctagggcttgtgctgcattgcagagctgccttccagacatgctcaaagatgggaccttcaataactgccttagggatgatccagcgacaaggcgctggctccaacagctcctgcacaatgtgactggcggaggcatgggaggtgctcctcaaccaggaatggatcccatgaacatgggaatgtgatgtgcattctagttgttgcaattcactgcaataacacatcacctctcagtgaattacaactagagaagatctggccactgtccagatgaaacttagtatggtgtagcctgactttctgccggggtaaaaataggaatgttgtttggtattgccataagctaagctgtagaaacaagatcggcaggcttctgttattgtgttcttgcaccggagctcttgtgcgttgacccttcagaacctgagaacaaaggaggaaacccccgtcccgtgaagctttgtcgcagtgccgatcgatcaagatcttgaattgcttcagatgatgccataagaaagcatactgaaaagaagtgtatgccgtgtgctatattttacgagtttatgggttgcttttgtctttctagtggcgtcgtgtaacaaagtccgctgttcttaatttgttcaggtaacaattaattaatccagcaatattttttcccaggttaccaataataatataaaaatatattctataaaa

SEQ ID NO: 19416 - DNA, 1331 bp, Zea Mays
ggctcccacatgagtgaagtccggggaagggataaaccgaggcaagcctttcccctgcaaatatgggaaggctgcttcaaaatcgcgacctggtgactcagttggacagctctcaccactgaaccagaaaagggagatttttcaagatcttgctccgctgctttggcactcatttggcacaattgctgcgttactccagtgtgttgcatcgcaccctgagaccaggatccttttcctaaatgctcatattccattgtacctgtaccctttcctcaacactaccagcaaaacgagaccttttgagtacctaaggcttactagcttgggggtcattggtgctcttgtcaaggttgatgatactgaagtcatcagttttttgctgcaaactgaaataattcctctgtgcttgcgaaccatggagatgggtagtgagctatccaaaactgtggcaactttcatcgtccaaaagattcttctagatgatgttgggctgcgctacatttgcgccactgctgagcgtttctttgccgtaggcagtgttttagcaaacatggttgtttcacttgctgatcagccctccacaaggctgctgaagcacatcattcgttgttacctccggctgtcagataaccctagggcttgtgctgcattgcagagctgccttccagacatgctcaaagatgggaccttcaataactgccttagggatgatccagcgacaaggcgctggctccaacagctcctgcacaatgtgactggcggaggcatgggaggtgctcctcaaccaggaatggatcccatgaacatgggaatgtgatgtgcattctagttgttgcaattcactgcaataacacatcacctctcagtgaattacaactagagaagatctggccactgtccagatgaaacttagtatggtgtagcctgactttctgccggggtaaaaataggaatgttgtttggtattgccataagctaagctgtagaaacaagatcggcaggcttctgttattgtgttcttgcaccggagctcttgtgcgttgacccttcagaacctgagaacaaaggaggaaacccccgtcccgtgaagctttgtcgcagtgccgatcgatcaagatcttgaattgcttcagatgatgccataagaaagcatactgaaaagaagtgtatgccgtgtgctatattttacgagtttatgggttgcttttgtctttctagtggcgtcgtgtaacaaagtccgctgttcttaatttgttcaggtaacaattaattaatccagcaatattttttcccaggttaccaataataatataaaaatatattctataaaa

SEQ ID NO: 19417 - DNA, 1662 bp, Zea Mays
cgaccctaagaagctgacgttgaggttgctaccttgtaaaaaaacgcggcttgctaatatggaagtgaaaggaagaaaggccagactattacaccacgtcgatcgtcgaaccagtgactcagaacaacaatctttcccacaggcttcgctgcagctttgagagccactcaaatcccctcccccttctctacacacacgacgaacgcaagctcccaataacgcatccccattggatttgaaagcttctacatgggacaccgagcctcgtagacgaagcagaggaaaccagcgaaatcgaagagcaaggaagcaagaagcagggcgccatggcgttcctccttcccaagctcacaacgccgtcctgcaagttgcccccaagtcccctcctcaagccccagctcgctcagccggtccacggcggcggcaagattcaaggctccgtcttcggctctgttgcggcgcaggtcgcggccccgggccacctcagtctcctgctcctgctcagcgcctcgcagcaggcagccgccccggcggccaaatccacggcgaccaagaaccggaccaagggcggcggggatccgcaaaggtcggatttttacctcaacctcgggacggcggtgcgcacgctgcgggacgacctgcccgacgtcttcgtccgggaacccaactacgatatctaccgtgaagacatcacatttgtcgacccactaaacacttttcatgggattgacaactacaagactatcttctgggcgcttagattccacgggcgcctactattcagagaaattgggcttgatgtatcacgcatttggcaactgacagagaattcaatagttgtccggtgggagctgtggggcactccacgtgttccatgggaatcgtatggctgcttcagtgggacgtcgagatacaaggttgacaggaacgggaaaatttacgagcacaaagtcgacaacttggcattggacttcccacgatcagtagcgaaagtgggcagcattgctgacatggtagtcgccacaccgagccccaatttaacgttctggaacgtggttgggacaggtgatggttgctcatggacaaagctgtatgaagccgtgctggaagctgtggaacgggaagagcatagttccacaggcattggcgttggagctctaggccctgttggctgcggatgtggctgcagtttttgaactggaaaactactgtagcttgaactgctgcagccagttcaagcgaagagggcccttaatcactagttcataggatggaatgagctccgggactagttgcttggtagtagttcttaggggaaatgtatagaagaatatatatatatatatgggcacatgaatcacgataccactaatatttctctgtatactgtagctataggacagcaaatttagataaaacacatactaggtggctacatttgattacccttgtgaccttgtctcatacagtcatactgaggtagtgctttcactgctttcatatgcgatacatggattttgagtgtgatttgtccagtattagacacagtttaggatgtggaggaaaattgaacatcggcagttgagggaggtcaaaataagtctttttccttctctagatgtgttgtgtctggtttggccggaacataactgaggatttttc

SEQ ID NO: 19418 - DNA, 1712 bp, Zea Mays
gtaaaggtatttcctctcgctcacggtgaggctgttaatatgatccttatcaacaatgctaccttttttagcatgttgctaccttgtaaaaaaacgcggcttgctaatatggaagtgaaaggaagaaaggccagactattacaccacgtcgatcgtcgaaccagtgactcagaacaacaatctttcccacaggcttcgctgcagctttgagagccactcaaatcccctcccccttctctacacacacgacgaacgcaagctcccaataacgcatccccattggatttgaaagcttctacatgggacaccgagcctcgtagacgaagcagaggaaaccagcgaaatcgaagagcaaggaagcaagaagcagggcgccatggcgttcctccttcccaagctcacaacgccgtcctgcaagttgcccccaagtcccctcctcaagccccagctcgctcagccggtccacggcggcggcaagattcaaggctccgtcttcggctctgttgcggcgcaggtcgcggccccgggccacctcagtctcctgctcctgctcagcgcctcgcagcaggcagccgccccggcggccaaatccacggcgaccaagaaccggaccaagggcggcggggatccgcaaaggtcggatttttacctcaacctcgggacggcggtgcgcacgctgcgggacgacctgcccgacgtcttcgtccgggaacccaactacgatatctaccgtgaagacatcacatttgtcgacccactaaacacttttcatgggattgacaactacaagactatcttctgggcgcttagattccacgggcgcctactattcagagaaattgggcttgatgtatcacgcatttggcaactgacagagaattcaatagttgtccggtgggagctgtggggcactccacgtgttccatgggaatcgtatggctgcttcagtgggacgtcgagatacaaggttgacaggaacgggaaaatttacgagcacaaagtcgacaacttggcattggacttcccacgatcagtagcgaaagtgggcagcattgctgacatggtagtcgccacaccgagccccaatttaacgttctggaacgtggttgggacaggtgatggttgctcatggacaaagctgtatgaagccgtgctggaagctgtggaacgggaagagcatagttccacaggcattggcgttggagctctaggccctgttggctgcggatgtggctgcagtttttgaactggaaaactactgtagcttgaactgctgcagccagttcaagcgaagagggcccttaatcactagttcataggatggaatgagctccgggactagttgcttggtagtagttcttaggggaaatgtatagaagaatatatatatatatatgggcacatgaatcacgataccactaatatttctctgtatactgtagctataggacagcaaatttagataaaacacatactaggtggctacatttgattacccttgtgaccttgtctcatacagtcatactgaggtagtgctttcactgctttcatatgcgatacatggattttgagtgtgatttgtccagtattagacacagtttaggatgtggaggaaaattgaacatcggcagttgagggaggtcaaaataagtctttttccttctctagatgtgttgtgtctggtttggccggaacataactgaggatttttc

SEQ ID NO: 19419 - DNA, 2375 bp, Zea Mays
gtttggttgtattgtttttgagctagcaagcaccggcctcaacaccggtagtacgtagcgtaggtatcgtccactcgtccggccgtcgcgcgcgctgctcctgccttcttcctctcgctgatatattggcgacgcacttacgatcgaggccagcagctggggttggacttggatagctagctagatggccaagccactgaacctgactcctgccttcctctcgctgatggccaccagctgccgcttcagctccggcgggcatgcgcaccgcttcgcctcgtcgctaccgtgcgggaggacgacgccgacgccacggaccacgtcgtcgtctacgcgccctgcggctcaggttagccctgacagaagcaagcaacgcgatgacgaagcagcatcggagactacgataaggcagcagctccagcaagtcgatgtgcttgagaacacggggatttctcggcattttgctggtgaaatcaagtgtatccttgacaggacatacagatgttggttagagaggcacgaggaaattatgcaggacacaacaacatgtgcgatggcatttcgtattctaaggatgaacggatatgatgtctcttgtgatctgttgtatcatgttgttgaaacatccgggatccatgatccacttaggggacatttgaatgacacaagaaccttgttagaattacacaaggcctctacagttagtatctctgaagacgagtctatcctggatagcataggcttaaggtcaagtaccttactgagggaacaaatggagtctagtggtgctctacaaaatcctccactctttagagaggtggaacatgctctgtaccatcccttctacgccacattggaccgtctaacccacaggtggaacattgaaaatttcaatactacagagcaccagatgctagacacaccatacttgtccagtcgatataccagtagagatattctagccttgggtatcagagacttcaattcctctcaacttacttaccagcaagaacttcaacatcttaaaagttgggtgaaagaatgcaggttggaccaactaccatttgtgaggcaaaatttggcatacttcttattgtccgctgctggctgcatgtactcccctgaactgtctgaagctcgcactttgtgtgcaaaaaatggtgcactcataactgttgttgatgacttctttgatgttggaggatcaaaagaagaacttgaaaaccttgtcatgttggttgagctgtgggacgagcatcgcaaaattgagttttactcagaacatgtagagattatattttcttcaatttacaactcagttaaccagtatggtgcaaaggcttctttgttacaagaccgcaatgttaccaaacacctagtacaaatatggttggatttgctaaagtctatgatgacagagcgttgtattttgttggaccgaagatcccggagtctattgttaaagatccagaatacgatgagttgttcaagctaatgagcacatgtggtcgactcttgaatgatgttcagagttttgagagggagtacaaggagggcaagttgaacattgtttctctcctcgttcttcatggtggctccatgtccatatcagatgccagaaggaaattacagaagcccatagacacatgtaggagagacctcctaagactagttcttcgtgaagaaagtgttgttcctaggccatgcaaggaattattctggaaaatgtgcaaggtctgctacttcttttactcgagaactgatgggtttaggtcaccagtggagagggccaaagaagtgaatgcagtgatcaacgagccattaaaactacaagaaaaccatacacacatgtctgttttgtgagaggaaccaagtgtcgatgtgatgtcttcatttgatttagtaggtgtgctttctatataagacagttcgctaggtgactgcatcaggtggtgcataaaaactcagcacattggtaatgtatagaagttggcccatatgtatgtctgattgtggttggtgaggttagtattattttgaaatttaaaagggtgacaccactatagaactagcatttactatcgttccattactattgatttctaacgagccgtcaattataataatttagtatttatgcattacttgaaaattttaaaatgactggggtccatatttctcagcaagtaaaggtccctatctctgtcgactcaaaccataagacaatagtaatcattattggttaaagctagaagcagtattgataatgagactatcattgttggttggtgactttaacagatagggacatgtcactgtcagtttgtggcttgagtctatcactactagttgttgatattagctcacaatgatat

SEQ ID NO: 19420 - DNA, 2674 bp, Zea Mays
caacaccggtagtacgtagcgtaggtatcgtccactcgtccggccgtcgcgcgcgctgctcctgccttcttcctctcgctgatatattggcgacgcacttacgatcgaggccagcagctggggttggacttggatagctagctagatggccaagccactgaacctgactcctgccttcctctcgctgatggccaccagctgccgcttcagctccggcgggcatgcgcaccgcttcgcctcgtcgctaccgtgcgggaggacgacgccgacgccacggaccacgtcgtcgtctacgcgccctgcggctcaggttagccctgacagaagcaagcaacgcgatgacgaagcagcatcggagactacgataaggcagcagctccagcaagtcgatgtgcttgagaacacggggatttctcggcattttgctggtgaaatcaagtgtatccttgacaggacatacagatgttggttagagaggcacgaggaaattatgcaggacacaacaacatgtgcgatggcatttcgtattctaaggatgaacggatatgatgtctcttgtgatctgttgtatcatgttgttgaaacatccgggatccatgatccacttaggggacatttgaatgacacaagaaccttgttagaattacacaaggcctctacagttagtatctctgaagacgagtctatcctggatagcataggcttaaggtcaagtaccttactgagggaacaaatggagtctagtggtgctctacaaaatcctccactctttagagaggtggaacatgctctgtaccatcccttctacgccacattggaccgtctaacccacaggtggaacattgaaaatttcaatactacagagcaccagatgctagacacaccatacttgtccagtcgatataccagtagagatattctagccttgggtatcagagacttcaattcctctcaacttacttaccagcaagaacttcaacatcttaaaagttgggtgaaagaatgcaggttggaccaactaccatttgtgaggcaaaatttggcatacttcttattgtccgctgctggctgcatgtactcccctgaactgtctgaagctcgcactttgtgtgcaaaaaatggtgcactcataactgttgttgatgacttctttgatgttggaggatcaaaagaagaacttgaaaaccttgtcatgttggttgagctgtgggacgagcatcgcaaaattgagttttactcagaacatgtagagattatattttcttcaatttacaactcagttaaccagtatggtgcaaaggcttctttgttacaagaccgcaatgttaccaaacacctagtacaaatatctatgatgacagaggtagagtggcgtttgaacaaatatgtgccaacagaggaggaatacatgacaaatgcatctttaacatttgcattgggtcccattgtattgccagcgttgtattttgttggaccgaagatcccggagtctattgttaaagatccagaatacgatgagttgttcaagctaatgagcacatgtggtcgactcttgaatgatgttcagagttttgaggtacattactgagttgcgagtcttaagctttcatgacaatcctgttacaggctcaagaaagtattagtgcgattaattaattagcataggacacaatgggtaattgagttagttttcattcttaggtgctattatttaataggtatatgagcatggtatactaaataataccactttagccttgactagttttaggaggtgtcttctttgtaatcgagaaaaaggaaaacccttgtatattcaaattgatatattgttgcagagggagtacaaggagggcaagttgaacattgtttctctcctcgttcttcatggtggctccatgtccatatcagatgccagaaggaaattacagaagcccatagacacatgtaggagagacctcctaagactagttcttcgtgaagaaagtgttgttcctaggccatgcaaggaattattctggaaaatgtgcaaggtctgctacttcttttactcgagaactgatgggtttaggtcaccagtggagagggccaaagaagtgaatgcagtgatcaacgagccattaaaactacaagaaaaccatacacacatgtctgttttgtgagaggaaccaagtgtcgatgtgatgtcttcatttgatttagtaggtgtgctttctatataagacagttcgctaggtgactgcatcaggtggtgcataaaaactcagcacattggtaatgtatagaagttggcccatatgtatgtctgattgtggttggtgaggttagtattattttgaaatttaaaagggtgacaccactatagaactagcatttactatcgttccattactattgatttctaacgagccgtcaattataataatttagtatttatgcattacttgaaaattttaaaatgactggggtccatatttctcagcaagtaaaggtccctatctctgtcgactcaaaccataagacaatagtaatcattattggttaaagctagaagcagtattgataatgagactatcattgttggttggtgactttaacagatagggacatgtcactgtcagtttgtggcttgagtctatcactactagttgttgatattagctcacaatgatat

SEQ ID NO: 19421 - DNA, 2305 bp, Zea Mays
ccggtagtacgtagcgtaggtatcgtccactcgtccggccgtcgcgcgcgctgctcctgccttcttcctctcgctgatatattggcgacgcacttacgatcgaggccagcagctggggttggacttggatagctagctagatggccaagccactgaacctgactcctgccttcctctcgctgatggccaccagctgccgcttcagctccggcgggcatgcgcaccgcttcgcctcgtcgctaccgtgcgggaggacgacgccgacgccacggaccacgtcgtcgtctacgcgccctgcggctcaggttagccctgacagaagcaagcaacgcgatgacgaagcagcatcggagactacgataaggcagcagctccagcaagtcgatgtgcttgagaacacggggatttctcggcattttgctggtgaaatcaagtatctgttgtatcatgttgttgaaacatccgggatccatgatccacttaggggacatttgaatgacacaagaaccttgttagaattacacaaggcctctacagttagtatctctgaagacgagtctatcctggatagcataggcttaaggtcaagtaccttactgagggaacaaatggagtctagtggtgctctacaaaatcctccactctttagagaggtggaacatgctctgtaccatcccttctacgccacattggaccgtctaacccacaggtggaacattgaaaatttcaatactacagagcaccagatgctagacacaccatacttgtccagtcgatataccagtagagatattctagccttgggtatcagagacttcaattcctctcaacttacttaccagcaagaacttcaacatcttaaaagttgggtgaaagaatgcaggttggaccaactaccatttgtgaggcaaaatttggcatacttcttattgtccgctgctggctgcatgtactcccctgaactgtctgaagctcgcactttgtgtgcaaaaaatggtgcactcataactgttgttgatgacttctttgatgttggaggatcaaaagaagaacttgaaaaccttgtcatgttggttgagctgtgggacgagcatcgcaaaattgagttttactcagaacatgtagagattatattttcttcaatttacaactcagttaaccagtatggtgcaaaggcttctttgttacaagaccgcaatgttaccaaacacctagtacaaatatggttggatttgctaaagtctatgatgacagaggtagagtggcgtttgaacaaatatgtgccaacagaggaggaatacatgacaaatgcatctttaacatttgcattgggtcccattgtattgccagcgttgtattttgttggaccgaagatcccggagtctattgttaaagatccagaatacgatgagttgttcaagctaatgagcacatgtggtcgactcttgaatgatgttcagagttttgagagggagtacaaggagggcaagttgaacattgtttctctcctcgttcttcatggtggctccatgtccatatcagatgccagaaggaaattacagaagcccatagacacatgtaggagagacctcctaagactagttcttcgtgaagaaagtgttgttcctaggccatgcaaggaattattctggaaaatgtgcaaggtctgctacttcttttactcgagaactgatgggtttaggtcaccagtggagagggccaaagaagtgaatgcagtgatcaacgagccattaaaactacaagaaaaccatacacacatgtctgttttgtgagaggaaccaagtgtcgatgtgatgtcttcatttgatttagtaggtgtgctttctatataagacagttcgctaggtgactgcatcaggtggtgcataaaaactcagcacattggtaatgtatagaagttggcccatatgtatgtctgattgtggttggtgaggttagtattattttgaaatttaaaagggtgacaccactatagaactagcatttactatcgttccattactattgatttctaacgagccgtcaattataataatttagtatttatgcattacttgaaaattttaaaatgactggggtccatatttctcagcaagtaaaggtccctatctctgtcgactcaaaccataagacaatagtaatcattattggttaaagctagaagcagtattgataatgagactatcattgttggttggtgactttaacagatagggacatgtcactgtcagtttgtggcttgagtctatcactactagttgttgatattagctcacaatgatat

SEQ ID NO: 19422 - DNA, 2849 bp, Zea Mays
acgctacaccacacctgcagagcagcaagactagcttgtggctaccagcctagctagccaccgccgcgatccactatcatcgcttgctcgccgagtttcctgcggcggccggcgggcacctacatctcctctacctgactggctagtcattagcacagccagtacgtacgtagctcgcccggccggtgctcgacgacacagtgaattggcgacgcacgtagctaggaggccagcagctggggtcggagatggccatgccagtgaagctgactcctgcctccctctcgctgaaggcggtctgctgccgcttcagctccggagggcatgcgctgcgcttcggctcgtcgctaccgtgctggaggaggacgccgacgcaacggagcacgtcgtcgtctacgacgcgccctgcggctgaggttagctctggcaaaagcaagcagcacgatcaagaagcatcggaggctacgataagacagcagctccagctagtcgatgtgcttgagaacatggggatttctcggcattttgctgctgaaatcaaatgcatccttgacaggacatacagaagttggttacagagacatgaggaaattatgctggacacaatgacctgtgcgatggcatttcgtattctaaggttgaatggatacaatgtctcttctgatgagttgtatcatgttgttgaagcttccggactccataattcacttggaggatatctcaatgatacaagaaccttgttagaattacacaaggcctcgacagttagtatctctgaagatgagtctatcctggatagcataggctcaaggtcacgtaccttactgagggaacaactagagtctggtggtgctctacgaaaaccttcactctttaaagaggtggaacatgctctggacggtcccttctacaccacattggaccgtctacaccataggtggaacatcgaaaatttcaatattatagagcagcacatgctagagacaccatacttgtcaaatcaacataccagtagagatattctagcgttgagtattagagacttcagttcctctcagtttacttaccagcaagaacttcaacatcttgaaagctgggtgaaagagtgcaggttagaccagctacaatttgcgcgacagaagttggcatacttctacttgtctgctgctggcaccatgttctctcctgagctgtctgatgctcgaactttgtgggccaaaaatggtgtgctcacaactattgttgacgacttctttgatgttgcgggatcaaaagaagaacttgaaaaccttgtcatgttggttgagatgtgggacgagcatcacaaagttgagttctactcagaacaagtagagattatattttcttcaatttatgactcagttaaccaacttggtgaaaaggcttctttggtacaagaccgcagtattaccaaacacctagtagaaatagtaagtatagtctatagacttgttggtagtatttttttccttcttttttcttttcagctttgagcctttgagtattgactagtgttgaatggtttgcacagtggttggatttgctaaagtctatgatgacagaggtagagtggcgtttgagcaaatatgtgccaacagagaaggaatacatgataaatgcatctttaacatttggactaggccccattgtattgccagcattatattttgttgggccaaagatctcagagtctattgttaaagatccagaatatgatgaattgttcaaactgatgagcacatgtggtcgcctcttgaatgatgttcagacttttgaggtacattatcgagttgcaagtcttaagctttcatgataaacctattagactcatgaaagtatttgtgtaattaattaattagcataggaaagaatggataacaaagttagtttttattctcatttgctactatttaataggtatacgagcatggtatactaaatactagtaatttagccttgactaacaggccttttctttgtaatcgagaaaagtgaaacccttgtatagttgtataatgaaaatatgacgccagttggcacatggtggtcaattgatgtattgttgcagagggagtacaacgagggcaagttgaatagtgtttctctcctcgttcttcatggtggctccatgtccatatcagacgccaaaaggaaattacagaagcccatagacacatgcagaagagacctcctaagtttagttcttcgtgaagaaagtgttgttcctaggccctgcaaggaattattttggaaaatgtgcaaggtgtgctacttcttctactcgacgacggatgggtttagctcacaagtggagagggctaaagaagtggatgcggtgatcaatgagccactaaagctacaaggaagtcatacgctggtgtctgatgtgtgaaaggaactaagcgtcgatgtgatgtgttcttttgatttattagtagttgtgttttctctatatggtggtttggtaggtgactgtataatgtaaaggagttggcacatgttgtcagtgtcgtaacatcttcttgatctattcagcgctctcttgggcttgcgttatggcgatgttgttgggtatgatgtagttgataactagtgtagactcatgtacatgataatacttcatgttacactaacatgcgcacgtgtggctatatggttgaagctcatacccattagtggtctcaagtaccttgttgccaagtcgtggcaaaagtgcgtctactaggttgtaatgttgcatatcatatatttaatatgttgtacagagacttatccaatatgacaacggacgctaggaaactttcagtagggccaagacatgggatggg

SEQ ID NO: 19423 - DNA, 2589 bp, Zea Mays
acgctacaccacacctgcagagcagcaagactagcttgtggctaccagcctagctagccaccgccgcgatccactatcatcgcttgctcgccgagtttcctgcggcggccggcgggcacctacatctcctctacctgactggctagtcattagcacagccagtacgtacgtagctcgcccggccggtgctcgacgacacagtgaattggcgacgcacgtagctaggaggccagcagctggggtcggagatggccatgccagtgaagctgactcctgcctccctctcgctgaaggcggtctgctgccgcttcagctccggagggcatgcgctgcgcttcggctcgtcgctaccgtgctggaggaggacgccgacgcaacggagcacgtcgtcgtctacgacgcgccctgcggctgaggttagctctggcaaaagcaagcagcacgatcaagaagcatcggaggctacgataagacagcagctccagctagtcgatgtgcttgagaacatggggatttctcggcattttgctgctgaaatcaaatgcatccttgacaggacatacagaagttggttacagagacatgaggaaattatgctggacacaatgacctgtgcgatggcatttcgtattctaaggttgaatggatacaatgtctcttctgacacacttgtcaacatgaaaacatggtgcagatgagttgtatcatgttgttgaagcttccggactccataattcacttggaggatatctcaatgatacaagaaccttgttagaattacacaaggcctcgacagttagtatctctgaagatgagtctatcctggatagcataggctcaaggtcacgtaccttactgagggaacaactagagtctggtggtgctctacgaaaaccttcactctttaaagaggtggaacatgctctggacggtcccttctacaccacattggaccgtctacaccataggtggaacatcgaaaatttcaatattatagagcagcacatgctagagacaccatacttgtcaaatcaacataccagtagagatattctagcgttgagtattagagacttcagttcctctcagtttacttaccagcaagaacttcaacatcttgaaagctgggtgaaagagtgcaggttagaccagctacaatttgcgcgacagaagttggcatacttctacttgtctgctgctggcaccatgttctctcctgagctgtctgatgctcgaactttgtgggccaaaaatggtgtgctcacaactattgttgacgacttctttgatgttgcgggatcaaaagaagaacttgaaaaccttgtcatgttggttgagatgtgggacgagcatcacaaagttgagttctactcagaacaagtagagattatattttcttcaatttatgactcagttaaccaacttggtgaaaaggcttctttggtacaagaccgcagtattaccaaacacctagtagaaatagtaagtatagtctatagacttgttggtagtatttttttccttcttttttcttttcagctttgagcctttgagtattgactagtgttgaatggtttgcacagtggttggatttgctaaagtctatgatgacagaggtagagtggcgtttgagcaaatatgtgccaacagagaaggaatacatgataaatgcatctttaacatttggactaggccccattgtattgccagcattatattttgttgggccaaagatctcagagtctattgttaaagatccagaatatgatgaattgttcaaactgatgagcacatgtggtcgcctcttgaatgatgttcagacttttgagagggagtacaacgagggcaagttgaatagtgtttctctcctcgttcttcatggtggctccatgtccatatcagacgccaaaaggaaattacagaagcccatagacacatgcagaagagacctcctaagtttagttcttcgtgaagaaagtgttgttcctaggccctgcaaggaattattttggaaaatgtgcaaggtgtgctacttcttctactcgacgacggatgggtttagctcacaagtggagagggctaaagaagtggatgcggtgatcaatgagccactaaagctacaaggaagtcatacgctggtgtctgatgtgtgaaaggaactaagcgtcgatgtgatgtgttcttttgatttattagtagttgtgttttctctatatggtggtttggtaggtgactgtataatgtaaaggagttggcacatgttgtcagtgtcgtaacatcttcttgatctattcagcgctctcttgggcttgcgttatggcgatgttgttgggtatgatgtagttgataactagtgtagactcatgtacatgataatacttcatgttacactaacatgcgcacgtgtggctatatggttgaagctcatacccattagtggtctcaagtaccttgttgccaagtcgtggcaaaagtgcgtctactaggttgtaatgttgcatatcatatatttaatatgttgtacagagacttatccaatatgacaacggacgctaggaaactttcagtagggccaagacatgggatggg

SEQ ID NO: 19424 - DNA, 2491 bp, Zea Mays
acgctacaccacacctgcagagcagcaagactagcttgtggctaccagcctagctagccaccgccgcgatccactatcatcgcttgctcgccgagtttcctgcggcggccggcgggcacctacatctcctctacctgactggctagtcattagcacagccagtacgtacgtagctcgcccggccggtgctcgacgacacagtgaattggcgacgcacgtagctaggaggccagcagctggggtcggagatggccatgccagtgaagctgactcctgcctccctctcgctgaaggcggtctgctgccgcttcagctccggagggcatgcgctgcgcttcggctcgtcgctaccgtgctggaggaggacgccgacgcaacggagcacgtcgtcgtctacgacgcgccctgcggctgaggttagctctggcaaaagcaagcagcacgatcaagaagcatcggaggctacgataagacagcagctccagctagtcgatgtgcttgagaacatggggatttctcggcattttgctgctgaaatcaaatgcatccttgacaggacatacagacacacttgtcaacatgaaaacatggtgcagatgagttgtatcatgttgttgaagcttccggactccataattcacttggaggatatctcaatgatacaagaaccttgttagaattacacaaggcctcgacagttagtatctctgaagatgagtctatcctggatagcataggctcaaggtcacgtaccttactgagggaacaactagagtctggtggtgctctacgaaaaccttcactctttaaagaggtggaacatgctctggacggtcccttctacaccacattggaccgtctacaccataggtggaacatcgaaaatttcaatattatagagcagcacatgctagagacaccatacttgtcaaatcaacataccagtagagatattctagcgttgagtattagagacttcagttcctctcagtttacttaccagcaagaacttcaacatcttgaaagctgggtgaaagagtgcaggttagaccagctacaatttgcgcgacagaagttggcatacttctacttgtctgctgctggcaccatgttctctcctgagctgtctgatgctcgaactttgtgggccaaaaatggtgtgctcacaactattgttgacgacttctttgatgttgcgggatcaaaagaagaacttgaaaaccttgtcatgttggttgagatgtgggacgagcatcacaaagttgagttctactcagaacaagtagagattatattttcttcaatttatgactcagttaaccaacttggtgaaaaggcttctttggtacaagaccgcagtattaccaaacacctagtagaaatagtaagtatagtctatagacttgttggtagtatttttttccttcttttttcttttcagctttgagcctttgagtattgactagtgttgaatggtttgcacagtggttggatttgctaaagtctatgatgacagaggtagagtggcgtttgagcaaatatgtgccaacagagaaggaatacatgataaatgcatctttaacatttggactaggccccattgtattgccagcattatattttgttgggccaaagatctcagagtctattgttaaagatccagaatatgatgaattgttcaaactgatgagcacatgtggtcgcctcttgaatgatgttcagacttttgagagggagtacaacgagggcaagttgaatagtgtttctctcctcgttcttcatggtggctccatgtccatatcagacgccaaaaggaaattacagaagcccatagacacatgcagaagagacctcctaagtttagttcttcgtgaagaaagtgttgttcctaggccctgcaaggaattattttggaaaatgtgcaaggtgtgctacttcttctactcgacgacggatgggtttagctcacaagtggagagggctaaagaagtggatgcggtgatcaatgagccactaaagctacaaggaagtcatacgctggtgtctgatgtgtgaaaggaactaagcgtcgatgtgatgtgttcttttgatttattagtagttgtgttttctctatatggtggtttggtaggtgactgtataatgtaaaggagttggcacatgttgtcagtgtcgtaacatcttcttgatctattcagcgctctcttgggcttgcgttatggcgatgttgttgggtatgatgtagttgataactagtgtagactcatgtacatgataatacttcatgttacactaacatgcgcacgtgtggctatatggttgaagctcatacccattagtggtctcaagtaccttgttgccaagtcgtggcaaaagtgcgtctactaggttgtaatgttgcatatcatatatttaatatgttgtacagagacttatccaatatgacaacggacgctaggaaactttcagtagggccaagacatgggatggg

SEQ ID NO: 19425 - DNA, 2532 bp, Zea Mays
acgctacaccacacctgcagagcagcaagactagcttgtggctaccagcctagctagccaccgccgcgatccactatcatcgcttgctcgccgagtttcctgcggcggccggcgggcacctacatctcctctacctgactggctagtcattagcacagccagtacgtacgtagctcgcccggccggtgctcgacgacacagtgaattggcgacgcacgtagctaggaggccagcagctggggtcggagatggccatgccagtgaagctgactcctgcctccctctcgctgaaggcggtctgctgccgcttcagctccggagggcatgcgctgcgcttcggctcgtcgctaccgtgctggaggaggacgccgacgcaacggagcacgtcgtcgtctacgacgcgccctgcggctgaggttagctctggcaaaagcaagcagcacgatcaagaagcatcggaggctacgataagacagcagctccagctagtcgatgtgcttgagaacatggggatttctcggcattttgctgctgaaatcaaatgcatccttgacaggacatacagaagttggttacagagacatgaggaaattatgctggacacaatgacctgtgcgatggcatttcgtattctaagatgagttgtatcatgttgttgaagcttccggactccataattcacttggaggatatctcaatgatacaagaaccttgttagaattacacaaggcctcgacagttagtatctctgaagatgagtctatcctggatagcataggctcaaggtcacgtaccttactgagggaacaactagagtctggtggtgctctacgaaaaccttcactctttaaagaggtggaacatgctctggacggtcccttctacaccacattggaccgtctacaccataggtggaacatcgaaaatttcaatattatagagcagcacatgctagagacaccatacttgtcaaatcaacataccagtagagatattctagcgttgagtattagagacttcagttcctctcagtttacttaccagcaagaacttcaacatcttgaaagctgggtgaaagagtgcaggttagaccagctacaatttgcgcgacagaagttggcatacttctacttgtctgctgctggcaccatgttctctcctgagctgtctgatgctcgaactttgtgggccaaaaatggtgtgctcacaactattgttgacgacttctttgatgttgcgggatcaaaagaagaacttgaaaaccttgtcatgttggttgagatgtgggacgagcatcacaaagttgagttctactcagaacaagtagagattatattttcttcaatttatgactcagttaaccaacttggtgaaaaggcttctttggtacaagaccgcagtattaccaaacacctagtagaaatagtaagtatagtctatagacttgttggtagtatttttttccttcttttttcttttcagctttgagcctttgagtattgactagtgttgaatggtttgcacagtggttggatttgctaaagtctatgatgacagaggtagagtggcgtttgagcaaatatgtgccaacagagaaggaatacatgataaatgcatctttaacatttggactaggccccattgtattgccagcattatattttgttgggccaaagatctcagagtctattgttaaagatccagaatatgatgaattgttcaaactgatgagcacatgtggtcgcctcttgaatgatgttcagacttttgagagggagtacaacgagggcaagttgaatagtgtttctctcctcgttcttcatggtggctccatgtccatatcagacgccaaaaggaaattacagaagcccatagacacatgcagaagagacctcctaagtttagttcttcgtgaagaaagtgttgttcctaggccctgcaaggaattattttggaaaatgtgcaaggtgtgctacttcttctactcgacgacggatgggtttagctcacaagtggagagggctaaagaagtggatgcggtgatcaatgagccactaaagctacaaggaagtcatacgctggtgtctgatgtgtgaaaggaactaagcgtcgatgtgatgtgttcttttgatttattagtagttgtgttttctctatatggtggtttggtaggtgactgtataatgtaaaggagttggcacatgttgtcagtgtcgtaacatcttcttgatctattcagcgctctcttgggcttgcgttatggcgatgttgttgggtatgatgtagttgataactagtgtagactcatgtacatgataatacttcatgttacactaacatgcgcacgtgtggctatatggttgaagctcatacccattagtggtctcaagtaccttgttgccaagtcgtggcaaaagtgcgtctactaggttgtaatgttgcatatcatatatttaatatgttgtacagagacttatccaatatgacaacggacgctaggaaactttcagtagggccaagacatgggatggg

SEQ ID NO: 19426 - DNA, 2845 bp, Zea Mays
acgctacaccacacctgcagagcagcaagactagcttgtggctaccagcctagctagccaccgccgcgatccactatcatcgcttgctcgccgagtttcctgcggcggccggcgggcacctacatctcctctacctgactggctagtcattagcacagccagtacgtacgtagctcgcccggccggtgctcgacgacacagtgaattggcgacgcacgtagctaggaggccagcagctggggtcggagatggccatgccagtgaagctgactcctgcctccctctcgctgaaggcggtctgctgccgcttcagctccggagggcatgcgctgcgcttcggctcgtcgctaccgtgctggaggaggacgccgacgcaacggagcacgtcgtcgtctacgacgcgccctgcggctgaggctctggcaaaagcaagcagcacgatcaagaagcatcggaggctacgataagacagcagctccagctagtcgatgtgcttgagaacatggggatttctcggcattttgctgctgaaatcaaatgcatccttgacaggacatacagaagttggttacagagacatgaggaaattatgctggacacaatgacctgtgcgatggcatttcgtattctaaggttgaatggatacaatgtctcttctgatgagttgtatcatgttgttgaagcttccggactccataattcacttggaggatatctcaatgatacaagaaccttgttagaattacacaaggcctcgacagttagtatctctgaagatgagtctatcctggatagcataggctcaaggtcacgtaccttactgagggaacaactagagtctggtggtgctctacgaaaaccttcactctttaaagaggtggaacatgctctggacggtcccttctacaccacattggaccgtctacaccataggtggaacatcgaaaatttcaatattatagagcagcacatgctagagacaccatacttgtcaaatcaacataccagtagagatattctagcgttgagtattagagacttcagttcctctcagtttacttaccagcaagaacttcaacatcttgaaagctgggtgaaagagtgcaggttagaccagctacaatttgcgcgacagaagttggcatacttctacttgtctgctgctggcaccatgttctctcctgagctgtctgatgctcgaactttgtgggccaaaaatggtgtgctcacaactattgttgacgacttctttgatgttgcgggatcaaaagaagaacttgaaaaccttgtcatgttggttgagatgtgggacgagcatcacaaagttgagttctactcagaacaagtagagattatattttcttcaatttatgactcagttaaccaacttggtgaaaaggcttctttggtacaagaccgcagtattaccaaacacctagtagaaatagtaagtatagtctatagacttgttggtagtatttttttccttcttttttcttttcagctttgagcctttgagtattgactagtgttgaatggtttgcacagtggttggatttgctaaagtctatgatgacagaggtagagtggcgtttgagcaaatatgtgccaacagagaaggaatacatgataaatgcatctttaacatttggactaggccccattgtattgccagcattatattttgttgggccaaagatctcagagtctattgttaaagatccagaatatgatgaattgttcaaactgatgagcacatgtggtcgcctcttgaatgatgttcagacttttgaggtacattatcgagttgcaagtcttaagctttcatgataaacctattagactcatgaaagtatttgtgtaattaattaattagcataggaaagaatggataacaaagttagtttttattctcatttgctactatttaataggtatacgagcatggtatactaaatactagtaatttagccttgactaacaggccttttctttgtaatcgagaaaagtgaaacccttgtatagttgtataatgaaaatatgacgccagttggcacatggtggtcaattgatgtattgttgcagagggagtacaacgagggcaagttgaatagtgtttctctcctcgttcttcatggtggctccatgtccatatcagacgccaaaaggaaattacagaagcccatagacacatgcagaagagacctcctaagtttagttcttcgtgaagaaagtgttgttcctaggccctgcaaggaattattttggaaaatgtgcaaggtgtgctacttcttctactcgacgacggatgggtttagctcacaagtggagagggctaaagaagtggatgcggtgatcaatgagccactaaagctacaaggaagtcatacgctggtgtctgatgtgtgaaaggaactaagcgtcgatgtgatgtgttcttttgatttattagtagttgtgttttctctatatggtggtttggtaggtgactgtataatgtaaaggagttggcacatgttgtcagtgtcgtaacatcttcttgatctattcagcgctctcttgggcttgcgttatggcgatgttgttgggtatgatgtagttgataactagtgtagactcatgtacatgataatacttcatgttacactaacatgcgcacgtgtggctatatggttgaagctcatacccattagtggtctcaagtaccttgttgccaagtcgtggcaaaagtgcgtctactaggttgtaatgttgcatatcatatatttaatatgttgtacagagacttatccaatatgacaacggacgctaggaaactttcagtagggccaagacatgggatggg

SEQ ID NO: 19427 - DNA, 2750 bp, Zea Mays
acgctacaccacacctgcagagcagcaagactagcttgtggctaccagcctagctagccaccgccgcgatccactatcatcgcttgctcgccgagtttcctgcggcggccggcgggcacctacatctcctctacctgactggctagtcattagcacagccagtacgtacgtagctcgcccggccggtgctcgacgacacagtgaattggcgacgcacgtagctaggaggccagcagctggggtcggagatggccatgccagtgaagctgactcctgcctccctctcgctgaaggcggtctgctgccgcttcagctccggagggcatgcgctgcgcttcggctcgtcgctaccgtgctggaggaggacgccgacgcaacggagcacgtcgtcgtctacgacgcgccctgcggctgaggttagctctggcaaaagcaagcagcacgatcaagaagcatcggaggctacgataagacagcagctccagctagtcgatgtgcttgagaacatggggatttctcggcattttgctgctgaaatcaaatgcatccttgacaggacatacagaagttggttacagagacatgaggaaattatgctggacacaatgacctgtgcgatggcatttcgtattctaaggttgaatggatacaatgtctcttctgatgagttgtatcatgttgttgaagcttccggactccataattcacttggaggatatctcaatgatacaagaaccttgttagaattacacaaggcctcgacagttagtatctctgaagatgagtctatcctggatagcataggctcaaggtcacgtaccttactgagggaacaactagagtctggtggtgctctacgaaaaccttcactctttaaagaggtggaacatgctctggacggtcccttctacaccacattggaccgtctacaccataggtggaacatcgaaaatttcaatattatagagcagcacatgctagagacaccatacttctgggtgaaagagtgcaggttagaccagctacaatttgcgcgacagaagttggcatacttctacttgtctgctgctggcaccatgttctctcctgagctgtctgatgctcgaactttgtgggccaaaaatggtgtgctcacaactattgttgacgacttctttgatgttgcgggatcaaaagaagaacttgaaaaccttgtcatgttggttgagatgtgggacgagcatcacaaagttgagttctactcagaacaagtagagattatattttcttcaatttatgactcagttaaccaacttggtgaaaaggcttctttggtacaagaccgcagtattaccaaacacctagtagaaatagtaagtatagtctatagacttgttggtagtatttttttccttcttttttcttttcagctttgagcctttgagtattgactagtgttgaatggtttgcacagtggttggatttgctaaagtctatgatgacagaggtagagtggcgtttgagcaaatatgtgccaacagagaaggaatacatgataaatgcatctttaacatttggactaggccccattgtattgccagcattatattttgttgggccaaagatctcagagtctattgttaaagatccagaatatgatgaattgttcaaactgatgagcacatgtggtcgcctcttgaatgatgttcagacttttgaggtacattatcgagttgcaagtcttaagctttcatgataaacctattagactcatgaaagtatttgtgtaattaattaattagcataggaaagaatggataacaaagttagtttttattctcatttgctactatttaataggtatacgagcatggtatactaaatactagtaatttagccttgactaacaggccttttctttgtaatcgagaaaagtgaaacccttgtatagttgtataatgaaaatatgacgccagttggcacatggtggtcaattgatgtattgttgcagagggagtacaacgagggcaagttgaatagtgtttctctcctcgttcttcatggtggctccatgtccatatcagacgccaaaaggaaattacagaagcccatagacacatgcagaagagacctcctaagtttagttcttcgtgaagaaagtgttgttcctaggccctgcaaggaattattttggaaaatgtgcaaggtgtgctacttcttctactcgacgacggatgggtttagctcacaagtggagagggctaaagaagtggatgcggtgatcaatgagccactaaagctacaaggaagtcatacgctggtgtctgatgtgtgaaaggaactaagcgtcgatgtgatgtgttcttttgatttattagtagttgtgttttctctatatggtggtttggtaggtgactgtataatgtaaaggagttggcacatgttgtcagtgtcgtaacatcttcttgatctattcagcgctctcttgggcttgcgttatggcgatgttgttgggtatgatgtagttgataactagtgtagactcatgtacatgataatacttcatgttacactaacatgcgcacgtgtggctatatggttgaagctcatacccattagtggtctcaagtaccttgttgccaagtcgtggcaaaagtgcgtctactaggttgtaatgttgcatatcatatatttaatatgttgtacagagacttatccaatatgacaacggacgctaggaaactttcagtagggccaagacatgggatggg

SEQ ID NO: 19428 - DNA, 3232 bp, Zea Mays
cctgtgtccggccagccatcgtcattggtttcgcgcactctcgctcctgctcccggttttgtcgctccccactctctcctccagacctctaccaccaccccacaccgccgcacgcccacacgcaaccacgaaacggaagttttcctcgccttgcctgccctctcgatccgatcgggacccaaccctagcccggaatggcggcggcgaccggcggcatgcggaaggcgccgtcgctggaatggcggtgggtgtccacggaggacgacgacgacgaggaccgcgccggggacggggccgccgccgcggtcgtcggggcggtgagcaggggcgggagctttgagtcggaggatgacgaggatgatgaagaggaggaggacgaggagaagaaggggaggaagaggctgatccggaccgtgccatccgtcgactggttcgacgtcgaggggaacgaggtctccgtcgcgcagcagctcgacgactccgaggacaatgtttcttgctcttcagactcttgctgtggtgtttggagatattggaattggtccattgtatacatttgatgtcatgtttaacaagtaccctattcttggagaggaggatgtccttggagcactctcactagttctgtatactcttatattgatgccattagtgaagtatgttttggttgtcctttgggccaatgatgacggtgaaggtggtctatttgccttgtattctttgatttgtagaaatgcaaaagtgtgtctcattccaaaccaagtacagtctgagaagaggatgtcaagttttcgactcaagcttccaacaccagagcttgagagatccataaaagtaaaagagaaacttgaatcgtcactactgttgaagaaggtgcttctaggcttagtcttgtttgggacttctatgtttatatccaatggagttatcacaccagcaatgtcagtgttatctgctgtcagtggcttgaaagttgggctaccaaatacctcacaagatgctgttgtgatgatttcaattgcacttcttgtagtattgtttagtgtacagaggtatgccactagcaaagtggggtttgcaattggcccttctttacttttatggttttgttgccttggaggaattggaatatacaatttgagtatatatggctcaacagcatttagggcatttaatcctctctacattatttattattttgggaggaatccttttcaggcttggctgtccctcggtggttgtcttttatgtgcaacaggatctgaggccatcttttcaaatctttgttactttcccgtaagatacgttcagtatatgtttgtgcttcttgttcttccttgccttgtcttggcgtatctaggacaagctgcttttctcattgccaaccaaaagtcatcggagcatgtcttcttttcatctattccaagtggagttttctggcctgttttcttagtggcgaatctggctgcactaattgccagtaggacaatgacggttgctatattccagtgcctaaagcagtctatagcacttggttgttttccccggctcaaaatcgttcatacatctcgaaaatttatggctaagatatacattcccgttgtaaactggtttctattggtttcctgcttgggctttatcattctgttcagaaacatatatgatgttggcaatgcatatgctattgctgagctcggggtgatgataatggccacggtttatgttacaataataatgcttctaatatgggagtccaatattacaaaggttctgtcatttgttatcacattcctgttcttggagctgattttcttctcatctgctctgagtagtgttggagatgggggttgggcgttgttgatttttgcatctgttctactcatgattatgtttatatggaactacgggagcaaactaaagtatgacagtgaagtcaagcagaagcttccaaaggatttgatgaggaagttagggcccaaccttggtaccatcagagctcctggactaggcttagtctgcagtgatattgtgaaaggagttcctgcaatttttggtcattttctgacctcactccctgcgatacactcgataattgtatttgtgtgtatcaggaatgtgccagttccggtggttcctcaaagtgaaaggttccttttccaacgtgtatgctcaaggggctatcacttgttccgctgtatagcgagatacgggtataaagacaagaagcaggagcaccatagcgtatttgagcgtcttctgattgaaggccttgagaaattcatacaaagagaggcagtagagctatccctacaaagcgaagacgacattgactcggacgaagagcctccaacccctgtgaagatcatcacagcaccaaatggcagcctgtactcgctcgatgtccctctcctggcagactatgtgccttcaacagagctcattcatgaagccagctgctccacgcctcaacacgatcctgtactggattatgcacagaaccttgaactggagctggcgttcatcgagcagtccaagcggtctggggtcatctacctcatcgataatcccatcatcaaggccaggaaggactcatggttcttcaagaagctgatgataaactatttcttcgcgttcctgaggaacaactgccgccgggcgatcatgttgatgagcatcccgcattcaaacatgatgcaggtgcgcatgacttcttatgtctgattgctggaactgcactggttctgttcatggatgtctgatacaaaccacactgacagtaaaagaatgaacgtggcaaatgcaaagaggatatcggcacttttgtttttgttcataatttgatgatggcttaggttgttgtcggaatctatctcccctgtagttgtacaatgccaaaatatagttggaagttttagctggtacaccattagggtgctgtattaaccttttttactcttgtgcagtaaagattctttttgtcagcctccttgattttgttagataaggtttttggtgtttgcaaagttactggtgaatgtggcaatttgtatgtatatttttgcctctttttttaggtaacggaagcataagcatctggctttgcgaaggaatcaggccaaagtttcaataaccgatttcacagacacttaaccaagataaagacaaaagcctaaacaccgagtctgagggctaaggctaaccaaaagacacaaagaaatgcatagctgctgtc

SEQ ID NO: 19429 - DNA, 3066 bp, Zea Mays
atcgtcattggtttcgcgcactctcgctcctgctcccggttttgtcgctccccactctctcctccagacctctaccaccaccccacaccgccgcacgcccacacgcaaccacgaaacggaagttttcctcgccttgcctgccctctcgatccgatcgggacccaaccctagcccggaatggcggcggcgaccggcggcatgcggaaggcgccgtcgctggaatggcggtgggtgtccacggaggacgacgacgacgaggaccgcgccggggacggggccgccgccgcggtcgtcggggcggtgagcaggggcgggagctttgagtcggaggatgacgaggatgatgaagaggaggaggacgaggagaagaaggggaggaagaggctgatccggaccgtgccatccgtcgactggttcgacgtcgaggggaacgaggtctccgtcgcgcagcagctcgacgactccgaggagtttgattttggcaggacaatgtttcttgctcttcagactcttgctgtggtgtttggagatattggaattggtccattgtatacatttgatgtcatgtttaacaagtaccctattcttggagaggaggatgtccttggagcactctcactagttctgtatactcttatattgatgccattagtgaagtatgttttggttgtcctttgggccaatgatgacggtgaaggtggtctatttgccttgtattctttgatttgtagaaatgcaaaagtgtgtctcattccaaaccaagtacagtctgagaagaggatgtcaagttttcgactcaagcttccaacaccagagcttgagagatccataaaagtaaaagagaaacttgaatcgtcactactgttgaagaaggtgcttctaggcttagtcttgtttgggacttctatgtttatatccaatggagttatcacaccagcaatgtcagtgttatctgctgtcagtggcttgaaagttgggctaccaaatacctcacaagatgctgttgtgatgatttcaattgcacttcttgtagtattgtttagtgtacagaggcttggctgtccctcggtggttgtcttttatgtgcaacaggatctgaggccatcttttcaaatctttgttactttcccgtaagatacgttcagtatatgtttgtgcttcttgttcttccttgccttgtcttggcgtatctaggacaagctgcttttctcattgccaaccaaaagtcatcggagcatgtcttcttttcatctattccaagtggagttttctggcctgttttcttagtggcgaatctggctgcactaattgccagtaggacaatgacggttgctatattccagtgcctaaagcagtctatagcacttggttgttttccccggctcaaaatcgttcatacatctcgaaaatttatggctaagatatacattcccgttgtaaactggtttctattggtttcctgcttgggctttatcattctgttcagaaacatatatgatgttggcaatgcatatgctattgctgagctcggggtgatgataatggccacggtttatgttacaataataatgcttctaatatgggagtccaatattacaaaggttctgtcatttgttatcacattcctgttcttggagctgattttcttctcatctgctctgagtagtgttggagatgggggttgggcgttgttgatttttgcatctgttctactcatgattatgtttatatggaactacgggagcaaactaaagtatgacagtgaagtcaagcagaagcttccaaaggatttgatgaggaagttagggcccaaccttggtaccatcagagctcctggactaggcttagtctgcagtgatattgtgaaaggagttcctgcaatttttggtcattttctgacctcactccctgcgatacactcgataattgtatttgtgtgtatcaggaatgtgccagttccggtggttcctcaaagtgaaaggttccttttccaacgtgtatgctcaaggggctatcacttgttccgctgtatagcgagatacgggtataaagacaagaagcaggagcaccatagcgtatttgagcgtcttctgattgaaggccttgagaaattcatacaaagagaggcagtagagctatccctacaaagcgaagacgacattgactcggacgaagagcctccaacccctgtgaagatcatcacagcaccaaatggcagcctgtactcgctcgatgtccctctcctggcagactatgtgccttcaacagagctcattcatgaagccagctgctccacgcctcaacacgatcctgtactggattatgcacagaaccttgaactggagctggcgttcatcgagcagtccaagcggtctggggtcatctacctcatcgataatcccatcatcaaggccaggaaggactcatggttcttcaagaagctgatgataaactatttcttcgcgttcctgaggaacaactgccgccgggcgatcatgttgatgagcatcccgcattcaaacatgatgcaggtgcgcatgacttcttatgtctgattgctggaactgcactggttctgttcatggatgtctgatacaaaccacactgacagtaaaagaatgaacgtggcaaatgcaaagaggatatcggcacttttgtttttgttcataatttgatgatggcttaggttgttgtcggaatctatctcccctgtagttgtacaatgccaaaatatagttggaagttttagctggtacaccattagggtgctgtattaaccttttttactcttgtgcagtaaagattctttttgtcagcctccttgattttgttagataaggtttttggtgtttgcaaagttactggtgaatgtggcaatttgtatgtatatttttgcctctttttttaggtaacggaagcataagcatctggctttgcgaaggaatcaggccaaagtttcaataaccgatttcacagacacttaaccaagataaagacaaaagcctaaacaccgagtctgagggctaaggctaaccaaaagacacaaagaaatgcatagctgctgtc

SEQ ID NO: 19430 - DNA, 2960 bp, Zea Mays
atcgtcattggtttcgcgcactctcgctcctgctcccggttttgtcgctccccactctctcctccagacctctaccaccaccccacaccgccgcacgcccacacgcaaccacgaaacggaagttttcctcgccttgcctgccctctcgatccgatcgggacccaaccctagcccggaatggcggcggcgaccggcggcatgcggaaggcgccgtcgctggaatggcggtgggtgtccacggaggacgacgacgacgaggaccgcgccggggacggggccgccgccgcggtcgtcggggcggtgagcaggggcgggagctttgagtcggaggatgacgaggatgatgaagaggaggaggacgaggagaagaaggggaggaagaggctgatccggaccgtgccatccgtcgactggttcgacgtcgaggggaacgaggtctccgtcgcgcagcagctcgacgactccgaggagtttgattttggcaggacaatgtttcttgctcttcagactcttgctgtggtgtttggagatattggaattggtccattgtatacatttgatgtcatgtttaacaagtaccctattcttggagaggaggatgtccttggagcactctcactagttctgtatactcttatattgatgccattagtgaagtatgttttggttgtcctttgggccaatgatgacggtgaaggtggtctatttgccttgtattctttgatttgtagaaatgcaaaagtgtgtctcattccaaaccaagtacagtctgagaagaggatgtcaagttttcgactcaagcttccaacaccagagcttgagagatccataaaagtaaaagagaaacttgaatcgtcactactgttgaagaaggtgcttctaggcttagtcttgtttgggacttctatgtttatatccaatggagttatcacaccagcaatgtcaggcttggctgtccctcggtggttgtcttttatgtgcaacaggatctgaggccatcttttcaaatctttgttactttcccgtaagatacgttcagtatatgtttgtgcttcttgttcttccttgccttgtcttggcgtatctaggacaagctgcttttctcattgccaaccaaaagtcatcggagcatgtcttcttttcatctattccaagtggagttttctggcctgttttcttagtggcgaatctggctgcactaattgccagtaggacaatgacggttgctatattccagtgcctaaagcagtctatagcacttggttgttttccccggctcaaaatcgttcatacatctcgaaaatttatggctaagatatacattcccgttgtaaactggtttctattggtttcctgcttgggctttatcattctgttcagaaacatatatgatgttggcaatgcatatgctattgctgagctcggggtgatgataatggccacggtttatgttacaataataatgcttctaatatgggagtccaatattacaaaggttctgtcatttgttatcacattcctgttcttggagctgattttcttctcatctgctctgagtagtgttggagatgggggttgggcgttgttgatttttgcatctgttctactcatgattatgtttatatggaactacgggagcaaactaaagtatgacagtgaagtcaagcagaagcttccaaaggatttgatgaggaagttagggcccaaccttggtaccatcagagctcctggactaggcttagtctgcagtgatattgtgaaaggagttcctgcaatttttggtcattttctgacctcactccctgcgatacactcgataattgtatttgtgtgtatcaggaatgtgccagttccggtggttcctcaaagtgaaaggttccttttccaacgtgtatgctcaaggggctatcacttgttccgctgtatagcgagatacgggtataaagacaagaagcaggagcaccatagcgtatttgagcgtcttctgattgaaggccttgagaaattcatacaaagagaggcagtagagctatccctacaaagcgaagacgacattgactcggacgaagagcctccaacccctgtgaagatcatcacagcaccaaatggcagcctgtactcgctcgatgtccctctcctggcagactatgtgccttcaacagagctcattcatgaagccagctgctccacgcctcaacacgatcctgtactggattatgcacagaaccttgaactggagctggcgttcatcgagcagtccaagcggtctggggtcatctacctcatcgataatcccatcatcaaggccaggaaggactcatggttcttcaagaagctgatgataaactatttcttcgcgttcctgaggaacaactgccgccgggcgatcatgttgatgagcatcccgcattcaaacatgatgcaggtgcgcatgacttcttatgtctgattgctggaactgcactggttctgttcatggatgtctgatacaaaccacactgacagtaaaagaatgaacgtggcaaatgcaaagaggatatcggcacttttgtttttgttcataatttgatgatggcttaggttgttgtcggaatctatctcccctgtagttgtacaatgccaaaatatagttggaagttttagctggtacaccattagggtgctgtattaaccttttttactcttgtgcagtaaagattctttttgtcagcctccttgattttgttagataaggtttttggtgtttgcaaagttactggtgaatgtggcaatttgtatgtatatttttgcctctttttttaggtaacggaagcataagcatctggctttgcgaaggaatcaggccaaagtttcaataaccgatttcacagacacttaaccaagataaagacaaaagcctaaacaccgagtctgagggctaaggctaaccaaaagacacaaagaaatgcatagctgctgtc

SEQ ID NO: 19431 - DNA, 2784 bp, Zea Mays
atcgtcattggtttcgcgcactctcgctcctgctcccggttttgtcgctccccactctctcctccagacctctaccaccaccccacaccgccgcacgcccacacgcaaccacgaaacggaagttttcctcgccttgcctgccctctcgatccgatcgggacccaaccctagcccggaatggcggcggcgaccggcggcatgcggaaggcgccgtcgctggaatggcggtgggtgtccacggaggacgacgacgacgaggaccgcgccggggacggggccgccgccgcggtcgtcggggcggtgagcaggggcgggagctttgagtcggaggatgacgaggatgatgaagaggaggaggacgaggagaagaaggggaggaagaggctgatccggaccgtgccatccgtcgactggttcgacgtcgaggggaacgaggtctccgtcgcgcagcagctcgacgactccgaggagtttgattttggcaggacaatgtttcttgctcttcagactcttgctgtggtgtttggagatattggaattggtccattgtatacatttgatgtcatgtttaacaagtaccctattcttggagaggaggatgtccttggagcactctcactagttctgtatactcttatattgatgccattagtgaagtatgttttggttgtcctttgggccaatgatgacggtgaaggtggtctatttgccttgtattctttgatttgtagaaatgcaaaagtgtgtctcattccaaaccaagtacagtctgagaagaggatgtcaagttttcgactcaagcttccaacaccagagcttgagagatccataaaagtaaaagagaaacttgaatcgtcactactgttgaagaaggtgcttctaggcttagtcttgtttgggacttctatgtttatatccaatggagttatcacaccagcaatgtcagtgttatctgctgtcagtggcttgaaagttgggctaccaaatacctcacaagatgctgttgtgatgatttcaattgcacttcttgtagtattgtttagtgtacagaggcttggctgtccctcggtggttgtcttttatgtgcaacaggatctgaggccatcttttcaaatctttgttactttcccgtaagatacgttcagtatatgtttgtgcttcttgttcttccttgccttgtcttggcgtatctaggacaagctgcttttctcattgccaaccaaaagtcatcggagcatgtcttcttttcatctattccaagtggagttttctggcctgttttcttagtggcgaatctggctgcactaattgccagtaggacaatgacggttgctatattccagtgcctaaagcagtctatagcacttggttgttttccccggctcaaaatcgttcatacatctcgaaaatttatggctaagatatacattcccgttgtaaactggtttctattggtttcctgcttgggctttatcattctgttcagaaacatatatgatgttggcaatgcatatggtaaataatctattgatatgcttttgatgccaatatgttctctatttattcttctgtttgtttcttctgatctgacaaagttccatcttgaacagctattgctgagctcggggtgatgataatggccacggtttatgttacaataataatgcttctaatatgggagtccaatattacaaaggttctgtcatttgttatcacattcctgttcttggagctgattttcttctcatctgctctgagtagtgttggagatgggggttgggcgttgttgatttttgcatctgttctactcatgattatgtttatatggaactacgggagcaaactaaagtatgacagtgaagtcaagcagaagcttccaaaggatttgatgaggaagttagggcccaaccttggtaccatcagagctcctggactaggcttagtctgcagtgatattgtgaaaggagttcctgcaatttttggtcattttctgacctcactccctgcgatacactcgataattgtatttgtgtgtatcaggaatgtgccagttccggtggttcctcaaagtgaaaggttccttttccaacgtgtatgctcaaggggctatcacttgttccgctgtatagcgagatacgggtataaagacaagaagcaggagcaccatagcgtatttgagcgtcttctgattgaaggccttgagaaattcatacaaagagaggcagtagagctatccctacaaagcgaagacgacattgactcggacgaagagcctccaacccctgtgaagatcatcacagcaccaaatggcagcctgtactcgctcgatgtccctctcctggcagactatgtgccttcaacagagctcattcatgaagccagctgctccacgcctcaacacgatcctgtactggattatgcacagaaccttgaactggagctggcgttcatcgagcagtccaagcggtctggggtcatctacctcatcgataatcccatcatcaaggccaggaaggactcatggttcttcaagaagctgatgataaactatttcttcgcgttcctgaggaacaactgccgccgggcgatcatgttgatgagcatcccgcattcaaacatgatgcaggtaacggaagcataagcatctggctttgcgaaggaatcaggccaaagtttcaataaccgatttcacagacacttaaccaagataaagacaaaagcctaaacaccgagtctgagggctaaggctaaccaaaagacacaaagaaatgcatagctgctgtc

SEQ ID NO: 19432 - DNA, 1350 bp, Zea Mays
aacaaaaagaagaggtgaaaatccatttcctattttcctcacgtattatcctcttgcttgttcgtccggttcttcgccctcgccgcgcgggactaccaatccaaactggcgacgaccctgctgccaccccacagcagatttgaggagcggacgcccgtttaaatggctattggagtcccatccatggagctccaccgctcctcaccgttgctctcgggtggccgaggaggaaatacatgcctacagaagaagcccttctttgtccaagcaaagagactagtggggatggagaaagcaagtacgaggccaggaacacaagagtctggacagacaaagaaaagagcacccctggttcgtggaactgttagcccacctcttccagtaccaggaaacatacctcggcctccttatgtcggcacagaatatgtaccagagatagcaaaagagatacaaatgcatgacaaagagggcattgtccacatgagagctgcttgcgagctcgcggctcgtgttcttgactatgcaggaacgttagtgaaatgcacaagatgatcatcgatgctggagcctatccatcaccacttggatatggtgggtttccaaaaagtgtatgcacctcagtgaatgagtgcatgtgccatggaattcctgattcacgcgagctacaggatggagacataattaacattgatgtcactgtctacttgaatgttactgaagagtgcttgctcaggggcatatcaacatgcaaacatggtaccagctttaagaagattggcagaagaataagtgagcatgctgagaggaacggttttggtgttgtggagtgttttgttgggcatggagtcggcagggtatttcactcagaaccaattatctatcaccagaggaacaacagaccgggccagatgattgaagggcagactttcacaatagagccgatcatatcgatggggagcatcgagtgcgacatgtgggacgacggctggactgccgtgacgacggacggcagcttggcggcgcagttcgagcacaccatactgatcaccaggaccggagccgagatcctcaccaagtgctaggaggaaaggaaatcgcatgtgcccgatagccgacggtaggtaatctgtattcgtgaggtggtgaggatgcttgaggtgacctattttgtctcgcaaaatgggcgtgctacagaatagtgaagaaaagggttgagagattgcaaatggcaggtttgggcaaagaggaccaagttctaggcgtccgggacacgactctgtgtctggcgttcccttctgttgtcgacatcccgtggttcagttgaggccatgtctcgtgacgttctcctcc

SEQ ID NO: 19433 - DNA, 1377 bp, Zea Mays
agaagaggtgaaaatccatttcctattttcctcacgtattatcctcttgcttgttcgtccggttcttcgccctcgccgcgcgggactaccaatccaaactggcgacgaccctgctgccaccccacagcagatttgaggagcggacgcccgtttaaatggctattggagtcccatccatggagctccaccgctcctcaccgttgctctcgggtggccgaggaggaaatacatgcctacagaagaagcccttctttgtccaagcaaagagactagtggggatggagaaagcaagtacgaggccaggaacacaagagtctggacagacaaagaaaagagcacccctggttcgtggaactgttagcccacctcttccagtaccaggaaacatacctcggcctccttatgtcggcacagaatatgtaccagagatagcaaaagagatacaaatgcatgacaaagagggcattgtccacatgagagctgcttgcgagctcgcggctcgtgttcttgactatgcaggaacgttagtgaaaccctctgtaacaacagacgaaattgataaagcagtgcacaagatgatcatcgatgctggagcctatccatcaccacttggatatggtgggtttccaaaaagtgtatgcacctcagtgaatgagtgcatgtgccatggaattcctgattcacgcgagctacaggatggagacataattaacattgatgtcactgtctacttgaatgttactgaagagtgcttgctcaggggcatatcaacatgcaaacatggtaccagctttaagaagattggcagaagaataagtgagcatgctgagaggaacggttttggtgttgtggagtgttttgttgggcatggagtcggcagggtatttcactcagaaccaattatctatcaccagaggaacaacagaccgggccagatgattgaagggcagactttcacaatagagccgatcatatcgatggggagcatcgagtgcgacatgtgggacgacggctggactgccgtgacgacggacggcagcttggcggcgcagttcgagcacaccatactgatcaccaggaccggagccgagatcctcaccaagtgctaggaggaaaggaaatcgcatgtgcccgatagccgacggtaggtaatctgtattcgtgaggtggtgaggatgcttgaggtgacctattttgtctcgcaaaatgggcgtgctacagaatagtgaagaaaagggttgagagattgcaaatggcaggtttgggcaaagaggaccaagttctaggcgtccgggacacgactctgtgtctggcgttcccttctgttgtcgacatcccgtggttcagttgaggccatgtctcgtgacgttctcctcc

SEQ ID NO: 19434 - DNA, 1406 bp, Zea Mays
gaaaatccatttcctattttcctcacgtattatcctcttgcttgttcgtccggttcttcgccctcgccgcgcgggactaccaatccaaactggcgacgaccctgctgccaccccacagcagatttgaggagcggacgcccgtttaaatggctattggagtcccatccatggagctccaccgctcctcaccgttgctctcgggtggccgaggaggaaatacatgcctacagaagaagcccttctttgtccaagcaaagagactagtggggatggagaaagcaagtacgaggccaggaacacaagagtctggacagacaaagaaaagagcacccctggttcgtggaactgttagcccacctcttccagtaccaggaaacatacctcggcctccttatgtcggcacagaatatgtaccagagatagcaaaagagatacaaatgcatgacaaagagggcattgtccacatgagagctgcttgcgagctcgcggctcgtgttcttgactatgcaggaacgttagtgaaatgcacaagatgatcatcgatgctggagcctatccatcaccacttggatatggtgggtttccaaaaagtgtatgcacctcagtgaatgagtgcatgtgccatggaattcctgattcacgcgagctacaggatggagacataattaacattgatgtcactgtctacttgaatggttatcatggggatacctcaaaaacatttctttgtggagaagtcgatgaagccagtaaacgacttgtgaaggttactgaagagtgcttgctcaggggcatatcaacatgcaaacatggtaccagctttaagaagattggcagaagaataagtgagcatgctgagaggaacggttttggtgttgtggagtgttttgttgggcatggagtcggcagggtatttcactcagaaccaattatctatcaccagaggaacaacagaccgggccagatgattgaagggcagactttcacaatagagccgatcatatcgatggggagcatcgagtgcgacatgtgggacgacggctggactgccgtgacgacggacggcagcttggcggcgcagttcgagcacaccatactgatcaccaggaccggagccgagatcctcaccaagtgctaggaggaaaggaaatcgcatgtgcccgatagccgacggtaggtaatctgtattcgtgaggtggtgaggatgcttgaggtgacctattttgtctcgcaaaatgggcgtgctacagaatagtgaagaaaagggttgagagattgcaaatggcaggtttgggcaaagaggaccaagttctaggcgtccgggacacgactctgtgtctggcgttcccttctgttgtcgacatcccgtggttcagttgaggccatgtctcgtgacgttctcctcc

SEQ ID NO: 19435 - DNA, 1427 bp, Zea Mays
atttcctattttcctcacgtattatcctcttgcttgttcgtccggttcttcgccctcgccgcgcgggactaccaatccaaactggcgacgaccctgctgccaccccacagcagatttgaggagcggacgcccgtttaaatggctattggagtcccatccatggagctccaccgctcctcaccgttgctctcgggtggccgaggaggaaatacatgcctacagaagaagcccttctttgtccaagcaaagagactagtggggatggagaaagcaagtacgaggaacacaagagtctggacagacaaagaaaagagcacccctggttcgtggaactgttagcccacctcttccagtaccaggaaacatacctcggcctccttatgtcggcacagaatatgtaccagagatagcaaaagagatacaaatgcatgacaaagagggcattgtccacatgagagctgcttgcgagctcgcggctcgtgttcttgactatgcaggaacgttagtgaaaccctctgtaacaacagacgaaattgataaagcagtgcacaagatgatcatcgatgctggagcctatccatcaccacttggatatggtgggtttccaaaaagtgtatgcacctcagtgaatgagtgcatgtgccatggaattcctgattcacgcgagctacaggatggagacataattaacattgatgtcactgtctacttgaatggttatcatggggatacctcaaaaacatttctttgtggagaagtcgatgaagccagtaaacgacttgtgaaggttactgaagagtgcttgctcaggggcatatcaacatgcaaacatggtaccagctttaagaagattggcagaagaataagtgagcatgctgagaggaacggttttggtgttgtggagtgttttgttgggcatggagtcggcagggtatttcactcagaaccaattatctatcaccagaggaacaacagaccgggccagatgattgaagggcagactttcacaatagagccgatcatatcgatggggagcatcgagtgcgacatgtgggacgacggctggactgccgtgacgacggacggcagcttggcggcgcagttcgagcacaccatactgatcaccaggaccggagccgagatcctcaccaagtgctaggaggaaaggaaatcgcatgtgcccgatagccgacggtaggtaatctgtattcgtgaggtggtgaggatgcttgaggtgacctattttgtctcgcaaaatgggcgtgctacagaatagtgaagaaaagggttgagagattgcaaatggcaggtttgggcaaagaggaccaagttctaggcgtccgggacacgactctgtgtctggcgttcccttctgttgtcgacatcccgtggttcagttgaggccatgtctcgtgacgttctcctcc

SEQ ID NO: 19436 - DNA, 1290 bp, Zea Mays
atttcctattttcctcacgtattatcctcttgcttgttcgtccggttcttcgccctcgccgcgcgggactaccaatccaaactggcgacgaccctgctgccaccccacagcagatttgaggagcggacgcccgtttaaatggctattggagtcccatccatggagctccaccgctcctcaccgttgctctcgggtggccgaggaggaaatacatgcctacagaagaagcccttctttgtccaagcaaagagactagtggggatggagaaagcaagtacgaggccaggaacacaagagtctggacagacaaagaaaagagcacccctggttcgtggaactgttagcccacctcttccagtaccaggaaacatacctcggcctccttatgtcggcacagaatatgtaccagagatagcaaaagagatacaaatgcatgacaaagagggcattgtccacatgagagctgcttgcgagctcgcggctcgtgttcttgactatgcaggaacgttagtgaaaccctctgtaacaacagacgaaattgataaagcagtgcacaagatgatcatcgatgctggagcctatccatcaccacttggatatggtgggtttccaaaaagtgtatgcacctcagtgaatgagtgcatgtgccatggaattcctgattcacgcgagctacaggatggagacataattaacattgatgtcactgtctacttgaatgttactgaagagtgcttgctcaggggcatatcaacatgcaaacatggtaccagctttaagaagattggcagaagaataagtgagcatgctgagaggaacggttttggtgttgtggagtgttttgttgggcatggagtcggcagggtatttcactcagaaccaattatctatcaccagaggaacaacagaccgggccagatgattgaagggcagactttcacaataggttcgcggcatcctagctcattccacgccgactaaaggcagccatagccgatcatatcgatggggagcatcgagtgcgacatgtgggacgacggctggactgccgtgacgacggacggcagcttggcggcgcagttcgagcacaccatactgatcaccaggaccggagccgagatcctcaccaagtgctaggaggaaaggaaatcgcatgtgcccgatagccgacggtttgggcaaagaggaccaagttctaggcgtccgggacacgactctgtgtctggcgttcccttctgttgtcgacatcccgtggttcagttgaggccatgtctcgtgacgttctcctcc

SEQ ID NO: 19437 - DNA, 1297 bp, Zea Mays
atttcctattttcctcacgtattatcctcttgcttgttcgtccggttcttcgccctcgccgcgcgggactaccaatccaaactggcgacgaccctgctgccaccccacagcagatttgaggagcggacgcccgtttaaatggctattggagtcccatccatggagctccaccgctcctcaccgttgctctcgggtggccgaggaaatacatgcctacagaagaagcccttctttgtccaagcaaagagactagtggggatggagaaagcaagtacgaggccaggaacacaagagtctggacagacaaagaaaagagcacccctggttcgtggaactgttagcccacctcttccagtaccaggaaacatacctcggcctccttatgtcggcacagaatatgtaccagagatagcaaaagagatacaaatgcatgacaaagagggcattgtccacatgagagctgcttgcgagctcgcggctcgtgttcttgactatgcaggaacgttagtgaaatgcacaagatgatcatcgatgctggagcctatccatcaccacttggatatggtgggtttccaaaaagtgtatgcacctcagtgaatgagtgcatgtgccatggaattcctgattcacgcgagctacaggatggagacataattaacattgatgtcactgtctacttgaatggttatcatggggatacctcaaaaacatttctttgtggagaagtcgatgaagccagtaaacgacttgtgaaggttactgaagagtgcttgctcaggggcatatcaacatgcaaacatggtaccagctttaagaagattggcagaagaataagggaacaacagaccgggccagatgattgaagggcagactttcacaatagagccgatcatatcgatggggagcatcgagtgcgacatgtgggacgacggctggactgccgtgacgacggacggcagcttggcggcgcagttcgagcacaccatactgatcaccaggaccggagccgagatcctcaccaagtgctaggaggaaaggaaatcgcatgtgcccgatagccgacggtaggtaatctgtattcgtgaggtggtgaggatgcttgaggtgacctattttgtctcgcaaaatgggcgtgctacagaatagtgaagaaaagggttgagagattgcaaatggcaggtttgggcaaagaggaccaagttctaggcgtccgggacacgactctgtgtctggcgttcccttctgttgtcgacatcccgtggttcagttgaggccatgtctcgtgacgttctcctcc

SEQ ID NO: 19438 - DNA, 1156 bp, Zea Mays
atttcctattttcctcacgtattatcctcttgcttgttcgtccggttcttcgccctcgccgcgcgggactaccaatccaaactggcgacgaccctgctgccaccccacagcagatttgaggagcggacgcccgtttaaatggctattggagtcccatccatggagctccaccgctcctcaccgttgctctcgggtggccgaggaggaaatacatgcctacagaagaagcccttctttgtccaagcaaagagactagtggggatggagaaagcaagtacgaggccaggaacacaagagtctggacagacaaagaaaagagcacccctggttcgtggaactgttagcccacctcttccagtaccaggaaacatacctcggcctccttatgtcggcacagaatatgtaccagagatagcaaaagagatacaaatgcatgacaaagagggcattgtccacatgagagctgcttgcgagctcgcggctcgtgttcttgactatgcaggaacgttagtgaaagttactgaagagtgcttgctcaggggcatatcaacatgcaaacatggtaccagctttaagaagattggcagaagaataagtgagcatgctgagaggaacggttttggtgttgtggagtgttttgttgggcatggagtcggcagggtatttcactcagaaccaattatctatcaccagaggaacaacagaccgggccagatgattgaagggcagactttcacaatagagccgatcatatcgatggggagcatcgagtgcgacatgtgggacgacggctggactgccgtgacgacggacggcagcttggcggcgcagttcgagcacaccatactgatcaccaggaccggagccgagatcctcaccaagtgctaggaggaaaggaaatcgcatgtgcccgatagccgacggtaggtaatctgtattcgtgaggtggtgaggatgcttgaggtgacctattttgtctcgcaaaatgggcgtgctacagaatagtgaagaaaagggttgagagattgcaaatggcaggtttgggcaaagaggaccaagttctaggcgtccgggacacgactctgtgtctggcgttcccttctgttgtcgacatcccgtggttcagttgaggccatgtctcgtgacgttctcctcc

SEQ ID NO: 19439 - DNA, 2207 bp, Zea Mays
cgcgtcgtggatcggctttctccgtgctccacctcatcggcctcatgccccgtagccccgactccccatctgccgcctccacctcatgggccgctgggtccaccctcgtcgtccagcttggcgacatctttaccgtggtggcgacgagctccgcctcctgcaccccctccgcctcctggccccttccgctgaggcccgcgtcggcgcgttcctgccatagtcggcaaccaataggagcgtaaaactggagctagggattgaagctgttgcaggtacatgtcatatataaatggacatgggcaggcactcccgctgagggtgcttcttggcttcgtctgtagaggcttgctgatatttggcataggatattgttaatttgtggtcaaagccatccatgccgcaattacttcagggacagggtgtttactggggctagaaggattctgtttttattgcacgacacatgacaacatatccaagtagtccttgattgatttagcagcagggagtaagcgtcttgctaaaagtggctccacaggtgaacttaggtgagtgtttggttaccatgtatttccagatcaatgacatactaaaattgttctttgcgcatataaatacaaaaaaataggtataggaaaagaaatgacatgcaacccaataaatctttttgtatttatttataagaaatgacagaaaaaatctccctcattaaaataagtgaaagaatctaacaaccactaattatcttccaaaaaatcaattattatttttgcaccaagttgtaacaatactgaaaccatattcctttcatctcattttatttgtttaacacaatgattttaataagttcaatatcacactgtaaagagtgaaccaatgatttgtcatagactacaggcattagctctcttttgatactaaatccatattcctttcatcctttgatctcatttaatatgtttaatacattgcttttagtacgttcaacatcacactacaagcatggttattttttaaagatgcctaccatttttatcggtcagactatttcttaaaattgttccacgacataatatttaccaatctatacatccatacatcattcaacaatgctagatcttggtagcgagacaacgttcttcgatgtttttgatggtcatggaggtaatcacaatatatgccttttatgttccttgaattagactgcctacgaggaataccattatgccaagtatttatagaacctctctttaacatttcacaacctcatacggtcataccattgctttacttaggaagagtagctgtcaaattctgtacaaaatacccgcataatcaagttctcaaaagtgaagcctattctgttggtgacctaggtcctactatcctaataaagcttaaatatttattatatgtatacaacaaacacaaagttgattgtgtaaatgctctgttgatagtggctttctaattcaacatatatccctataactgcatatctgtattgaatatgataatgttatctgcatttaaatggacctgtgggtaagactcatatgaatgaacagccgtctagaggccattttgtatttacattaaagatatccaaatctaatgaggtagaatggaacattcactattatcataccaagatctaccaaaatatagtgttccttatgctctctttcagactcgcgacaatccctttttaaacaaatattttgcatgccaaataactaatcctgagaaagtatagctcccatttttttggttgaagaaaacagaccaacctggccaaagagtcattaacttgattgattttgctgcagcgatcgtcttgctaaaagtggttgtacaggtgatcgcttgaaggaaactcaggttcaagaaggacacatgagtatccgagaaaaaactcctcaaatcctggaatagcctcgatggttccagatggcgaacgaaccgggtgaggaaaagaacccaccggcctgctgtccattgctcctagaagcatcgcgtcgtggatcggctttctccgtgctccacctcgtcggcctcatgccccgtagccccgactctccatctgccgcctccacctcatgggccgccgggtccaccctcgccgtccagcttggcgacatctttaccgtggtggcgacgagctccgcctcctgcaccccctccgcctcctcgccccttccgctgag

SEQ ID NO: 19440 - DNA, 2286 bp, Zea Mays
cgcgtcgtggatcggctttctccgtgctccacctcatcggcctcatgccccgtagccccgactccccatctgccgcctccacctcatgggccgctgggtccaccctcgtcgtccagcttggcgacatctttaccgtggtggcgacgagctccgcctcctgcaccccctccgcctcctggccccttccgctgaggcccgcgtcggcgcgttcctgccatagtcggcaaccaataggagcgtaaaactggagctagggattgaagctgttgcaggtacatgtcatatataaatggacatgggcaggcactcccgctgagggtgcttcttggcttcgtctgtagaggcttgctgatatttggcataggatattgttaatttgtgggtatgatgcatgtattatttgagatctttgagcagataaagcaatcattatcatctcaaagggagggtattgatttcatggccgtgattccccctctcccagtcaaagccatccatgccgcaattacttcagggacagggtgtttactggggctagaaggattctgtttttattgcacgacacatgacaacatatccaagtagtccttgattgatttagcagcagggagtaagcgtcttgctaaaagtggctccacaggtgaacttaggtgagtgtttggttaccatgtatttccagatcaatgacatactaaaattgttctttgcgcatataaatacaaaaaaataggtataggaaaagaaatgacatgcaacccaataaatctttttgtatttatttataagaaatgacagaaaaaatctccctcattaaaataagtgaaagaatctaacaaccactaattatcttccaaaaaatcaattattatttttgcaccaagttgtaacaatactgaaaccatattcctttcatctcattttatttgtttaacacaatgattttaataagttcaatatcacactgtaaagagtgaaccaatgatttgtcatagactacaggcattagctctcttttgatactaaatccatattcctttcatcctttgatctcatttaatatgtttaatacattgcttttagtacgttcaacatcacactacaagcatggttattttttaaagatgcctaccatttttatcggtcagactatttcttaaaattgttccacgacataatatttaccaatctatacatccatacatcattcaacaatgctagatcttggtagcgagacaacgttcttcgatgtttttgatggtcatggaggtaatcacaatatatgccttttatgttccttgaattagactgcctacgaggaataccattatgccaagtatttatagaacctctctttaacatttcacaacctcatacggtcataccattgctttacttaggaagagtagctgtcaaattctgtacaaaatacccgcataatcaagttctcaaaagtgaagcctattctgttggtgacctaggtcctactatcctaataaagcttaaatatttattatatgtatacaacaaacacaaagttgattgtgtaaatgctctgttgatagtggctttctaattcaacatatatccctataactgcatatctgtattgaatatgataatgttatctgcatttaaatggacctgtgggtaagactcatatgaatgaacagccgtctagaggccattttgtatttacattaaagatatccaaatctaatgaggtagaatggaacattcactattatcataccaagatctaccaaaatatagtgttccttatgctctctttcagactcgcgacaatccctttttaaacaaatattttgcatgccaaataactaatcctgagaaagtatagctcccatttttttggttgaagaaaacagaccaacctggccaaagagtcattaacttgattgattttgctgcagcgatcgtcttgctaaaagtggttgtacaggttcaagaaggacacatgagtatccgagaaaaaactcctcaaatcctggaatagcctcgatggttccagatggcgaacgaaccgggtgaggaaaagaacccaccggcctgctgtccattgctcctagaagcatcgcgtcgtggatcggctttctccgtgctccacctcgtcggcctcatgccccgtagccccgactctccatctgccgcctccacctcatgggccgccgggtccaccctcgccgtccagcttggcgacatctttaccgtggtggcgacgagctccgcctcctgcaccccctccgcctcctcgccccttccgctgag

SEQ ID NO: 19441 - DNA, 2316 bp, Zea Mays
cgcgtcgtggatcggctttctccgtgctccacctcatcggcctcatgccccgtagccccgactccccatctgccgcctccacctcatgggccgctgggtccaccctcgtcgtccagcttggcgacatctttaccgtggtggcgacgagctccgcctcctgcaccccctccgcctcctggccccttccgctgaggcccgcgtcggcgcgttcctgccatagtcggcaaccaataggagcgtaaaactggagctagggattgaagctgttgcaggtacatgtcatatataaatggacatgggcaggcactcccgctgagggtgcttcttggcttcgtctgtagaggcttgctgatatttggcataggatattgttaatttgtgggtatgatgcatggattatttgagatctttgaacagataaagcaatcattatcatctcaaagggagggtattgatttcatggccgtgattccccctctcccagtcaaagccatccaagccgcaattacttcagggacagggtgttcactggggctagaaggattctgtttttattgcacgacacatgacaacatatccaagtagtccttgattgatttagcagcagggagtaagcgtcttgctaaaagtggctccacaggtgaacttaggtgagtgtttggttaccatgtatttccagatcaatgacatactaaatttgttctttgcacatataaatacaaaaaaaataggtataggaaaagaaatgacatgcaacccaataaatctttttgtatttatttataagaaatgacagaaaaaatctccctcattaaaataagtgaaagaatctaacaaccactaattatcttccaaaaaatcaattattatttttgcaccaagttgtaacaatactgaaaccatattcctttcatctcattctatctgtttaacacaatgattttaataagttcaatatcacactgtaaagagtgaaccaatgatttgtcatagactacaggcattagctctcttttgatactaaatccatattcctttcatcctttgatctcatttaatatgtttaatacattgattttagtacgttcaacatcacactacaagcatggttattttttaaagatgcctaccatttttatcggtcagactatttcttaaaattgttccacgacataatatttaccaatctatacatccatacatcattcaacaatgctagatcttggtagcgagacaacgttcttcgatgtttttgatggtcatggaggtaatcacaatatatgccttttatgttccttgaattagactgcctacgaggaataccattatgccaagtatttatagaacctctctttaacatttcacaacctcatacggtcataccattgctttacttaggaagagtagctgtcaaattctgtacaaaatacccgcataatcaagttctcaaaagtgaagcctattcagttggtgacctaggtcctactgtcctaataaagcttaaatatttattatatgtatacaacaaacacaaagttgattgtgtaaatgctctgttgatagtggctttctaattcaacatatatccctataactgcatatctgtattgaatatgataatgttatctgcatttaaatggacctgtgggtaagactcatatgaatgaacaaccgtctagaggccattttgtatttacattaaagatatccaaatctaatgaggtagaatggaacattcactattatcataccaagatctaccaaaatatagtgttccttatgctctctttcagactcgcgacaatccctttttaaacaaatattttgcatgccaaataactaatcctgagaaagtatagctcccatttttttggttgaagaaaacagaccaacctggccaaagagtcattaacttgattgattttgctgcagcgatcgtcttgctaaaagtggttgtacaggtgatcgcttgaaggaaactcaggttcaagaaggacacatgagtatccgagaaaaaactcccaagaaatcttcccaaaactgaatgttgccttctaccatcaacaacctttgaagttctagggtgtttatttttgtatgttctctacaattatgtgtatatatatatatattcatccttttcaagacaatttttataaatataacaacttgatttcaaatgttgaaacacgataatttacctaactctatttagatgagtatatgtatatcttgctcaaaatgttatcacttatactacaatttttgcccacgcgcgcaggtcgtctgcgcgcgccagttactagtattatctat

SEQ ID NO: 19442 - DNA, 2067 bp, Zea Mays
ttatttacacaatttctagcttggtacatgtcatatataaatggacatgggcaggcactcccgctgagggtgcttcttggcttcgtctgtagaggcttgctgatatttggcataggatattgttaatttgtgggtatgatgcatggattatttgagatctttgaacagataaagcaatcattatcatctcaaagggagggtattgatttcatggccgtgattccccctctcccagtcaaagccatccaagccgcaattacttcagggacagggtgttcactggggctagaaggattctgtttttattgcacgacacatgacaacatatccaagtagtccttgattgatttagcagcagggagtaagcgtcttgctaaaagtggctccacaggtgaacttaggtgagtgtttggttaccatgtatttccagatcaatgacatactaaatttgttctttgcacatataaatacaaaaaaaataggtataggaaaagaaatgacatgcaacccaataaatctttttgtatttatttataagaaatgacagaaaaaatctccctcattaaaataagtgaaagaatctaacaaccactaattatcttccaaaaaatcaattattatttttgcaccaagttgtaacaatactgaaaccatattcctttcatctcattctatctgtttaacacaatgattttaataagttcaatatcacactgtaaagagtgaaccaatgatttgtcatagactacaggcattagctctcttttgatactaaatccatattcctttcatcctttgatctcatttaatatgtttaatacattgattttagtacgttcaacatcacactacaagcatggttattttttaaagatgcctaccatttttatcggtcagactatttcttaaaattgttccacgacataatatttaccaatctatacatccatacatcattcaacaatgctagatcttggtagcgagacaacgttcttcgatgtttttgatggtcatggaggtaatcacaatatatgccttttatgttccttgaattagactgcctacgaggaataccattatgccaagtatttatagaacctctctttaacatttcacaacctcatacggtcataccattgctttacttaggaagagtagctgtcaaattctgtacaaaatacccgcataatcaagttctcaaaagtgaagcctattcagttggtgacctaggtcctactgtcctaataaagcttaaatatttattatatgtatacaacaaacacaaagttgattgtgtaaatgctctgttgatagtggctttctaattcaacatatatccctataactgcatatctgtattgaatatgataatgttatctgcatttaaatggacctgtgggtaagactcatatgaatgaacaaccgtctagaggccattttgtatttacattaaagatatccaaatctaatgaggtagaatggaacattcactattatcataccaagatctaccaaaatatagtgttccttatgctctctttcagactcgcgacaatccctttttaaacaaatattttgcatgccaaataactaatcctgagaaagtatagctcccatttttttggttgaagaaaacagaccaacctggccaaagagtcattaacttgattgattttgctgcagcgatcgtcttgctaaaagtggttgtacaggtgatcgcttgaaggaaactcaggttcaagaaggacacatgagtatccgagaaaaaactcccaagaaatcttcccaaaactgaatgttgccttctaccatcaacaacctttgaagttctagggtgtttatttttgtatgttctctacaattatgtgtatatatatatatattcatccttttcaagacaatttttataaatataacaacttgatttcaaatgttgaaacacgataatttacctaactctatttagatgagtatatgtatatcttgctcaaaatgttatcacttatactacaatttttgcccacgcgcgcaggtcgtctgcgcgcgccagttactagtattatctat

SEQ ID NO: 19443 - DNA, 1399 bp, Zea Mays
atcaaaacagcaaccgccctctctctctctccatctccttcacgccacaccacaagtgtcgaaacggatcaaagagcaagcgacggggacgagagagacgagaggaccgtcgtctccccctcctccctcacaactcacacgcgagacggagacgcggccgcagccgagaatgcagcctgtcttaattcgtcatctactgataccggcaagggaaggagtaaattgtcaaccaacaaagttacacatggattccacctggtggaaggcaagtccggccatggcatggaagactaccatgtggcagagtacaaatatgtgaagaaccatgagcttggtctcttcgccatctttgatggccatttaggagataaggtgccaagttacctgaaagctaaccttttcagcaacataatgaaagagcctctcttctggtctagtcctgaagaagcaataaagaatgcatactgctctacaaacaaatatatcctggaaaatggcaaacaacttggaccaggtggttcaacagcagttacagctattgtagtcgatggtaaggacatgttgatcgcaaatgtaggcgactctcgagctgttgtgtgtgaaatgggctctgctaatcagctcactgttgaccatgagcccgatacaactgaggaaaggcagaggattgaaaagcacggtggctttgtaacgacatttcctggtgatgttcctcgggtgaatggccagcttgctgttgctagagcatttggtgaccaaagcctcaaggcccacttgagctctaaacctgatactagacatgtaccaatagactcaagtatagagttcgtcatacttgccagtgatggattgtggaaggtaatgaagaaccaggaagccgtggatctcgtgaagtcaatcaaggatcccaaggcagcagcgaagcgattgaccactgaagcgttggcaaggaagagcaaagatgacatctcttgcattgtcatccgtttccgctgctgacttaccccctcaacagcacttttttatttccgatccacgcctcatgatatggattgagacaatctgtctgtaatcatctgccttgccgattttttttctggtagaatctgctctacctaccgtagttgtggacagacctggaactaattaggacagtgaagacttgagagctggtaggtgagtgtgtgcagggtgtccattccattcgcctgtgcatatatacacccaggccccagcgtagactgtgcatccgttgaccgggacttgggggtcctgtcaggacctagtgcttgtgatgctaatggacctaatggtgcgaaggaacttgtcgatatctgatttggtcaatttagtttattacatcgctctcagtcgtagggtagatgcatctgatttcaat

SEQ ID NO: 19444 - DNA, 1466 bp, Zea Mays
agcaaccgccctctctctctctccatctccttcacgccacaccacaagtgtcgaaacggatcaaagagcaagcgacggggacgagagagacgagaggaccgtcgtctccccctcctccctcacaactcacacgcgagacggagacgcggccgcagccgagcttacccccgccggcgagttcaccctgacatggtcggccggatggagcggcagaccgcgtcgtcgtcagcttcgtgctcctcctcctcctcttcctcctcggtctgcggcggcaagaagcgccctgatatcctcaacatgatccggaatgcagcctgtcttaattcgtcatctactgataccggcaagggaaggagtaaattgtcaaccaacaaagttacacatggattccacctggtggaaggcaagtccggccatggcatggaagactaccatgtggcagagtacaaatatgtgaagaaccatgagcttggtctcttcgccatctttgatggccatttaggagataaggtgccaagttacctgaaagctaaccttttcagcaacataatgaaagagcctctcttctggtctagtcctgaagaagcaataaagaatgcatactgctctacaaacaaatatatcctggaaaatggcaaacaacttggaccaggtggttcaacagcagttacagctattgtagtcgatgctcactgttgaccatgagcccgatacaactgaggaaaggcagaggattgaaaagcacggtggctttgtaacgacatttcctggtgatgttcctcgggtgaatggccagcttgctgttgctagagcatttggtgaccaaagcctcaaggcccacttgagctctaaacctgatactagacatgtaccaatagactcaagtatagagttcgtcatacttgccagtgatggattgtggaaggtaatgaagaaccaggaagccgtggatctcgtgaagtcaatcaaggatcccaaggcagcagcgaagcgattgaccactgaagcgttggcaaggaagagcaaagatgacatctcttgcattgtcatccgtttccgctgctgacttaccccctcaacagcacttttttatttccgatccacgcctcatgatatggattgagacaatctgtctgtaatcatctgccttgccgattttttttctggtagaatctgctctacctaccgtagttgtggacagacctggaactaattaggacagtgaagacttgagagctggtaggtgagtgtgtgcagggtgtccattccattcgcctgtgcatatatacacccaggccccagcgtagactgtgcatccgttgaccgggacttgggggtcctgtcaggacctagtgcttgtgatgctaatggacctaatggtgcgaaggaacttgtcgatatctgatttggtcaatttagtttattacatcgctctcagtcgtagggtagatgcatctgatttcaat

SEQ ID NO: 19445 - DNA, 1590 bp, Zea Mays
cctctctctctctccatctccttcacgccacaccacaagtgtcgaaacggatcaaagagcaagcgacggggacgagagagacgagaggaccgtcgtctccccctcctccctcacaactcacacgcgagacggagacgcggccgcagccgaggtctgcataaaagcgcaaaagatctctcgctctcggctctcctcctctccccctcacccccgcttacccccgccggcgagttcaccctgacatggtcggccggatggagcggcagaccgcgtcgtcgtcagcttcgtgctcctcctcctcctcttcctcctcggtctgcggcggcaagaagcgccctgatatcctcaacatgatccggaatgcagcctgtcttaattcgtcatctactgataccggcaagggaaggagtaaattgtcaaccaacaaagttacacatggattccacctggtggaaggcaagtccggccatggcatggaagactaccatgtggcagagtacaaatatgtgaagaaccatgagcttggtctcttcgccatctttgatggccatttaggagataaggtgccaagttacctgaaagctaaccttttcagcaacataatgaaagagcctctcttctggtctagtcctgaagaagcaataaagaatgcatactgctctacaaacaaatatatcctggaaaatggcaaacaacttggaccaggtggttcaacagcagttacagctattgtagtcgatggtaaggacatgttgatcgcaaatgtaggcgactctcgagctgttgtgtgtgaaatgggctctgctaatcagctcactgttgaccatgagcccgatacaactgaggaaaggcagaggattgaaaagcacggtggctttgtaacgacatttcctggtgatgttcctcgggtgaatggccagcttgctgttgctagagcatttggtgaccaaagcctcaaggcccacttgagctctaaacctgatactagacatgtaccaatagactcaagtatagagttcgtcatacttgccagtgatggattgtggaaggtaatgaagaaccaggaagccgtggatctcgtgaagtcaatcaaggatcccaaggcagcagcgaagcgattgaccactgaagcgttggcaaggaagagcaaagatgacatctcttgcattgtcatccgtttccgctgctgacttaccccctcaacagcacttttttatttccgatccacgcctcatgatatggattgagacaatctgtctgtaatcatctgccttgccgattttttttctggtagaatctgctctacctaccgtagttgtggacagacctggaactaattaggacagtgaagacttgagagctggtaggtgagtgtgtgcagggtgtccattccattcgcctgtgcatatatacacccaggccccagcgtagactgtgcatccgttgaccgggacttgggggtcctgtcaggacctagtgcttgtgatgctaatggacctaatggtgcgaaggaacttgtcgatatctgatttggtcaatttagtttattacatcgctctcagtcgtagggtagatgcatctgatttcaat

SEQ ID NO: 19446 - DNA, 3497 bp, Zea Mays
catcagttgtcgtcgactcatccaagcaggacccgcggtactcaaaccctcggtccttctcggcggcggcgtacgggatagcagaggtggccatggcggcggtggccacggtgagctctgccagtgggctccttgctatgctgcaggagccggcgccggagctgaagctgcacgcactcgacagtctcaactccgtcgtccacctcttctggcccgagatctccaccagtgttcccaccatcgagagcctgtatgaagatgaagagtttgagcagaggcagcttgcagcacttgttgtttctaagccaaagcattagatgaatatgccagtatcaagaccagagcctctaaagctgcaaaggaggaagagaacattgatcctcgattagaggccatagtggagaggatgcttgaaaagtgtattcttgatgggaaatatcaacaggccatgggtatggctgttgaatgcagaaggttggataagctggaggaagcaattgttcggtgtgataatattcatggggctctatcgtattgcatcaatctttctcatcaatatgttaatcaccgtgaatatcgctttgaggttctccgttgtattgttaaaatataccaaactttgccaaacccagattatcagagcatttgccagtgtcttatgtttttgggtgagccagaaactgttgcaagcatattggacacgctgctttctggaaacaaggatgatgctctacttgcatatcaaactgccttcgatcttgttgagaatgaaaaccaagcttttcttttgaatgtgaggaatcgtttggcctcaccgactcctgtgccatccaaccctgacagcgagccagctgtgcaagatgatcaaactgccagcactgtgggtacaggcacagaagcagctggagatgttcagatgagagatgatacagcaccaaatggaaatgctcacactgtggatccaaatgaggtagcacatgctgaccggcttcaaaaaattaaaggaatactgtcaggggagacttctattcagctgacattgcaatttctatatagccacaacagatctgatcttttaattctgaagacaataaagcaagctgtggaaatgaggaatagtgtttgtcacagttcaacaatatgtgccaatgcaatcatgcatgcgggaactactgtagatacctttctaagagagaacctggagtggttaagcagggcaaccaattgggcaaaattcagtgcaactgctggactaggtgtcattcatagaggtcaccttcaacaaggccgggctttgatggccccctacctacctcaaagtggtgcagttggcggtggcagtccatattcagaaggtggtgccctctacgcactaggtctgattcatgccaatcatggtgaaggaatcaaacaattcctccgtgaaagtcttcgcaacaccagtgcagaggtcatccagcatggtgcatgtttggggcttgggcttgcagctttgggcacatcagatgaggaaatatatgaggacataaagaatgtcctttacacagacagtgctgttgctggtgaggcagctggtattggcatgggcttgctcatggttgggaccgctagtgaaaaggctagtgagatgcttgcttatgcacatgatacacagcatgaaaagattataaggggtttgtcactgggaattgcactgacagtatatggcagagaagaggaagcagacaccttgattgaacaaatgactagagatcaagatcccatattacgttatggtggtatgtatgcattggctctagcctacaggggaactgccaacaacaaagccatccaccagctgctgcattttgctgtatcagatgtcagtgatgatgttcggaggactgcagttatggctcttggttttgttctgtacaatgagcccgagcagactccaagaattgtatccctgctatctgaatcatacaacccacatgttcgctatggtgcagccttagccgttgggatatcatgtgcagggtctggattaagtgatgcaatttccttgttggagcctcttacatcagacgttgttgactttgtgcgtcagggagctctcattgccatggcaatggtaatgatccaaacgaatgaatcctttgattctcgtgttggagcatttaggcgtcagttggagaagatcattcttgacaaacatgaggacaccatgagcaagatgggtgccatactagcttctggtgtccttgatgctggtggtaggaatgttacaatcaagctcctttcaagaaacaagcatgacaaactcactgctgtgattggtcttgccgttttcagtcagttctggtactggtatcctctcttatattttatcagcctggccttctcaccaacagccttcattgggctcaactctgatttgaaagtgccaaagtttgagttcctgtcacatgctaaaccgtctctcttcgagtatcccaaaccgacaactcagcagactactacttcgacagtgaaactgccaacagccattttgtcaacttatgcgaaagcaaaatctagggcaaagaaggacgcagaaagcaaagctaaccaggagaaagcaacagaggaggcttctggttctacctcaagcaaggcggctaaagctcaagagaaggatgctgatgtcatgcaggttgataatgccactgaaaagaaagctcctgaaccagaagcaacgtatcaactcctgacgaacccagctcgggtgatccctgcacaggagaagttcatcaagtttcttgaaaacagccgatacgtccctgtgaaaccagcgccttctggattcatcctcctccgagaccttcagcccactgaggccgaggaccttgcactgaccgatgctcccacagcagttggaggaagcaccggcaacactgccacagctgcaagccaacaggggtccggatcatctgccatggccgttgacgacgagccacaaccgccgcaaccctttgagtactcctcataagcgtagatacctgggtccgtagagggttgtgttggtggtctgaacttgcgattcccctcgtcctttctataccttttgttatcttttttttttttactttctgagtatgtagtgtgcggaaatttgttgttggttggaagactttttgtaggctcgagaattatacttgagtcggctctataggatcatcgttgagaatctgggtgctcttatagctaagccccaacaaccctgattttatcctagccgtgaagtcatacatagagcctgggttattcatctgggttattcattgctgcggttttaatccaactatagcttctataatattttgtcttcatagattgcagctactacagtcggacgaccaacggaggtgttctttaggggcaatcatacctaccacatgggcatgtatattatgttgtatcaacaaacaacgatgtctagtatgacatagctggtaatcgatgtaataatctatatt

SEQ ID NO: 19447 - DNA, 1603 bp, Zea Mays
gtatattattttactgagcatcttatattcaacactcggcaaataaattttttatcaagtgtccgaaaaaattactcgacaaattatttgacactcagcaaccgatagtggtcacagttgttgttaggcactgccacagctcagcatggcatgttgtgaccaggaaccaaacaaacagaggcccgacatctcaattaaccaggcaccgcgcgcactagctagcatcatattgacaacatgcctgagcccatacagccgggacccacagaaacaatttaaaaatgggaaatcacatccagacccagccaatcgctgagctatcgtatcgcatcccaaaaatggaaagctttaggttgaaacttttgtgatataaagaatccaatgtgcagtgacctccattattccaaatccaacttgttggtgcctataaatgcacaccataccacaacccacagcaatgcacaacacttgcagactctccctccacacagagaagcaaagaaaccacaccacagtcgtaggggaagggagaggagggagggtggcttctgctgggttgccatgtgctatgaggtagagaacgggatgcagccaaggatgacttgccggctcctggaacctggaggcgtctcagcttgctgtgctgtggcttagaacttagtcggcaagtctgtccttggctacacctagttctcttcctctcgtgtatggccctcaagcaccgtcaagagatctaggacctgcattcatatatcatcagcccactccagaggaaacgtaagggcaagtatgcatctaacctcaagttgacatatttctatttctcctgcaattttgggtcttccaaaaaaatcagaaatttgagatatatgaatattattacaaacatacagggcttgcatacaatacaagcccaagccccatctggcatcatacgtcaaatttcatacatgcatctgtcagacaatatatatcctcactattttgtaccattatcgcatgctaatctttgatgtttgatggaaaagagccacttacttgtatcccctattcgcctgatggcgatacagacgaaaaggccaaatcgaagtacagcaggcgctgcacgacaagattcctcgaggctcctggagaagaagctttacgacgttcgcctcctcaccgccggttgccggcggtccgttcgaagcttggtgattggatggccgattcgccgagcatcgccatccagagctctcgacgctagctttcgtgccccatgcggcggctatagtagcccacgcgaacaaattcgacgtgctccgaaccaccagcccctcgagacctccaacactcgcgccgcggccgccacgcactggcagacgtgcctggcgggaggcgaaggggaggagaacgacgagactgggcgggctttgcattcgccgctcgccgtggttacccgtcgtcgactcctccccacgcacacgcccgcatcgcgcatgctcccgcttccacgcgtacgggtacgacaccgcggcgaccgactggtccagcgaggctcgaccgctcgaggcgtccacctccaactccaagtcgccggcagacggcctccaggaggttcgag

SEQ ID NO: 19448 - DNA, 954 bp, Zea Mays
gatataaagaatccaatgtgcagtgacctccattattccaaatccaacttgttggtgcctataaatgcacaccataccacaacccacagcaatgcacaacacttgcagactctccctccacacagagaagcaaagaaaccacaccacagtcgtaggggaagggagaggagggagggtggcttctgctgggttgccatgtgctatgaggtagagaacgggatgcagccaaggatgacttgccggctcctggaacctggaggcgtctcagcttgctgtgctgtggcttagaacttagtcggcaagtctgtccttggctacacctagttctcttcctctcgtgtatggccctcaagcaccgtcaagagatctaggacctgcattcatatatcatcagcccactccagaggaaacgtaagggcaaacgaaaaggccaaatcgaagtacagcaggcgctgcacgacaagattcctcgaggctcctggagaagaagctttacgacgttcgcctcctcaccgccggttgccggcggtccgttcgaagcttggtgattggatggccgattcgccgagcatcgccatccagagctctcgacgctagctttcgtgccccatgcggcggctatagtagcccacgcgaacaaattcgacgtgctccgaaccaccagcccctcgagacctccaacactcgcgccgcggccgccacgcactggcagacgtgcctggcgggaggcgaaggggaggagaacgacgagactgggcgggctttgcattcgccgctcgccgtggttacccgtcgtcgactcctccccacgcacacgcccgcatcgcgcatgctcccgcttccacgcgtacgggtacgacaccgcggcgaccgactggtccagcgaggctcgaccgctcgaggcgtccacctccaactccaagtcgccggcagacggcctccaggaggttcgag

SEQ ID NO: 19449 - DNA, 4026 bp, Zea Mays
ctggaaagcaaggcatattaggcatcatctgaacttcgtcaaaattgaagatttccagtgtactgggctaaaaagttaccggcaatataatgtatatatacctggaacttgtatcgcagtacgtttcaaatgtaaataagttccagtctgaggcacaccctttaaccccaaagctgtctcggatttaagagagaagatccacgcacagaccagagctacaattatggccacaggcccacaacaactccagtgtcatggtctgataataggtatgatatgtatgaagtgtttgaacactgtatatttctatagtaccctgtttggatgtagatattggagcataaaattagaaattggaatcggctttcaattctattgtttggttgcacgcggaattgagatttggaatcagagactcaattccatggaattggactataactaaaaactccatctcccaatataatacatagcataactcctctgtattgtgtggaattggaccacacaatttcaaacttgaaatcaataacattcaaataatagaattagaattatatctcatttcaataccatggctgattgatattaaacccaatttaattttacgtcctttaatatcgacatccaaacggagtatagatgttttttcttcttctcatgggacattagacaagaagttgatagagataatcttgcgacaaagacatcaacctttgcaatgtatattgtacgacgatacatatttttttgcagtggttcaaaagacaatatgccttattgcattgcatccctccggtggcagcaagataaggaaggtgatgggatggtggttgaaatgtgggtgtcgatggccgcccgatcgagtcgccccagaaaaacgacacgggggcggaagattgttccttttttttgacgtacccagtcgcagtgttcaactatctatgtgaactatgacagtgttatgagaaaatatttgctaacaataaatgaagcataataacatggcaagcttaaggtatgtaaacattatatataaaggattaatttttagcccgtcattgcaattttgttgtgacccagttattgcctcatccattaataaattatagtacaacttgtggaaaccattcgaccaaatctttgaaataattagtaaaggtagaatcgtcagaacaacgactcaaagaataccagagaggagggtattgaatataggtagtggcaccaatcctattgcaacttttcattttttttcagttaaaaaacatcttagaaaaatatcaacaagtctttatcgggttgcatggagataggagggtattgaattattttttagaataacgaggggtgatgcccaccttttattgattgattggaaacattcaagcagaatgctattgagaggacaagcagttttaatttgaggttacatgcatgtgtgcacaccgttgtgtgacaagttccttcacgcacacaaacgatggagctaaatgttaagatcactaactacccctcgcaataatgacatgcacatgatgatcttctcccctaaacacatggttattcctattctcctaaatcctccagaagatggcacaaagaacttgcgtatggatgtcggtggggacaacatcagagggcaaacatgtacgaagtaggagggacccatccaacctagcaatgtggaggcagagagatcgccaaacgtttctgacacgggcacactccaggaagatgtggaatctatcctcagtcgtcgcgccacattgggcatgtagggtcggggaggatattattgttaaacaaactcatccgcatgttcaaccagtctttgaaaaacaactagagaaacatcaaaattattcgacaactttagtttccagacctgcgaaaggaataagcttcactaagaagggtttccttgaagccaccatccttcgagcatcacgctgaccaaagaacctgtgacaggagagcaggcagcaaatctagctcggccgcagcagtgttagttaaccagctgggcataagtgcaaatcgaaattatgcccaaaaactctagacactgcgaggtcaggctgggtagtatgagaaaagagggagaggaaggtacaatagagcgagtcgtttgaaagccaccgatcaaacaaaaaagaagtggatctaccatccctgacatagatgagtatggtctctgaagtgatcaataacataattgtagacacgacccaagtacgtgggggaggaggggtgggaaccaagtccggatcgttaccctcgaagcaccagtctctccaagggacataggggccatggagggctttgtcagcgaacttgagaaggaggcaaaggtttttgagtcttcagattttttatgcctaggtcgccggcattcctaggaatatagacattgtcccacgccaccagacacttataaccacctctgggtgaatcctctctgcttaaggatctgaattaggctcatccagttaaggccttgtacggttaatcccgttttttttaagcttaaattactgtagggaggacctacagtatttttattgcataaagagaaaaagaaaaagtcaatacaggagggcagaggagagcagatacaggaaagaaaacgaaaattacattacagaacactgaatccaggttttaattttatctcctatcactggtttaactcggtgacacaataaattcatttctgttttgaacatgtcccgacatccctccaccgtgggcggaatctcattgaacacccaattgtttctgcttttccagatgcaccaggttaatagtatgatagtttcaagtttccatgtggtacttggcaccgtcttctgatcctcagaatgatgttgattaaatcagttgaccatgacggggagattcttataaaggaccagcatctcctagcaaaattgcatcggaaaaaaagatgggtgattgtctcttcagcttgtagaatacagttgtcacatgtgtatgagtccagtagcatagctcactgccttaaaaatgcccgggtatttaatctgtccttaagtaaaagccagaagaagaccttgtgcttgggttgacattttgatttccacagccaagtgaagatgggatgagtccactggttgcccatcaagtgagaataaatcttttgtgatgaaaagaggctagaagaagcattgcagagccatttgtctctctgattattatgcggaagattaaccaaacgaccattcaaagcttgaaattgaacaaaggcatctgctgacagtggggtgtgaaacatctcgtgcgaagctgccaatcttgcttgttggatggtgatgtccttgcatgaggcgaaagaccaaagttctggatattgtgccgatttgcaaataccatcccagttgtcatgccatagaagcgttgtttttccatctccgatctccacccgagcaattcccttaggtcccgtttgtttcctttcattttgaggaattggaatcttactaatagaatatgctaattttttagaatgtgacattccaccactttccaaagttatcatataagcctatctcaaattcatggggtgagagatagaaattgattctatagatttacatgctatgtttccgatgtacaacttatagcacactattctacttgttttgctataacataaatatagtatataactatctctttcatataatttagaataatatacaaatatattaaatatataaatatatgaacttaattagttttgtctaaattataattattaaaatggaattcaattccaacgaaacaaacggggccttaaaggattcaagagttttaaggacgtctctccaccagaaagaaccaactggtttatctgagggcagtgaatggctataatgattggcccagattatattgatccatgggatgtcggctctgttatagaatttatgaagatttttcatgagcagggatttattttgtaaggccaaatttatgacacccaatccccctgaaattttg

SEQ ID NO: 19450 - DNA, 1367 bp, Zea Mays
atgtccgtttcgctttcccgtcgccaggttcggttgctcagccaccagtccgactcccctccatcaggaacccatcccctgctgctaccggtgacgggcttgtacaagcgagaaggaattatctgccgaccatttttcaccacactgctgggcattaaggatatgaaggccgtcccacttcctcgcccgagggcagccacgagaaggcgcgcgtggatgctcgccgttgcagcttttatcttcgtcgcactagtctgggcttatctaactcaaaaatagctttcatgttcttgactccggggacactgccatttgaaaggttgtgggaaaagttctttgagggccatgagggaaggtataccatatatgttcatgcctcaagagagaagccagaacatgtcagtcccatatttgttggtcgagagatacacagtgaaaaggtaacttggggtacaatttctatggttgatgctgagaggaggttgctggcaaatgctctacaagacatggacaatcagcattttattttgctatctgatagttgtgtacctttgcacaattttgactatgtatatgactacctgatgggtgcaaatctcagttttattgactgcttttatgatcctggaccgcatggaaattttagatattcaaagaatatgttacctgaggtcacagaggctgattttaggaagggttcacagtggttctcagttaagcgccaacatgcgttgatgatcattgcagatagtctttactataccaagttcaagcttcattgcagacctgggatggaagatggtcgcaactgctatgctgatgaacattatttgccaacagtattccatatgatggacccagatggaattgctaattggtctgtaacccatgttgactggtctgaagggaagtggcacccgaaagcttacagggcaaaggatgtcactttcgagcttctgaagaatataacatcaattgacataagtcaccatgtcactagtgatagcaagaaagtggttacagagaaggcctgcctatggaatgaaacaaagagaccatgctacctgtttgcgagaaagttctaccctgagtccataaacaatctcttgaccttgttcgcgaattatacacttatttgagcttctaggtggcgcttagaggctacacaggaaacattttgttatacaaaaccttgtacattggatagcaacagagtaggacattaattaacagaatagcaatagctattggtgaggagaaggctttcgctgcagcaacacagtggcttcagatttatcacgacaggccattgcgttgggtggatgacgaaggctgattctcgacggcggtaacgagcacgagatgag

SEQ ID NO: 19451 - DNA, 1845 bp, Zea Mays
caacatctttggcgtgtatcaaaccaaaacaaacaagcaaatccaaccgcctcgttccttccctcgtctctaccagtctccccccttccgtttttctcgtcgcggtcgcgggtcacagccgccgcgccggtcgcgcccccttcccaagacctcacgctgtcacgcacgtatatcaatcagagcgttggaccttggcacgacctgattcctgatcctcttgcgcgttggaccgcgcccgccgaagctctctctcgcgtcctcttgtttctgccagcgacgacttcgcgcgcggccgcggcgccgccgcctcctgcccaggcccttcgccggcgacaagcacccaccagacgggcttgtacaagcgagaaggaattatctgccgaccatttttcaccacactgctgggcattaaggatatgaaggccgtcccacttcctcgcccgagggcagccacgagaaggcgcgcgtggatgctcgccgttgcagcttttatcttcgtcgcactagtctgggcttatctgtatcctcccccgcgttacacctctcctgtgagagattggcttcctggtaggctccctgcggaaccagccagggaattcactgatgaggagagggcctcgcgtgttgttttcagacagatcttaacaacacctcctgttcgatctaagaactcaaaaatagctttcatgttcttgactccggggacactgccatttgaaaggttgtgggaaaagttctttgagggccatgagggaaggtataccatatatgttcatgcctcaagagagaagccagaacatgtcagtcccatatttgttggtcgagagatacacagtgaaaaggtaacttggggtacaatttctatggttgatgctgagaggaggttgctggcaaatgctctacaagacatggacaatcagcattttattttgctatctgatagttgtgtacctttgcacaattttgactatgtatatgactacctgatgggtgcaaatctcagttttattgactgcttttatgatcctggaccgcatggaaattttagatattcaaagaatatgttacctgaggtcacagaggctgattttaggaagggttcacagtggttctcagttaagcgccaacatgcgttgatgatcattgcagatagtctttactataccaagttcaagcttcattgcagacctgggatggaagatggtcgcaactgctatgctgatgaacattatttgccaacagtattccatatgatggacccagatggaattgctaattggtctgtaacccatgttgactggtctgaagggaagtggcacccgaaagcttacagggcaaaggatgtcactttcgagcttctgaagaatataacatcaattgacataagtcaccatgtcactagtgatagcaagaaagtggttacagagaaggcctgcctatggaatgaaacaaagagaccatgctacctgtttgcgagaaagttctaccctgagtccataaacaatctcttgaccttgttcgcgaattatacacttatttgagcttctaggtggcgcttagaggctacacaggaaacattttgttatacaaaaccttgtacattggatagcaacagagtaggacattaattaacagaatagcaatagctattggtgaggagaaggctttcgctgcagcaacacagtggcttcagatttatcacgacaggccattggtactcctttagcctcgttactttcatagtttgtcctctccacatatttttagctgcggttttaccatgtacatcaagcttatttggacaatgaatggtcattaaatggaaaatcagagatcatggtctta

SEQ ID NO: 19452 - DNA, 1273 bp, Zea Mays
accagtctccccccttccgtttttctcgtcgcggtcgcgggtcacagccgccgcgccggtcgcgcccccttcccaagacctcacgctgtcacgcacgtatatcaatcagagcgttggaccttggcacgacctgattcctgatcctcttgcgcgttggaccgcgcccgccgaagctctctctcgcgtcctcttgtttctgccagcgacgacttcgcgcgcggccgcggcgccgccgcctcctgcccaggcccttcgccggcgacaagcacccaccagacgggcttgtacaagcgagaaggaattatctgccgaccatttttcaccacactggtggagtccgagagtaatgagagctgtgaagcttaaatagatgaagttgcatcaagtttggcagctgggcattaaggatatgaaggccgtcccacttcctcgcccgagggcagccacgagaaggcgcgcgtggatgctcgccgttgcagcttttatcttcgtcgcactagtctgggcttatctgtatcctcccccgcgttacacctctcctgtgagagattggcttcctggtaggctccctgcggaaccagccagggaattcactgatgaggagagggcctcgcgtgttgttttcagacagatcttaacaacacctcctgttcgatctaagaactcaaaaatagctttcatgttcttgactccggggacactgccatttgaaaggttgtgggaaaagttctttgagggccatgagggaaggtataccatatatgttcatgcctcaagagagaagccagaacatgtcagtcccatatttgttggtcgagagatacacagtgaaaaggtaacttggggtacaatttctatggttgatgctgagaggaggttgctggcaaatgctctacaagacatggacaatcagcattttattttgctatctgatagttgtgtacctttgcacaattttgactatgtatatgactacctgatgggtgcaaatctcagttttattgactgcttttatgatcctggaccgcatggaaattttagatattcaaagaatatgttacctgaggtcacagaggctgattttaggaagggttcacagtggttctcagttaagcgccaacatgcgttgatgatcattgcagatagtctttactataccaagttcaagcttcattgcagacctgggatggaagatggtcgcaactgctatgctgatgaacattatttgccaacagtattccatccctgttgacactgcaaatttgcatatctg

SEQ ID NO: 19453 - DNA, 2716 bp, Zea Mays
acgcggtcgttctcacgttggcggctggccaccattccctgtctcgtgctcacggcgggcggcagaccgccaggcgccaccgcgccagaccagctgaccagcaggcggcagtgcaggccatcagccgtcacggctctccctcaggtcggcagtgcaggccatcagccgccaaccgatctagtagtgcagaccgccagaggccaggtgaccaggtcggcagtgcagccgtgcaggcggccagccctctccaggcgtccagctaccaccacacacacgaagagcaggcgatgaaaatgtccgcttccgttgcggccgcctcccccaccctccgcttctcctccgccactcatcctctccaccgaccgctccgccggcggctcccgtcggttcgatgctccctcgccgccgccgccggccccggtgtccgggcgccccctgagctcgtcgactccatcctctccaaggtgaagggaactgaccgaggagtgctgctgccaaaagatgggcaccaggaagtggctgaggtcgcgctgcagctggggaagtactgcatagacgaccccgtcaagtccccgcttatattcggagaatgggaggttgtgtactgctcggtgccaacctcgccgggagggctctaccggacgccccttggccgcctggtattcaaaaccgacgagatggtccaggcggtggaagcgcctgacgtggtcaggaacaaggtgtcgttctccgtctttggcctagagggcgcagtgtcattgaaaggtaagctgaatgtgctggacagtaaatggattcaggtcgtgttcgaagcaccagaactgaaggtcggctccttggggtttcagtacggtggcgagagcgaagtcaagctggagatcacctatgtcgatgagaagatcaggctagggagagggtccagaggctcgcttttcgtcttccttagacgatgatagaatggcatgcatgtgtgttgagacttcagacccacaagcaccgatgaggggtggcgctgacgcggtcgtttgtacaatactgtgttcaggacttctatacgtttatgtaaaaattctggcgtccagctgggtaattctggcgtttcagtacggtggcctgatgaatgttgttgtgtagtttgtagcatccattattagtgctgtaagatgatgttttgaattctgatacaccagtgcgagtgtgatgaaccaaattcatacgacacgtttggaccatagaaatgcagagtactgttatgggatggagtaggacgaatctgcaggaatcatcagctcagctcgtgtcggatcctaggagtgtaggatctatgaatctatcgatgcagcctccagagatttcgagtatgtttcagtatttggaatctttgtcagtgtgttacctcgctgagctagaagttgaaacaagcaagacttttggattcagcgagttaaatacgcctctcaagtagacacgtgcttctacggctctacggagggataggtcgctcttcttcctcactgagagaccatgagacgggtcgagacgacagcggcggatgcaccccacgacctccagtgactctcccagtcccaggctcccagccccccttcctcccgcctccgcgagaccgcgatggcagtcttgctgtggcggtgcatatgcgggccccaacaatccttcagtaagaatcgaggcgcatccaccccttctcctcttgctggcaggagatccaaatactcgggacaatctgtgaaagcaatgcccatgcgtttgttaacggttggaaagaagaggtctcgggggacacaactccttgttgaagaatacaaggagaagctcggtcactattgcgagttcgaggacactcttatcaggtccaacccaaagcttacaaggtgcaagttgaagcagaagacacggctatgatgcagcaactcaagtctgacgattttgtagttgtgctggatgaaaacgggaaggatgtcatatccgagcagatagctgatctgattggggatgctggcaacacaggatcatcaaggctcacattctgtatcggtggaccatacggtctcgggttacaagtgcgagagcgtgcagatgcaacgattaggctgtcctcactagttttgaaccatcaagttgccttgatagtcctcatggagcagctctacagggcatggactataataaaaggacagaagtatcaccattaggcctaagtgctatcatcattcgctgctgtatgtaggacttgaaaaatggaagactgcattaataaatttgcaggtatagtgttcaaaggactcattgtactttccattcgggtagaaccccaaaattgctcaaaatggttttctttgacatgttcgaatgttcattatcgatgactgtcagtttccagcacaacatggacacttgtaaataagaagaaattctgctgggtgctttactggttgctaggctgctacatgcttgaaaatggttgctatctgcagctgaggttctgcaaaagcgaatggcacacctgaacattcttcttttactgagatcaagcgtgtcataagatttattagttcctcttgtattgtgaaaatttccaaagaacacaggaagtgaaatatcttttattatgaacattcccaaggaactcaggaagtttgataaaaaaaatgagcataatccctccgtcccagaataacaatcgttctagacttca

SEQ ID NO: 19454 - DNA, 4200 bp, Zea Mays
acgcggtcgttctcacgttggcggctggccaccattccctgtctcgtgctcacggcgggcggcagaccgccaggcgccaccgcgccagaccagctgaccagcaggcggcagtgcaggccatcagccgtcacggctctccctcaggtcggcagtgcaggccatcagccgccaaccgatctagtagtgcagaccgccagaggccaggtgaccaggtcggcagtgcagccgtgcaggcggccagccctctccaggcgtccagctaccaccacacacacgaagagcaggcgatgaaaatgtccgcttccgttgcggccgcctcccccaccctccgcttctcctccgccactcatcctctccaccgaccgctccgccggcggctcccgtcggttcgatgctccctcgccgccgccgccggccccggtgtccgggcgccccctgagctcgtcgactccatcctctccaaggtgaagggaactgaccgaggagtgctgctgccaaaagatgggcaccaggaagtggctgaggtcgcgctgcagctggggaagtactgcatagacgaccccgtcaagtccccgcttatattcggagaatgggaggttgtgtactgctcggtgccaacctcgccgggagggctctaccggacgccccttggccgcctggtattcaaaaccgacgagatggtccaggcggtggaagcgcctgacgtggtcaggaacaaggtgtcgttctccgtctttggcctagagggcgcagtgtcattgaaagtacggtggcgagagcgaagtcaagctggagatcacctatgtcgatgagaagatcaggctagggagagggtccagaggctcgcttttcgtcttccttagacgatgatagaatggcatgcatgtgtgttgagacttcagacccacaagcaccgatgaggggtggcgctgacgcggtcgtttgtacaatactgtgttcaggacttctatacgtttatgtaaaaattctggcgtccagctgggtaattctggcgtttcaaaaaataataattggtgtatctcactctgacattatttttctgctctgctagtactcttaagtataaagggagcatccttcttgacgcgactcacattattcaaggtttcagccccgaaaaaacgttcacatccttcatgtttcagacatcttacaacaggggctgattctgtattcaggtgtaggcatcccatatttcagaaactcaaatcatagctcatttgatggggtgccaggctactctttacatgtgagctgcaagtattgctggaagtatgataggattggttcaataagtctttgaacttgaaacaatataaacagaaagctttgagcagcttcatataattacttcccctatgtcaccataaccaaatcactgcacatagcttattccacagtgacaagatgaggcctagtcattgtgctgaaaaccaggaagaagcgatgcaacaaaccctacaacaaccagctggatctctttcaagacaccttccagccaattacgccgattgccttctacctctgcctcttgtggattctcgttaccagctgcagcatcttgttcacggttctctgcagcttggtcagggtttgcagggtcattgggctgctcattgccatcattctgggcaggcagagcagcacggttctcggcccgagcaggagcctgtggtggatgagcagctgcacctcccgcccgctgaagccatctaacaaaaggtataatagctccggtttgatatctgcaggatacagaagcatgaggttatctagcagcaccatatataggctatacaagtaatgaagaataaactgtgaaatagcattaagtattttggagacgatttgagcaaagtacttacaaagtaaatcgaatgatgcaaacagtatgagaagaaatagcctttgttttgagccttcctggctaagagaaacaccactgcagctagtaggaagatcagggtcaagtcaagctgaaaagcgaagtgaaacctcctcacaacaacttgtctttgaggtacattttgctgcctagcatcctgtacattctcttcaccagcaggagcaccaatgctttctcttcaagcacagaagagcagatataagcaagcaattggacagttcaaaacttcataatgcttcgcactggtcccaagtatccccatcccccaatgaccaaatcaccaaaccagaataaaaaggaatgtcatagcccatagtagcaattcttgcaacaaaagttttcttttttcaactgctcaaagtctgtaaccaagttttacaagttagctgtagttccattctatcttcaagcatggcagcatcagaaacagcgcttgggctccattcaaaaagttaaaggtgtttgtgttgtggtattctcaatcaaattagtcattacaaactagtcagttatagcaagtccctgctgtcataacgatgaaaattgtattatttcaggactgagtaaacatcattatatgttatgttctgccttactcctgttctacaagttacaatatccctagataaataagagagatggctgaagttattcatcttgattttgacccccacactacaacagtgtgataaggccagtcaatcggttttttcggtgtaatcagtttactggtgtaatcggtttgtttgttcagttttagagaacttcggtgttgcagaatgaagagtcgatcaatgtttggaacaaaaaccaacattttcgtttatctgttttttggctcggtgttcgctttttgccaaactacatcgaacactagcacagcaccctgaacggaggacagagacagcaatttagctatgtgaatgattaaaaaacggggataacagcaagctgttcaacacaaccacatgccgttcaacatcaatcaaagcacgggattcaggaagaccaaaaaatcaagaaaggaagtggagaactgaatttgaacaggagagacagacacatcccacaaggaacccactgacctgcaccgtcgcatcggctttcaaggtgctgatgcgccggcgcgccacgctcgtcgtggtatgcgtcatcgctaactcgcagcaccactgagcaggatgcaccatagctaagccctgcggcgggtgctgatgcgccgatgcgccacgcttgccgtgggatgcgccatcactaactcgcagcaccactgggcaggatgcaccatagctaagccacgctgcgggtgctgccatcgatttggtcactagggatagagtcagggcctcaagggtgcggtgcgggaatgctggctgggcgtcttggctggctgtgggccaccttggtgtgggcttcatgggctgactgttgatggaaagttggtttagctgctctagtgcttatggcagatacacttcggtatatacggtgagtcagtttggtcaggcctaagcactgacaccgaagccgatcactgaggtatcaagaaatcaaaaccgatcccatgccgaacaactaatagtttgggttagttcggtttcaggtcggtaattggtgtctgggaaaaatatgcccagccctaagtgggactgtgggagtttttttctgtaacatatctaattgctgagttaattagtaatgaatgttgcttcaagaacaaatgaggtgcatgtcaaataattcatggaaacagatacaatagtgaaagttgactcactgttttttcggttacccaagattgtcgccacctcataacagatcctaaacgaggtacgtataaagtataattcaaatgaagatctaaggatctcataatccttaaagtaagattatattgtatactgctgctgctgagcatgcttttaatcataaaatttctaccaagggccaacggaaaaagtacctaaatctcaacatatctactatgaacccctcatcacactagttcgatacagccacccaaatgtgtccaaggttttcaacagtacaattttatgactgcatatattacttgcataagctgacttacaatgactactgcaatggcacgcgagcagatctcaccaattcattgattgtacaaaataggcagacgtagcatattgttcagtaccaaagggtaacaacttacgttgggatattgtaagtgaggggaatgagtgtggttggagcatagcaacccattcccatcgccgctgctaactggttctgtt

SEQ ID NO: 19455 - DNA, 1210 bp, Zea Mays
gccactagatcctactcccgcggtcacatacacgcatgttattttctggcgggtaacgggttgcccgatatccgcggatatcctgcggatacggatacgggtcgaaaattttacccgcgcgctctcgcgggtacgggtaaacaccagagacgcggatatgctggcgggcgggtaaatggcttacccgcactttacccgacccgctgccatccctactctccaggcgtccagctaccaccacacacacgaagagcaggcgatgaaaatgtccgcttccgttgcggccgcctcccccaccctccgcttctcctccgccactcatcctctccaccgaccgctccgccggcggctcccgtcggttcgatgctccctcgccgccgccgccggccccggtgtccgggcgccccctgagctcgtcgactccatcctctccaaggtgaagggaactgaccgaggagtgctgctgccaaaagatgggcaccaggaagtggctgaggtcgcgctgcagctggggaagtactgcatagacgaccccgtcaagtccccgcttatattcggagaatgggaggttgtgtactgctcggtgccaacctcgccgggagggctctaccggacgccccttggccgcctggtattcaaaaccgacgagatggtccaggcggtggaagcgcctgacgtggtcaggaacaaggtgtcgttctccgtctttggcctagagggcgcagtgtcattgaaaggtaagctgaatgtgctggacagtaaatggattcaggtcgtgttcgaagcaccagaactgaaggtcggctccttggggtttcagtacggtggcgagagcgaagtcaagctggagatcacctatgtcgatgagaagatcaggctagggagagggtccagaggctcgcttttcgtcttccttagacgatgatagaatggcatgcatgtgtgttgagacttcagacccacaagcaccgatgaggggtggcgctgacgcggtcgtttgtacaatactgtgttcaggacttctatacgtttatgtaaaaattctggcgtccagctgggtaattctggcgtttcagtacggtggcctgatgaatgttgttgtgtagtttgtagcatccattattagtgctgtaagatgatgttttgaattctgatacaccagtgcgagtgtgatgaaccaaattcatacgacacgtttggaccatagaaa

SEQ ID NO: 19456 - DNA, 1248 bp, Zea Mays
tctacggctctacggagggataggtcgctcttcttcctcactgagagaccatgagacgggtcgagacgacagcggcggatgcaccccacgacctccagtgactctcccagtcccaggctcccagccccccttcctcccgcctccgcgagaccgcgatggcagtcttgctgtggcggtgcatatgcgggccccaacaatccttcagtaagaatcgaggcgcatccaccccttctcctcttgctggcaggagatccaaatactcgggacaatctgtgaaagcaatgcccatgcgtttgttaacggttggaaagaagaggtctcgggggacacaactccttgttgaagaatacaaggagaagctcggtcactattgcgagttcgaggacactcttatcaggtccaacccaaagcttacaagtgatgtaaaggtgcaagttgaagcagaagacacggctatgatgcagcaactcaagtctgacgattttttgtgctggatgaaaacgggaaggatgtcatatccgagcagatagctgatctgattggggatgctggcaacacaggatcatcaaggctcacattctgtatcggtggaccatacggtctcgggttacaagtgcgagagcgtgcagatgcaacgattaggctgtcctcactagttttgaaccatcaagttgccttgatagtcctcatggagcagctctacagggcatggactataataaaaggacagaagtatcaccattaggcctaagtgctatcatcattcgctgctgtatgtaggacttgaaaaatggaagactgcattaataaatttgcaggtatagtgttcaaaggactcattgtactttccattcgggtagaaccccaaaattgctcaaaatggttttctttgacatgttcgaatgttcattatcgatgactgtcagtttccagcacaacatggacacttgtaaataagaagaaattctgctgggtgctttactggttgctaggctgctacatgcttgaaaatggttgctatctgcagctgaggttctgcaaaagcgaatggcacacctgaacattcttcttttactgagatcaagcgtgtcataagatttattagttcctcttgtattgtgaaaatttccaaagaacacaggaagtgaaatatcttttattatgaacattcccaaggaactcaggaagtttgataaaaaaaatgagcataatccctccgtcccagaataacaatcgttctagacttca

SEQ ID NO: 19457 - DNA, 4498 bp, Zea Mays
tctacggctctacggagggataggtcgctcttcttcctcactgagagaccatgagacgggtcgagacgacagcggcggatgcaccccacgacctccagtgactctcccagtcccaggctcccagccccccttcctcccgcctccgcgagaccgcgatggcagtcttgctgtggcggtgcatatgcgggccccaacaatccttcagtaagaatcgaggcgcatccaccccttctcctcttgctggcaggagatccaaatactcgggacaatctgtgaaagcaatgcccatgcgtttgttaacggttggaaagaagaggtctcgggggacacaactccttgttgaagaatacaaggagaagctcggtcactattgcgagttcgaggacactcttatcaggtccaacccaaagcttacaagtgatgtaaaggtgcaagttgaagcagaagacacggctatgatgcagcaactcaagtctgacgattttgtagttgtgctggatgaaaacgggaaggatgtcatatccgagcagatagctgatctgattggggatgctggcaacacaggatcatcaaggctcacattctgtatcggtggaccatacggtctcgggttacaagtgcgagagcgtgcagatgcaacgattaggctgtcctcactagttttgaaccatcaagttgccttgatagtcctcatggagcagctctacagggcatggactataataaaaggacagaagtatcaccattaggcctaagtgctatcatcattcgctgctgtatgtaggacttgaaaaatggaagactgcattaataaatttgcagtttccagcacaacatggacacttgtaaataagaagaaattctgctgggtgctttactggttgctaggctgctacatgcttgaaaatggttgctatctgcagctgaggttctgcaaaagcgaatggcacacctgaacattcttcttttactgagatcaagcgtgtcataagatttattagttcctcttgtattgtgaaaatttccaaagaacacaggaagtgaaatatcttttattatgaacattcccaaggaactcaggaagtttgataaaaaaaatgagcataatccctccgtcccagaataacaatcgttctagacttcaaaatttgtgctgattagagattttttaaatctaattatgatgtaatacttcagagcgtatcactatccttcgaacaaaagaaacacagttctttgtgctgaacgcttgtttgcacacttatattgagctgattcaacgacgagtaactgaagaatactgacaaaatcaaccgagaaaaataataattggtgtatctcactctgacattatttttctgctctgctagtactcttaagtataaagggagcatccttcttgacgcgactcacattattcaaggtttcagccccgaaaaaacgttcacatccttcatgtttcagacatcttacaacaggggctgattctgtattcaggtgtaggcatcccatatttcagaaactcaaatcatagctcatttgatggggtgccaggctactctttacatgtgagctgcaagtattgctggaagtatgataggattggttcaataagtctttgaacttgaaacaatataaacagaaagctttgagcagcttcatataattacttcccctatgtcaccataaccaaatcactgcacatagcttattccacagtgacaagatgaggcctagtcattgtgctgaaaaccaggaagaagcgatgcaacaaaccctacaacaaccagctggatctctttcaagacaccttccagccaattacgccgattgccttctacctctgcctcttgtggattctcgttaccagctgcagcatcttgttcacggttctctgcagcttggtcagggtttgcagggtcattgggctgctcattgccatcattctgggcaggcagagcagcacggttctcggcccgagcaggagcctgtggtggatgagcagctgcacctcccgcccgctgaagccatctaacaaaaggtataatagctccggtttgatatctgcaggatacagaagcatgaggttatctagcagcaccatatataggctatacaagtaatgaagaataaactgtgaaatagcattaagtattttggagacgatttgagcaaagtacttacaaagtaaatcgaatgatgcaaacagtatgagaagaaatagcctttgttttgagccttcctggctaagagaaacaccactgcagctagtaggaagatcagggtcaagtcaagctgaaaagcgaagtgaaacctcctcacaacaacttgtctttgaggtacattttgctgcctagcatcctgtacattctcttcaccagcaggagcaccaatgctttctcttcaagcacagaagagcagatataagcaagcaattggacagttcaaaacttcataatgcttcgcactggtcccaagtatccccatcccccaatgaccaaatcaccaaaccagaataaaaaggaatgtcatagcccatagtagcaattcttgcaacaaaagttttcttttttcaactgctcaaagtctgtaaccaagttttacaagttagctgtagttccattctatcttcaagcatggcagcatcagaaacagcgcttgggctccattcaaaaagttaaaggtgtttgtgttgtggtattctcaatcaaattagtcattacaaactagtcagttatagcaagtccctgctgtcataacgatgaaaattgtattatttcaggactgagtaaacatcattatatgttatgttctgccttactcctgttctacaagttacaatatccctagataaataagagagatggctgaagttattcatcttgattttgacccccacactacaacagtgtgataaggccagtcaatcggttttttcggtgtaatcagtttactggtgtaatcggtttgtttgttcagttttagagaacttcggtgttgcagaatgaagagtcgatcaatgtttggaacaaaaaccaacattttcgtttatctgttttttggctcggtgttcgctttttgccaaactacatcgaacactagcacagcaccctgaacggaggacagagacagcaatttagctatgtgaatgattaaaaaacggggataacagcaagctgttcaacacaaccacatgccgttcaacatcaatcaaagcacgggattcaggaagaccaaaaaatcaagaaaggaagtggagaactgaatttgaacaggagagacagacacatcccacaaggaacccactgacctgcaccgtcgcatcggctttcaaggtgctgatgcgccggcgcgccacgctcgtcgtggtatgcgtcatcgctaactcgcagcaccactgagcaggatgcaccatagctaagccctgcggcgggtgctgatgcgccgatgcgccacgcttgccgtgggatgcgccatcactaactcgcagcaccactgggcaggatgcaccatagctaagccacgctgcgggtgctgccatcgatttggtcactagggatagagtcagggcctcaagggtgcggtgcgggaatgctggctgggcgtcttggctggctgtgggccaccttggtgtgggcttcatgggctgactgttgatggaaagttggtttagctgctctagtgcttatggcagatacacttcggtatatacggtgagtcagtttggtcaggcctaagcactgacaccgaagccgatcactgaggtatcaagaaatcaaaaccgatcccatgccgaacaactaatagtttgggttagttcggtttcaggtcggtaattggtgtctgggaaaaatatgcccagccctaagtgggactgtgggagtttttttctgtaacatatctaattgctgagttaattagtaatgaatgttgcttcaagaacaaatgaggtgcatgtcaaataattcatggaaacagatacaatagtgaaagttgactcactgttttttcggttacccaagattgtcgccacctcataacagatcctaaacgaggtacgtataaagtataattcaaatgaagatctaaggatctcataatccttaaagtaagattatattgtatactgctgctgctgagcatgcttttaatcataaaatttctaccaagggccaacggaaaaagtacctaaatctcaacatatctactatgaacccctcatcacactagttcgatacagccacccaaatgtgtccaaggttttcaacagtacaattttatgactgcatatattacttgcataagctgacttacaatgactactgcaatggcacgcgagcagatctcaccaattcattgattgtacaaaataggcagacgtagcatattgttcagtaccaaagggtaacaacttacgttgggatattgtaagtgaggggaatgagtgtggttggagcatagcaacccattcccatcgccgctgctaactggttctgtt

SEQ ID NO: 19458 - DNA, 4585 bp, Zea Mays
tctacggctctacggagggataggtcgctcttcttcctcactgagagaccatgagacgggtcgagacgacagcggcggatgcaccccacgacctccagtgactctcccagtcccaggctcccagccccccttcctcccgcctccgcgagaccgcgatggcagtcttgctgtggcggtgcatatgcgggccccaacaatccttcagtaagaatcgaggcgcatccaccccttctcctcttgctggcaggagatccaaatactcgggacaatctgtggtaaggagcgcacgcattgaccttttcctgctacacctatgcatttggttcatttctcctgaaaaaaaagtacactggaggcaaaagaaagcaatgcccatgcgtttgttaacggttggaaagaagaggtctcgggggacacaactccttgttgaagaatacaaggagaagctcggtcactattgcgagttcgaggacactcttatcaggtccaacccaaagcttacaagtgatgtaaaggtgcaagttgaagcagaagacacggctatgatgcagcaactcaagtctgacgattttgtagttgtgctggatgaaaacgggaaggatgtcatatccgagcagatagctgatctgattggggatgctggcaacacaggatcatcaaggctcacattctgtatcggtggaccatacggtctcgggttacaagtgcgagagcgtgcagatgcaacgattaggctgtcctcactagttttgaaccatcaagttgccttgatagtcctcatggagcagctctacagggcatggactataataaaaggacagaagtatcaccattaggcctaagtgctatcatcattcgctgctgtatgtaggacttgaaaaatggaagactgcattaataaatttgcagtttccagcacaacatggacacttgtaaataagaagaaattctgctgggtgctttactggttgctaggctgctacatgcttgaaaatggttgctatctgcagctgaggttctgcaaaagcgaatggcacacctgaacattcttcttttactgagatcaagcgtgtcataagatttattagttcctcttgtattgtgaaaatttccaaagaacacaggaagtgaaatatcttttattatgaacattcccaaggaactcaggaagtttgataaaaaaaatgagcataatccctccgtcccagaataacaatcgttctagacttcaaaatttgtgctgattagagattttttaaatctaattatgatgtaatacttcagagcgtatcactatccttcgaacaaaagaaacacagttctttgtgctgaacgcttgtttgcacacttatattgagctgattcaacgacgagtaactgaagaatactgacaaaatcaaccgagaaaaataataattggtgtatctcactctgacattatttttctgctctgctagtactcttaagtataaagggagcatccttcttgacgcgactcacattattcaaggtttcagccccgaaaaaacgttcacatccttcatgtttcagacatcttacaacaggggctgattctgtattcaggtgtaggcatcccatatttcagaaactcaaatcatagctcatttgatggggtgccaggctactctttacatgtgagctgcaagtattgctggaagtatgataggattggttcaataagtctttgaacttgaaacaatataaacagaaagctttgagcagcttcatataattacttcccctatgtcaccataaccaaatcactgcacatagcttattccacagtgacaagatgaggcctagtcattgtgctgaaaaccaggaagaagcgatgcaacaaaccctacaacaaccagctggatctctttcaagacaccttccagccaattacgccgattgccttctacctctgcctcttgtggattctcgttaccagctgcagcatcttgttcacggttctctgcagcttggtcagggtttgcagggtcattgggctgctcattgccatcattctgggcaggcagagcagcacggttctcggcccgagcaggagcctgtggtggatgagcagctgcacctcccgcccgctgaagccatctaacaaaaggtataatagctccggtttgatatctgcaggatacagaagcatgaggttatctagcagcaccatatataggctatacaagtaatgaagaataaactgtgaaatagcattaagtattttggagacgatttgagcaaagtacttacaaagtaaatcgaatgatgcaaacagtatgagaagaaatagcctttgttttgagccttcctggctaagagaaacaccactgcagctagtaggaagatcagggtcaagtcaagctgaaaagcgaagtgaaacctcctcacaacaacttgtctttgaggtacattttgctgcctagcatcctgtacattctcttcaccagcaggagcaccaatgctttctcttcaagcacagaagagcagatataagcaagcaattggacagttcaaaacttcataatgcttcgcactggtcccaagtatccccatcccccaatgaccaaatcaccaaaccagaataaaaaggaatgtcatagcccatagtagcaattcttgcaacaaaagttttcttttttcaactgctcaaagtctgtaaccaagttttacaagttagctgtagttccattctatcttcaagcatggcagcatcagaaacagcgcttgggctccattcaaaaagttaaaggtgtttgtgttgtggtattctcaatcaaattagtcattacaaactagtcagttatagcaagtccctgctgtcataacgatgaaaattgtattatttcaggactgagtaaacatcattatatgttatgttctgccttactcctgttctacaagttacaatatccctagataaataagagagatggctgaagttattcatcttgattttgacccccacactacaacagtgtgataaggccagtcaatcggttttttcggtgtaatcagtttactggtgtaatcggtttgtttgttcagttttagagaacttcggtgttgcagaatgaagagtcgatcaatgtttggaacaaaaaccaacattttcgtttatctgttttttggctcggtgttcgctttttgccaaactacatcgaacactagcacagcaccctgaacggaggacagagacagcaatttagctatgtgaatgattaaaaaacggggataacagcaagctgttcaacacaaccacatgccgttcaacatcaatcaaagcacgggattcaggaagaccaaaaaatcaagaaaggaagtggagaactgaatttgaacaggagagacagacacatcccacaaggaacccactgacctgcaccgtcgcatcggctttcaaggtgctgatgcgccggcgcgccacgctcgtcgtggtatgcgtcatcgctaactcgcagcaccactgagcaggatgcaccatagctaagccctgcggcgggtgctgatgcgccgatgcgccacgcttgccgtgggatgcgccatcactaactcgcagcaccactgggcaggatgcaccatagctaagccacgctgcgggtgctgccatcgatttggtcactagggatagagtcagggcctcaagggtgcggtgcgggaatgctggctgggcgtcttggctggctgtgggccaccttggtgtgggcttcatgggctgactgttgatggaaagttggtttagctgctctagtgcttatggcagatacacttcggtatatacggtgagtcagtttggtcaggcctaagcactgacaccgaagccgatcactgaggtatcaagaaatcaaaaccgatcccatgccgaacaactaatagtttgggttagttcggtttcaggtcggtaattggtgtctgggaaaaatatgcccagccctaagtgggactgtgggagtttttttctgtaacatatctaattgctgagttaattagtaatgaatgttgcttcaagaacaaatgaggtgcatgtcaaataattcatggaaacagatacaatagtgaaagttgactcactgttttttcggttacccaagattgtcgccacctcataacagatcctaaacgaggtacgtataaagtataattcaaatgaagatctaaggatctcataatccttaaagtaagattatattgtatactgctgctgctgagcatgcttttaatcataaaatttctaccaagggccaacggaaaaagtacctaaatctcaacatatctactatgaacccctcatcacactagttcgatacagccacccaaatgtgtccaaggttttcaacagtacaattttatgactgcatatattacttgcataagctgacttacaatgactactgcaatggcacgcgagcagatctcaccaattcattgattgtacaaaataggcagacgtagcatattgttcagtaccaaagggtaacaacttacgttgggatattgtaagtgaggggaatgagtgtggttggagcatagcaacccattcccatcgccgctgctaactggttctgtt

SEQ ID NO: 19459 - DNA, 1264 bp, Zea Mays
atttggttcatttctcctgaaaaaaaagtacactggaggcaaaagaaagcaatgcccatgcgtttgttaacggttggaaagaagaggtctcgggggacacaactccttgttgaagaatacaaggagaagctcggtcactattgcgagttcgaggacactcttatcaggtccaacccaaagcttacaaggtatgatcctccgactttgaagccggtagtcagatacatctataacaggcgaccctcactgcagtgtgcatatcaatatgtgcggcatcaaagtacagcatataggctatctccagccttcatatcccaccttatatcactccctatttcaaactccactctataaacagtacaaaacggtgttttacacgtctatatacagcgaacccatggcttaatataatacgtttttgtgttgaactgctgatagttttcacacaaaaaaaagttaaaaagagaagtcagaacagccaccattaaatgtcagaggttcttcctccatcggtactgttttctgatgctttcttcagtgatgtaaaggtgcaagttgaagcagaagacacggctatgatgcagcaactcaagtctgacgattttgtagttgtgctggatgaaaacgggaaggatgtcatatccgagcagatagctgatctgattggggatgctggcaacacaggatcatcaaggctcacattctgtatcggtggaccatacggtctcgggttacaagtgcgagagcgtgcagatgcaacgattaggctgtcctcactagttttgaaccatcaagttgccttgatagtcctcatggagcagctctacagggcatggactataataaaaggacagaagtatcaccattaggcctaagtgctatcatcattcgctgctgtatgtaggacttgaaaaatggaagactgcattaataaatttgcagtttccagcacaacatggacacttgtaaataagaagaaattctgctgggtgctttactggttgctaggctgctacatgcttgaaaatggttgctatctgcagctgaggttctgcaaaagcgaatggcacacctgaacattcttcttttactgagatcaagcgtgtcataagatttattagttcctcttgtattgtgaaaatttccaaagaacacaggaagtgaaatatcttttattatgaacattcccaaggaactcaggaagtttgataaaaaaaatgagcataatccctccgtcccagaataacaatcgttctagacttca

SEQ ID NO: 19460 - DNA, 818 bp, Zea Mays
ggcggtttgcctagcttccgcacgcgagaggcacagggcgagcgcacgcgagagggaggcagccggcactgcaactgctgaagtccgtgtgtttttcttatttttcagtttggcccttctgtacgtttaatgcagcccgtatctccgcctcccgcggcccgtctcgacacttccatcaccgcccatcgaaatccttctaccgccccgctccgtcatccatggctcgtctgctcgcggcgcgagcccttgcgctggcccgcccctcggggacgccatccgccctacgcttctgcccctcccgtgcgctgtcggacgaggtggagttcgtcgagatcgacctatccgaggagtcccctgcctcttcatccggaggggaaggcgagggcgactcagccacggttcaggcgcagatggggtcgcggcgcctggaggacgccatctatggggtgctcgtgcgccgggcggcgcccgaatggctccccttcgtgcccggggcatcctactgggtcccgccgttgccgcggccgctcggggtggcgagtctcctcggcgcggctgtgtacaccgcgaggggcgccacggcgatgacggaggaggaggcgttcagcttcactaccgtacgggggtgtccatccgcggcgtactttgtgggaggtggtcagagtttttggtctccttaggctccaaagtgtccagggccagaaatggaaaatttctgcgtccagtgaagaaatcaagggaagatgctactcaaactgacgatgatgatgaaagctaattctatgctgcttcacctggggctcctaccgaagagggct

SEQ ID NO: 19461 - DNA, 715 bp, Zea Mays
tctgtacgtttaatgcagcccgtatctccgcctcccgcggcccgtctcgacacttccatcaccgcccatcgaaatccttctaccgccccgctccgtcatccatggctcgtctgctcgcggcgcgagcccttgcgctggcccgcccctcggggacgccatccgccctacgcttctgcccctcccgtgcgctgtcggacgaggtggagttcgtcgagatcgacctatccgaggagtcccctgcctcttcatccggaggggaaggcgagggcgactcagccacggttcaggcgcagatggggtcgcggcgcctggaggacgccatctatggggtgctcgtgcgccgggcggcgcccgaatggctccccttcgtgcccggggcatcctactgggtcccgccgttgccgcggccgctcggggtggcgagtctcctcggcgcggctgtgtacaccgcgaggggcgccacggcgatgacggaggaggaggcgttcagcttcactaccgtacgggggtgtccatccgcggcgtactttgtgggaggtttgagcgggttcgcaaaccaagccgtgtgcatgtactctggtctgggttgggtagctctgcacaggaaaatttctgcgtccagtgaagaaatcaagggaagatgctactcaaactgacgatgatgatgaaagctaattctatgctgcttcacctggggctcctaccgaagagggct

SEQ ID NO: 19462 - DNA, 768 bp, Zea Mays
tctgtacgtttaatgcagcccgtatctccgcctcccgcggcccgtctcgacacttccatcaccgcccatcgaaatccttctaccgccccgctccgtcatccatggctcgtctgctcgcggcgcgagcccttgcgctggcccgcccctcggggacgccatccgccctacgcttctgcccctcccgtgcgctgtcggacgaggtggagttcgtcgagatcgacctatccgaggagtcccctgcctcttcatccggaggggaaggcgagggcgactcagccacggttcaggcgcagatggggtcgcggcgcctggaggacgccatctatggggtgctcgtgcgccgggcggcgcccgaatggctccccttcgtgcccggggcatcctactgggtcccgccgttgccgcggccgctcggggtggcgagtctcctcggcgcggctgtgtacaccgcgaggggcgccacggcgatgacggaggaggaggcgttcagcttcactaccgtacgggggtgtccatccgcggcgtactttgtgggaggtttgagcgggttcgcaaaccaagccgtgtgcatgtactctggtctgggttgggtagctctgcacaggtggtcagagtttttggtctccttaggctccaaagtgtccagggccagaaatggaaaatttctgcgtccagtgaagaaatcaagggaagatgctactcaaactgacgatgatgatgaaagctaattctatgctgcttcacctggggctcctaccgaagagggct

SEQ ID NO: 19463 - DNA, 836 bp, Zea Mays
tctgtacgtttaatgcagcccgtatctccgcctcccgcggcccgtctcgacacttccatcaccgcccatcgaaatccttctaccgccccgctccgtcatccatggctcgtctgctcgcggcgcgagcccttgcgctggcccgcccctcggggacgccatccgccctacgcttctgcccctcccgtgcgctgtcggacgaggtggagttcgtcgagatcgacctatccgaggagtcccctgcctcttcatccggaggggaaggcgagggcgactcagccacggttcaggcgcagatggggtcgcggcgcctggaggacgccatctatggggtgctcgtgcgccgggcggcgcccgaatggctccccttcgtgcccggggcatcctactgggtcccgccgttgccgcggccgctcggggtggcgagtctcctcggcgcggctgtgtacaccgcgaggggcgccacggcgatgacggaggaggaggcgttcagcttcactaccgtacgggggtgtccatccgcggcgtactttgtgggaggtttgagcgggttcgcaaaccaagccgtgtgcatgtactctggtctgggttgggtagctctgcacagttgataagtcccatcgctagaaggaaaaacaaaaaaggaaggttcctagaatcccatccccttcaaaggtggtcagagtttttggtctccttaggctccaaagtgtccagggccagaaatggaaaatttctgcgtccagtgaagaaatcaagggaagatgctactcaaactgacgatgatgatgaaagctaattctatgctgcttcacctggggctcctaccgaagagggct

SEQ ID NO: 19464 - DNA, 883 bp, Zea Mays
ctttgacctcttgctcccccaacgtgaaaagctgagcacctggcggtggtccacggtcattatcaatgttatctacttccatcttagagatcccctgttctccaggctggttttgaagcaggtgcagggagtcctttgtttttgttggtaataccttcttcaatcttagaggtatcatctgtgtccaaattttcatcatcttggcattcgctggggccactttcttcagattcaacatcacctatttttgctttctggtttcctcttctagtgtatctggtttaaggctgtaagcagtttcagagagcttcatttgtttctccactgaatcttccaaccacttgttactgacaacatgtaatcttttgtcatgtagataacgtctttcagcgggagggaagctgcataaacaaccaatggacgaccataaagtttttctatttgcccttcgctcacaaaagttacaaagcaaatctaaagcaataactcagtacctcttgtacaggttatcaaagttatagacctgtaaaaccgaaactactaccaaatgagtagctggagcaatactgctgcagacttgaccaccatgcattgttagatcctgcttcaccctcttcagtgcaagatcagatattacattgtagtccgcattcctccaggaaaaaaggtgaaaaaaacaaatgaggagatgtatcatgtgaaagacatgctacttgacagtaaatgaagcttacactaagggcgcattatgcaagtagacacagcaaccctggaagaaacagaatctttcatctatgcaatgcttctttttgtactgaataaccatgtttgaatcaccagaaactttgtcaatgttacagaaaatctggtgcatgaaaaaaag

SEQ ID NO: 19465 - DNA, 4337 bp, Zea Mays
ctttccgacagtgcttgagcccccattcgacgctgatccgttcagccaaacgccaccggtggcacctgaacggccgaacagctgatagagcctagcagaatgtgcagagagagcgcgtagtcgaaaatggttggatggagtggagacacctgggctcaacaaaagaaacctggactcgaaggttcaaactataaaacacactcccgagtccctctatagcccaaaccaattccaaaactgcaggcctctccaaaattcgaacaccctcgcctggaaccttctacgagccagctccgagcggttgccgtcccataatctgagagacggtgccgtgggtttgcggcgcctgggtcgccagtaaagtgcgggccgagatggagtcctcgtcgtcgggcggcgggctggcgcggcggcggagtagcggcggctggggcagcttcagcggcgacacggacccgttcgacatccccgcgaagggcgcacccctcgagcggcttaggaagtggcggcaagcagcccttgtgctgaatgcatcaaggcgctttaggtacacactcgatttgaaaaaggaggaacaaaatgaggaaatcaggagaaaaattcgtgcaaaggcatatgttataacggctgcttttcgtttcaaagaggctggccgagtccatgttcggtctgaagaaacaaaagtaccgattgctgatggtgcacttggctttggaatcaaagaagacgagattacagcactgacaagggatcacaactactctggtctgcagcaatatggaggggtttctggtgtagcacatatgctaaaaaccgattcggagaagggcattagtggagatgactcagatttgatagcaaggaaaaatacatttggttcaaacacatatcctcgctttcgtatgggatgcttgtaaagacctgacgctaatcatcctcatggttgctgctgctgtttcactggcattgggcataacaacagagggcataaaagaaggctggtatgatggagcgagcattgcctttgctgttcttctagttgtatttgttacagctatcagcgactacaagcaatcactacaatttcaaaatctgaatgaagaaaaacagaacattcgtttggaggttgttagaggtggaaggcgaatcacagtatcaatatatgatttggttgttggagatgttgtccctctcaaaattggtgaccaggtccctgctgatggtatccttatcaatggccactctctttccatagatgaatcaagcatgacgggagaaagtaaaattgtacacaaagatcaaaagtcgccatttctaatgtcaggttgcaaagttgccgatggctatggcacaatgctggtaactgctgttggagtcaacactgaatgggggttgctaatggcaagcatatctgaagattcgggtgaagagacaccactccaggttcgtttgaatggtgtcgctactttcattggaatggttggactttctgttgcccttgcagttctggttgtacttttggccaggtacttcactgggcatacttataatcctgacggatctgtgcaatatgtgaaagggaagatgggtgtaggccagacgatacgtggagtagttagaatattcacagtggctgtcactattgtggtcgtggctgttccagaaggactaccattagctgtcacactgacgcttgctttctcaatgcgcaaaatgatgaaggacaaggctctggtcaggaggctttctgcatgtgaaacgatgggttctgccacaacaatctgcagtgacaagactggcaccttaactttaaatcagatgactgttgttgaggcatattttggtggaaagaagatggactcaccagataatgcacaaatgttatctgctgatgtcacatcactgattgttgaaggaattgcacagaacacttctggaagcatatttgagcccgagggtggtcaagaaccggaggtgactggatcacctacagaaaaggctatattgtcttgggggctaaagctgggtatgaaattcaatgaaacaagattgaagtcatctattcttcatgtatttcctttcaactcagagaaaaagcgaggatggccctgaagtccatatacactggaaaggagcagctgaaatcattttggattcatgcacaagctggcttgacactgatggttcgaagcactcaatgactcctgaaaaaattgctgaattcaagaaattcattgaagatatggctgtggctagcctccgctgtgttgcctttgcctatataactcatgagatggatgatgttccaaacgaagatcagagggcagagtggaaactgcctgaagataacctcattatgcttggaattgtgggaataaaggatccctgccgtccaggagttcgagattctgttcgtttatgtcaggcagctggcattaaggtgcgcatggttactggtgataatcttcaaactgcgagagccattgccctggaatgcgggatacttgatgatcccaatgtgttggagcctgtcatcattgaaggaaaagcattccgggtgctgtcagacttagaaagggaggaagctgctgaaaaaatatctgtgatggggaggtcttcaccaaatgataaacttttacttgttaaggcactgagggcaagaggtcatgttgttgctgttactggagatggcacaaatgatgccccagcactgcatgaggcagatattggtctatcaatgggcattcagggaactgaagttgccaaggagagttctgatattattatcttggatgacaatttcgcatcagtcgtgagggttgtcagatggggtcgttcggtgtatgcaaacatacagaagtttatacaattccaactaacggtcaacgtcgcagctctgataatcaatgtagttgctgccgtcagttctggaaatgtgccgttgaatgctgttcagttgctgtgggttaacctaattatggatactttgggtgcccttgcattggcgacagaaccacctacaaaccatcttatggagagacccccagtagggagaagggagccattgattacaaatatcatgtggagaaacttaattatcatggctttgtttcaagtttcagttctcctcactctcaacttcaagggaataagcctcctgcagttgaaaaatgatgatccagcacatgcagataaagtgaaaaataccttcattttcaacacatttgttctctgccaggtgttcaacgaattcaattcgcgtaaaccagatgagctgaatatattcaagggcatttcagggaaccatctgtttattggcatcatagctataacagttgtactccaggcgcttatcgttgagttccttggcaagtttgcctcaacggtaaggctaagttggcagttgtggttggtatcgataggtcttgctttcttcggctggccgctggcattcgtggggaagcttattcctgttcctaaacgtccattgggagaattctttgcatgctgctgtatctgcaaggggagcaaacaagcccctgatgacgcaacctctaatgataaggaagacaacaagcccgagccttgagatgtcagcaagattgatggttgctaacaatgaccttgtgctgtttcttaccgggttttgacgtgttggatttgtgattaccactgattgctattgtacttcaaacaggaaggctggaaatgcaactcggcttctcatgagaccttgtcatttgctgtagttcgttcgcaactgtatattgtagcttggaagactctgtgccgtggtgcgtgtatttgagaaatttctatgcaaagtgagctggcgataacattggatggcgcagcaaagcatcgcgcgcagtgtttcctaggcatcatccagtgcggctcgtggatgcttttcgtgggtggagctgcctgtgttcgtgccatagcatttgacgagtgggcgcccgctgtcggctttgtgccttgaagcctccgatgcagagaaaacaaggtgagttggaacccgagacgtgtctgaccagcatggcccgtagaaaagtttgccccggccggctaaaatttcccgtgctcgtactttagccgtgcacttgtgcgtccatgtccgtacgtaccgttacgtgaagccgttgccttctctatatttcttgtcagctgtccagtgtattacacgcatgcgcgtttcattgttgagccccacggggccgaggcgacagttgacagcagctgcagcagcagacagcgccatgaattctcaggccctccctcggttggcaccagttgacggactccctttgacacgatagaaaagtgaagagcgg

SEQ ID NO: 19466 - DNA, 4172 bp, Zea Mays
ctataaaacacactcccgagtccctctatagcccaaaccaattccaaaactgcaggcctctccaaaattcgaacaccctcgcctggaaccttctacgagccagctccgagcggttgccgtcccataatctgagagacggtgccgtgggtttgcggcgcctgggtcgccagtaaagtgcgggccgagatggagtcctcgtcgtcgggcggcgggctggcgcggcggcggagtagcggcggctggggcagcttcagcggcgacacggacccgttcgacatccccgcgaagggcgcacccctcgagcggcttaggaagtggcggcaagcagcccttgtgctgaatgcatcaaggcgctttaggtacacactcgatttgaaaaaggaggaacaaaatgaggaaatcaggagaaaaattcgtgcaaaggcatatgttataacggctgcttttcgtttcaaagaggctggccgagtccatgttcggtctgaagaaacaaaagtaccgattgctgatggtgcacttggctttggaatcaaagaagacgagattacagcactgacaagggatcacaactactctggtctgcagcaatatggaggggtttctggtgtagcacatatgctaaaaaccgattcggagaagggcattagtggagatgactcagatttgatagcaaggaaaaatacatttggttcaaacacatatcctcgtaagaaaggaagaagttttttggctttcgtatgggatgcttgtaaagacctgacgctaatcatcctcatggttgctgctgctgtttcactggcattgggcataacaacagagggcataaaagaaggctggtatgatggagcgagcattgcctttgctgttcttctagttgtatttgttacagctatcagcgactacaagcaatcactacaatttcaaaatctgaatgaagaaaaacagaacattcgtttggaggttgttagaggtggaaggcgaatcacagtatcaatatatgatttggttgttggagatgttgtccctctcaaaattggtgaccaggtccctgctgatggtatccttatcaatggccactctctttccatagatgaatcaagcatgacgggagaaagtaaaattgtacacaaagatcaaaagtcgccatttctaatgtcaggttgcaaagttgccgatggctatggcacaatgctggtaactgctgttggagtcaacactgaatgggggttgctaatggcaagcatatctgaagattcgggtgaagagacaccactccaggttcgtttgaatggtgtcgctactttcattggaatggttggactttctgttgcccttgcagttctggttgtacttttggccaggtacttcactgggcatacttataatcctgacggatctgtgcaatatgtgaaagggaagatgggtgtaggccagacgatacgtggagtagttagaatattcacagtggctgtcactattgtggtcgtggctgttccagaaggactaccattagctgtcacactgacgcttgctttctcaatgcgcaaaatgatgaaggacaaggctctggtcaggaggctttctgcatgtgaaacgatgggttctgccacaacaatctgcagtgacaagactggcaccttaactttaaatcagatgactgttgttgaggcatattttggtggaaagaagatggactcaccagataatgcacaaatgttatctgctgatgtcacatcactgattgttgaaggaattgcacagaacacttctggaagcatatttgagcccgagggtggtcaagaaccggaggtgactggatcacctacagaaaaggctatattgtcttgggggctaaagctgggtatgaaattcaatgaaacaagattgaagtcatctattcttcatgtatttcctttcaactcagagaaaaagcgaggatggccctgaagtccatatacactggaaaggagcagctgaaatcattttggattcatgcacaagctggcttgacactgatggttcgaagcactcaatgactcctgaaaaaattgctgaattcaagaaattcattgaagatatggctgtggctagcctccgctgtgttgcctttgcctatataactcatgagatggatgatgttccaaacgaagatcagagggcagagtggaaactgcctgaagataacctcattatgcttggaattgtgggaataaaggatccctgccgtccaggagttcgagattctgttcgtttatgtcaggcagctggcattaaggtgcgcatggttactggtgataatcttcaaactgcgagagccattgccctggaatgcgggatacttgatgatcccaatgtgttggagcctgtcatcattgaaggaaaagcattccgggtgctgtcagacttagaaagggaggaagctgctgaaaaaatatctgtgatggggaggtcttcaccaaatgataaacttttacttgttaaggcactgagggcaagaggtcatgttgttgctgttactggagatggcacaaatgatgccccagcactgcatgaggcagatattggtctatcaatgggcattcagggaactgaagttgccaaggagagttctgatattattatcttggatgacaatttcgcatcagtcgtgagggttgtcagatggggtcgttcggtgtatgcaaacatacagaagtttatacaattccaactaacggtcaacgtcgcagctctgataatcaatgtagttgctgccgtcagttctggaaatgtgccgttgaatgctgttcagttgctgtgggttaacctaattatggatactttgggtgcccttgcattggcgacagaaccacctacaaaccatcttatggagagacccccagtagggagaagggagccattgattacaaatatcatgtggagaaacttaattatcatggctttgtttcaagtttcagttctcctcactctcaacttcaagggaataagcctcctgcagttgaaaaatgatgatccagcacatgcagataaagtgaaaaataccttcattttcaacacatttgttctctgccaggtgttcaacgaattcaattcgcgtaaaccagatgagctgaatatattcaagggcatttcagggaaccatctgtttattggcatcatagctataacagttgtactccaggcgcttatcgttgagttccttggcaagtttgcctcaacggtaaggctaagttggcagttgtggttggtatcgataggtcttgctttcttcggctggccgctggcattcgtggggaagcttattcctgttcctaaacgtccattgggagaattctttgcatgctgctgtatctgcaaggggagcaaacaagcccctgatgacgcaacctctaatgataaggaagacaacaagcccgagccttgagatgtcagcaagattgatggttgctaacaatgaccttgtgctgtttcttaccgggttttgacgtgttggatttgtgattaccactgattgctattgtacttcaaacaggaaggctggaaatgcaactcggcttctcatgagaccttgtcatttgctgtagttcgttcgcaactgtatattgtagcttggaagactctgtgccgtggtgcgtgtatttgagaaatttctatgcaaagtgagctggcgataacattggatggcgcagcaaagcatcgcgcgcagtgtttcctaggcatcatccagtgcggctcgtggatgcttttcgtgggtggagctgcctgtgttcgtgccatagcatttgacgagtgggcgcccgctgtcggctttgtgccttgaagcctccgatgcagagaaaacaaggtgagttggaacccgagacgtgtctgaccagcatggcccgtagaaaagtttgccccggccggctaaaatttcccgtgctcgtactttagccgtgcacttgtgcgtccatgtccgtacgtaccgttacgtgaagccgttgccttctctatatttcttgtcagctgtccagtgtattacacgcatgcgcgtttcattgttgagccccacggggccgaggcgacagttgacagcagctgcagcagcagacagcgccatgaattctcaggccctccctcggttggcaccagttgacggactccctttgacacgatagaaaagtgaagagcgg

SEQ ID NO: 19467 - DNA, 4196 bp, Zea Mays
ctataaaacacactcccgagtccctctatagcccaaaccaattccaaaactgcaggcctctccaaaattcgaacaccctcgcctggaaccttctacgagccagctccgagcggttgccgtcccataatctgagagacggtgccgtgggtttgcggcgcctgggtcgccagtaaagtgcgggccgagatggagtcctcgtcgtcgggcggcgggctggcgcggcggcggagtagcggcggctggggcagcttcagcggcgacacggacccgttcgacatccccgcgaagggcgcacccctcgagcggcttaggaagtggcggcaagcagcccttgtgctgaatgcatcaaggcgctttaggtacacactcgatttgaaaaaggaggaacaaaatgaggaaatcaggagaaaaattcgtgcaaaggcatatgttataacggctgcttttcgtttcaaagaggctggccgagtccatgttcggtctgaagaaacaaaagtaccgattgctgatggtgcacttggctttggaatcaaagaagacgagattacagcactgacaagggatcacaactactctggtctgcagcaatatggaggggtttctggtgtagcacatatgctaaaaaccgattcggagaagggcattagtggagatgactcagatttgatagcaaggaaaaatacatttggttcaaacacatatcctcgtaagaaaggaagaagttttttggctttcgtatgggatgcttgtaaagacctgacgctaatcatcctcatggttgctgctgctgtttcactggcattgggcataacaacagagggcataaaagaaggctggtatgatggagcgagcattgcctttgctgttcttctagttgtatttgttacagctatcagcgactacaagcaatcactacaatttcaaaatctgaatgaagaaaaacagaacattcgtttggaggttgttagaggtggaaggcgaatcacagtatcaatatatgatttggttgttggagatgttgtccctctcaaaattggtgaccaggtccctgctgatggtatccttatcaatggccactctctttccatagatgaatcaagcatgacgggagaaagtaaaattgtacacaaagatcaaaagtcgccatttctaatgtcaggttgcaaagttgccgatggctatggcacaatgctggtaactgctgttggagtcaacactgaatgggggttgctaatggcaagcatatctgaagattcgggtgaagagacaccactccaggttcgtttgaatggtgtcgctactttcattggaatggttggactttctgttgcccttgcagttctggttgtacttttggccaggtacttcactgggcatacttataatcctgacggatctgtgcaatatgtgaaagggaagatgggtgtaggccagacgatacgtggagtagttagaatattcacagtggctgtaggtcactattgtggtcgtggctgttccagaaggactaccattagctgtcacactgacgcttgctttctcaatgcgcaaaatgatgaaggacaaggctctggtcaggaggctttctgcatgtgaaacgatgggttctgccacaacaatctgcagtgacaagactggcaccttaactttaaatcagatgactgttgttgaggcatattttggtggaaagaagatggactcaccagataatgcacaaatgttatctgctgatgtcacatcactgattgttgaaggaattgcacagaacacttctggaagcatatttgagcccgagggtggtcaagaaccggaggtgactggatcacctacagaaaaggctatattgtcttgggggctaaagctgggtatgaaattcaatgaaacaagattgaagtcatctattcttcatgtatttcctttcaactcagagaaaaagcgaggtggggttgcagtgcacctggatggccctgaagtccatatacactggaaaggagcagctgaaatcattttggattcatgcacaagctggcttgacactgatggttcgaagcactcaatgactcctgaaaaaattgctgaattcaagaaattcattgaagatatggctgtggctagcctccgctgtgttgcctttgcctatataactcatgagatggatgatgttccaaacgaagatcagagggcagagtggaaactgcctgaagataacctcattatgcttggaattgtgggaataaaggatccctgccgtccaggagttcgagattctgttcgtttatgtcaggcagctggcattaaggtgcgcatggttactggtgataatcttcaaactgcgagagccattgccctggaatgcgggatacttgatgatcccaatgtgttggagcctgtcatcattgaaggaaaagcattccgggtgctgtcagacttagaaagggaggaagctgctgaaaaaatatctgtgatggggaggtcttcaccaaatgataaacttttacttgttaaggcactgagggcaagaggtcatgttgttgctgttactggagatggcacaaatgatgccccagcactgcatgaggcagatattggtctatcaatgggcattcagggaactgaagttgccaaggagagttctgatattattatcttggatgacaatttcgcatcagtcgtgagggttgtcagatggggtcgttcggtgtatgcaaacatacagaagtttatacaattccaactaacggtcaacgtcgcagctctgataatcaatgtagttgctgccgtcagttctggaaatgtgccgttgaatgctgttcagttgctgtgggttaacctaattatggatactttgggtgcccttgcattggcgacagaaccacctacaaaccatcttatggagagacccccagtagggagaagggagccattgattacaaatatcatgtggagaaacttaattatcatggctttgtttcaagtttcagttctcctcactctcaacttcaagggaataagcctcctgcagttgaaaaatgatgatccagcacatgcagataaagtgaaaaataccttcattttcaacacatttgttctctgccaggtgttcaacgaattcaattcgcgtaaaccagatgagctgaatatattcaagggcatttcagggaaccatctgtttattggcatcatagctataacagttgtactccaggcgcttatcgttgagttccttggcaagtttgcctcaacggtaaggctaagttggcagttgtggttggtatcgataggtcttgctttcttcggctggccgctggcattcgtggggaagcttattcctgttcctaaacgtccattgggagaattctttgcatgctgctgtatctgcaaggggagcaaacaagcccctgatgacgcaacctctaatgataaggaagacaacaagcccgagccttgagatgtcagcaagattgatggttgctaacaatgaccttgtgctgtttcttaccgggttttgacgtgttggatttgtgattaccactgattgctattgtacttcaaacaggaaggctggaaatgcaactcggcttctcatgagaccttgtcatttgctgtagttcgttcgcaactgtatattgtagcttggaagactctgtgccgtggtgcgtgtatttgagaaatttctatgcaaagtgagctggcgataacattggatggcgcagcaaagcatcgcgcgcagtgtttcctaggcatcatccagtgcggctcgtggatgcttttcgtgggtggagctgcctgtgttcgtgccatagcatttgacgagtgggcgcccgctgtcggctttgtgccttgaagcctccgatgcagagaaaacaaggtgagttggaacccgagacgtgtctgaccagcatggcccgtagaaaagtttgccccggccggctaaaatttcccgtgctcgtactttagccgtgcacttgtgcgtccatgtccgtacgtaccgttacgtgaagccgttgccttctctatatttcttgtcagctgtccagtgtattacacgcatgcgcgtttcattgttgagccccacggggccgaggcgacagttgacagcagctgcagcagcagacagcgccatgaattctcaggccctccctcggttggcaccagttgacggactccctttgacacgatagaaaagtgaagagcgg

SEQ ID NO: 19468 - DNA, 4083 bp, Zea Mays
caggcctctccaaaattcgaacaccctcgcctggaaccttctacgagccagctccgagcggttgccgtcccataatctgagagacggtgccgtgggtttgcggcgcctgggtcgccagtaaagtgcgggccgagatggagtcctcgtcgtcgggcggcgggctggcgcggcggcggagtagcggcggctggggcagcttcagcggcgacacggacccgttcgacatccccgcgaagggcgcacccctcgagcggcttaggaagtggcggcaagcagcccttgtgctgaatgcatcaaggcgctttaggtacacactcgatttgaaaaaggaggaacaaaatgaggaaatcaggagaaaaattcgtgcaaaggcatatgttataacggctgcttttcgtttcaaagaggctggccgagtccatgttcggtctgaagaaacaaaagtaccgattgctgatggtgcacttggctttggaatcaaagaagacgagattacagcactgacaagggatcacaactactctggtctgcagcaatatggaggggtttctggtgtagcacatatgctaaaaaccgattcggagaagggcattagtggagatgactcagatttgatagcaaggaaaaatacatttggttcaaacacatatcctcgtaagaaaggaagaagttttttggctttcgtatgggatgcttgtaaagacctgacgctaatcatcctcatggttgctgctgctgtttcactggcattgggcataacaacagagggcataaaagaaggctggtatgatggagcgagcattgcctttgctgttcttctagttgtatttgttacagctatcagcgactacaagcaatcactacaatttcaaaatctgaatgaagaaaaacagaacattcgtttggaggttgttagaggtggaaggcgaatcacagtatcaatatatgatttggttgttggagatgttgtccctctcaaaattggtgaccaggtccctgctgatggtatccttatcaatggccactctctttccatagatgaatcaagcatgacgggagaaagtaaaattgtacacaaagatcaaaagtcgccatttctaatgtcaggttgcaaagttgccgatggctatggcacaatgctggtaactgctgttggagtcaacactgaatgggggttgctaatggcaagcatatctgaagattcgggtgaagagacaccactccaggttcgtttgaatggtgtcgctactttcattggaatggttggactttctgttgcccttgcagttctggttgtacttttggccaggtacttcactgggcatacttataatcctgacggatctgtgcaatatgtgaaagggaagatgggtgtaggccagacgatacgtggagtagttagaatattcacagtggctgtcactattgtggtcgtggctgttccagaaggactaccattagctgtcacactgacgcttgctttctcaatgcgcaaaatgatgaaggacaaggctctggtcaggaggctttctgcatgtgaaacgatgggttctgccacaacaatctgcagtgacaagactggcaccttaactttaaatcagatgactgttgttgaggcatattttggtggaaagaagatggactcaccagataatgcacaaatgttatctgctgatgtcacatcactgattgttgaaggaattgcacagaacacttctggaagcatatttgagcccgagggtggtcaagaaccggaggtgactggatcacctacagaaaaggctatattgtcttgggggctaaagctgggtatgaaattcaatgaaacaagattgaagtcatctattcttcatgtatttcctttcaactcagagaaaaagcgaggtggggttgcagtgcacctggatggccctgaagtccatatacactggaaaggagcagctgaaatcattttggattcatgcacaagctggcttgacactgatgatatggctgtggctagcctccgctgtgttgcctttgcctatataactcatgagatggatgatgttccaaacgaagatcagagggcagagtggaaactgcctgaagataacctcattatgcttggaattgtgggaataaaggatccctgccgtccaggagttcgagattctgttcgtttatgtcaggcagctggcattaaggtgcgcatggttactggtgataatcttcaaactgcgagagccattgccctggaatgcgggatacttgatgatcccaatgtgttggagcctgtcatcattgaaggaaaagcattccgggtgctgtcagacttagaaagggaggaagctgctgaaaaaatatctgtgatggggaggtcttcaccaaatgataaacttttacttgttaaggcactgagggcaagaggtcatgttgttgctgttactggagatggcacaaatgatgccccagcactgcatgaggcagatattggtctatcaatgggcattcagggaactgaagttgccaaggagagttctgatattattatcttggatgacaatttcgcatcagtcgtgagggttgtcagatggggtcgttcggtgtatgcaaacatacagaagtttatacaattccaactaacggtcaacgtcgcagctctgataatcaatgtagttgctgccgtcagttctggaaatgtgccgttgaatgctgttcagttgctgtgggttaacctaattatggatactttgggtgcccttgcattggcgacagaaccacctacaaaccatcttatggagagacccccagtagggagaagggagccattgattacaaatatcatgtggagaaacttaattatcatggctttgtttcaagtttcagttctcctcactctcaacttcaagggaataagcctcctgcagttgaaaaatgatgatccagcacatgcagataaagtgaaaaataccttcattttcaacacatttgttctctgccaggtgttcaacgaattcaattcgcgtaaaccagatgagctgaatatattcaagggcatttcagggaaccatctgtttattggcatcatagctataacagttgtactccaggcgcttatcgttgagttccttggcaagtttgcctcaacggtaaggctaagttggcagttgtggttggtatcgataggtcttgctttcttcggctggccgctggcattcgtggggaagcttattcctgttcctaaacgtccattgggagaattctttgcatgctgctgtatctgcaaggggagcaaacaagcccctgatgacgcaacctctaatgataaggaagacaacaagcccgagccttgagatgtcagcaagattgatggttgctaacaatgaccttgtgctgtttcttaccgggttttgacgtgttggatttgtgattaccactgattgctattgtacttcaaacaggaaggctggaaatgcaactcggcttctcatgagaccttgtcatttgctgtagttcgttcgcaactgtatattgtagcttggaagactctgtgccgtggtgcgtgtatttgagaaatttctatgcaaagtgagctggcgataacattggatggcgcagcaaagcatcgcgcgcagtgtttcctaggcatcatccagtgcggctcgtggatgcttttcgtgggtggagctgcctgtgttcgtgccatagcatttgacgagtgggcgcccgctgtcggctttgtgccttgaagcctccgatgcagagaaaacaaggtgagttggaacccgagacgtgtctgaccagcatggcccgtagaaaagtttgccccggccggctaaaatttcccgtgctcgtactttagccgtgcacttgtgcgtccatgtccgtacgtaccgttacgtgaagccgttgccttctctatatttcttgtcagctgtccagtgtattacacgcatgcgcgtttcattgttgagccccacggggccgaggcgacagttgacagcagctgcagcagcagacagcgccatgaattctcaggccctccctcggttggcaccagttgacggactccctttgacacgatagaaaagtgaagagcgg

SEQ ID NO: 19469 - DNA, 3827 bp, Zea Mays
tgttggagaagattttcttcaatttgtgctaccctagcatattaccaagcagcccttgtgctgaatgcatcaaggcgctttaggtacacactcgatttgaaaaaggaggaacaaaatgaggaaatcaggagaaaaattcgtgcaaaggcatatgttataacggctgcttttcgtttcaaagaggctggccgagtccatgttcggtctgaagaaacaaaagtaccgattgctgatggtgcacttggctttggaatcaaagaagacgagattacagcactgacaagggatcacaactactctggtctgcagcaatatggaggggtttctggtgtagcacatatgctaaaaaccgattcggagaagggcattagtggagatgactcagatttgatagcaaggaaaaatacatttggttcaaacacatatcctcgtaagaaaggaagaagttttttggctttcgtatgggatgcttgtaaagacctgacgctaatcatcctcatggttgctgctgctgtttcactggcattgggcataacaacagagggcataaaagaaggctggtatgatggagcgagcattgcctttgctgttcttctagttgtatttgttacagctatcagcgactacaagcaatcactacaatttcaaaatctgaatgaagaaaaacagaacattcgtttggaggttgttagaggtggaaggcgaatcacagtatcaatatatgatttggttgttggagatgttgtccctctcaaaattggtgaccaggtccctgctgatggtatccttatcaatggccactctctttccatagatgaatcaagcatgacgggagaaagtaaaattgtacacaaagatcaaaagtcgccatttctaatgtcaggttgcaaagttgccgatggctatggcacaatgctggtaactgctgttggagtcaacactgaatgggggttgctaatggcaagcatatctgaagattcgggtgaagagacaccactccaggttcgtttgaatggtgtcgctactttcattggaatggttggactttctgttgcccttgcagttctggttgtacttttggccaggtacttcactgggcatacttataatcctgacggatctgtgcaatatgtgaaagggaagatgggtgtaggccagacgatacgtggagtagttagaatattcacagtggctgtcactattgtggtcgtggctgttccagaaggactaccattagctgtcacactgacgcttgctttctcaatgcgcaaaatgatgaaggacaaggctctggtcaggaggctttctgcatgtgaaacgatgggttctgccacaacaatctgcagtgacaagactggcaccttaactttaaatcagatgactgttgttgaggcatattttggtggaaagaagatggactcaccagataatgcacaaatgttatctgctgatgtcacatcactgattgttgaaggaattgcacagaacacttctggaagcatatttgagcccgagggtggtcaagaaccggaggtgactggatcacctacagaaaaggctatattgtcttgggggctaaagctgggtatgaaattcaatgaaacaagattgaagtcatctattcttcatgtatttcctttcaactcagagaaaaagcgaggtggggttgcagtgcacctggatggccctgaagtccatatacactggaaaggagcagctgaaatcattttggattcatgcacaagctggcttgacactgatggttcgaagcactcaatgactcctgaaaaaattgctgaattcaagaaattcattgaagatatggctgtggctagcctccgctgtgttgcctttgcctatataactcatgagatggatgatgttccaaacgaagatcagagggcagagtggaaactgcctgaagataacctcattatgcttggaattgtgggaataaaggatccctgccgtccaggagttcgagattctgttcgtttatgtcaggcagctggcattaaggtgcgcatggttactggtgataatcttcaaactgcgagagccattgccctggaatgcgggatacttgatgatcccaatgtgttggagcctgtcatcattgaaggaaaagcattccgggtgctgtcagacttagaaagggaggaagctgctgaaaaaatatctgtgatggggaggtcttcaccaaatgataaacttttacttgttaaggcactgagggcaagaggtcatgttgttgctgttactggagatggcacaaatgatgccccagcactgcatgaggcagatattggtctatcaatgggcattcagggaactgaagttgccaaggagagttctgatattattatcttggatgacaatttcgcatcagtcgtgagggttgtcagatggggtcgttcggtgtatgcaaacatacagaagtttatacaattccaactaacggtcaacgtcgcagctctgataatcaatgtagttgctgccgtcagttctggaaatgtgccgttgaatgctgttcagttgctgtgggttaacctaattatggatactttgggtgcccttgcattggcgacagaaccacctacaaaccatcttatggagagacccccagtagggagaagggagccattgattacaaatatcatgtggagaaacttaattatcatggctttgtttcaagtttcagttctcctcactctcaacttcaagggaataagcctcctgcagttgaaaaatgatgatccagcacatgcagataaagtgaaaaataccttcattttcaacacatttgttctctgccaggtgttcaacgaattcaattcgcgtaaaccagatgagctgaatatattcaagggcatttcagggaaccatctgtttattggcatcatagctataacagttgtactccaggcgcttatcgttgagttccttggcaagtttgcctcaacggtaaggctaagttggcagttgtggttggtatcgataggtcttgctttcttcggctggccgctggcattcgtggggaagcttattcctgttcctaaacgtccattgggagaattctttgcatgctgctgtatctgcaaggggagcaaacaagcccctgatgacgcaacctctaatgataaggaagacaacaagcccgagccttgagatgtcagcaagattgatggaaggctggaaatgcaactcggcttctcatgagaccttgtcatttgctgtagttcgttcgcaactgtatattgtagcttggaagactctgtgccgtggtgcgtgtatttgagaaatttctatgcaaagtgagctggcgataacattggatggcgcagcaaagcatcgcgcgcagtgtttcctaggcatcatccagtgcggctcgtggatgcttttcgtgggtggagctgcctgtgttcgtgccatagcatttgacgagtgggcgcccgctgtcggctttgtgccttgaagcctccgatgcagagaaaacaaggtgagttggaacccgagacgtgtctgaccagcatggcccgtagaaaagtttgccccggccggctaaaatttcccgtgctcgtactttagccgtgcacttgtgcgtccatgtccgtacgtaccgttacgtgaagccgttgccttctctatatttcttgtcagctgtccagtgtattacacgcatgcgcgtttcattgttgagccccacggggccgaggcgacagttgacagcagctgcagcagcagacagcgccatgaattctcaggccctccctcggttggcaccagttgacggactccctttgacacgatagaaaagtgaagagcgg

SEQ ID NO: 19470 - DNA, 1754 bp, Zea Mays
ttccgttccattccgttggtggcctcctctcctcctccaatctctttctctatagtagtagtactcgttagttgtgtctcttctctcggttccctccctagtccctcccgctatatatcaaggctctctcgcttggctcaaggctcaccttctcctacctctcgcctagcctgcctcgctcctccgttcaggcaggctttcagctaccgccgcgcggccgcgaccggcggcctcctttagcggctacgtacgacgtatataccgggcaggcgggcaccggccacggccaacgctagctgctgccaggttgctggaaagagcagctaagagagataattcaggagtgggatcgagacgacatgagggacatgggagagaagaggagacacgggcatggacatggacatggacatcttgttgggtttggagctggaggggttgttggacatgccgcagagcatgaggagaagcgcatggagcagaagaagctggacatgagcagcatgtccatggacaccctgccacatctcaccacgcctcttggcaacatcactaccctggatctctccaacaacaacctacagagcattccggagtccataatcgcgaggctcctgaacgtggtggtgctggacgtgcgctccaaccagctcaagtcgctgcccaactccatcggctgcctctcaaagctcaaggtcctcaacgtctccggcaacctgctccaagaactcccggccaccatcgaggaatgccgtgcgctggaggagctgaacgccaacttcaaccagctgacgaggctgccggacacgctgggcttcgagctccacggcctccggcggctgtccgtcaactccaacaagctcgcgtacctgccgtcgtccacctcccacatgacggcgctgcggtcgctggacgcgcgcctcaactgcctccgcgcgctgcccgacgggctggagaacctcggcggcctcgaggcgctcaacgtgagccagaacttccagtacctgcgggagctgccctacggcatcggcctcctcgtctcgctccgggagctggacgtcagctacaactccatcgccgcgctcccggactccatgggctgcctcaccaagctcgccaggttcagcgccgcgggcaacccgctggtgtgcccgcccatggacgtcgtcgagcagagcctcgacgccatgcgcgcctacctcagcgcgcggatgaacggcaccgccaaggccaagaagaagagctgggtgcccaagctggtcaagtacagcaccttctcggcggggatgatgacgcccggccgcaccaaggtgcacgggaacaacaccgacggcctccacatgtcggattaccggtcgctcgacggcggcggcgttgcgtcgtcggcgtttctcagcatgctgtcgccccggcgtctcttctcgccgcggagaaattcggccaagcactagtagcttagcagtggccactggttcggcgggctatacatgtgtgctccctccttattgctggctatttgcttgctgcttcgatgttcatatgacatgcacgtactgtagcgcaagctgaagctaatgatcttgctactgcagttgtatatgctttgaagagaggtatatatgaagtgtgtatagtagcacgtagtgcaatagggcattaatgtacataagaattaagggtgtctttctttccattgtttacatttgcgttagtgcttatgctggagtagtctttttgaaggaaattgtgtcatc

SEQ ID NO: 19471 - DNA, 1440 bp, Zea Mays
tgattgtaacgcccgcaatcaataccagagtgggatcgagacgacatgagggacatgggagagaagaggagacacgggcatggacatggacatggacatcttgttgggtttggagctggaggggttgttggacatgccgcagagcatgaggagaagcgcatggagcagaagaagctggacatgagcagcatgtccatggacaccctgccacatctcaccacgcctcttggcaacatcactaccctggatctctccaacaacaacctacagagcattccggagtccataatcgcgaggctcctgaacgtggtggtgctggacgtgcgctccaaccagctcaagtcgctgcccaactccatcggctgcctctcaaagctcaaggtcctcaacgtctccggcaacctgctccaagaactcccggccaccatcgaggaatgccgtgcgctggaggagctgaacgccaacttcaaccagctgacgaggctgccggacacgctgggcttcgagctccacggcctccggcggctgtccgtcaactccaacaagctcgcgtacctgccgtcgtccacctcccacatgacggcgctgcggtcgctggacgcgcgcctcaactgcctccgcgcgctgcccgacgggctggagaacctcggcggcctcgaggcgctcaacgtgagccagaacttccagtacctgcgggagctgccctacggcatcggcctcctcgtctcgctccgggagctggacgtcagctacaactccatcgccgcgctcccggactccatgggctgcctcaccaagctcgccaggttcagcgccgcgggcaacccgctggtgtgcccgcccatggacgtcgtcgagcagagcctcgacgccatgcgcgcctacctcagcgcgcggatgaacggcaccgccaaggccaagaagaagagctgggtgcccaagctggtcaagtacagcaccttctcggcggggatgatgacgcccggccgcaccaaggtgcacgggaacaacaccgacggcctccacatgtcggattaccggtcgctcgacggcggcggcgttgcgtcgtcggcgtttctcagcatgctgtcgccccggcgtctcttctcgccgcggagaaattcggccaagcactagtagcttagcagtggccactggttcggcgggctatacatgtgtgctccctccttattgctggctatttgcttgctgcttcgatgttcatatgacatgcacgtactgtagcgcaagctgaagctaatgatcttgctactgcagttgtatatgctttgaagagaggtatatatgaagtgtgtatagtagcacgtagtgcaatagggcattaatgtacataagaattaagggtgtctttctttccattgtttacatttgcgttagtgcttatgctggagtagtctttttgaaggaaattgtgtcatc

SEQ ID NO: 19472 - DNA, 3457 bp, Zea Mays
ggggagagagaaggggaccgacacgtagggggcgctgtagggggcaccgctgcggccatagggtgccccctacgcgccgcatgcaaggggagggggatcgctagggtgtaccgctgcgcacagcctaagtatcccacccttcaaacgccacctaggagccacgttgttgctgtcgggaacaatcgttgagcttcttctagttcacactcaattcggtcgttttcagcattaacggagtcaggcccaggcctaacctcagttcatccgagcagccgaacacgcccgccgccattctacgccttgctgcccaggtcggacggaccctttgccggagacgagcacacgccacagcaggaattatcgggcatagagcagagcgaagcgagagatccaatggcggcggcggaggggcagtgggtgctcatggcaacggggcggacgccgaccaacattgcggtgatcaagtactgggggaagcgggacgaggcgctcatcctccccatcaacgacagcatcagcgtaacgctcgaccccgaccatctctccgccaccaccactatcgccgtcagcccctcattcccttccgaccgcatgtggctcaatggcaaggagatctcgctattaggaggaaggtttcagagctgcctcaaagaaatcagaaagcgtgctcgtgacattgaggacaaggagaaggacgtcaagatcaagaaagaggactggggcaagttgcatgttcacatagcctcgtacaacaacttccccacttctgctggtttggcctcttcggctgctgaccttgcctgtttcgatagagattgcgaatgtaagttttctccctttatgcccggggtggtgacaagaaacaaggcttgacttgtggcaaaaggttatgccaagtcgcaggtttggatttcgaggaaacttttgctcctgtggctaggttagagtcaatttaaattttattagcctatgctgctcaccattcttttaggccgttccaaatggacgtgaagagcgctttcctcaatgggccaatcaaggaggaggtatacgtggaacaaccccctggctttgaggatgacaagtatcccgaccatgtatataagctctctaaggcgctatatggacttaagcacatggacatccagcatcacttcctgagagaccaccagcaaaagggagatatcgatgtgtatcacattagcaccgagaaccagctagccgatagcttcaccaagcctttagatgagaaaaggttttgcaggttgcgtagtgagctaaatgtcttagattcgcgtaacttggattgatctatagcatacatgtagtctatgcctttgatcatgttactttgagcatttacattatttgttgtctatttatggtgctcaagttgtacaaatatccccggacctcataagtccatatgcaaatgatgcacatatttaaggggagatgtgctacaacttgacccctttgagactaacttgtttggttaaatacacttgatgtagtctcgaaggtacattgaaagggaaaatgaacttggacaacgaaaatacttccactgcactccggtattagtgtatttaattccaagttcatacttgtgctctcattgcctttctgctcttaattgacattttggtgaggcaatggggttaaagggccaagaatgatcctgttttggtgcttaatgccaaagggggagaaattaaggccaaagcaaaatggatcagccaaccacttgtgaattttgaaaatagaggagttagaatttggattttgtcaaaatactcttattgcaaaatttggtctcttatgggggagaattttgattatgggaaaaagggggggtttggcacttgatcaattttactcttggaatatctctcgatttgcccaaacaagggtgtttgacttagagataggaaaaacaatttgatttgcaaaaacaaaccaagtggtggcaaagagtgatccaaatatgccaaatcttaagtaaaaagggaattggtcttcatttgcattgatgttgcacttcttgtgttgctttttgatgtgttggcataaatcaccaaaaagaggagattgaaagggaaatgtgcccttgggccatttctataagtattttggtgattagatgtccaacacatattgagtgagttcttatgtgccaaatgagtgagaagtgttaaatcaagaacaaggtatgtttctagacttagtgaattgtttttgcatactaacatggttatctaagtgctagaaacagtgtcaagaaaaggatatttgaattggagaagagttggcaaagtatagccaacaccagctcgggcttggcacaccggactgtctggttgtgcacctgacagtgtccagtgccccaggctggtcatcggtgaaccgactgctctcaagaagcggtggagcgacgcgactataaatcaccggactgtccggtgagtcatctgcgcacgcgtccaagtcatcggcgatgaactcgtcgctctcgggaaaagagaaaggcgacgtggctataattcactggactgtccggtgatgcaccggactgtccggtgagtcaacggcgccagcagccaacggtcgtccacgcgatcaacgcgcgacacgtggtccgtgtcaacggtcggttgggcacaccggactgtccggtgtgcaccggacagtgtccggtgcgccaaccggtcccgaggaccaacggtcggctgcgcccggtatggaaggaaatcgagcaccgaactgctacagtggttgtccggtggtgcaccggactgtccgatgcaccactcgacagaatgcaagaattgcctaccaaactgatgtccaacggctcctagcttccttggggctataaaagagaccactaggcgcatggagcagaacaccaagcttacaagaaacatcctaaggcatctagactctgcattcacgcaatcggatcatcgttcttgagatttgagcactgttcgagttgtaaactgaaagggaattaggcttacacctagttcctaattaattttggtggttgaattgcccaacacaaataattggactaactagtttgctctagtgtacaagttatacatgtgccaaaggttcacacttagccaataaaaagaccaagtattgggttcaaacaaaggagcaagagccaaccgaaggcacctctggcctggcgcaccggactgtccggtgtgccaccggacatgtccggtgcaccagaggactccgacttcaaactcttcaccttcgggaattctcgtaagccggcgcgctataattcaccggactattcggtgtacaccggacagtgtccggtgctccaaggatgagcggcctcgcgaactcggcagcctcgggaattcacttcggctgctccgctataattcaccggactgtccggtgtgacagcggggcaacgactacttcgaag

SEQ ID NO: 19473 - DNA, 3463 bp, Zea Mays
ggggagagagaaggggaccgacacgtagggggcgctgtagggggcaccgctgcggccatagggtgccccctacgcgccgcatgcaaggggagggggatcgctagggtgtaccgctgcgcacagcctaagtatcccacccttcaaacgccacctaggagccacgttgttgctgtcgggaacaatcgttgagcttcttctagttcacactcaattcggtcgttttcagcattaacggagtcaggcccaggcctaacctcagttcatccgagcagccgaacacgcccgccgccattctacgccttgctgcccaggtcggacggaccctttgccggagacgagcacacgccacagcaggaattatcgggcatagagcagagcgaagcgagagatccaatggcggcggcggaggggcagtgggtgctcatggcaacggggcggacgccgaccaacattgcggtgatcaagtactgggggaagcgggacgaggcgctcatcctccccatcaacgacagcatcagcgtaacgctcgaccccgaccatctctccgccaccaccactatcgccgtcagcccctcattcccttccgaccgcatgtggctcaatggcaaggagatctcgctattaggaggaaggtttcagagctgcctcaaagaaatcagaaagcgtgctcgtgacattgaggacaaggagaaggacgtcaagatcaagaaagaggactggggcaagttgcatgttcacatagcctcgtacaacaacttccccacttctgctggtttggcctcttcggctgctgaccttgcctgtttcgggacagatagagattgcgaatgtaagttttctccctttatgcccggggtggtgacaagaaacaaggcttgacttgtggcaaaaggttatgccaagtcgcaggtttggatttcgaggaaacttttgctcctgtggctaggttagagtcaatttaaattttattagcctatgctgctcaccattcttttaggccgttccaaatggacgtgaagagcgctttcctcaatgggccaatcaaggaggaggtatacgtggaacaaccccctggctttgaggatgacaagtatcccgaccatgtatataagctctctaaggcgctatatggacttaagcacatggacatccagcatcacttcctgagagaccaccagcaaaagggagatatcgatgtgtatcacattagcaccgagaaccagctagccgatagcttcaccaagcctttagatgagaaaaggttttgcaggttgcgtagtgagctaaatgtcttagattcgcgtaacttggattgatctatagcatacatgtagtctatgcctttgatcatgttactttgagcatttacattatttgttgtctatttatggtgctcaagttgtacaaatatccccggacctcataagtccatatgcaaatgatgcacatatttaaggggagatgtgctacaacttgacccctttgagactaacttgtttggttaaatacacttgatgtagtctcgaaggtacattgaaagggaaaatgaacttggacaacgaaaatacttccactgcactccggtattagtgtatttaattccaagttcatacttgtgctctcattgcctttctgctcttaattgacattttggtgaggcaatggggttaaagggccaagaatgatcctgttttggtgcttaatgccaaagggggagaaattaaggccaaagcaaaatggatcagccaaccacttgtgaattttgaaaatagaggagttagaatttggattttgtcaaaatactcttattgcaaaatttggtctcttatgggggagaattttgattatgggaaaaagggggggtttggcacttgatcaattttactcttggaatatctctcgatttgcccaaacaagggtgtttgacttagagataggaaaaacaatttgatttgcaaaaacaaaccaagtggtggcaaagagtgatccaaatatgccaaatcttaagtaaaaagggaattggtcttcatttgcattgatgttgcacttcttgtgttgctttttgatgtgttggcataaatcaccaaaaagaggagattgaaagggaaatgtgcccttgggccatttctataagtattttggtgattagatgtccaacacatattgagtgagttcttatgtgccaaatgagtgagaagtgttaaatcaagaacaaggtatgtttctagacttagtgaattgtttttgcatactaacatggttatctaagtgctagaaacagtgtcaagaaaaggatatttgaattggagaagagttggcaaagtatagccaacaccagctcgggcttggcacaccggactgtctggttgtgcacctgacagtgtccagtgccccaggctggtcatcggtgaaccgactgctctcaagaagcggtggagcgacgcgactataaatcaccggactgtccggtgagtcatctgcgcacgcgtccaagtcatcggcgatgaactcgtcgctctcgggaaaagagaaaggcgacgtggctataattcactggactgtccggtgatgcaccggactgtccggtgagtcaacggcgccagcagccaacggtcgtccacgcgatcaacgcgcgacacgtggtccgtgtcaacggtcggttgggcacaccggactgtccggtgtgcaccggacagtgtccggtgcgccaaccggtcccgaggaccaacggtcggctgcgcccggtatggaaggaaatcgagcaccgaactgctacagtggttgtccggtggtgcaccggactgtccgatgcaccactcgacagaatgcaagaattgcctaccaaactgatgtccaacggctcctagcttccttggggctataaaagagaccactaggcgcatggagcagaacaccaagcttacaagaaacatcctaaggcatctagactctgcattcacgcaatcggatcatcgttcttgagatttgagcactgttcgagttgtaaactgaaagggaattaggcttacacctagttcctaattaattttggtggttgaattgcccaacacaaataattggactaactagtttgctctagtgtacaagttatacatgtgccaaaggttcacacttagccaataaaaagaccaagtattgggttcaaacaaaggagcaagagccaaccgaaggcacctctggcctggcgcaccggactgtccggtgtgccaccggacatgtccggtgcaccagaggactccgacttcaaactcttcaccttcgggaattctcgtaagccggcgcgctataattcaccggactattcggtgtacaccggacagtgtccggtgctccaaggatgagcggcctcgcgaactcggcagcctcgggaattcacttcggctgctccgctataattcaccggactgtccggtgtgacagcggggcaacgactacttcgaag

SEQ ID NO: 19474 - DNA, 935 bp, Zea Mays
ggggagagagaaggggaccgacacgtagggggcgctgtagggggcaccgctgcggccatagggtgccccctacgcgccgcatgcaaggggagggggatcgctagggtgtaccgctgcgcacagcctaagtatcccacccttcaaacgccacctaggagccacgttgttgctgtcgggaacaatcgttgagcttcttctagttcacactcaattcggtcgttttcagcattaacggagtcaggcccaggcctaacctcagttcatccgagcagccgaacacgcccgccgccattctacgccttgctgcccaggtcggacggaccctttgccggagacgagcacacgccacagcaggaattatcgggcatagagcagagcgaagcgagagatccaatggcggcggcggaggggcagtgggtgctcatggcaacggggcggacgccgaccaacattgcggtgatcaagtactgggggaagcgggacgaggcgctcatcctccccatcaacgacagcatcagcgtaacgctcgaccccgaccatctctccgccaccaccactatcgccgtcagcccctcattcccttccgaccgcatgtggctcaatggcaaggagatctcgctattaggaggaaggtttcagagctgcctcaaagaaatcagaaagcgtgctcgtgacattgaggacaaggagaaggacgtcaagatcaagaaagaggactggggcaagttgcatgttcacatagcctcgtacaacaacttccccacttctgctggtttggcctcttcggctgctgaccttgcctgtttcggtcttcgttagccagcctataatcaaacttgtttacacctcccaacaagctatggcgtcgccgagttcgagatgagatcgatcctgctgcgtggaatttgaccctggtagtgagatcgcccagtgac

SEQ ID NO: 19475 - DNA, 1444 bp, Zea Mays
cgaccccccaatcatctactactaataatacccgtacggggggcggctacttagtcctcgtctcagatctgcagcgcaccgtccctttcagctgctcatcagccgcagcggcacgcaaatcgttccgttctgttgcactctcgatctcgttgtccaatagtgcagctaactctccgcactccgttgcgagcttgcgctctgcagctgcggcggccgagcagagcatagcagagcagggcgcgacgcgatcaatcggagatgccccggaccgcgtgtacgcccatccacttttcaaaaggtttaaccaccaacatgtatagtacaagccgagcagttggacgtacagctgatctgaatcctggtctatcctactcctagaaagagtagcactgtaggcgatacatgacctctgtgtgtgattgtgagcgtttcgcctccgattggaacgtcgcagacgcctcttttcgtcttcgtggagcctgccttttctttttcatgccgattggaggctgaggcagcagatgacggacggggacggcccccttttttgccgtcgcggaagtggtggaatcggctagccgcttcgcttttctgtccacggctccacgcacggccgtccgtaggatctgccggccctgggtgcgggcgggcgtaataaagccatgccacccgcgtcgcgtgtggtgctccgttccccgtctggatttgacttgcccgggtgctgctgctgctggtcgaaacggaataaagccacggtgctggggcaagcaagacaagcgcagacgaacctggtgctggtgggggcgccggcggcggcagcatactgaagcttcacgaggacgtgcagacctgtggctacagggacgtgcaggtgatgttcgacatcctgacgtcggagctggaggcgtccgcgcagcgccccgccgccaagcaccaccagcggaagcggccgccgtcgccgtcgtcgccgtggcccagatacccgtcatcctccatgatcgcggccgcgcaatagaggccgcgcgcgacgctgacggggcgtggacatggagtatagtagtccaaagctgccgcgctcgtcctgggtgatgatggcgccgcggttagttaataagcaagcagttcggttaagaacaccgggttattagtagcacgctgtctagttcgtggtggtagctagctaatagagctggcactgaacgtaaggtttggtgccatgaagggtgtcgtcgatcgtcctcctgccgtctctccggcgaaaagagcgaagaaatccaacagcgtcaaggaccaaggtggtggtagtgtcatataagctgtctggtctgaatgtgcctgtacatactacatagcaccatgtgctgaatttttcgcaatactcggagaaatatattgatggaacaagagaggtttgttttttctctctctctctctcaagtgtctt

SEQ ID NO: 19476 - DNA, 519 bp, Zea Mays
caaaaagctaaagacggaggcttggatgtcattcagacctaagtcttttggaatggacatgagcctacgcctggaaattactatttcgaggagaggtacgatttagtcaggttcataaagacggtccagaaggctggcctgtttgtacatatctgcatcggtcctacatttgtggcgagtggaacttcgggtatgggtatttctccatttcctgaaatcacctccgttaaaaatggagcattaccgtgtctccagtttggtttaagtatgtaccgggcatcagcttcaggacagacaactaacctttcaagacggccatgcagggagaaaattgtgggaatgatgaagagcgaaaacctctttgcatcccaaggtggcccaattatcctctctcaggcaagtataatctttttccttaggtttggtacaaaggaaatagctcccagcagcatgagcgtactattagaaaaaataaacaattcactaagagtaatatcgataactgcacttagcgtttaa

SEQ ID NO: 19477 - DNA, 2345 bp, Zea Mays
ctctgtggtttggtttctttgccacgcgtatataacaactcccatcacttgcgatcggttcttatcgccccctttcccatttctcccctcgattctccgggctgatccggtcgctgtccgggcctgttcgattggaggagaatcgcctggtttgaaggaaaggcttgggaagaaaggcatggccaaattgacctttcaggatggaaaatgattccggacaggaaggggaaaaggtcgctactcgctactagcaagttcgcttggtcgtcacagaaagaggctttggttgcactatgagcaggcacatatacaataactagaacagttagaacctgataggtaaacttatatagacagattgtagtaaaattaaggattacggtcatgtttttttgggtctgctgattccgttttagtcatactgcgaccacatggcccgcggtgtagtttgaagtcaaaacggtatttcagtttatattgttgcgtatcaattaaaatttggtatcaggcatggtaggacctgaatcggtaatgaccgtgcgtgtcatgaatccagcacattattacctgtttaccaggtctgagtgatttaacctgttcgagaagtgcctgacctcgtccaaccatttctaatttcaggtaattatcactgtatctgacatggatgagcacatgggaagacgaacagtcggcggcctcctcttcaccaagggaggatccatccttctcttcagagaagacggctcgcgccccaaggccaagaactgctgcacgcgccatggctgtagcggtcagcatcctgctgacagagccaagggcaaggaggtgcacagggcagcagcggtgggcagtgaatcgacaccggctacccctcggagatcacaagcttttaggaagcccaacagaaggcctccacatgaaggcagtgcctcaggcagcatcgtcagggatgtaggaggcccttgtagcgaaaccggcagcgggtcaagagatgctcctgggcgtgatctgcttgctcggcttaaggagagggtcaacacatcaaggaaacgatcgttgaacagggagaacagcccgcagtcgccgagtggactcagtgtctgtgccagttccccgagcaacagtcggtcagtctcaaggccgtcgcaccggacagcttcgaggataagagaagctgacgaaggcgcgaatgcaggagctgacagtgtagtgcgcagaaatgctgctaggaggggttcagagaggagtgacgatgacttgctgctggtcgagcagggagagctttcgtccctggacgacagcatggaggatccaaatggatacttgcgctttgatgtgggcgggattgaagagctcgagaactatttcatattcaatgatcggcatagaggaatgaggatggatatcgacggcatgtcctacgaagagttgcttgctttgggggagcgaattggtaccgtaaacacaggtctttcagacgacgcgttatccgcgtgcctgaacaggaggctctacatgcccacagcttcaggttctcatgaagattgtgaaagaaaatgcagcgtatgccaggaggagtatttagcaggcgaggaggtgggcgagatggcatgtaaacactactaccacctttcctgcatagatcactggcttcggcagaagaactggtgtcctatctgcaaatctgtcgccctgaaaatcaactagcaacgtgtttcatgtttcttcataaatgaagtgtatagattcttcatctcctgtattccttccccaccccactccttttcccttttggaattttttttctttctttctttttcttttactcaaagcactcattttttattatcaatttaaatcagaaaagaaaatcttgtgttgggttagggcttgctgcgagccttactcgtgttggcccatggcccagtaagaacagccccaatttaggatgggaaaagttcatttgacacctcaactatcgacgtcatctgattagctaggggtgtttggaacttctacaactaactattaccgtttagagtttccaaaacgaaccttagtcacccctttatgactaaatgactatttgaggcttctttaagtaatgtttggtttcagagtttgtttagagctagtttgggaacctcatttttcaaggggttttcatttttcgaagaaaaaatagttcatttttttagaaaaattaaaatcccttagaaggtttccaaatcagtccttagatggaacgactctgttcaagattcagataacatgataaagggcaaagtttaagaggctacttttatatagtgtttggttctggagcctatttaagtggagcggct

SEQ ID NO: 19478 - DNA, 3747 bp, Zea Mays
ctgagagtgagacagaacggcgcagtcagcagtaggaataatgaataaataaaaatataaaatatgacagtttctaggtatataggcgcaggctcgtattatcgtctcgttaattatttaataatgggattcacagctaattaaatctggaagtatatcttgcccgcaaggaaagaatagaagaaaatacaggcggagagaggcgaggaaggaagaaatcgacgaggggattggattggactgcgactgttgttgattctctcttgcacgcggcggtcctcctccagagtccagacccaatcccaaatccctaatcctacagagggatcccaaatccggcgtccagtccagtccaacctgtagtagatatccccgccggcttggccgtccgtccttgccccaattccgattgaccggagaggagttggatcagggagcattggaatggccgccgccgcataggatggagctggattcctccggccgctgctcggttgctcccgtgaatgctgtgatcgtcgcgattggaggtggaggcgaaggttctcttcagtaagagcttcaagagctgtgatctagctgattgggtatggaggagagtggcggcagctgcggaaagcgggaggacgcggcgccgccgtggaggccgagcgactccacggcgttcggccgttttgcggcggccgcttctccgccggaggcgtccccgtcggcctccgccaatggggctgctgcccgcgtcagcagccttcatggggtcaggcggaaaccgtctgttgcgagattaacagcaggcatcattcagacatatctacaatgtgatcccgagtttaagtactcagaggttctaaatccaaaacgtttcctcacgaatccctctaccccagcccacaacgatgggcttgacaatgcaaattgggatctcatattgtatgtcaacttggagttggttaataagatgtcgaacagaaggtttattgtcaaggaaatgcttgggcagggaacttttggtcaagtagttaaatgctgggacacagaaactaacgactatgttgctgtgaaggtgataaaaaaccagcctgcattttaccatcaagctatcatggaggtttcactattaagaacggtatgatagttcattagaaacttaacttcgttttgctcaataggtacactaagtcactaactattaagattgcggatgtacttgcagttaaatcagaaatttgatcctgatgatcagcataacattgtccgtatgcttgattatctgtcatttcaaaaccatttgtgtatagcttttgagatgcttggccaaaacctatatgaactgctcaaaaggaatcacttaagaggtctgaaattgaaatatgttcaagccttctcaaaacagatattggatgccatggttgtgatgagagaagctggaatcatccattgtgatttgaagccagaaaatatcctgttagctcccagtgtcacaacagctgcagaagtgaaagttattgattttggatcagcctgcctggagggtaaaacggtttactcgtacatccagagccgctattacaggtctccagaggttctccttggctatccatatactaccgcgatcgacatgtggtcgtttggctgcatagttgctgaactgtttctaggtttgccattgtttcctggagcgtcagaatatgatgtgcttcagcgaatgatgaaaattcttgggggccaaccaccagatgaactgctaagggaagctaaaaacactgcaaggttttttaaacatgttggaagtatctatcctggcaatgaggcacctactggtctttgtagtgcgtacaaaagtttaagtgaagaagatgttgaagtgagagactccaagaagccacagatgggaaagtggtacttcccacacctaaagcttgacaaactcatatgtacctatccttggaacaattccgaactgacaggtcttacattttgattcagagacagaaaaaatggatcgtttgggattagttgatttcttgaagggtctccttgaatttgatccaaataagagatggtcaccattgcaggctctataccatccattcataacaggcaaatcgttcaccggtccatatgaacctgtacctgagaccacaagaattcctgttgttcgtgctgcagcaattgatcacaatcctggagggggccactggctacattcaggtctttccccgcaggttggaagtgtcaacagatacctaccttcgaataatgcctaccctccaaaggttcctttttcttatgggagtagttatggaagctttggtagccatggtagctataccgccaatgctggttttggtaacagctacggaagcattggtgatgttaatgctatcaatatgtattattcacccttaagttcttctggattaacgcaaattggctctagtccagatgttagactaaggatgcttctcccacatgatagaggaattcgattgagccctggtagtcttgggcctatgtctcttggagccagtccatcacagtttaccccaccaaactaccagatgcaaatcccagctaattcggttgggaagcatggttctggttctcctgcaagtggaggcattcatggttctccgttaggaaaatctgcaggagtgggcccatacaacatgaggaggaacttgccaatgccgccacatgattatgtatctcagcatggacacgggcgttgtggagatggtgtcagtttcagtcattttgatgcctgtgctcgaggacatacaggtcactctcatagtgcagcgggacctagttcttatcattctggttggagaccacaaataggttcaaggagtggtatttccttggaggcctcgtctagtcatgtgctttcacaggctccatcacaatcgtttgacttttcaccttcatcagcacttgatcctgctaattgggaccctaattatagtgatgagtcactactgcaggacaattcactgtcagctgaactaagtagcaacctccactttggagatgcaactggccaagggagtggatctatcaggtcagcaaatttccaaggccacgtcttcgctacatctaaccctgtaccaacaaaccaaagagcagatcaattatttcatgtgtcttctcaaggattgagtgcccattccagtgttcccgtcaactacggtggttacaaccctccaaattatcctccgcaaaatctccgtcctcgtcgtggacaaccaattcttcatcagcgatataaccaggcaacttccagtccgatgcggccaatgggaagccatcacagtgggcagcctgcgtggcctagttttggcatgggcgatggagtgccctggggaggaacaggagggcactcatttacgacaagtgggctatcttcatctcttgcaagaaaggattatgggagcatcttttagtgtgttgtggacaggaggaatggcgttgattcattgcagtcgtaaattatttgtattagcaaaattggagtgcgatgattctggtttattgtttcgatgttgttaccccatccctccaattggtcctttgtgaacaagacagttgatatacaatatatgatcgatgacaatagcattcctttgcagccctttttttatcagtcagaagtttgggtgttcgcctgattgctgactatgttgtagttgccttgtcagctatgtaatatgaaggcgtgatgtgcttaggttcaggtgtgtttgg

SEQ ID NO: 19479 - DNA, 3668 bp, Zea Mays
ctgagagtgagacagaacggcgcagtcagcagtaggaataatgaataaataaaaatataaaatatgacagtttctaggtatataggcgcaggctcgtattatcgtctcgttaattatttaataatgggattcacagctaattaaatctggaagtatatcttgcccgcaaggaaagaatagaagaaaatacaggcggagagaggcgaggaaggaagaaatcgacgaggggattggattggactgcgactgttgttgattctctcttgcacgcggcggtcctcctccagagtccagacccaatcccaaatccctaatcctacagagggatcccaaatccggcgtccagtccagtccaacctgtagtagatatccccgccggcttggccgtccgtccttgccccaattccgattgaccggagaggagttggatcagggagcattggaatggccgccgccgcataggatggagctggattcctccggccgctgctcggttgctcccgtgaatgctgtgatcgtcgcgattggaggtggaggcgaaggttctcttcagtaagagcttcaagagctgtgatctagctgattgggtatggaggagagtggcggcagctgcggaaagcgggaggacgcggcgccgccgtggaggccgagcgactccacggcgttcggccgttttgcggcggccgcttctccgccggaggcgtccccgtcggcctccgccaatggggctgctgcccgcgtcagcagccttcatggggtcaggcggaaaccgtctgttgcgagattaacagcaggcatcattcagacatatctacaatgtgatcccgagtttaagtactcagaggttctaaatccaaaacgtttcctcacgaatccctctaccccagcccacaacgatgggcttgacaatgcaaattgggatctcatattgtatgtcaacttggagttggttaataagatgtcgaacagaaggtttattgtcaaggaaatgcttgggcagggaacttttggtcaagtagttaaatgctgggacacagaaactaacgactatgttgctgtgaaggtgataaaaaaccagcctgcattttaccatcaagctatcatggaggtttcactattaagaacggtatgatagttcattagaaacttaacttcgttttgctcaataggtacactaagtcactaactattaagattgcggatgtacttgcagttaaatcagaaatttgatcctgatgatcagcataacattgtccgtatgcttgattatctgtcatttcaaaaccatttgtgtatagcttttgagatgcttggccaaaacctatatgaactgctcaaaaggaatcacttaagaggtctgaaattgaaatatgttcaagccttctcaaaacagatattggatgccatggttgtgatgagagaagctggaatcatccattgtgatttgaagccagaaaatatcctgttagctcccagtgtcacaacagctgcagaagtgaaagttattgattttggatcagcctgcctggagggtaaaacggtttactcgtacatccagagccgctattacaggtctccagaggttctccttggctatccatatactaccgcgatcgacatgtggtcgtttggctgcatagttgctgaactgtttctaggtttgccattgtttcctggagcgtcagaatatgatgtgcttcagcgaatgatgaaaattcttgggggccaaccaccagatgaactgctaagggaagctaaaaacactgcaaggttttttaaacatgttggaagtatctatcctggcaatgaggcacctactggtctttgtagtgcgtacaaaagtttaagtgaagaagatgttgaagtgagagactccaagaagccacagatgggaaagtggtacttcccacacctaaagcttgacaaactcatatgtacctatccttggaacaattccgaactgacagagacagaaaaaatggatcgtttgggattagttgatttcttgaagggtctccttgaatttgatccaaataagagatggtcaccattgcaggctctataccatccattcataacaggcaaatcgttcaccggtccatatgaacctgtacctgagaccacaagaattcctgttgttcgtgctgcagcaattgatcacaatcctggagggggccactggctacattcaggtctttccccgcaggttggaagtgtcaacagatacctaccttcgaataatgcctaccctccaaaggttcctttttcttatgggagtagttatggaagctttggtagccatggtagctataccgccaatgctggttttggtaacagctacggaagcattggtgatgttaatgctatcaatatgtattattcacccttaagttcttctggattaacgcaaattggctctagtccagatgttagactaaggatgcttctcccacatgatagaggaattcgattgagccctggtagtcttgggcctatgtctcttggagccagtccatcacagtttaccccaccaaactaccagatgcaaatcccagctaattcggttgggaagcatggttctggttctcctgcaagtggaggcattcatggttctccgttaggaaaatctgcaggagtgggcccatacaacatgaggaggaacttgccaatgccgccacatgattatgtatctcagcatggacacgggcgttgtggagatggtgtcagtttcagtcattttgatgcctgtgctcgaggacatacaggtcactctcatagtgcagcgggacctagttcttatcattctggttggagaccacaaataggttcaaggagtggtatttccttggaggcctcgtctagtcatgtgctttcacaggctccatcacaatcgtttgacttttcaccttcatcagcacttgatcctgctaattgggaccctaattatagtgatgagtcactactgcaggacaattcactgtcagctgaactaagtagcaacctccactttggagatgcaactggccaagggagtggatctatcagagcagatcaattatttcatgtgtcttctcaaggattgagtgcccattccagtgttcccgtcaactacggtggttacaaccctccaaattatcctccgcaaaatctccgtcctcgtcgtggacaaccaattcttcatcagcgatataaccaggcaacttccagtccgatgcggccaatgggaagccatcacagtgggcagcctgcgtggcctagttttggcatgggcgatggagtgccctggggaggaacaggagggcactcatttacgacaagtgggctatcttcatctcttgcaagaaaggattatgggagcatcttttagtgtgttgtggacaggaggaatggcgttgattcattgcagtcgtaaattatttgtattagcaaaattggagtgcgatgattctggtttattgtttcgatgttgttaccccatccctccaattggtcctttgtgaacaagacagttgatatacaatatatgatcgatgacaatagcattcctttgcagccctttttttatcagtcagaagtttgggtgttcgcctgattgctgactatgttgtagttgccttgtcagctatgtaatatgaaggcgtgatgtgcttaggttcaggtgtgtttgg

SEQ ID NO: 19480 - DNA, 3531 bp, Zea Mays
ctgagagtgagacagaacggcgcagtcagcagtaggaataatgaataaataaaaatataaaatatgacagtttctaggtatataggcgcaggctcgtattatcgtctcgttaattatttaataatgggattcacagctaattaaatctggaagtatatcttgcccgcaaggaaagaatagaagaaaatacaggcggagagaggcgaggaaggaagaaatcgacgaggggattggattggactgcgactgttgttgattctctcttgcacgcggcggtcctcctccagagtccagacccaatcccaaatccctaatcctacagagggatcccaaatccggcgtccagtccagtccaacctgtagtagatatccccgccggcttggccgtccgtccttgccccaattccgattgaccggagaggagttggatcagggagcattggaatggccgccgccgcataggatggagctggattcctccggccgctgctcggttgctcccgtgaatgctgtgatcgtcgcgattggaggtggaggcgaaggttctcttcagtaagagcttcaagagctgtgatctagctgattgggtatggaggagagtggcggcagctgcggaaagcgggaggacgcggcgccgccgtggaggccgagcgactccacggcgttcggccgttttgcggcggccgcttctccgccggaggcgtccccgtcggcctccgccaatggggctgctgcccgcgtcagcagccttcatggggtcaggcggaaaccgtctgttgcgagattaacagcaggcatcattcagacatatctacaatgtgatcccgagtttaagtactcagaggttctaaatccaaaacgtttcctcacgaatccctctaccccagcccacaacgatgggcttgacaatgcaaattgggatctcatattgtatgtcaacttggagttggttaataagatgtcgaacagaaggtttattgtcaaggaaatgcttgggcagggaacttttggtcaagtagttaaatgctgggacacagaaactaacgactatgttgctgtgaaggtgataaaaaaccagcctgcattttaccatcaagctatcatggaggtttcactattaagaacgatatgaactgctcaaaaggaatcacttaagaggtctgaaattgaaatatgttcaagccttctcaaaacagatattggatgccatggttgtgatgagagaagctggaatcatccattgtgatttgaagccagaaaatatcctgttagctcccagtgtcacaacagctgcagaagtgaaagttattgattttggatcagcctgcctggagggtaaaacggtttactcgtacatccagagccgctattacaggtctccagaggttctccttggctatccatatactaccgcgatcgacatgtggtcgtttggctgcatagttgctgaactgtttctaggtttgccattgtttcctggagcgtcagaatatgatgtgcttcagcgaatgatgaaaattcttgggggccaaccaccagatgaactgctaagggaagctaaaaacactgcaaggttttttaaacatgttggaagtatctatcctggcaatgaggcacctactggtctttgtagtgcgtacaaaagtttaagtgaagaagatgttgaagtgagagactccaagaagccacagatgggaaagtggtacttcccacacctaaagcttgacaaactcatatgtacctatccttggaacaattccgaactgacagagacagaaaaaatggatcgtttgggattagttgatttcttgaagggtctccttgaatttgatccaaataagagatggtcaccattgcaggctctataccatccattcataacaggcaaatcgttcaccggtccatatgaacctgtacctgagaccacaagaattcctgttgttcgtgctgcagcaattgatcacaatcctggagggggccactggctacattcaggtctttccccgcaggttggaagtgtcaacagatacctaccttcgaataatgcctaccctccaaaggttcctttttcttatgggagtagttatggaagctttggtagccatggtagctataccgccaatgctggttttggtaacagctacggaagcattggtgatgttaatgctatcaatatgtattattcacccttaagttcttctggattaacgcaaattggctctagtccagatgttagactaaggatgcttctcccacatgatagaggaattcgattgagccctggtagtcttgggcctatgtctcttggagccagtccatcacagtttaccccaccaaactaccagatgcaaatcccagctaattcggttgggaagcatggttctggttctcctgcaagtggaggcattcatggttctccgttaggaaaatctgcaggagtgggcccatacaacatgaggaggaacttgccaatgccgccacatgattatgtatctcagcatggacacgggcgttgtggagatggtgtcagtttcagtcattttgatgcctgtgctcgaggacatacaggtcactctcatagtgcagcgggacctagttcttatcattctggttggagaccacaaataggttcaaggagtggtatttccttggaggcctcgtctagtcatgtgctttcacaggctccatcacaatcgtttgacttttcaccttcatcagcacttgatcctgctaattgggaccctaattatagtgatgagtcactactgcaggacaattcactgtcagctgaactaagtagcaacctccactttggagatgcaactggccaagggagtggatctatcaggtcagcaaatttccaaggccacgtcttcgctacatctaaccctgtaccaacaaaccaaagagcagatcaattatttcatgtgtcttctcaaggattgagtgcccattccagtgttcccgtcaactacggtggttacaaccctccaaattatcctccgcaaaatctccgtcctcgtcgtggacaaccaattcttcatcagcgatataaccaggcaacttccagtccgatgcggccaatgggaagccatcacagtgggcagcctgcgtggcctagttttggcatgggcgatggagtgccctggggaggaacaggagggcactcatttacgacaagtgggctatcttcatctcttgcaagaaaggattatgggagcatcttttagtgtgttgtggacaggaggaatggcgttgattcattgcagtcgtaaattatttgtattagcaaaattggagtgcgatgattctggtttattgtttcgatgttgttaccccatccctccaattggtcctttgtgaacaagacagttgatatacaatatatgatcgatgacaatagcattcctttgcagccctttttttatcagtcagaagtttgggtgttcgcctgattgctgactatgttgtagttgccttgtcagctatgtaatatgaaggcgtgatgtgcttaggttcaggtgtgtttgg

SEQ ID NO: 19481 - DNA, 3531 bp, Zea Mays
ctgagagtgagacagaacggcgcagtcagcagtaggaataatgaataaataaaaatataaaatatgacagtttctaggtatataggcgcaggctcgtattatcgtctcgttaattatttaataatgggattcacagctaattaaatctggaagtatatcttgcccgcaaggaaagaatagaagaaaatacaggcggagagaggcgaggaaggaagaaatcgacgaggggattggattggactgcgactgttgttgattctctcttgcacgcggcggtcctcctccagagtccagacccaatcccaaatccctaatcctacagagggatcccaaatccggcgtccagtccagtccaacctgtagtagatatccccgccggcttggccgtccgtccttgccccaattccgattgaccggagaggagttggatcagggagcattggaatggccgccgccgcataggatggagctggattcctccggccgctgctcggttgctcccgtgaatgctgtgatcgtcgcgattggaggtggaggcgaaggttctcttcagtaagagcttcaagagctgtgatctagctgattgggtatggaggagagtggcggcagctgcggaaagcgggaggacgcggcgccgccgtggaggccgagcgactccacggcgttcggccgttttgcggcggccgcttctccgccggaggcgtccccgtcggcctccgccaatggggctgctgcccgcgtcagcagccttcatggggtcaggcggaaaccgtctgttgcgagattaacagcaggcatcattcagacatatctacaatgtgatcccgagtttaagtactcagaggttctaaatccaaaacgtttcctcacgaatccctctaccccagcccacaacgatgggcttgacaatgcaaattgggatctcatattgtatgtcaacttggagttggttaataagatgtcgaacagaaggtttattgtcaaggaaatgcttgggcagggaacttttggtcaagtagttaaatgctgggacacagaaactaacgactatgttgctgtgaaggtgataaaaaaccagcctgcattttaccatcaagctatcatggaggtttcactattaagaacgatatgaactgctcaaaaggaatcacttaagaggtctgaaattgaaatatgttcaagccttctcaaaacagatattggatgccatggttgtgatgagagaagctggaatcatccattgtgatttgaagccagaaaatatcctgttagctcccagtgtcacaacagctgcagaagtgaaagttattgattttggatcagcctgcctggagggtaaaacggtttactcgtacatccagagccgctattacaggtctccagaggttctccttggctatccatatactaccgcgatcgacatgtggtcgtttggctgcatagttgctgaactgtttctaggtttgccattgtttcctggagcgtcagaatatgatgtgcttcagcgaatgatgaaaattcttgggggccaaccaccagatgaactgctaagggaagctaaaaacactgcaaggttttttaaacatgttggaagtatctatcctggcaatgaggcacctactggtctttgtagtgcgtacaaaagtttaagtgaagaagatgttgaagtgagagactccaagaagccacagatgggaaagtggtacttcccacacctaaagcttgacaaactcatatgtacctatccttggaacaattccgaactgacaggtcttacattttgattcagagacagaaaaaatggatcgtttgggattagttgatttcttgaagggtctccttgaatttgatccaaataagagatggtcaccattgcaggctctataccatccattcataacaggcaaatcgttcaccggtccatatgaacctgtacctgagaccacaagaattcctgttgttcgtgctgcagcaattgatcacaatcctggagggggccactggctacattcaggtctttccccgcaggttggaagtgtcaacagatacctaccttcgaataatgcctaccctccaaaggttcctttttcttatgggagtagttatggaagctttggtagccatggtagctataccgccaatgctggttttggtaacagctacggaagcattggtgatgttaatgctatcaatatgtattattcacccttaagttcttctggattaacgcaaattggctctagtccagatgttagactaaggatgcttctcccacatgatagaggaattcgattgagccctggtagtcttgggcctatgtctcttggagccagtccatcacagtttaccccaccaaactaccagatgcaaatcccagctaattcggttgggaagcatggttctggttctcctgcaagtggaggcattcatggttctccgttaggaaaatctgcaggagtgggcccatacaacatgaggaggaacttgccaatgccgccacatgattatgtatctcagcatggacacgggcgttgtggagatggtgtcagtttcagtcattttgatgcctgtgctcgaggacatacaggtcactctcatagtgcagcgggacctagttcttatcattctggttggagaccacaaataggttcaaggagtggtatttccttggaggcctcgtctagtcatgtgctttcacaggctccatcacaatcgtttgacttttcaccttcatcagcacttgatcctgctaattgggaccctaattataggacaattcactgtcagctgaactaagtagcaacctccactttggagatgcaactggccaagggagtggatctatcaggtcagcaaatttccaaggccacgtcttcgctacatctaaccctgtaccaacaaaccaaagagcagatcaattatttcatgtgtcttctcaaggattgagtgcccattccagtgttcccgtcaactacggtggttacaaccctccaaattatcctccgcaaaatctccgtcctcgtcgtggacaaccaattcttcatcagcgatataaccaggcaacttccagtccgatgcggccaatgggaagccatcacagtgggcagcctgcgtggcctagttttggcatgggcgatggagtgccctggggaggaacaggagggcactcatttacgacaagtgggctatcttcatctcttgcaagaaaggattatgggagcatcttttagtgtgttgtggacaggaggaatggcgttgattcattgcagtcgtaaattatttgtattagcaaaattggagtgcgatgattctggtttattgtttcgatgttgttaccccatccctccaattggtcctttgtgaacaagacagttgatatacaatatatgatcgatgacaatagcattcctttgcagccctttttttatcagtcagaagtttgggtgttcgcctgattgctgactatgttgtagttgccttgtcagctatgtaatatgaaggcgtgatgtgcttaggttcaggtgtgtttgg

SEQ ID NO: 19482 - DNA, 3660 bp, Zea Mays
ctgagagtgagacagaacggcgcagtcagcagtaggaataatgaataaataaaaatataaaatatgacagtttctaggtatataggcgcaggctcgtattatcgtctcgttaattatttaataatgggattcacagctaattaaatctggaagtatatcttgcccgcaaggaaagaatagaagaaaatacaggcggagagaggcgaggaaggaagaaatcgacgaggggattggattggactgcgactgttgttgattctctcttgcacgcggcggtcctcctccagagtccagacccaatcccaaatccctaatcctacagagggatcccaaatccggcgtccagtccagtccaacctgtagtagatatccccgccggcttggccgtccgtccttgccccaattccgattgaccggagaggagttggatcagggagcattggaatggccgccgccgcataggatggagctggattcctccggccgctgctcggttgctcccgtgaatgctgtgatcgtcgcgattggaggtggaggcgaaggttctcttcagtaagagcttcaagagctgtgatctagctgattgggtatggaggagagtggcggcagctgcggaaagcgggaggacgcggcgccgccgtggaggccgagcgactccacggcgttcggccgttttgcggcggccgcttctccgccggaggcgtccccgtcggcctccgccaatggggctgctgcccgcgtcagcagccttcatggggtcaggcggaaaccgtctgttgcgagattaacagcaggcatcattcagacatatctacaatgtgatcccgagtttaagtactcagaggttctaaatccaaaacgtttcctcacgaatccctctaccccagcccacaacgatgggcttgacaatgcaaattgggatctcatattgtatgtcaacttggagttggttaataagatgtcgaacagaaggtttattgtcaaggaaatgcttgggcagggaacttttggtcaagtagttaaatgctgggacacagaaactaacgactatgttgctgtgaaggtgataaaaaaccagcctgcattttaccatcaagctatcatggaggtttcactattaagaacgattgcggatgtacttgcagttaaatcagaaatttgatcctgatgatcagcataacattgtccgtatgcttgattatctgtcatttcaaaaccatttgtgtatagcttttgagatgcttggccaaaacctatatgaactgctcaaaaggaatcacttaagaggtctgaaattgaaatatgttcaagccttctcaaaacagatattggatgccatggttgtgatgagagaagctggaatcatccattgtgatttgaagccagaaaatatcctgttagctcccagtgtcacaacagctgcagaagtgaaagttattgattttggatcagcctgcctggagggtaaaacggtttactcgtacatccagagccgctattacaggtctccagaggttctccttggctatccatatactaccgcgatcgacatgtggtcgtttggctgcatagttgctgaactgtttctaggtttgccattgtttcctggagcgtcagaatatgatgtgcttcagcgaatgatgaaaattcttgggggccaaccaccagatgaactgctaagggaagctaaaaacactgcaaggttttttaaacatgttggaagtatctatcctggcaatgaggcacctactggtctttgtagtgcgtacaaaagtttaagtgaagaagatgttgaagtgagagactccaagaagccacagatgggaaagtggtacttcccacacctaaagcttgacaaactcatatgtacctatccttggaacaattccgaactgacagagacagaaaaaatggatcgtttgggattagttgatttcttgaagggtctccttgaatttgatccaaataagagatggtcaccattgcaggctctataccatccattcataacaggcaaatcgttcaccggtccatatgaacctgtacctgagaccacaagaattcctgttgttcgtgctgcagcaattgatcacaatcctggagggggccactggctacattcaggtctttccccgcaggttggaagtgtcaacagatacctaccttcgaataatgcctaccctccaaaggttcctttttcttatgggagtagttatggaagctttggtagccatggtagctataccgccaatgctggttttggtaacagctacggaagcattggtgatgttaatgctatcaatatgtattattcacccttaagttcttctggattaacgcaaattggctctagtccagatgttagactaaggatgcttctcccacatgatagaggaattcgattgagccctggtagtcttgggcctatgtctcttggagccagtccatcacagtttaccccaccaaactaccagatgcaaatcccagctaattcggttgggaagcatggttctggttctcctgcaagtggaggcattcatggttctccgttaggaaaatctgcaggagtgggcccatacaacatgaggaggaacttgccaatgccgccacatgattatgtatctcagcatggacacgggcgttgtggagatggtgtcagtttcagtcattttgatgcctgtgctcgaggacatacaggtcactctcatagtgcagcgggacctagttcttatcattctggttggagaccacaaataggttcaaggagtggtatttccttggaggcctcgtctagtcatgtgctttcacaggctccatcacaatcgtttgacttttcaccttcatcagcacttgatcctgctaattgggaccctaattatagtgatgagtcactactgcaggacaattcactgtcagctgaactaagtagcaacctccactttggagatgcaactggccaagggagtggatctatcaggtcagcaaatttccaaggccacgtcttcgctacatctaaccctgtaccaacaaaccaaagagcagatcaattatttcatgtgtcttctcaaggattgagtgcccattccagtgttcccgtcaactacggtggttacaaccctccaaattatcctccgcaaaatctccgtcctcgtcgtggacaaccaattcttcatcagcgatataaccaggcaacttccagtccgatgcggccaatgggaagccatcacagtgggcagcctgcgtggcctagttttggcatgggcgatggagtgccctggggaggaacaggagggcactcatttacgacaagtgggctatcttcatctcttgcaagaaaggattatgggagcatcttttagtgtgttgtggacaggaggaatggcgttgattcattgcagtcgtaaattatttgtattagcaaaattggagtgcgatgattctggtttattgtttcgatgttgttaccccatccctccaattggtcctttgtgaacaagacagttgatatacaatatatgatcgatgacaatagcattcctttgcagccctttttttatcagtcagaagtttgggtgttcgcctgattgctgactatgttgtagttgccttgtcagctatgtaatatgaaggcgtgatgtgcttaggttcaggtgtgtttgg

SEQ ID NO: 19483 - DNA, 3610 bp, Zea Mays
ctgagagtgagacagaacggcgcagtcagcagtaggaataatgaataaataaaaatataaaatatgacagtttctaggtatataggcgcaggctcgtattatcgtctcgttaattatttaataatgggattcacagctaattaaatctggaagtatatcttgcccgcaaggaaagaatagaagaaaatacaggcggagagaggcgaggaaggaagaaatcgacgaggggattggattggactgcgactgttgttgattctctcttgcacgcggcggtcctcctccagagtccagacccaatcccaaatccctaatcctacagagggatcccaaatccggcgtccagtccagtccaacctgtagtagatatccccgccggcttggccgtccgtccttgccccaattccgattgaccggagaggagttggatcagggagcattggaatggccgccgccgcataggatggagctggattcctccggccgctgctcggttgctcccgtgaatgctgtgatcgtcgcgattggaggtggaggcgaaggttctcttcagtaagagcttcaagagctgtgatctagctgattgggtatggaggagagtggcggcagctgcggaaagcgggaggacgcggcgccgccgtggaggccgagcgactccacggcgttcggccgttttgcggcggccgcttctccgccggaggcgtccccgtcggcctccgccaatggggctgctgcccgcgtcagcagccttcatggggtcaggcggaaaccgtctgttgcgagattaacagcaggcatcattcagacatatctacaatgtgatcccgagtttaagtactcagaggttctaaatccaaaacgtttcctcacgaatccctctaccccagcccacaacgatgggcttgacaatgcaaattgggatctcatattgtatgtcaacttggagttggttaataagatgtcgaacagaaggtttattgtcaaggaaatgcttgggcagggaacttttggtcaagtagttaaatgctgggacacagaaactaacgactatgttgctgtgaaggtgataaaaaaccagcctgcattttaccatcaagctatcatggaggtttcactattaagaacgttaaatcagaaatttgatcctgatgatcagcataacattgtccgtatgcttgattatctgtcatttcaaaaccatttgtgtatagcttttgagatgcttggccaaaacctatatgaactgctcaaaaggaatcacttaagaggtctgaaattgaaatatgttcaagccttctcaaaacagctggaatcatccattgtgatttgaagccagaaaatatcctgttagctcccagtgtcacaacagctgcagaagtgaaagttattgattttggatcagcctgcctggagggtaaaacggtttactcgtacatccagagccgctattacaggtctccagaggttctccttggctatccatatactaccgcgatcgacatgtggtcgtttggctgcatagttgctgaactgtttctaggtttgccattgtttcctggagcgtcagaatatgatgtgcttcagcgaatgatgaaaattcttgggggccaaccaccagatgaactgctaagggaagctaaaaacactgcaaggttttttaaacatgttggaagtatctatcctggcaatgaggcacctactggtctttgtagtgcgtacaaaagtttaagtgaagaagatgttgaagtgagagactccaagaagccacagatgggaaagtggtacttcccacacctaaagcttgacaaactcatatgtacctatccttggaacaattccgaactgacagagacagaaaaaatggatcgtttgggattagttgatttcttgaagggtctccttgaatttgatccaaataagagatggtcaccattgcaggctctataccatccattcataacaggcaaatcgttcaccggtccatatgaacctgtacctgagaccacaagaattcctgttgttcgtgctgcagcaattgatcacaatcctggagggggccactggctacattcaggtctttccccgcaggttggaagtgtcaacagatacctaccttcgaataatgcctaccctccaaaggttcctttttcttatgggagtagttatggaagctttggtagccatggtagctataccgccaatgctggttttggtaacagctacggaagcattggtgatgttaatgctatcaatatgtattattcacccttaagttcttctggattaacgcaaattggctctagtccagatgttagactaaggatgcttctcccacatgatagaggaattcgattgagccctggtagtcttgggcctatgtctcttggagccagtccatcacagtttaccccaccaaactaccagatgcaaatcccagctaattcggttgggaagcatggttctggttctcctgcaagtggaggcattcatggttctccgttaggaaaatctgcaggagtgggcccatacaacatgaggaggaacttgccaatgccgccacatgattatgtatctcagcatggacacgggcgttgtggagatggtgtcagtttcagtcattttgatgcctgtgctcgaggacatacaggtcactctcatagtgcagcgggacctagttcttatcattctggttggagaccacaaataggttcaaggagtggtatttccttggaggcctcgtctagtcatgtgctttcacaggctccatcacaatcgtttgacttttcaccttcatcagcacttgatcctgctaattgggaccctaattatagtgatgagtcactactgcaggacaattcactgtcagctgaactaagtagcaacctccactttggagatgcaactggccaagggagtggatctatcaggtcagcaaatttccaaggccacgtcttcgctacatctaaccctgtaccaacaaaccaaagagcagatcaattatttcatgtgtcttctcaaggattgagtgcccattccagtgttcccgtcaactacggtggttacaaccctccaaattatcctccgcaaaatctccgtcctcgtcgtggacaaccaattcttcatcagcgatataaccaggcaacttccagtccgatgcggccaatgggaagccatcacagtgggcagcctgcgtggcctagttttggcatgggcgatggagtgccctggggaggaacaggagggcactcatttacgacaagtgggctatcttcatctcttgcaagaaaggattatgggagcatcttttagtgtgttgtggacaggaggaatggcgttgattcattgcagtcgtaaattatttgtattagcaaaattggagtgcgatgattctggtttattgtttcgatgttgttaccccatccctccaattggtcctttgtgaacaagacagttgatatacaatatatgatcgatgacaatagcattcctttgcagccctttttttatcagtcagaagtttgggtgttcgcctgattgctgactatgttgtagttgccttgtcagctatgtaatatgaaggcgtgatgtgcttaggttcaggtgtgtttgg

SEQ ID NO: 19484 - DNA, 2511 bp, Zea Mays
gttaaatcagaaatttgatcctgatgatcagcataacattgtccgtatgcttgattatctgtcatttcaaaaccatttgtgtatagcttttgagatgcttggccaaaacctatatgaactgctcaaaaggaatcacttaagaggtctgaaattgaaatatgttcaagccttctcaaaacagatattggatgccatggttgtgatgagagaagctggaatcatccattgtgatttgaagccagaaaatatcctgttagctcccagtgtcacaacagctgcagaagtgaaagttattgattttggatcagcctgcctggagggtaaaacggtttactcgtacatccagagccgctattacaggtctccagaggttctccttggctatccatatactaccgcgatcgacatgtggtcgtttggctgcatagttgctgaactgtttctaggtttgccattgtttcctggagcgtcagaatatgatgtgcttcagcgaatgatgaaaattcttgggggccaaccaccagatgaactgctaagggaagctaaaaacactgcaaggttttttaaacatgttggaagtatctatcctggcaatgaggcacctactggtctttgtagtgcgtacaaaagtttaagtgaagaagatgttgaagtgagagactccaagaagccacagatgggaaagtggtacttcccacacctaaagcttgacaaactcatatgtacctatccttggaacaattccgaactgacagagacagaaaaaatggatcgtttgggattagttgatttcttgaagggtctccttgaatttgatccaaataagagatggtcaccattgcaggctctataccatccattcataacaggcaaatcgttcaccggtccatatgaacctgtacctgagaccacaagaattcctgttgttcgtgctgcagcaattgatcacaatcctggagggggccactggctacattcaggtctttccccgcaggttggaagtgtcaacagatacctaccttcgaataatgcctaccctccaaaggttcctttttcttatgggagtagttatggaagctttggtagccatggtagctataccgccaatgctggttttggtaacagctacggaagcattggtgatgttaatgctatcaatatgtattattcacccttaagttcttctggattaacgcaaattggctctagtccagatgttagactaaggatgcttctcccacatgatagaggaattcgattgagccctggtagtcttgggcctatgtctcttggagccagtccatcacagtttaccccaccaaactaccagatgcaaatcccagctaattcggttgggaagcatggttctggttctcctgcaagtggaggcattcatggttctccgttaggaaaatctgcaggagtgggcccatacaacatgaggaggaacttgccaatgccgccacatgattatgtatctcagcatggacacgggcgttgtggagatggtgtcagtttcagtcattttgatgcctgtgctcgaggacatacaggtcactctcatagtgcagcgggacctagttcttatcattctggttggagaccacaaataggttcaaggagtggtatttccttggaggcctcgtctagtcatgtgctttcacaggctccatcacaatcgtttgacttttcaccttcatcagcacttgatcctgctaattgggaccctaattatagtgatgagtcactactgcaggacaattcactgtcagctgaactaagtagcaacctccactttggagatgcaactggccaagggagtggatctatcaggtcagcaaatttccaaggccacgtcttcgctacatctaaccctgtaccaacaaaccaaagatcaattatttcatgtgtcttctcaaggattgagtgcccattccagtgttcccgtcaactacggtggttacaaccctccaaattatcctccgcaaaatctccgtcctcgtcgtggacaaccaattcttcatcagcgatataaccaggcaacttccagtccgatgcggccaatgggaagccatcacagtgggcagcctgcgtggcctagttttggcatgggcgatggagtgccctggggaggaacaggagggcactcatttacgacaagtgggctatcttcatctcttgcaagaaaggattatgggagcatcttttagtgtgttgtggacaggaggaatggcgttgattcattgcagtcgtaaattatttgtattagcaaaattggagtgcgatgattctggtttattgtttcgatgttgttaccccatccctccaattggtcctttgtgaacaagacagttgatatacaatatatgatcgatgacaatagcattcctttgcagccctttttttatcagtcagaagtttgggtgttcgcctgattgctgactatgttgtagttgccttgtcagctatgtaatatgaaggcgtgatgtgcttaggttcaggtgtgtttgg

SEQ ID NO: 19485 - DNA, 2476 bp, Zea Mays
agaaatttgatcctgatgatcagcataacattgtccgtatgcttgattatctgtcatttcaaaaccatttgtgtatagcttttgagatgcttggccaaaacctatatgaactgctcaaaaggaatcacttaagaggtctgaaattgaaatatgttcaagccttctcaaaacagatattggatgccatggttgtgatgagagaagctggaatcatccattgtgatttgaagccagaaaatatcctgttagctcccaggcagaagtgaaagttattgattttggatcagcctgcctggagggtaaaacggtttactcgtacatccagagccgctattacaggtctccagaggttctccttggctatccatatactaccgcgatcgacatgtggtcgtttggctgcatagttgctgaactgtttctaggtttgccattgtttcctggagcgtcagaatatgatgtgcttcagcgaatgatgaaaattcttgggggccaaccaccagatgaactgctaagggaagctaaaaacactgcaaggttttttaaacatgttggaagtatctatcctggcaatgaggcacctactggtctttgtagtgcgtacaaaagtttaagtgaagaagatgttgaagtgagagactccaagaagccacagatgggaaagtggtacttcccacacctaaagcttgacaaactcatatgtacctatccttggaacaattccgaactgacaggtcttacattttgattcagagacagaaaaaatggatcgtttgggattagttgatttcttgaagggtctccttgaatttgatccaaataagagatggtcaccattgcaggctctataccatccattcataacaggcaaatcgttcaccggtccatatgaacctgtacctgagaccacaagaattcaattgatcacaatcctggagggggccactggctacattcaggtctttccccgcaggttggaagtgtcaacagatacctaccttcgaataatgcctaccctccaaaggttcctttttcttatgggagtagttatggaagctttggtagccatggtagctataccgccaatgctggttttggtaacagctacggaagcattggtgatgttaatgctatcaatatgtattattcacccttaagttcttctggattaacgcaaattggctctagtccagatgttagactaaggatgcttctcccacatgatagaggaattcgattgagccctggtagtcttgggcctatgtctcttggagccagtccatcacagtttaccccaccaaactaccagatgcaaatcccagctaattcggttgggaagcatggttctggttctcctgcaagtggaggcattcatggttctccgttaggaaaatctgcaggagtgggcccatacaacatgaggaggaacttgccaatgccgccacatgattatgtatctcagcatggacacgggcgttgtggagatggtgtcagtttcagtcattttgatgcctgtgctcgaggacatacaggtcactctcatagtgcagcgggacctagttcttatcattctggttggagaccacaaataggttcaaggagtggtatttccttggaggcctcgtctagtcatgtgctttcacaggctccatcacaatcgtttgacttttcaccttcatcagcacttgatcctgctaattgggaccctaattataggacaattcactgtcagctgaactaagtagcaacctccactttggagatgcaactggccaagggagtggatctatcaggtcagcaaatttccaaggccacgtcttcgctacatctaaccctgtaccaacaaaccaaagagcagatcaattatttcatgtgtcttctcaaggattgagtgcccattccagtgttcccgtcaactacggtggttacaaccctccaaattatcctccgcaaaatctccgtcctcgtcgtggacaaccaattcttcatcagcgatataaccaggcaacttccagtccgatgcggccaatgggaagccatcacagtgggcagcctgcgtggcctagttttggcatgggcgatggagtgccctggggaggaacaggagggcactcatttacgacaagtgggctatcttcatctcttgcaagaaaggattatgggagcatcttttagtgtgttgtggacaggaggaatggcgttgattcattgcagtcgtaaattatttgtattagcaaaattggagtgcgatgattctggtttattgtttcgatgttgttaccccatccctccaattggtcctttgtgaacaagacagttgatatacaatatatgatcgatgacaatagcattcctttgcagccctttttttatcagtcagaagtttgggtgttcgcctgattgctgactatgttgtagttgccttgtcagctatgtaatatgaaggcgtgatgtgcttaggttcaggtgtgtttgg

SEQ ID NO: 19486 - DNA, 2491 bp, Zea Mays
agaaatttgatcctgatgatcagcataacattgtccgtatgcttgattatctgtcatttcaaaaccatttgtgtatagcttttgagatgcttggccaaaacctatatgaactgctcaaaaggaatcacttaagaggtctgaaattgaaatatgttcaagccttctcaaaacagatattggatgccatggttgtgatgagagaagctggaatcatccattgtgatttgaagccagaaaatatcctgttagctcccagaagtgaaagttattgattttggatcagcctgcctggagggtaaaacggtttactcgtacatccagagccgctattacaggtctccagaggttctccttggctatccatatactaccgcgatcgacatgtggtcgtttggctgcatagttgctgaactgtttctaggtttgccattgtttcctggagcgtcagaatatgatgtgcttcagcgaatgatgaaaattcttgggggccaaccaccagatgaactgctaagggaagctaaaaacactgcaaggttttttaaacatgttggaagtatctatcctggcaatgaggcacctactggtctttgtagtgcgtacaaaagtttaagtgaagaagatgttgaagtgagagactccaagaagccacagatgggaaagtggtacttcccacacctaaagcttgacaaactcatatgtacctatccttggaacaattccgaactgacagagacagaaaaaatggatcgtttgggattagttgatttcttgaagggtctccttgaatttgatccaaataagagatggtcaccattgcaggctctataccatccattcataacaggcaaatcgttcaccggtccatatgaacctgtacctgagaccacaagaattcctgttgttcgtgctgcagcaattgatcacaatcctggagggggccactggctacattcaggtctttccccgcaggttggaagtgtcaacagatacctaccttcgaataatgcctaccctccaaaggttcctttttcttatgggagtagttatggaagctttggtagccatggtagctataccgccaatgctggttttggtaacagctacggaagcattggtgatgttaatgctatcaatatgtattattcacccttaagttcttctggattaacgcaaattggctctagtccagatgttagactaaggatgcttctcccacatgatagaggaattcgattgagccctggtagtcttgggcctatgtctcttggagccagtccatcacagtttaccccaccaaactaccagatgcaaatcccagctaattcggttgggaagcatggttctggttctcctgcaagtggaggcattcatggttctccgttaggaaaatctgcaggagtgggcccatacaacatgaggaggaacttgccaatgccgccacatgattatgtatctcagcatggacacgggcgttgtggagatggtgtcagtttcagtcattttgatgcctgtgctcgaggacatacaggtcactctcatagtgcagcgggacctagttcttatcattctggttggagaccacaaataggttcaaggagtggtatttccttggaggcctcgtctagtcatgtgctttcacaggctccatcacaatcgtttgacttttcaccttcatcagcacttgatcctgctaattgggaccctaattatagtgatgagtcactactgcaggacaattcactgtcagctgaactaagtagcaacctccactttggagatgcaactggccaagggagtggatctatcaggtcagcaaatttccaaggccacgtcttcgctacatctaaccctgtaccaacaaaccaaagagcagatcaattatttcatgtgtcttctcaaggattgagtgcccattccagtgttcccgtcaactacggtggttacaaccctccaaattatcctccgcaaaatctccgtcctcgtcgtggacaaccaattcttcatcagcgatataaccaggcaacttccagtccgatgcggccaatgggaagccatcacagtgggcagcctgcgtggcctagttttggcatgggcgatggagtgccctggggaggaacaggagggcactcatttacgacaagtgggctatcttcatctcttgcaagaaaggattatgggagcatcttttagtgtgttgtggacaggaggaatggcgttgattcattgcagtcgtaaattatttgtattagcaaaattggagtgcgatgattctggtttattgtttcgatgttgttaccccatccctccaattggtcctttgtgaacaagacagttgatatacaatatatgatcgatgacaatagcattcctttgcagccctttttttatcagtcagaagtttgggtgttcgcctgattgctgactatgttgtagttgccttgtcagctatgtaatatgaaggcgtgatgtgcttaggttcaggtgtgtttgg

SEQ ID NO: 19487 - DNA, 2595 bp, Zea Mays
atttgatcctgatgatcagcataacattgtccgtatgcttgattatctgtcatttcaaaaccatttgtgtatagcttttgagatgcttggccaaaacctatatgaactgctcaaaaggaatcacttaagaggtctgaaattgaaatatgttcaagccttctcaaaacagatattggatgccatggttgtgatgagagaagctggaatcatccattgtgatttgaagccagaaaatatcctgttagctcccagtgtcacaacagctgcagaagtgaaagttattgattttggatcagcctgcctggagggtaaaacggtttactcgtacatccaggtctccagaggttctccttggctatccatatactaccgcgatcgacatgtggtcgtttggctgcatagttgctgaactgtttctaggtttgccattgtttcctggagcgtcagaatatgatgtgcttcagcgaatgatgaaaattcttgggggccaaccaccagatgaactgctaagggaagctaaaaacactgcaaggttttttaaacatgttggaagtatctatcctggcaatgaggcacctactggtctttgtagtgcgtacaaaagtttaagtgaagaagatgttgaagtgagagactccaagaagccacagatgggaaagtggtacttcccacacctaaagcttgacaaactcatatgtacctatccttggaacaattccgaactgacaggtcttacattttgattcagagacagaaaaaatggatcgtttgggattagttgatttcttgaagggtctccttgaatttgatccaaataagagatggtcaccattgcaggctctataccatccattcataacaggcaaatcgttcaccggtccatatgaacctgtacctgagaccacaagaattcctgttgttcgtgctgcagcaattgatcacaatcctggagggggccactggctacattcaggtctttccccgcaggtgatagatgtcctctcattttatgtttctcagttgagttttagaaacagtaactataccgaatctttcttaaaccattatgccgtatacttgaaacttgtataggttggaagtgtcaacagatacctaccttcgaataatgcctaccctccaaaggttcctttttcttatgggagtagttatggaagctttggtagccatggtagctataccgccaatgctggttttggtaacagctacggaagcattggtgatgttaatgctatcaatatgtattattcacccttaagttcttctggattaacgcaaattggctctagtccagatgttagactaaggatgcttctcccacatgatagaggaattcgattgagccctggtagtcttgggcctatgtctcttggagccagtccatcacagtttaccccaccaaactaccagatgcaaatcccagctaattcggttgggaagcatggttctggttctcctgcaagtggaggcattcatggttctccgttaggaaaatctgcaggagtgggcccatacaacatgaggaggaacttgccaatgccgccacatgattatgtatctcagcatggacacgggcgttgtggagatggtgtcagtttcagtcattttgatgcctgtgctcgaggacatacaggtcactctcatagtgcagcgggacctagttcttatcattctggttggagaccacaaataggttcaaggagtggtatttccttggaggcctcgtctagtcatgtgctttcacaggctccatcacaatcgtttgacttttcaccttcatcagcacttgatcctgctaattgggaccctaattataggacaattcactgtcagctgaactaagtagcaacctccactttggagatgcaactggccaagggagtggatctatcaggtcagcaaatttccaaggccacgtcttcgctacatctaaccctgtaccaacaaaccaaagagcagatcaattatttcatgtgtcttctcaaggattgagtgcccattccagtgttcccgtcaactacggtggttacaaccctccaaattatcctccgcaaaatctccgtcctcgtcgtggacaaccaattcttcatcagcgatataaccaggcaacttccagtccgatgcggccaatgggaagccatcacagtgggcagcctgcgtggcctagttttggcatgggcgatggagtgccctggggaggaacaggagggcactcatttacgacaagtgggctatcttcatctcttgcaagaaaggattatgggagcatcttttagtgtgttgtggacaggaggaatggcgttgattcattgcagtcgtaaattatttgtattagcaaaattggagtgcgatgattctggtttattgtttcgatgttgttaccccatccctccaattggtcctttgtgaacaagacagttgatatacaatatatgatcgatgacaatagcattcctttgcagccctttttttatcagtcagaagtttgggtgttcgcctgattgctgactatgttgtagttgccttgtcagctatgtaatatgaaggcgtgatgtgcttaggttcaggtgtgtttgg

SEQ ID NO: 19488 - DNA, 2501 bp, Zea Mays
tcctgatgatcagcataacattgtccgtatgcttgattatctgtcatttcaaaaccatttgtgtatagcttttgagatgcttggccaaaacctatatgaactgctcaaaaggaatcacttaagaggtctgaaattgaaatatgttcaagccttctcaaaacagatattggatgccatggttgtgatgagagaagctggaatcatccattgtgatttgaagccagaaaatatcctgttagctcccagtgtcacaacagctgcagaagtgaaagttattgattttggatcagcctgcctggagggtaaaacggtttactcgtacatccagagccgctattacaggtctccagaggttctccttggctatccatatactaccgcgatcgacatgtggtcgtttggctgcatagttgctgaactgtttctaggtttgccattgtttcctggagcgtcagaatatgatgtgcttcagcgaatgatgaaaattcttgggggccaaccaccagatgaactgctaagggaagctaaaaacactgcaaggttttttaaacatgttggaagtatctatcctggcaatgaggcacctactggtctttgtagtgcgtacaaaagtttaagtgaagaagatgttgaagtgcagagagactccaagaagccacagatgggaaagtggtacttcccacacctaaagcttgacaaactcatatgtacctatccttggaacaattccgaactgacagagacagaaaaaatggatcgtttgggattagttgatttcttgaagggtctccttgaatttgatccaaataagagatggtcaccattgcaggctctataccatccattcataacaggcaaatcgttcaccggtccatatgaacctgtacctgagaccacaagaattcctgttgttcgtgctgcagcaattgatcacaatcctggagggggccactggctacattcaggtctttccccgcaggttggaagtgtcaacagatacctaccttcgaataatgcctaccctccaaaggttcctttttcttatgggagtagttatggaagctttggtagccatggtagctataccgccaatgctggttttggtaacagctacggaagcattggtgatgttaatgctatcaatatgtattattcacccttaagttcttctggattaacgcaaattggctctagtccagatgttagactaaggatgcttctcccacatgatagaggaattcgattgagccctggtagtcttgggcctatgtctcttggagccagtccatcacagtttaccccaccaaactaccagatgcaaatcccagctaattcggttgggaagcatggttctggttctcctgcaagtggaggcattcatggttctccgttaggaaaatctgcaggagtgggcccatacaacatgaggaggaacttgccaatgccgccacatgattatgtatctcagcatggacacgggcgttgtggagatggtgtcagtttcagtcattttgatgcctgtgctcgaggacatacaggtcactctcatagtgcagcgggacctagttcttatcattctggttggagaccacaaataggttcaaggagtggtatttccttggaggcctcgtctagtcatgtgctttcacaggctccatcacaatcgtttgacttttcaccttcatcagcacttgatcctgctaattgggaccctaattatagtgatgagtcactactgcaggacaattcactgtcagctgaactaagtagcaacctccactttggagatgcaactggccaagggagtggatctatcaggtcagcaaatttccaaggccacgtcttcgctacatctaaccctgtaccaacaaaccaaagagcagatcaattatttcatgtgtcttctcaaggattgagtgcccattccagtgttcccgtcaactacggtggttacaaccctccaaattatcctccgcaaaatctccgtcctcgtcgtggacaaccaattcttcatcagcgatataaccaggcaacttccagtccgatgcggccaatgggaagccatcacagtgggcagcctgcgtggcctagttttggcatgggcgatggagtgccctggggaggaacaggagggcactcatttacgacaagtgggctatcttcatctcttgcaagaaaggattatgggagcatcttttagtgtgttgtggacaggaggaatggcgttgattcattgcagtcgtaaattatttgtattagcaaaattggagtgcgatgattctggtttattgtttcgatgttgttaccccatccctccaattggtcctttgtgaacaagacagttgatatacaatatatgatcgatgacaatagcattcctttgcagccctttttttatcagtcagaagtttgggtgttcgcctgattgctgactatgttgtagttgccttgtcagctatgtaatatgaaggcgtgatgtgcttaggttcaggtgtgtttgg

SEQ ID NO: 19489 - DNA, 1599 bp, Zea Mays
tcctgatgatcagcataacattgtccgtatgcttgattatctgtcatttcaaaaccatttgtgtatagcttttgagatgcttggccaaaacctatatgaactgctcaaaaggaatcacttaagaggtctgaaattgaaatatgttcaagccttctcaaaacagatattggatgccatggttgtgatgagagaagctggaatcatccattgtgatttgaagccagaaaatatcctgttagctcccagtgtcacaacagctgcagaagtgaaagttattgattttggatcagcctgcctggagggtaaaacggtttactcgtacatccagagccgctattacaggtctccagaggttctccttggctatccatatactaccgcgatcgacatgtggtcgtttggctgcatagttgctgaactgtttctaggtttgccattgtttcctggagcgtcagaatatgatgtgcttcagcgaatgatgaaaattcttgggggccaaccaccagatgaactgctaagggaagctaaaaacactgcaaggttttttaaacatgttggaagtatctatcctggcaatgaggcacctactggtctttgtagtgcgtacaaaagtttaagtgaagaagatgttgaagtgagagactccaagaagccacagatgggaaagtggtacttcccacacctaaagcttgacaaactcatatgtacctatccttggaacaattccgaactgacagagacagaaaaaatggatcgtttgggattagttgatttcttgaagggtctccttgaatttgatccaaataagagatggtcaccattgcaggctctataccatccattcataacaggcaaatcgttcaccggtccatatgaacctgtacctgagaccacaagaattcctgttgttcgtgctgcagcaattgatcacaatcctggagggggccactggctacattcaggtctttccccgcagagcagatcaattatttcatgtgtcttctcaaggattgagtgcccattccagtgttcccgtcaactacggtggttacaaccctccaaattatcctccgcaaaatctccgtcctcgtcgtggacaaccaattcttcatcagcgatataaccaggcaacttccagtccgatgcggccaatgggaagccatcacagtgggcagcctgcgtggcctagttttggcatgggcgatggagtgccctggggaggaacaggagggcactcatttacgacaagtgggctatcttcatctcttgcaagaaaggattatgggagcatcttttagtgtgttgtggacaggaggaatggcgttgattcattgcagtcgtaaattatttgtattagcaaaattggagtgcgatgattctggtttattgtttcgatgttgttaccccatccctccaattggtcctttgtgaacaagacagttgatatacaatatatgatcgatgacaatagcattcctttgcagccctttttttatcagtcagaagtttgggtgttcgcctgattgctgactatgttgtagttgccttgtcagctatgtaatatgaaggcgtgatgtgcttaggttcaggtgtgtttgg

SEQ ID NO: 19490 - DNA, 2470 bp, Zea Mays
ataacattgtccgtatgcttgattatctgtcatttcaaaaccatttgtgtatagcttttgagatgcttggccaaaacctatatgaactgctcaaaaggaatcacttaagaggtctgaaattgaaatatgttcaagccttctcaaaacagatattggatgccatggttgtgatgagagaagctggaatcatccattgtgatttgaagccagaaaatatcctgttagctcccagtgtcacaacagctgcagaagtgaaagttattgattttggatcagcctgcctggagggtaaaacggtttactcgtacatccaggtctccagaggttctccttggctatccatatactaccgcgatcgacatgtggtcgtttggctgcatagttgctgaactgtttctaggtttgccattgtttcctggagcgtcagaatatgatgtgcttcagcgaatgatgaaaattcttgggggccaaccaccagatgaactgctaagggaagctaaaaacactgcaaggttttttaaacatgttggaagtatctatcctggcaatgaggcacctactggtctttgtagtgcgtacaaaagtttaagtgaagaagatgttgaagtgagagactccaagaagccacagatgggaaagtggtacttcccacacctaaagcttgacaaactcatatgtacctatccttggaacaattccgaactgacagagacagaaaaaatggatcgtttgggattagttgatttcttgaagggtctccttgaatttgatccaaataagagatggtcaccattgcaggctctataccatccattcataacaggcaaatcgttcaccggtccatatgaacctgtacctgagaccacaagaattcctgttgttcgtgctgcagcaattgatcacaatcctggagggggccactggctacattcaggtctttccccgcaggttggaagtgtcaacagatacctaccttcgaataatgcctaccctccaaaggttcctttttcttatgggagtagttatggaagctttggtagccatggtagctataccgccaatgctggttttggtaacagctacggaagcattggtgatgttaatgctatcaatatgtattattcacccttaagttcttctggattaacgcaaattggctctagtccagatgttagactaaggatgcttctcccacatgatagaggaattcgattgagccctggtagtcttgggcctatgtctcttggagccagtccatcacagtttaccccaccaaactaccagatgcaaatcccagctaattcggttgggaagcatggttctggttctcctgcaagtggaggcattcatggttctccgttaggaaaatctgcaggagtgggcccatacaacatgaggaggaacttgccaatgccgccacatgattatgtatctcagcatggacacgggcgttgtggagatggtgtcagtttcagtcattttgatgcctgtgctcgaggacatacaggtcactctcatagtgcagcgggacctagttcttatcattctggttggagaccacaaataggttcaaggagtggtatttccttggaggcctcgtctagtcatgtgctttcacaggctccatcacaatcgtttgacttttcaccttcatcagcacttgatcctgctaattgggaccctaattatagtgatgagtcactactgcaggacaattcactgtcagctgaactaagtagcaacctccactttggagatgcaactggccaagggagtggatctatcaggtcagcaaatttccaaggccacgtcttcgctacatctaaccctgtaccaacaaaccaaagagcagatcaattatttcatgtgtcttctcaaggattgagtgcccattccagtgttcccgtcaactacggtggttacaaccctccaaattatcctccgcaaaatctccgtcctcgtcgtggacaaccaattcttcatcagcgatataaccaggcaacttccagtccgatgcggccaatgggaagccatcacagtgggcagcctgcgtggcctagttttggcatgggcgatggagtgccctggggaggaacaggagggcactcatttacgacaagtgggctatcttcatctcttgcaagaaaggattatgggagcatcttttagtgtgttgtggacaggaggaatggcgttgattcattgcagtcgtaaattatttgtattagcaaaattggagtgcgatgattctggtttattgtttcgatgttgttaccccatccctccaattggtcctttgtgaacaagacagttgatatacaatatatgatcgatgacaatagcattcctttgcagccctttttttatcagtcagaagtttgggtgttcgcctgattgctgactatgttgtagttgccttgtcagctatgtaatatgaaggcgtgatgtgcttaggttcaggtgtgtttgg

SEQ ID NO: 19491 - DNA, 2478 bp, Zea Mays
ataacattgtccgtatgcttgattatctgtcatttcaaaaccatttgtgtatagcttttgagatgcttggccaaaacctatatgaactgctcaaaaggaatcacttaagaggtctgaaattgaaatatgttcaagccttctcaaaacagatattggatgccatggttgtgatgagagaagctggaatcatccattgtgatttgaagccagaaaatatcctgttagctcccagtgtcacaacagctgcagaagtgaaagttattgattttggatcagcctgcctggagggtaaaacggtttactcgtacatccagagccgctattacaggtctccagaggttctccttggctatccatatactaccgcgatcgacatgtggtcgtttggctgcatagttgctgaactgtttctaggtttgccattgtttcctggagcgtcagaatatgatgtgcttcagcgaatgatgaaaattcttgggggccaaccaccagatgaactgctaagggaagctaaaaacactgcaaggttttttaaacatgttggaagtatctatcctggcaatgaggcacctactggtctttgtagtgcgtacaaaagtttaagtgaagaagatgttgaagtgagagactccaagaagccacagatgggaaagtggtacttcccacacctaaagcttgacaaactcatatgtacctatccttggaacaattccgaactgacagaaaaaatggatcgtttgggattagttgatttcttgaagggtctccttgaatttgatccaaataagagatggtcaccattgcaggctctataccatccattcataacaggcaaatcgttcaccggtccatatgaacctgtacctgagaccacaagaattcctgttgttcgtgctgcagcaattgatcacaatcctggagggggccactggctacattcaggtctttccccgcaggttggaagtgtcaacagatacctaccttcgaataatgcctaccctccaaaggttcctttttcttatgggagtagttatggaagctttggtagccatggtagctataccgccaatgctggttttggtaacagctacggaagcattggtgatgttaatgctatcaatatgtattattcacccttaagttcttctggattaacgcaaattggctctagtccagatgttagactaaggatgcttctcccacatgatagaggaattcgattgagccctggtagtcttgggcctatgtctcttggagccagtccatcacagtttaccccaccaaactaccagatgcaaatcccagctaattcggttgggaagcatggttctggttctcctgcaagtggaggcattcatggttctccgttaggaaaatctgcaggagtgggcccatacaacatgaggaggaacttgccaatgccgccacatgattatgtatctcagcatggacacgggcgttgtggagatggtgtcagtttcagtcattttgatgcctgtgctcgaggacatacaggtcactctcatagtgcagcgggacctagttcttatcattctggttggagaccacaaataggttcaaggagtggtatttccttggaggcctcgtctagtcatgtgctttcacaggctccatcacaatcgtttgacttttcaccttcatcagcacttgatcctgctaattgggaccctaattatagtgatgagtcactactgcaggacaattcactgtcagctgaactaagtagcaacctccactttggagatgcaactggccaagggagtggatctatcaggtcagcaaatttccaaggccacgtcttcgctacatctaaccctgtaccaacaaaccaaagagcagatcaattatttcatgtgtcttctcaaggattgagtgcccattccagtgttcccgtcaactacggtggttacaaccctccaaattatcctccgcaaaatctccgtcctcgtcgtggacaaccaattcttcatcagcgatataaccaggcaacttccagtccgatgcggccaatgggaagccatcacagtgggcagcctgcgtggcctagttttggcatgggcgatggagtgccctggggaggaacaggagggcactcatttacgacaagtgggctatcttcatctcttgcaagaaaggattatgggagcatcttttagtgtgttgtggacaggaggaatggcgttgattcattgcagtcgtaaattatttgtattagcaaaattggagtgcgatgattctggtttattgtttcgatgttgttaccccatccctccaattggtcctttgtgaacaagacagttgatatacaatatatgatcgatgacaatagcattcctttgcagccctttttttatcagtcagaagtttgggtgttcgcctgattgctgactatgttgtagttgccttgtcagctatgtaatatgaaggcgtgatgtgcttaggttcaggtgtgtttgg

SEQ ID NO: 19492 - DNA, 2400 bp, Zea Mays
attgtccgtatgcttgattatctgtcatttcaaaaccatttgtgtatagcttttgagatgcttggccaaaacctatatgaactgctcaaaaggaatcacttaagaggtctgaaattgaaatatgttcaagccttctcaaaacagatattggatgccatggttgtgatgagagaagctggaatcatccattgtgatttgaagccagaaaatatcctgttagctcccagtgtcacaacagctgcagaagtgaaagttattgattttggatcagcctgcctggagggtaaaacggtttactcgtacatccagagccgctattacaggtctccagaggttctccttggctatccatatactaccgcgatcgacatgtggtcgtttggctgcatagttgctgaactgtttctaggtttgccattgtttcctggagcgtcagaatatgatgtgcttcagcgaatgatgaaaattcttgggggccaaccaccagatgaactgctaagggaagctaaaaacactgcaaggttttttaaacatgttggaagtatctatcctggcaatgaggcacctactggtctttgtagtgcgtacaaaagtttaagtgaagaagatgttgaagtgagagactccaagaagccacagatgggaaagtggtacttcccacacctaaagcttgacaaactcatatgtacctatccttggaacaattccgaactgacagagacagaaaaaatggatcgtttgggattagttgatttcttgaagggtctccttgaatttgatccaaataagagatggtcaccattgcaggctctataccatccattcataacaggcaaatcgttcaccggtccatatgaacctgtacctgagaccacaagaattcctgttgttcgtgctgcagcaattgatcacaatcctggagggggccactggctacattcaggtctttccccgcaggttggaagtgtcaacagatacctaccttcgaataatgcctaccctccaaaggttcctttttcttatgggagtagttatggaagctttggtagccatggtagctataccgccaatgctggttttggtaacagctacggaagcattggtgatgttaatgctatcaatatgtattattcacccttaagttcttctggattaacgcaaattggctctagtccagatgttagactaaggatgcttctcccacatgatagaggaattcgattgagccctggtagtcttgggcctatgtctcttggagccagtccatcacagtttaccccaccaaactaccagatgcaaatcccagctaattcggttgggaagcatggttctggttctcctgcaagtggaggcattcatggttctccgttaggaaaatctgcaggagtgggcccatacaacatgaggaggaacttgccaatgccgccacatgattatgtatctcagcatggacacgggcgttgtggagatggtgtcagtttcagtcattttgatgcctgtgctcgaggacatacaggtcactctcatagtgcagcgggacctagttcttatcattctggttggagaccacaaataggttcaaggagtggtatttccttggaggcctcgtctagtcatgtgctttcacaggctccatcacaatcgtttgacttttcaccttcatcagcacttgatcctgctaattgggaccctaattataggacaattcactgtcagctgaactaagtagcaacctccactttggagatgcaactggccaagggagtggatctatcagagcagatcaattatttcatgtgtcttctcaaggattgagtgcccattccagtgttcccgtcaactacggtggttacaaccctccaaattatcctccgcaaaatctccgtcctcgtcgtggacaaccaattcttcatcagcgatataaccaggcaacttccagtccgatgcggccaatgggaagccatcacagtgggcagcctgcgtggcctagttttggcatgggcgatggagtgccctggggaggaacaggagggcactcatttacgacaagtgggctatcttcatctcttgcaagaaaggattatgggagcatcttttagtgtgttgtggacaggaggaatggcgttgattcattgcagtcgtaaattatttgtattagcaaaattggagtgcgatgattctggtttattgtttcgatgttgttaccccatccctccaattggtcctttgtgaacaagacagttgatatacaatatatgatcgatgacaatagcattcctttgcagccctttttttatcagtcagaagtttgggtgttcgcctgattgctgactatgttgtagttgccttgtcagctatgtaatatgaaggcgtgatgtgcttaggttcaggtgtgtttgg

SEQ ID NO: 19493 - DNA, 2136 bp, Zea Mays
tccgtatgcttgattatctgtcatttcaaaaccatttgtgtatagcttttgagatgcttggccaaaacctatatgaactgctcaaaaggaatcacttaagaggtctgaaattgaaatatgttcaagccttctcaaaacagatattggatgccatggttgtgatgagagaagctggaatcatccattgtgatttgaagccagaaaatatcctgttagctcccagtgtcacaacagctgcagaagtgaaagttattgattttggatcagcctgcctggagggtaaaacggtttactcgtacatccagagccgctattacaggtctccagaggttctccttggctatccatatactaccgcgatcgacatgtggtcgtttggctgcatagttgctgaactgtttctaggtttgccattgtttcctggagcgtcagaatatgatgtgcttcagcgaatgatgaaaattcttgggggccaaccaccagatgaactgctaagggaagctaaaaacactgcaaggttttttaaacatgttggaagtatctatcctggcaatgaggcacctactggtctttgtagtgcgtacaaaagtttaagtgaagaagatgttgaagtgagagactccaagaagccacagatgggaaagtggtacttcccacacctaaagcttgacaaactcatatgtacctatccttggaacaattccgaactgacagagacagaaaaaatggatcgtttgggattagttgatttcttgaagggtctccttgaatttgatccaaataagagatggtcaccattgcaggctctataccatccattcataacaggcaaatcgttcaccggtccatatgaacctgtacctgagaccacaagaattcctgttgttcgtgctgcagcaattgatcacaatcctggagggggccactggctacattcaggtctttccccgcaggaaaatctgcaggagtgggcccatacaacatgaggaggaacttgccaatgccgccacatgattatgtatctcagcatggacacgggcgttgtggagatggtgtcagtttcagtcattttgatgcctgtgctcgaggacatacaggtcactctcatagtgcagcgggacctagttcttatcattctggttggagaccacaaataggttcaaggagtggtatttccttggaggcctcgtctagtcatgtgctttcacaggctccatcacaatcgtttgacttttcaccttcatcagcacttgatcctgctaattgggaccctaattataggtatggaatactcaaatcgattcttgtaaacttgtattaaaggcaatattaatctataccatgttccattttgtagtgatgagtcactactgcaggacaattcactgtcagctgaactaagtagcaacctccactttggagatgcaactggccaagggagtggatctatcaggtcagcaaatttccaaggccacgtcttcgctacatctaaccctgtaccaacaaaccaaagagcagatcaattatttcatgtgtcttctcaaggattgagtgcccattccagtgttcccgtcaactacggtggttacaaccctccaaattatcctccgcaaaatctccgtcctcgtcgtggacaaccaattcttcatcagcgatataaccaggcaacttccagtccgatgcggccaatgggaagccatcacagtgggcagcctgcgtggcctagttttggcatgggcgatggagtgccctggggaggaacaggagggcactcatttacgacaagtgggctatcttcatctcttgcaagaaaggattatgggagcatcttttagtgtgttgtggacaggaggaatggcgttgattcattgcagtcgtaaattatttgtattagcaaaattggagtgcgatgattctggtttattgtttcgatgttgttaccccatccctccaattggtcctttgtgaacaagacagttgatatacaatatatgatcgatgacaatagcattcctttgcagccctttttttatcagtcagaagtttgggtgttcgcctgattgctgactatgttgtagttgccttgtcagctatgtaatatgaaggcgtgatgtgcttaggttcaggtgtgtttgg

SEQ ID NO: 19494 - DNA, 2697 bp, Zea Mays
tgcttgattatctgtcatttcaaaaccatttgtgtatagcttttgagatgcttggccaaaacctatatgaactgctcaaaaggaatcacttaagaggtctgaaattgaaatatgttcaagccttctcaaaacagatattggatgccatggttgtgatgagagaagctggaatcatccattgtgatttgaagccagaaaatatcctgttagctcccagtgtcacaacagctgcagaagtgaaagttattgattttggatcagcctgcctggagggtaaaacggtttactcgtacatccagagccgctattacaggtctccagaggttctccttggctatccatatactaccgcgatcgacatgtggtcgtttggctgcatagttgctgaactgtttctaggtttgccattgtttcctggagcgtcagaatatgatgtgcttcagcgaatgatgaaaattcttgggggccaaccaccagatgaactgctaagggaagctaaaaacactgcaaggttttttaaacatgttggaagtatctatcctggcaatgaggcacctactggtctttgtagtgcgtacaaaagtttaagtgaagaagatgttgaagtgagagactccaagaagccacagatgggaaagtggtacttcccacacctaaagcttgacaaactcatatgtacctatccttggaacaattccgaactgacagcgattcacgtcggtatccagaccccttgttcgacatttggttggatgactctgtaacaaatcacggcgcaagcagttacgaccctgtgggatcaaagcgcaagtccactacccctgttttggtgctattatgcgatcccatgagacagaaaaaatggatcgtttgggattagttgatttcttgaagggtctccttgaatttgatccaaataagagatggtcaccattgcaggctctataccatccattcataacaggcaaatcgttcaccggtccatatgaacctgtacctgagaccacaagaattcctgttgttcgtgctgcagcaattgatcacaatcctggagggggccactggctacattcaggtctttccccgcaggtgatagatgtcctctcattttatgtttctcagttgagttttagaaacagtaactataccgaatctttcttaaaccattatgccgtatacttgaaacttgtataggttggaagtgtcaacagatacctaccttcgaataatgcctaccctccaaaggttcctttttcttatgggagtagttatggaagctttggtagccatggtagctataccgccaatgctggttttggtaacagctacggaagcattggtgatgttaatgctatcaatatgtattattcacccttaagttcttctggattaacgcaaattggctctagtccagatgttagactaaggatgcttctcccacatgatagaggaattcgattgagccctggtagtcttgggcctatgtctcttggagccagtccatcacagtttaccccaccaaactaccagatgcaaatcccagctaattcggttgggaagcatggttctggttctcctgcaagtggaggcattcatggttctccgttaggaaaatctgcaggagtgggcccatacaacatgaggaggaacttgccaatgccgccacatgattatgtatctcagcatggacacgggcgttgtggagatggtgtcagtttcagtcattttgatgcctgtgctcgaggacatacaggtcactctcatagtgcagcgggacctagttcttatcattctggttggagaccacaaataggttcaaggagtggtatttccttggaggcctcgtctagtcatgtgctttcacaggctccatcacaatcgtttgacttttcaccttcatcagcacttgatcctgctaattgggaccctaattataggacaattcactgtcagctgaactaagtagcaacctccactttggagatgcaactggccaagggagtggatctatcaggtcagcaaatttccaaggccacgtcttcgctacatctaaccctgtaccaacaaaccaaagagcagatcaattatttcatgtgtcttctcaaggattgagtgcccattccagtgttcccgtcaactacggtggttacaaccctccaaattatcctccgcaaaatctccgtcctcgtcgtggacaaccaattcttcatcagcgatataaccaggcaacttccagtccgatgcggccaatgggaagccatcacagtgggcagcctgcgtggcctagttttggcatgggcgatggagtgccctggggaggaacaggagggcactcatttacgacaagtgggctatcttcatctcttgcaagaaaggattatgggagcatcttttagtgtgttgtggacaggaggaatggcgttgattcattgcagtcgtaaattatttgtattagcaaaattggagtgcgatgattctggtttattgtttcgatgttgttaccccatccctccaattggtcctttgtgaacaagacagttgatatacaatatatgatcgatgacaatagcattcctttgcagccctttttttatcagtcagaagtttgggtgttcgcctgattgctgactatgttgtagttgccttgtcagctatgtaatatgaaggcgtgatgtgcttaggttcaggtgtgtttgg

SEQ ID NO: 19495 - DNA, 2753 bp, Zea Mays
cattatcagattcgttctgcagtacaataatgggagcctgcaactcgtgcgaggccacggcggtggcggcggcgccggggccggcgacggcggaggcgagggtggtgctcgcggacggcgcgctgcggcggttcccgggcggcacgcgggcgtcgcaggccgtgaaggcggccgccgccggggcggcctcgtggttcctgtgcagcgcggacgggctggagctcggcggcgccgtggtgcccgtgcggcccgaggaggcgctgcagcccgggcagctgtacttcgtgctccccgccgcgatgcggcgccgcccgctgcaggcggaggagatggccgcgctcgccatccgcgccagcgccgcgctggccggcgaccacgacggcccgctcgtgttcccggaggccgccgctgccgccggcgccggggcgcggtgcggcaaggggccagctcgcttcacccctttcggtctcggcggccgtcgggcccacgccgcagaagccccgacggcgctagccgcgctacgctacgctacgctacgcaccgcgtttctccgcttcagcggttcgcctctgcgccgcaagctcctagagatggcggcgaagtctggatacacacgccggctcccgctcaccggggagaccgctcctccacctcccagcgccgtcctctatgtggccaactgcgggcccgcggtgggagtgaccgacgccgacgtccgctcgacattcggcgccttcggggaggtcgcaggagtccaggctgccgacgacagcggcgcccgcatcatcgtccggttccacgagcccgccgccgcggaggccgccatggctgcgctccacgggcgcccctgcgacctccttgcgggtcgcgtgctgcacataaggtactcggtgcccgtgaagccaaaggctcgtcctgggggctctgtaccggtggctcacgcggcatcggagctcggaatccccgggatttacatggttcaggagttcgtgactgccgctgaggaacaggagttactttcagctgtggatagcaagacgtggaaaagactggcgaaaagacgagttcagcattacggttatgagtttctgtacgaaacaaggaatgttgattcgaagcagttcttgggtgaactgcctacttttgtttcaactgtccttgagaagattgcttcttttcctggtgtgaaggactgcgccaccagattagttgatcaattgaccgtttgtctccacatatagacacacactcagcatttgaggaaatgatttttagcctttctttggctggaacttgcatcatggagttcagaaaatatactaaaggcacttggcgtgctccaagtgtggtcgatggagttgatgaagatagcagtcaagagccagaatgcataaggaaagccattttcctacctcctcggtcaatgctattgatgtcaggagaaggtcgttatgcctggcatcactatataccacatcataaaatcgatgccgtgggtggtcaagtcatcaaaaggaattcaaggcgagtttctttcactttccgaaaggtgaggatggggccttgtgattgcgaatacaagcaattttgtgatgctcatagcaagagatgttaagctgagaaggctgatattttcaaaactacctgctgctacaaccattggcaagtctcataacataataacaatctgtcggtattttgtctcgcacaatcaaaatggtcaaggagcccaccgatcaaactcatatcaatttacagatgtgtcatctgacgtgtgtgcaaatgaatagatagagaaatgtagggaatagccagatgtaacttttgaaccttgtattcatctcgttgagattgagaattgcttgaacgagcctgtagtttgtcattattttttcctgatatctcgaaacaacaaagttctatttataatatgatgaaaaaaatgacaccattgtttttgctactgtcgaacttggtggaattggccttcgtaccaggacatttttctagataacctggtttcatcatttggttactcagtttaatgatctcaaaaatttattggtgttgagctttacaataaaatgtctccttcaggtttcatagatgcacataagcataaggagataacgtccagcacaaagcaaaaaaaaaagtaactcgatgatttttcatcttcatttgagtacgccatcttcaatatgaacaaattgctgtacacttcaccatgcatgtcaggtgtcttggtcttggactgcgactaaaagctgtatgaggctacatgcaccgagcaaatacctttgctggtcttgtaaacactcactgctcaccgcggcttgcaagacgccgcattcaagtattcaactaatgcgatatccttcctgcatgactgcatccaggtccaggccatcagggtctcaacctgcagggttatttcaccgctcacgagtagtgcgggagttcagtttgttgttcatatatatgtaaatgttccgaaatgccccaatttcgtcaaggtgacaaggtgtcaatgctgcagataaccaaaaggccaatctgtcatagcctgagctgatcacgtcatgggacatgaacaaacaccagatcagcaagctttccactgctgcagtactgattcatgtcagatgatttcatctctaccgtaatcaactacatgcagtaatgagtgttcatggccatttttagggtagctttgcaatgctgcatgctggactttaatccaactagaacct

SEQ ID NO: 19496 - DNA, 2767 bp, Zea Mays
aataatgggagcctgcaactcgtgcgaggccacggcggtggcggcggcgccggggccggcgacggcggaggcgagggtggtgctcgcggacggcgcgctgcggcggttcccgggcggcacgcgggcgtcgcaggccgtgaaggcggccgccgccggggcggcctcgtggttcctgtgcagcgcggacgggctggagctcggcggcgccgtggtgcccgtgcggcccgaggaggcgctgcagcccgggcagctgtacttcgtgctccccgccgcgatgcggcgccgcccgctgcaggcggaggagatggccgcgctcgccatccgcgccagcgccgcgctggccggcgaccacgacggcccgctcgtgttcccggaggccgccgctgccgccggcgccggggcgcggtgcggcaaggggccagctcgcttcacccctttcggtctcggcggccgtcgggcccacgccgcagaagccccgacggcgctagccgcgctacgctacgctacgctacgcaccgcgtttctccgcttcagcggttcgcctctgcgccgcaagctcctagagatggcggcgaagtctggatacacacgccggctcccgctcaccggggagaccgctcctccacctcccagcgccgtcctctatgtggccaactgcgggcccgcggtgggagtgaccgacgccgacgtccgctcgacattcggcgccttcggggaggtcgcaggagtccaggctgccgacgacagcggcgcccgcatcatcgtccggttccacgagcccgccgccgcggaggccgccatggctgcgctccacgggcgcccctgcgacctccttgcgggtcgcgtgctgcacataaggtactcggtgcccgtgaagccaaaggctcgtcctgggggctctgtaccggtggctcacgcggcatcggagctcggaatccccgggatttacatggttcaggagttcgtgactgccgctgaggaacaggagttactttcagctgtggatagcaagacgtggaaaagactggcgaaaagacgagttcagcattacggttatgagtttctgtacgaagtaagttcgaccttacaaggaatgttgattcgaagcagttcttgggtgaactgcctacttttgtttcaactgtccttgagaagattgcttcttttcctggtgtgaaggactgcgccaccagattagttgatcaattgaccgtaaatgaatatccttgtggtgtaggtttgtctccacatatagacacacactcagcatttgaggaaatgatttttagcctttctttggctggaacttgcatcatggagttcagaaaatatactaaaggcacttggcgtgctccaagtgtggtcgatggagttgatgaagatagcagtcaagagccagaatgcataaggaaagccattttcctacctcctcggtcaatgctattgatgtcaggagaaggtcgttatgcctggcatcactatataccacatcataaaatcgatgccgtgggtggtcaagtcatcaaaaggaattcaaggcgagtttctttcactttccgaaaggtgaggatggggccttgtgattgcgaatacaagcaattttgtgatgctcatagcaagagatgttaagctgagaaggctgatattttcaaaactacctgctgctacaaccattggcaagtctcataacataataacaatctgtcggtattttgtctcgcacaatcaaaatggtcaaggagcccaccgatcaaactcatatcaatttacagatgtgtcatctgacgtgtgtgcaaatgaatagatagagaaatgtagggaatagccagatgtaacttttgaaccttgtattcatctcgttgagattgagaattgcttgaacgagcctgtagtttgtcattattttttcctgatatctcgaaacaacaaagttctatttataatatgatgaaaaaaatgacaccattgtttttgctactgtcgaacttggtggaattggccttcgtaccaggacatttttctagataacctggtttcatcatttggttactcagtttaatgatctcaaaaatttattggtgttgagctttacaataaaatgtctccttcaggtttcatagatgcacataagcataaggagataacgtccagcacaaagcaaaaaaaaaagtaactcgatgatttttcatcttcatttgagtacgccatcttcaatatgaacaaattgctgtacacttcaccatgcatgtcaggtgtcttggtcttggactgcgactaaaagctgtatgaggctacatgcaccgagcaaatacctttgctggtcttgtaaacactcactgctcaccgcggcttgcaagacgccgcattcaagtattcaactaatgcgatatccttcctgcatgactgcatccaggtccaggccatcagggtctcaacctgcagggttatttcaccgctcacgagtagtgcgggagttcagtttgttgttcatatatatgtaaatgttccgaaatgccccaatttcgtcaaggtgacaaggtgtcaatgctgcagataaccaaaaggccaatctgtcatagcctgagctgatcacgtcatgggacatgaacaaacaccagatcagcaagctttccactgctgcagtactgattcatgtcagatgatttcatctctaccgtaatcaactacatgcagtaatgagtgttcatggccatttttagggtagctttgcaatgctgcatgctggactttaatccaactagaacct

SEQ ID NO: 19497 - DNA, 1910 bp, Zea Mays
gcgcccttcccgtcctcacatcccacattcccaccactacttcactcgctcgctcgtgaagcgtctcgctgccctgcccccaccgatccaccacccccccactcatcacccctcagccaccgcccaccggccatgtcgtcgccgtcggtagccagcctccgtctcccgatgctcccagcgtcgccgcccctctcccgccgcgctatcgccggagttaccccgagcgcggccgcaccccgcgctcttctcctacaacccctcgcgcccaaggcgctcgcggcgtaccaccagcctgcgctcctcctccaccagcgacgccggcatggaccgccccccgtcgccgctgtcactgcctccaagccggttctcaaggacccgaagaagtaccaggagtgggactccatgacggccaagttcgctggcgccgccaacatccccttcctactgctccagctcccgcagatcgtcctcaacacccgcaacctcctcgccggcaacaagaccgcgctcttcgccgtgccgtggcttggaatgctcactgggctgctgggcaacctctcgctcctctcctatttcgccaagaagaaggaaacggaggctgtcatcgtgcagactcttggcgtcatctccacctatgcggtcctcgtgcagctcgcaatggcggagtccatgccggtgccgcagttcgtggccacttcggttgttgtggccgcagggctcatcctaaacttcctcaactactttggctggatccctggaaccctcttgctgctgtgggaggatttcattacagtcggcggccttgccgtgctccctcaggtcatgtggtcaacttttgttcccttcatccccaatagcgtactgcctggcataatctctggttctttagctgttgcagctgttgcgatgggcatacttaccaacttatcaatcaagcactaaaagcaaggatgggcaagctttccaatgcaggggttaaatttgttgggtcattgtctggttggacagccacacttctcttcatgtggatgccagtggcacagatgtggacaaattaccttaacccaagtaacatcaaagggctgtcagctttcagcatgttgcttgcaatgcttggaaacggacttatgattcctcgcgctgtattcatccgtgatttgatgtggttcactggttctgcatgggcatctgtcctacagggttggggtaacctggcgtgcatgtactgctttaatagcatcagcggagaagttttctttgcaacatcagctggatttactctatggagagatgccattgcctatggcaacagctcgcccttctcttccttgaaggagctgttttttgggaagtgatgaaccgtcggcaaccttgtttctcttgcactttaagcagctaactgttcccgggtaggacgctctcctgcaataaatcatggtagctgttaagaacggtggttcagttgctcccatatggtctgaagaaacggtgcttcagtctttagcattttgaggaggaaacgtgaaacttactggtcagctgaaggctataaacattgccatggccctggactggaagccccaactttcccaagcctgtagaaagcgccgtgtgcctctacagaagccaccgcgtgatgaccagcttcatccggcagggtgggtacagtagcaagctatagccctagtctgatgtaagaacaaatttatattatccatcccatattgtctttaattagattcatttttgaaaccaatgcaatttcagctcttgctgtcgtgcaaatctgtacccattgtccatggatgagtagatgacctgggagaatcacacaatacatattgtaatatcagttcacgttttaaagaagtgaatatgagtagatgacctagggtctcattgagctagac

SEQ ID NO: 19498 - DNA, 1931 bp, Zea Mays
cgcccttcccgtcctcacatcccacattcccaccactacttcactcgctcgctcgtgaagcgtctcgctgccctgcccccaccgatccaccacccccccactcatcacccctcagccaccgcccaccggccatgtcgtcgccgtcggtagccagcctccgtctcccgatgctcccagcgtcgccgcccctctcccgccgcgctatcgccggagttaccccgagcgcggccgcaccccgcgctcttctcctacaacccctcgcgcccaaggcgctcgcggcgtaccaccagcctgcgctcctcctccaccagcgacgccggcatggaccgccccccgtcgccgctgtcactgcctccaagccggttctcaaggacccgaagaagtaccaggagtgggactccatgacggccaagttcgctggcgccgccaacatccccttcctactgctccagctcccgcagatcgtcctcaacacccgcaacctcctcgccggcaacaagaccgcgctcttcgccgtgccgtggcttggaatgctcactgggctgctgggcaacctctcgctcctctcctatttcgccaagaagaaggaaacggaggctgtcatcgtgcagactcttggcgtcatctccacctatgcggtcctcgtgcagctcgcaatggcggagtccatgccggtgccgcagttcgtggccacttcggttgttgtggccgcagggctcatcctaaacttcctcaactactttggctggatccctggaaccctcttgctgctgtgggaggatttcattacagtcggcggccttgccgtgctccctcaggtcatgtggtcaacttttgttcccttcatccccaatagcgtactgcctggcataatctctggttctttagctgttgcagctgttgcgatgggcatacttaccaacttatcaatcaagcactaaaagtaggcaaggatgggcaagctttccaatgcaggggttaaatttgttgggtcattgtctggttggacagccacacttctcttcatgtggatgccagtggcacagatgtggacaaattaccttaacccaagtaacatcaaagggctgtcagctttcagcatgttgcttgcaatgcttggaaacggacttatgattcctcgcgctgtattcatccgtgatttgatgtggttcactggttctgcatgggcatctgtcctacagggttggggtaacctggcgtgcatgtactgctttaatagcatcagcggagaagttttctttgcaacatcagctggtctgcttctatggctaggatttactctatggagagatgccattgcctatggcaacagctcgcccttctcttccttgaaggagctgttttttgggaagtgatgaaccgtcggcaaccttgtttctcttgcactttaagcagctaactgttcccgggtaggacgctctcctgcaataaatcatggtagctgttaagaacggtggttcagttgctcccatatggtctgaagaaacggtgcttcagtctttagcattttgaggaggaaacgtgaaacttactggtcagctgaaggctataaacattgccatggccctggactggaagccccaactttcccaagcctgtagaaagcgccgtgtgcctctacagaagccaccgcgtgatgaccagcttcatccggcagggtgggtacagtagcaagctatagccctagtctgatgtaagaacaaatttatattatccatcccatattgtctttaattagattcatttttgaaaccaatgcaatttcagctcttgctgtcgtgcaaatctgtacccattgtccatggatgagtagatgacctgggagaatcacacaatacatattgtaatatcagttcacgttttaaagaagtgaatatgagtagatgacctagggtctcattgagctagac

SEQ ID NO: 19499 - DNA, 1936 bp, Zea Mays
ctcacatcccacattcccaccactacttcactcgctcgctcgtgaagcgtctcgctgccctgcccccaccgatccaccacccccccactcatcacccctcagccaccgcccaccggccatgtcgtcgccgtcggtagccagcctccgtctcccgatgctcccagcgtcgccgcccctctcccgccgcgctatcgccggagttaccccgagcgcggccgcaccccgcgctcttctcctacaacccctcgcgcccaaggcgctcgcggcgtaccaccagcctgcgctcctcctccaccagcgacgccggcatggaccgccccccgtcgccgctgtcactgcctccaagccggttctcaaggacccgaagaagtaccaggagtgggactccatgacggccaagttcgctggcgccgccaacatccccttcctactgctccagctcccgcagatcgtcctcaacacccgcaacctcctcgccggcaacaagaccgcgctcttcgccgtgccgtggcttggaatgctcactgggctgctgggcaacctctcgctcctctcctatttcgccaagaagaaggaaacggaggctgtcatcgtgcagactcttggcgtcatctccacctatgcggtcctcgtgcagctcgcaatggcggagtccatgccggtgccgcagttcgtggccacttcggttgttgtggccgcagggctcatcctaaacttcctcaactactttggctggatccctggaaccctcttgctgctgtgggaggatttcattacagtcggcggccttgccgtgctccctcaggtcatgtggtcaacttttgttcccttcatccccaatagcgtactgcctggcataatctctggttctttagctgttgcagctgttgcgatgggcatacttaccaacttatcaatcaagcactaaaatttttttccctcttggtttcaggcaaggatgggcaagctttccaatgcaggggttaaatttgttgggtcattgtctggttggacagccacacttctcttcatgtggatgccagtggcacagatgtggacaaattaccttaacccaagtaacatcaaagggctgtcagctttcagcatgttgcttgcaatgcttggaaacggacttatgattcctcgcgctgtattcatccgtgatttgatgtggttcactggttctgcatgggcatctgtcctacagggttggggtaacctggcgtgcatgtactgctttaatagcatcagcggagaagttttctttgcaacatcagctggtctgcttctatggctaggatttactctatggagagatgccattgcctatggcaacagctcgcccttctcttccttgaaggagctgttttttgggaagtgatgaaccgtcggcaaccttgtttctcttgcactttaagcagctaactgttcccgggtaggacgctctcctgcaataaatcatggtagctgttaagaacggtggttcagttgctcccatatggtctgaagaaacggtgcttcagtctttagcattttgaggaggaaacgtgaaacttactggtcagctgaaggctataaacattgccatggccctggactggaagccccaactttcccaagcctgtagaaagcgccgtgtgcctctacagaagccaccgcgtgatgaccagcttcatccggcagggtgggtacagtagcaagctatagccctagtctgatgtaagaacaaatttatattatccatcccatattgtctttaattagattcatttttgaaaccaatgcaatttcagctcttgctgtcgtgcaaatctgtacccattgtccatggatgagtagatgacctgggagaatcacacaatacatattgtaatatcagttcacgttttaaagaagtgaatatgagtagatgacctagggtctcattgagctagac

SEQ ID NO: 19500 - DNA, 2157 bp, Zea Mays
accactacttcactcgctcgctcgtgaagcgtctcgctgccctgcccccaccgatccaccacccccccactcatcacccctcagccaccgcccaccggccatgtcgtcgccgtcggtagccagcctccgtctcccgatgctcccagcgtcgccgcccctctcccgccgcgctatcgccggagttaccccgagcgcggccgcaccccgcgctcttctcctacaacccctcgcgcccaaggcgctcgcggcgtaccaccagcctgcgctcctcctccaccagcgacgccggcatggaccgccccccgtcgccgctgtcactgcctccaagccggttctcaaggacccgaagaagtaccaggagtgggactccatgacggccaagttcgctggcgccgccaacatccccttcctactgctccagctcccgcagatcgtcctcaacacccgcaacctcctcgccggcaacaagaccgcgctcttcgccgtgccgtggcttggaatgctcactgggctgctgggcaacctctcgctcctctcctatttcgccaagaagaaggaaacggaggctgtcatcgtgcagactcttggcgtcatctccacctatgcggtcctcgtgcagctcgcaatggcggagtccatgccggtgccgcagttcgtggccacttcggttgttgtggccgcagggctcatcctaaacttcctcaactactttggctggatccctggaaccctcttgctgctgtgggaggatttcattacagtcggcggccttgccgtgctccctcaggtcatgtggtcaacttttgttcccttcatccccaatagcgtactgcctggcataatctctggttctttagctgttgcagctgttgcgatgggcatacttaccaacttatcaatcaagcactaaaagcaaggatgggcaagctttccaatgcaggggttaaatttgttgggtcattgtctggttggacagccacacttctcttcatgtggatgccagtggcacagatgtggacaaattaccttaacccaagtaacatcaaagggctgtcagctttcagcatgttgcttgcaatgcttggaaacggacttatgattcctcgcgctgtattcatccgtgatttgatgtggttcactggttctgcatgggcatctgtcctacagggttggggtaacctggcgtgcatgtactgctttaatagcatcagcggagaagttttctttgcaacatcagctggtctgcttctatggctaggtcttctctctttacaatatctagtttgcttctttccgaatataaacgtcttgatcagaaacatttcattttggcaatttgtgaggagcacacacatttcagagtttcaacattttcgtgaagagttcctgtcaaaaaacattttcgtgaagcgcacttgttttggaactaatacataactgactcttttttgttgttgtagtgcaagtgtgctagattgtctttctgaccatacatgtcacttttttggttgcttgctaggatttactctatggagagatgccattgcctatggcaacagctcgcccttctcttccttgaaggagctgttttttgggaagtgatgaaccgtcggcaaccttgtttctcttgcactttaagcagctaactgttcccgggtaggacgctctcctgcaataaatcatggtagctgttaagaacggtggttcagttgctcccatatggtctgaagaaacggtgcttcagtctttagcattttgaggaggaaacgtgaaacttactggtcagctgaaggctataaacattgccatggccctggactggaagccccaactttcccaagcctgtagaaagcgccgtgtgcctctacagaagccaccgcgtgatgaccagcttcatccggcagggtgggtacagtagcaagctatagccctagtctgatgtaagaacaaatttatattatccatcccatattgtctttaattagattcatttttgaaaccaatgcaatttcagctcttgctgtcgtgcaaatctgtacccattgtccatggatgagtagatgacctgggagaatcacacaatacatattgtaatatcagttcacgttttaaagaagtgaatatgagtagatgacctagggtctcattgagctagac

SEQ ID NO: 19501 - DNA, 2122 bp, Zea Mays
accactacttcactcgctcgctcgtgaagcgtctcgctgccctgcccccaccgatccaccacccccccactcatcacccctcagccaccgcccaccggccatgtcgtcgccgtcggtagccagcctccgtctcccgatgctcccagcgtcgccgcccctctcccgccgcgctatcgccggagttaccccgagcgcggccgcaccccgcgctcttctcctacaacccctcgcgcccaaggcgctcgcggcgtaccaccagcctgcgctcctcctccaccagcgacgccggcatggaccgccccccgtcgccgctgtcactgcctccaagccggttctcaaggacccgaagaagtaccaggagtgggactccatgacggccaagttcgctggcgccgccaacatccccttcctactgctccagctcccgcagatcgtcctcaacacccgcaacctcctcgccggcaacaagaccgcgctcttcgccgtgccgtggcttggaatgctcactgggctgctgggcaacctctcgctcctctcctatttcgccaagaagaaggaaacggaggctgtcatcgtgcagactcttggcgtcatctccacctatgcggtcctcgtgcagctcgcaatggcggagtccatgccggtgccgcagttcgtggccacttcggttgttgtggccgcagggctcatcctaaacttcctcaactactttggctggatccctggaaccctcttgctgctgtgggaggatttcattacagtcggcggccttgccgtgctccctcaggtcatgtggtcaacttttgttcccttcatccccaatagcgtactgcctggcataatctctggttctttagctgttgcagctgttgcgatggcaaggatgggcaagctttccaatgcaggggttaaatttgttgggtcattgtctggttggacagccacacttctcttcatgtggatgccagtggcacagatgtggacaaattaccttaacccaagtaacatcaaagggctgtcagctttcagcatgttgcttgcaatgcttggaaacggacttatgattcctcgcgctgtattcatccgtgatttgatgtggttcactggttctgcatgggcatctgtcctacagggttggggtaacctggcgtgcatgtactgctttaatagcatcagcggagaagttttctttgcaacatcagctggtctgcttctatggctaggtcttctctctttacaatatctagtttgcttctttccgaatataaacgtcttgatcagaaacatttcattttggcaatttgtgaggagcacacacatttcagagtttcaacattttcgtgaagagttcctgtcaaaaaacattttcgtgaagcgcacttgttttggaactaatacataactgactcttttttgttgttgtagtgcaagtgtgctagattgtctttctgaccatacatgtcacttttttggttgcttgctaggatttactctatggagagatgccattgcctatggcaacagctcgcccttctcttccttgaaggagctgttttttgggaagtgatgaaccgtcggcaaccttgtttctcttgcactttaagcagctaactgttcccgggtaggacgctctcctgcaataaatcatggtagctgttaagaacggtggttcagttgctcccatatggtctgaagaaacggtgcttcagtctttagcattttgaggaggaaacgtgaaacttactggtcagctgaaggctataaacattgccatggccctggactggaagccccaactttcccaagcctgtagaaagcgccgtgtgcctctacagaagccaccgcgtgatgaccagcttcatccggcagggtgggtacagtagcaagctatagccctagtctgatgtaagaacaaatttatattatccatcccatattgtctttaattagattcatttttgaaaccaatgcaatttcagctcttgctgtcgtgcaaatctgtacccattgtccatggatgagtagatgacctgggagaatcacacaatacatattgtaatatcagttcacgttttaaagaagtgaatatgagtagatgacctagggtctcattgagctagac

SEQ ID NO: 19502 - DNA, 2259 bp, Zea Mays
accactacttcactcgctcgctcgtgaagcgtctcgctgccctgcccccaccgatccaccacccccccactcatcacccctcagccaccgcccaccggccatgtcgtcgccgtcggtagccagcctccgtctcccgatgctcccagcgtcgccgcccctctcccgccgcgctatcgccggagttaccccgagcgcggccgcaccccgcgctcttctcctacaacccctcgcgcccaaggcgctcgcggcgtaccaccagcctgcgctcctcctccaccagcgacgccggcatggaccgccccccgtcgccgctgtcactgcctccaagccggttctcaaggacccgaagaagtaccaggagtgggactccatgacggccaagttcgctggcgccgccaacatccccttcctactgctccagctcccgcagatcgtcctcaacacccgcaacctcctcgccggcaacaagaccgcgctcttcgccgtgccgtggcttggaatgctcactgggctgctgggcaacctctcgctcctctcctatttcgccaagaagaaggaaacggaggctgtcatcgtgcagactcttggcgtcatctccacctatgcggtcctcgtgcagctcgcaatggcggagtccatgccggtgccgcagttcgtggccacttcggttgttgtggccgcagggctcatcctaaacttcctcaactactttggctggatccctggaaccctcttgctgctgtgggaggatttcattacagtcggcggccttgccgtgctccctcaggtcatgtggtcaacttttgttcccttcatccccaatagcgtactgcctggcataatctctggttctttagctgttgcagctgttgcgatggcaaggatgggcaagctttccaatgcaggggttaaatttgttgggtcattgtctggttggacagccacacttctcttcatgtggatgccagtggcacagatgtggacaaattaccttaacccaagtaacatcaaagggctgtcagctttcagcatgttgcttgcaatgcttggaaacggacttatgattcctcgcgctgtattcatccgtgatttgatgtggtattaattttttattctatcttgcctgatagtgttcaagaaattgtgatgggaagtatctaactccgactggaaatgcctattgtagatgagaagggaccatatgaaaatatcacttccctaggcattcccatgcatgaagctttacatgaaacctcctaaatcatcttcattaaataatcatgaaagggcatgacacacataataagatggcccattatttcataaactgaggctgatcgaatgccttattttcatggaagtttgaatttatggttgttaaataataaaagatgtatttattaatagtcaataatatagtcaaaccaatgccatttttatctgctctattgcaattcctatattcccttaaccatagttatttttcatgaatctaggttcactggttctgcatgggcatctgtcctacagggttggggtaacctggcgtgcatgtactgctttaatagcatcagcggagaagttttctttgcaacatcagctggtctgcttctatggctaggatttactctatggagagatgccattgcctatggcaacagctcgcccttctcttccttgaaggagctgttttttgggaagtgatgaaccgtcggcaaccttgtttctcttgcactttaagcagctaactgttcccgggtaggacgctctcctgcaataaatcatggtagctgttaagaacggtggttcagttgctcccatatggtctgaagaaacggtgcttcagtctttagcattttgaggaggaaacgtgaaacttactggtcagctgaaggctataaacattgccatggccctggactggaagccccaactttcccaagcctgtagaaagcgccgtgtgcctctacagaagccaccgcgtgatgaccagcttcatccggcagggtgggtacagtagcaagctatagccctagtctgatgtaagaacaaatttatattatccatcccatattgtctttaattagattcatttttgaaaccaatgcaatttcagctcttgctgtcgtgcaaatctgtacccattgtccatggatgagtagatgacctgggagaatcacacaatacatattgtaatatcagttcacgttttaaagaagtgaatatgagtagatgacctagggtctcattgagctagac

SEQ ID NO: 19503 - DNA, 948 bp, Zea Mays
catgatgcttccaattacacattttgaagggaaagaaacttcagatccagaaaatggtaggcagtgtcccttctttgaagagctgcatggtgtcttcacagagcgtgctagaaatatgcagcaacaactccttgagtctgaatctggagtttctgtcaaaacgaaactgaagcgacctggtggtgactggtcatctcgggagtctgacgacaaggaagatgatggtgaagaaagtgacgatgagaagccgatgcacaacagaaagaggaaagctgatgacaagaaacagcaacatcaaagaatgtctgagaagtcaagaacaggaatttcgagcatccatgaactgctgcaggatttcctggtgcagcaacagcacattgatgtccggtggcgggagatgatcgagagacgtgcccaggagcgggtggttttcgaacaacaatggcggctgacaatgcagaggctggagcaggagcggttgttgctggaacactcgtggatggaacgggaggagcgaagaaggatgaaagaagaagcacgagctgaaaaaagggatgcactcctgaccactctgttgaacaaactcctgcaggaagatctatagcaggataagcttgctcttcgtttcatcagggtttagctgcagaagtggacattttctcaccttgttttatcaattctttgtagctactacatttattgacatgtgatttgtcaatttctttcagcatctgtattaggttcctagggctcttttttccagttatttagtagagcaaagctaattttatgcttaattgtggttgtaagtatcatactgccaagtaggtctacagaccaatgctaatatgcttgagagataattggtttctctgtcagcaatggacagaagtttatgtaatcggcctgtacaaaaataagttcatgtggcctcaaaggaaaaaaaaa

SEQ ID NO: 19504 - DNA, 2037 bp, Zea Mays
aaaagttcatttgatatattttctgaaagataagttcatgtacagtcggcaaccgtcatattcacatgtttgagcaaaaatgctttcagcgggcaaccgtcatgtgcgagaacaagtgaacaaataaggccctgtttcaatctcgcgagataaactttagcagctttttctagctacttttagtcatttgtaatctaaacaggagagctaatgatggtaattgaaactaaactttatagctaaagtttagcaggaagctaaagtttatcccgtgagattgaaacggggcctaagcccatcagtcgcagaaggccactgcctggacggcgactccgagaacgaaccgggcagcaccccagcggcaatggagggccagccgctccctctcctcctcggtcttcgcccagccccaccaccctcgcctcatcctcaaccaccctacccgcctccgactccgcgtacaccgtcgcgagtcgaaccagctcgccgcagtgcgtttgaggcgtccatcgggcagtcagacgcacatggccctgaccgtagcggctgggagcggctgaccgtgtcctcgctcccttttctcttccccaaccgtgcccgagtcctcgcgctcccgccccctctgggggccgctgcggtggttgaggcgacgcaggaggactggaggaggacaaggagtgggacttgggaggctgcgctgcagaagtggaagaccaagacttacgcgctctcggtgcccctccggaaaggcgcgctacgcggctccttccctccatcttggattaaggatttcgttgaagttcaggggaagaagctcaaattcagtgccgagctccgtgctaatcttgatgggatcttctctgagatgtcacggtgtatggacaagggtcaagttcagccaaagtccgcaatggcagctgatgtcgtgtcccttggtgactcctggcttggctatgctatctgtaaggaattgctagagcctgtcaagaatgctgaagaacaggattggttccgtagactgagtgacagatggaaggactgggaggatttatggaggcccgaacttgctgggaggatttcaatggtctactagagaggtgattggtgcagttctgaagcatctggggtcatcatataacacggttgatatggaaatagaggtcaatggtggtagagcagcagtcctgaatagctttacacaactacagaagcaggtccaactattccacggcatgaactatctgaaatcgtttagtctcggagatgtatgggtcgcagtgggttggagcagcgatgtggtcgttccctgctgcaaagcgaatgtctaatgtcgcggtggtcgttcccaagtctggcagcagcctatgggctgatctgtgggcaacaccgcgcgccacaggattccagaccgaccaaatcggtagccgaaccagaggcccatcttctccactcatccaccagtggttcgacttctgcctgcagagtgctaggagcctacccttctgccaagacgtcatccccggagcatctccgcactccgctgtacctcgagagccccgtgcctccagaggcccctcgagatagtaacaagcggaggacgaagctggacacgaaccttgtcaggggagtgccgccgcccgagatcctggaaagatgcgagtttttggaacccctgtcaggtaaggcgctggaggattaccggtagctggtgtccagcgtgcagagacctcggctcggtttggttgggaatgcagaagatgtcagctgtactagacttcagagaaagattatagagccactgtaatgtaattgaccaaagggggtgctacttatcgttccgtatatgtttgacgatcacgttattcttatttgcggcagtggtgcgagtggtcgaggcagagaaatgggcaagcaaaatgacgagccagctgtcctgcttctgatcagaattcagaaacatgagctcagacttcagactcaagacatgacacttgcacttcttttctactaattcttcagtcgtctcgtatacgtaag

SEQ ID NO: 19505 - DNA, 1145 bp, Zea Mays
aagattagggacccattaaaccagaatcatacacctcatcgatatagctttatttcccttgcccttttccagggcacaccccctccagctctccgccgtcggccatgggtcaagcctggggtaatctccaagataggctccaagggcggcggtggaaggagcaccaggtgaggaagatcaccgacaaggtgttcgaccgcctcacggaggacgcccagaagcgcgacaaggaggccctcagattcgaggaggtctacatcgccgtcctctgcgtctacaatgacatcaataagtacttgccggggccgcaccacgaccccccgtccaaggagaagctcagggccatgatggaggtaaccacatccttctccttcgtttagattttgctgtttcagtatggccaatcgaatatcgtgttcttccggctgttccttgaactggaagcaaagtgttcttgatttatgtgtttaattatggtcacaaagtcagtgatttgatttggaagtctagaagtaattattgttttttccccttgtcgagatcccagttgcttcagctgccacagcctacaggtagttcttgggttgagtcattgagtgtggtttatcactggcttggttcctgcaacgcgcaggagtacgacgtgaacctggacgggctcctggaccgcgaggagttcgcggagttcatccggaagctgaccgcggactcgctgtgctcgatcagcgtgaagctgctgatcacgctggtggcggcgccggcgctggcgatggcgaccaagcgggcgacggagggcgtccccggcgtgggcaaggtggtacgcaaggtgcccaacgcgctctacgcctccgccatcaccctgggcgttgtgctgttgcagagatcaaccgagggcgtcgagtgactcgcgctgctgaaactgcaatgtcgtcggctgtgtagatggagcagcgtatctaggataggtgttggttctttacggcttgtgcggtgaattgatctgtgtatcaattcgatgtgatttatcctggatttgggacaaatagttgtggatccttgtgaattgtcttgcttttttacctttaagatccggaacaaggctcaataagaagagagagagttacatgcgtcagcggcgcaaacaa

SEQ ID NO: 19506 - DNA, 855 bp, Zea Mays
aagattagggacccattaaaccagaatcatacacctcatcgatatagctttatttcccttgcccttttccagggcacaccccctccagctctccgccgtcggccatgggtcaagcctggggtaatctccaagataggctccaagggcggcggtggaaggagcaccaggtgaggaagatcaccgacaaggtgttcgaccgcctcacggaggacgcccagaagcgcgacaaggaggccctcagattcgaggaggtctacatcgccgtcctctgcgtctacaatgacatcaataagtacttgccggggccgcaccacgaccccccgtccaaggagaagctcagggccatgatggaggagtacgacgtgaacctggacgggctcctggaccgcgaggagttcgcggagttcatccggaagctgaccgcggactcgctgtgctcgatcagcgtgaagctgctgatcacgctggtggcggcgccggcgctggcgatggcgaccaagcgggcgacggagggcgtccccggcgtgggcaaggtggtacgcaaggtgcccaacgcgctctacgcctccgccatcaccctgggcgttgtgctgttgcagagatcaaccgagggcgtcgagtgactcgcgctgctgaaactgcaatgtcgtcggctgtgtagatggagcagcgtatctaggataggtgttggttctttacggcttgtgcggtgaattgatctgtgtatcaattcgatgtgatttatcctggatttgggacaaatagttgtggatccttgtgaattgtcttgcttttttacctttaagatccggaacaaggctcaataagaagagagagagttacatgcaaaaagaa

SEQ ID NO: 19507 - DNA, 2057 bp, Zea Mays
ctcgacgagatagaggagggagggagggagggaggcgcagtaggacagggctgcaggcaggtgcttgtccttagctggaaccctcccgtgtcggcctcatcccaccgccccgccctgccgtcctgccctgcgcggctgcggtcgcctataaggctagcccaggccatttgccctttgcccccgtccgtccgtccctcacctcacctcacctcacctcggcccgcctccctcatcaggtagccgtagcgagcagtatagcacgcacagccgccgccctgccctgccctgccctgctcggcgtaggcacaggcacagcccagagcgagcgagacagagggaaagagacagagccagccaggtaaaaggcaaaagcacagcacattaaaagagaggccggaagcagcggcagagcggagagagagagagaactagaagcatatatggcgatgccctttgcctccctgtctccggcagccgaccaccgcccctcctccctcctcccctactgccgcgccgcccctctctccgcggtgggagaggacgccgccgcgcaggcgcaacagcagcagcagcacgctatgagcggcaggtgggcagcgaggccgccggcgctcttcaccgcggcgcagtacgaggagctggagcaccaggcgcttatatacaagtacctcgtcgccggcgtgcccgtcccgccggacctcctcctccccctacgccgaggcttcgtctaccaccaacccgcccgtactctgcctacggggtgaagtctctgtcggacgagcacagccagctcttgtccggcggcggcggcatggacgcgtcaatggacaactcgtggcgcctgttgccgtcccaaaccgccgccacgttccaggccacaagctaccctctgttcggcgcgctgagcggtctggacgagagcaccatcgcctcgctgcccaagacgcagagggagcccctctccttcttcgggagcgacttcgtgaccccgaagcaggagaaccagacgctgcgccccttcttcgacgagtggcccaagtcgagggactcgtggccggagctgaacgaggacaacagcctcggctcctcggccacccagctctccatctccatccccatggcgccctccgacttcaacaccagctccagatcgccgaatggaataccgtcaagatgaacctgagtaaccatgcggaccccaacatctcagagctgacgactctttgctgctggcctggcctcatcgtaccttgaggcgtcaaggaatacttcattaccactagtatcatgctcctggattttcgaacaatatatatatgcttatgtaccgctatttctctcatcttttacacttctttacccgtttggaattgtatgttctgcgtggcacggttgttcatttgacctttttggatttgattgaaagctccgtttcttgcttactccagcgcatcgtgagcaatgtccctgtctccgctgcatgtgaaagatctaccgctgcatgcatcagtagttcaaagatgttcagtgctgcgggagggaacatgatcctgatgggcacccgtcaggtccaagtcgtggcctcgtgggtgtttggagaagataaagcgtggcaacgctggatctgccgcaaagcttccagagttggtggaggaacaggctctaaccctggacgtgggtccttgcacgcactagttcgctggtccagtccagggacagggagcagagacgcaaggcagagccactgtactacgacggcactgcgggtgaaggcgcttgcctggtgcgattcgcatcacgtgttgtatcgggttccctccttgtcgctgacgcctttaccctttgggcttgcatggacacatggttttccatggatgcttgggttcacggtaccgacgcatcggcccgttggcgacaagggagaaaagccaagcctggttgcgtatcgcgccatggagcagtcagcactcggcagtggtggtggtctctccggtgtacggacgaacggtcccggcgttggaccatatgcaagtgtccacgacaacgagtccacgtga

SEQ ID NO: 19508 - DNA, 3312 bp, Zea Mays
ctcgacgagatagaggagggagggagggagggaggcgcagtaggacagggctgcaggcaggtgcttgtccttagctggaaccctcccgtgtcggcctcatcccaccgccccgccctgccgtcctgccctgcgcggctgcggtcgcctataaggctagcccaggccatttgccctttgcccccgtccgtccgtccctcacctcacctcacctcacctcggcccgcctccctcatcaggtagccgtagcgagcagtatagcacgcacagccgccgccctgccctgccctgccctgctcggcgtaggcacaggcacagcccagagcgagcgagacagagggaaagagacagagccagccaggtaaaaggcaaaagcacagcacattaaaagagaggccggaagcagcggcagagcggagagagagagagaactagaagcatatatggcgatgccctttgcctccctgtctccggcagccgaccaccgcccctcctccctcctcccctactgccgcgccgcccctctctccgcggtgggagaggacgccgccgcgcaggcgcaacagcagcagcagcacgctatgagcggcaggtgggcagcgaggccgccggcgctcttcaccgcggcgcagtacgaggagctggagcaccaggcgcttatatacaagtacctcgtcgccggcgtgcccgtcccgccggacctcctcctccccctacgccgaggcttcgtctaccaccaacccgcccgtaagcaagcacggcccccgcgccgcctccgcaccccttcacactcacacgcacgtttaaccgcttttgcactgcacaaccccggccgcccggcggcggcgtccgtgccttgatctggttgtttactcggatcgagggattcagatgtcctctccgtccgtttgttaatcggctccggtcatttcttaatctcgtcctggattcggtcacgaaaagctagaggtcaagattttgctctcgattactatatccttgcctcatgttctaatggagtttattttattggtctgatgtgattagataggatgctagccaggcttgtctccggccaaaagcggcggtttagtttattgatgattgcttctttccttgggggatttattcctgtctggttgttgggagcctaaccacgctcctattgctgctgcggtttactaaccatctgcgccagtacacctactccatggaccccaaaatacagttcttccaaccattccccccctccatctgctttctcgcgggcaaataaaaacgtgtagaacgacggtgtagtaggcagatctactccttgtgccgctacgctagcccgctaccgaagatcgggcccgtttcaaccggttcgttggtctgagcggagctaagatggggcgcatttcattttttggtcctttcgtctgattggagaagtgcccattccggtatcgctccccggcctccaaatacgcaccgacacagaacgtgttcgtacgcacgtacacatggtatgcgcaccgtgctgctggccatagccgttgactcaccgggattcactcctctctcgcgtgtgtgtgtgtggcttccttgcagttgggtacgggccctacttcggcaagaaggtggacccggagcccgggcggtgccggcgtacggacggcaagaagtggcggtgctccaaggaggccgccccggactccaagtactgcgagcgccacatgcaccgcggccgcaaccgttcaagaaagcctgtggaagcgcagctcgtgcccccgccgcacgcccagcagcagcagcagcagcaggcccccgcgcccaccgctggcttccagagccaccccatgtacccatccatcctcgccggcaacggcggcggcggcggcggggtaggtggtggtgctggtggcggtggcacgttcggcctggggcccacctctcagctgcacatggacagtgccgctgcttacgcgactgctgctggtggagggagcaaagatctcaggtactctgcctacggggtgaagtctctgtcggacgagcacagccagctcttgtccggcggcggcggcatggacgcgtcaatggacaactcgtggcgcctgttgccgtcccaaaccgccgccacgttccaggccacaagctaccctctgttcggcgcgctgagcggtctggacgagagcaccatcgcctcgctgcccaagacgcagagggagcccctctccttcttcgggagcgacttcgtgaccccgaagcaggagaaccagacgctgcgccccttcttcgacgagtggcccaagtcgagggactcgtggccggagctgaacgaggacaacagcctcggctcctcggccacccagctctccatctccatccccatggcgccctccgacttcaacaccagctccagatcgccgaatggaataccgtcaagatgaacctgagtaaccatgcggaccccaacatctcagagctgacgactctttgctgctggcctggcctcatcgtaccttgaggcgtcaaggaatacttcattaccactagtatcatgctcctggattttcgaacaatatatatatgcttatgtaccgctatttctctcatcttttacacttctttacccgtttggaattgtatgttctgcgtggcacggttgttcatttgacctttttggatttgattgaaagctccgtttcttgcttactccagcgcatcgtgagcaatgtccctgtctccgctgcatgtgaaagatctaccgctgcatgcatcagtagttcaaagatgttcagtgctgcgggagggaacatgatcctgatgggcacccgtcaggtccaagtcgtggcctcgtgggtgtttggagaagataaagcgtggcaacgctggatctgccgcaaagcttccagagttggtggaggaacaggctctaaccctggacgtgggtccttgcacgcactagttcgctggtccagtccagggacagggagcagagacgcaaggcagagccactgtactacgacggcactgcgggtgaaggcgcttgcctggtgcgattcgcatcacgtgttgtatcgggttccctccttgtcgctgacgcctttaccctttgggcttgcatggacacatggttttccatggatgcttgggttcacggtaccgacgcatcggcccgttggcgacaagggagaaaagccaagcctggttgcgtatcgcgccatggagcagtcagcactcggcagtggtggtggtctctccggtgtacggacgaacggtcccggcgttggaccatatgcaagtgtccacgacaacgagtccacgtga

SEQ ID NO: 19509 - DNA, 1367 bp, Zea Mays
gtcaattctttctggaacctgtgatttctcatcctgagaagatgacgctttctggtactctgcctacggggtgaagtctctgtcggacgagcacagccagctcttgtccggcggcggcggcatggacgcgtcaatggacaactcgtggcgcctgttgccgtcccaaaccgccgccacgttccaggccacaagctaccctctgttcggcgcgctgagcggtctggacgagagcaccatcgcctcgctgcccaagacgcagagggagcccctctccttcttcgggagcgacttcgtgaccccgaagcaggagaaccagacgctgcgccccttcttcgacgagtggcccaagtcgagggactcgtggccggagctgaacgaggacaacagcctcggctcctcggccacccagctctccatctccatccccatggcgccctccgacttcaacaccagctccagatcgccgaatggaataccgtcaagatgaacctgagtaaccatgcggaccccaacatctcagagctgacgactctttgctgctggcctggcctcatcgtaccttgaggcgtcaaggaatacttcattaccactagtatcatgctcctggattttcgaacaatatatatatgcttatgtaccgctatttctctcatcttttacacttctttacccgtttggaattgtatgttctgcgtggcacggttgttcatttgacctttttggatttgattgaaagctccgtttcttgcttactccagcgcatcgtgagcaatgtccctgtctccgctgcatgtgaaagatctaccgctgcatgcatcagtagttcaaagatgttcagtgctgcgggagggaacatgatcctgatgggcacccgtcaggtccaagtcgtggcctcgtgggtgtttggagaagataaagcgtggcaacgctggatctgccgcaaagcttccagagttggtggaggaacaggctctaaccctggacgtgggtccttgcacgcactagttcgctggtccagtccagggacagggagcagagacgcaaggcagagccactgtactacgacggcactgcgggtgaaggcgcttgcctggtgcgattcgcatcacgtgttgtatcgggttccctccttgtcgctgacgcctttaccctttgggcttgcatggacacatggttttccatggatgcttgggttcacggtaccgacgcatcggcccgttggcgacaagggagaaaagccaagcctggttgcgtatcgcgccatggagcagtcagcactcggcagtggtggtggtctctccggtgtacggacgaacggtcccggcgttggaccatatgcaagtgtccacgacaacgagtccacgtga

SEQ ID NO: 19510 - DNA, 1369 bp, Zea Mays
cacaatagcacaaccaacaatactactgtttcggcaaaacatggtttgcttgcatggtactctgcctacggggtgaagtctctgtcggacgagcacagccagctcttgtccggcggcggcggcatggacgcgtcaatggacaactcgtggcgcctgttgccgtcccaaaccgccgccacgttccaggccacaagctaccctctgttcggcgcgctgagcggtctggacgagagcaccatcgcctcgctgcccaagacgcagagggagcccctctccttcttcgggagcgacttcgtgaccccgaagcaggagaaccagacgctgcgccccttcttcgacgagtggcccaagtcgagggactcgtggccggagctgaacgaggacaacagcctcggctcctcggccacccagctctccatctccatccccatggcgccctccgacttcaacaccagctccagatcgccgaatggaataccgtcaagatgaacctgagtaaccatgcggaccccaacatctcagagctgacgactctttgctgctggcctggcctcatcgtaccttgaggcgtcaaggaatacttcattaccactagtatcatgctcctggattttcgaacaatatatatatgcttatgtaccgctatttctctcatcttttacacttctttacccgtttggaattgtatgttctgcgtggcacggttgttcatttgacctttttggatttgattgaaagctccgtttcttgcttactccagcgcatcgtgagcaatgtccctgtctccgctgcatgtgaaagatctaccgctgcatgcatcagtagttcaaagatgttcagtgctgcgggagggaacatgatcctgatgggcacccgtcaggtccaagtcgtggcctcgtgggtgtttggagaagataaagcgtggcaacgctggatctgccgcaaagcttccagagttggtggaggaacaggctctaaccctggacgtgggtccttgcacgcactagttcgctggtccagtccagggacagggagcagagacgcaaggcagagccactgtactacgacggcactgcgggtgaaggcgcttgcctggtgcgattcgcatcacgtgttgtatcgggttccctccttgtcgctgacgcctttaccctttgggcttgcatggacacatggttttccatggatgcttgggttcacggtaccgacgcatcggcccgttggcgacaagggagaaaagccaagcctggttgcgtatcgcgccatggagcagtcagcactcggcagtggtggtggtctctccggtgtacggacgaacggtcccggcgttggaccatatgcaagtgtccacgacaacgagtccacgtga

SEQ ID NO: 19511 - DNA, 589 bp, Zea Mays
gcaggcgcctcccgcaactcccacgagatccgagtatccgactcggacgaaactctcctggctggccaccgtcgcggcgtcgcggcaaccggctgcgcacagggaggccgcacagtggtttacgagggcgcggttgtcggctcgtcgctggtggggctgggctgtggttctggttcctgaaccggcggctgtacaaggagtacgaggagcggcggttgctggtgcaggtcctcttcggcctcgtcttcgccttctcctgcaacctcttcgagctcgttctcttcgagatcctccccttcctgtccaagcatgcacgccttcctcacctggcacctcgacttcttctgcctcctactactcctcgtcttcgtactcctctactattactgctatcttctgctccgtaactcaggggtgaggagggagcgggcgtggctcggcgattcacttccccatgccttcatcggagaaggttttttttacgatgtcgcagttgttggtcagtaggattggggtgattggagtgagtgtcatggctgttctttctggttttggtgccgtcaatatgccatacagttatctgtcgctc

SEQ ID NO: 19512 - DNA, 1572 bp, Zea Mays
gtcgctctttccaccgccgaagccgagtacattgccgcaggtcattgttgcgcgcaattgctatggatgaggcaaaccctgcgggactatggttacaaattaaccaaagtccctttgctatgtgataatgagagtgcaatcaaaatggccgacaatcccgtcgaacatagccgcactaagcacatagccattcggtatcattttcttagggatcaccaacaaaagggggatatcgagatttcttacattaatactaaagatcaattagccgatatttttaccaagccacttgatgaacaatcttttaccagacttaggcatgagctcaatattcttgattctagaaatttcttttgctagcttgcacacataactcatttgaatacctttgatcatatctctgttatatgctatgactaatgtgttttcaagtctatttcaaaccaagtcataggtatattgaaagggaattggagtcttcggcgaagaaaaaggcttccactccgtaactcatacttcgccatcactccaagcaactctctatcctttgggggagaaatgagcatcaaagaaaaggacttcatccttgggggagagagtaaacgctcgaaagcaaaaggaccggacttcgtctttggtataatcttaactcatttacttatgaccaaaggggaagcaattacttcgaaaggctctaatgattccgtttttggcgattcatgccaaaaagggggagaaatgagcccaaagcaaaaggaccgcaccaccaccaccaaattcaaaaacttagtgctttccaaaagtatttatcatttggtgtcctattgtgttcaaaagggggagaaagtagtatttcaaaaatggtatatcaaaaccctcttgaacactaagaggtggatctcttttagggggagttttattaagtcaaaagaagagcatttgaaacagggggagacaatttcaaatcttgaaaatgctttgcaaactcttattcatctacctttgactatttgcaaaagaactttgaaaaggatttacaaaagaatttgcaaaaacaaaactcgtggtgcaaacgtggtccaaaatgctaaataaagaaagaaacattccttgcatatcttgtaagtagttatattggcttaattccaagcaacctttacacttacattatgcaaactagttcaattatgcacttttctatttgctttggtttgtgttggcatcaatcaccaaaaagggggagattgaaagggaattaggcttacacctagttcctaaataattttggtggttgaattgcccaacacaaataattggactaactagtttgcccaagtgtatagattacacaggtgtaaaaggttcacactcagccaataaaaagaccaagtgttggattcaataaaggagcaaaggggcaaccgagggcacccctggtctggcgcaccggactgtccggtgtgccaccggacagtgaacagtacctgtccggtgtaccaggggactcagactcaaactcttcactctcgggatttctcggaagccggcgcgctataattcaccggactgtcc

SEQ ID NO: 19513 - DNA, 3159 bp, Zea Mays
acttgctcttgatctttcagactcccacagatttcacaggacttaacttttgaattaatttcacaaaacgacaactatgtgcacataagtatcaaggaactacaatttcatgtatcatttttagaaacttgaactaactgaggcatatgtttcaagcaactctaacattttgcatgtggagacctatattagacacacaagttatgcgtgaaacctatgtcaacttgggtgtgaatgccatgtggaccaatgtcaaatgttgtaggattgtgaaattgatggcgcaagaagctgtagttctctgaagtaatcctagaagttgttgctttgtagttagcaacaaatgtgaaagggcctccaggctccagatgagttggttggttagatggtctgagtagcactccttaagttctgggttcgacttaggtggaaacgaatttcaggttctcgtgtcccatgccaaagcacaggtctaaggcccgaccttaatcgtggtgaaaacggtcggaaacaaccggtacacacaaaccatttccattatcgtattttctctcggaaacgaaatcgaaaacgataacttcgaaaacagaaaatacatcggtgattcagaaactacggaaacgaaatttcggtacggaaaacacaccagttacgatcagaatatatagtacactagtaaaaatcgtaacatgtaaaaattcacacaagccatacatccacataattattagtaatatataaatattcacaaaatcattaagattaaagcatatctcacaaaaaattaaagcaatatctcataaatacaagtgacaagcattgtacacacatacatatagttaggaagtcaacatatttggtatcatcctggaggccctcgcgtaaattatgaatatatgtatcaagagcaataattgaaaataaactataaataagacccataaaagttttaaaaaactctactatataccattagatagatcttgattttaggaaaataataaaattagttccatatttttctaagttaatacgaatttattacgaatttacaaagattagtgcaattttatttttttctaaaaaataatcgaatttgttactgacggtaaaatatcgaataaatacggcaattttgaaaaacgatcgaaagagacctaaaccgtttcagaacgtttctatcgatttcgtttccatattttcggcaataatttttgtttccgtttagccccgaatttcggcaaaatttcgaaaatgattcccggtaaccgaaaattaatgttttcgttttcacccctagtcgtctcacacaggctacagggccgctgtgtatgagtgagacatgggttgtgggttttttcgacctgcgtgagaaggtctttttaatataatgtcgtggggacggtcttaccatataggtgtgtttttttaagttagaagcaaatagttatgttttatgatactaattaccttttttgtctccaacatctatactctaaactacatcacttgtgtgcaatagaatcttttactttagtgtactggcaggccagcttcatagtcctttgcaattttgcatcttgcatgtcgtttactcgtttaacattcgtgactgttgggcatgtttgtttcagtggatctttgttaggctaagtaatctagcttttaaattgtaggagagcatatgaatttctatgctctcctacaatttcattgtagaaagctgctgtgtattttcgaacttggagaggccatcttcagaatctacttggatatgctttgtctgtatattgtgtttataagatgctcaagtccttgcagagcgcagtctttaagaagtcaggttctgttgatcctgtaacaataacgataacgattttcttgagacattttgacattggcattgatgttgcgctgttatctcagtacatatctttgatgttcattgggatgttagttgtcatatctgttcgaggtttcttggcaaatgttatgaaattcttcttcgctagttctagagttgggagtcggtctacaaccaatgttgtccttgtcctatcagagatcatggccaggtacttcatatcttccattctcctcataagaaaaagcctggcaaatgaatataggtattccgtaagaccataactgaacatgtttcattagtttaacttgattttctctctgtatttactctaatgatcctgttgttatggtcgctacatcgacgagggattcgagagggatatcgatgtgcaggaacgtcgaccgggggcctctgcccacgaccgagcaagaggaaagtttctcccttctaatttttgactcatttatttctcatctattaattacataaataggccagctggccgtccatgtctagctagagatccttatctccttaaaactcttctaaaaactgtcaacaaactactaactgataaccttcctagataatatcaactaatcttttagataatctgaactaatcttctaattttatctctaactatcattatataatccctcttgtagtgtccatggctggagctatagcgcagcccttccggtgatcattactgcggtgttttgggtggtgatatccaatttgacttctaccaccgctggtttgatgctatatttttggctagtgcattcctgtcattggttctgatatctgcccaatacaccaccaggcagacagacaagcgtccgattgattgatgcatcttgcacacatttgtgcatgttgtcttttaaccactattcatccaaggttgacccattttttgcaccacagattccaagggcactgtttgttcatacacttgcatacacatgcagttatacataacctaacatttgattttcctaaggatgaaaaggctaaaaaagttgagatagtgagcatatttgaagatgagttttgaagtgagcataagactgtctccagcaacgtcctatatatccatcctctatatcggttctttacagtctcctctagaagatttcatcctctatatctccttcctctccaacaacgtcctctaaatcacgtcccctatactcaaatacctatattagagacatttttatttttattttttatacatatgtatttgtcatactctcaaatgtattgtatatattttagttttg

SEQ ID NO: 19514 - DNA, 1400 bp, Zea Mays
atgctcaagtccttgcagagcgcagtctttaagaagtcaggttctgttgatcctgtaacaataacgataacgattttcttgagacattttgacattggcattgatgttgcgctgttatctcagttcttcttcgctagttctagagttgggagtcggtctacaaccaatgttgtccttgtcctatcagagatcatggccaggtacttcatatcttccattctcctcataagaaaaagcctggcaaatgaatataggtattccggtgatcattactgcggtgttttgggtggtgatatccaatttgacttctaccaccgctggtttgatgctatatttttggctagtgcattcctgtcattggttctgatatctgcccaatacaccaccaggcagacagacaagcgtccgattgattgatgcatcttgcacacatttgtgcatgttgtcttttaaccactattcatccaaggttgacccattttttgcaccacagattccaagggcactgtttgttcatacacttgcatacacatgcagttatacataacctaacatgtcagttaacttgatcaaaagtctttattttgtacatagttttgtgcccgtgcgttgccacgaaagtaaaaaaaactgtataaaacaaagatacggaacgacaaacatcacataattttttttcaacaatcaatctcttctctatctatatttgtactaatattttgaattatagatgagtaaaatgagattaaccctggacagcaactgtatcagttagagcatctctaaaagactctttatatccttcataatatatataaatagagatttaccgttggagattaaaaatatatagaaagtggttttaatgtaaacgactctccaaataataatttagagagtgaaatttagaaaggctcgtggacatgctcttacaggctcatttgttccactattactgtaacttttatatttttagtatctgtattagtaacctattaattcctcattattttctatgttaagttagaggatcattcgtgtttttcaccttcggattagcgtatggacgtgtgtttgtatatatccgtgtctatgtgtttcagttgattttcctaaggatgaaaaggctaaaaaagttgagatagtgagcatatttgaagatgagttttgaagtgagcataagactgtctccagcaacgtcctatatatccatcctctatatcggttctttacagtctcctctagaagatttcatcctctatatctccttcctctccaacaacgtcctctaaatcacgtcccctatactcaaatacctatattagagacatttttatttttattttttatacatatgtatttgtcatactctcaaatgtattgtatatattttagttttg

SEQ ID NO: 19515 - DNA, 1199 bp, Zea Mays
atgctcaagtccttgcagagcgcagtctttaagaagtcaggttctgttgatcctgtaacaataacgataacgattttcttgagacattttgacattggcattgatgttgcgctgttatctcagttcttcttcgctagttctagagttgggagtcggtctacaaccaatgttgtccttgtcctatcagagatcatggccaggtacttcatatcttccattctcctcataagaaaaagcctggcaaatgaatataggtattccgtaagaccataactgaacatgtttcattagtttaacttgattttctctctgtatttactctaatgatcctgttgttatggtcgctacatcgacgagggattcgagagggatatcgatgtgcaggaacgtcgaccgggggcctctgcccacgaccgagcaagaggaaagtttctcccttctaatttttgactcatttatttctcatctattaattacataaataggccagctggccgtccatgtctagctagagatccttatctccttaaaactcttctaaaaactgtcaacaaactactaactgataaccttcctagataatatcaactaatcttttagataatctgaactaatcttctaattttatctctaactatcattatataatccctcttgtagtgtccatggctggagctatagcgcagcccttccgggtgatcattactgcggtgttttgggtggtgatatccaatttgacttctaccaccgctggtttgatgctatatttttggctagtgcattcctgtcattggttctgatatctgcccaatacaccaccaggcagacagacaagcgtccgattgattgatgcatcttgcacacatttgtgcatgttgtcttttaaccactattcatccaagttgattttcctaaggatgaaaaggctaaaaaagttgagatagtgagcatatttgaagatgagttttgaagtgagcataagactgtctccagcaacgtcctatatatccatcctctatatcggttctttacagtctcctctagaagatttcatcctctatatctccttcctctccaacaacgtcctctaaatcacgtcccctatactcaaatacctatattagagacatttttatttttattttttatacatatgtatttgtcatactctcaaatgtattgtatatattttagttttg

SEQ ID NO: 19516 - DNA, 1675 bp, Zea Mays
atgctcaagtccttgcagagcgcagtctttaagaagtcaggttctgttgatcctgtaacaataacgataacgattttcttgagacattttgacattggcattgatgttgcgctgttatctcagttcttcttcgctagttctagagttgggagtcggtctacaaccaatgttgtccttgtcctatcagagatcatggccagggattcgagagggatatcgatgtgcaggaacgtcgaccgggggcctctgcccacgaccgagcaagaggaaagtttctcccttctaatttttgactcatttatttctcatctattaattacataaataggccagctggccgtccatgtctagctagagatccttatctccttaaaactcttctaaaaactgtcaacaaactactaactgataaccttcctagataatatcaactaatcttttagataatctgaactaatcttctaattttatctctaactatcattatataatccctcttgtagtgtccatggctggagctatagcgcagcccttccggtgatcattactgcggtgttttgggtggtgatatccaatttgacttctaccaccgctggtttgatgctatatttttggctagtgcattcctgtcattggttctgatatctgcccaatacaccaccaggcagacagacaagcgtccgattgattgatgcatcttgcacacatttgtgcatgttgtcttttaaccactattcatccaaggttgacccattttttgcaccacagattccaagggcactgtttgttcatacacttgcatacacatgcagttatacataacctaacatgtcagttaacttgatcaaaagtctttattttgtacatagttttgtgcccgtgcgttgccacgaaagtaaaaaaaactgtataaaacaaagatacggaacgacaaacatcacataattttttttcaacaatcaatctcttctctatctatatttgtactaatattttgaattatagatgagtaaaatgagattaaccctggacagcaactgtatcagttagagcatctctaaaagactctttatatccttcataatatatataaatagagatttaccgttggagattaaaaatatatagaaagtggttttaatgtaaacgactctccaaataataatttagagagtgaaatttagaaaggctcgtggacatgctcttacaggctcatttgttccactattactgtaacttttatatttttagtatctgtattagtaacctattaattcctcattattttctatgttaagttagaggatcattcgtgtttttcaccttcggattagcgtatggacgtgtgtttgtatatatccgtgtctatgtgtttcagttgattttcctaaggatgaaaaggctaaaaaagttgagatagtgagcatatttgaagatgagttttgaagtgagcataagactgtctccagcaacgtcctatatatccatcctctatatcggttctttacagtctcctctagaagatttcatcctctatatctccttcctctccaacaacgtcctctaaatcacgtcccctatactcaaatacctatattagagacatttttatttttattttttatacatatgtatttgtcatactctcaaatgtattgtatatattttagttttg

SEQ ID NO: 19517 - DNA, 1964 bp, Zea Mays
taggcctttaaaaaggaggagagtacgtccagcgcacgaggccgtcttctcttcccaaacccatcccgccgttctcttcctgcttcgttcttctctccacccgtcgctcctccctcctctcggcgagggagacccccctctcttcacagcgtggattattccattcttcgtctgccgtttgccgtggcgcgtcatcgatggcttgactctgatcgtcgtcggcggtgttgctgttttccagagctccaagatcgacaccgacagcatagcacctcctgcacatttgcaggctgtagcgcgcgccacatagatagtagacaggcgaggggcgatagagcagtgtgcgcgactagctagctagctagcttggggcagccgaagatgctggcatgcattgcgtgctcctccaaggaaggcgcagaggacggctcccgtgccgcggccactacgacgacgcctcacggcaaagaagccgtcaagtctctcacctcacagctcaaggacatggtgctcaagttctccggctccagcaagcagtgcaaggggacggccgggacccagtcgttcaggagcagcggggacaggtaccgccgcccctaccccggcttcatcgacgacacaggcttcacgcccgcgagcaaggttctcggcgaggactactacccaaggaccgcattggcgggggcagcaggcgccgccggtggcgcgcgaacggcttcgtcggatacgttggacatgggcaggagcaaccgcaagagccccgggagtagcggctggattccgggcaccgacgaggcagcggcgggcggggacgatgtcctcgctctggaggacgccgccgcgcccagggagtggacggcgcaggtggagcccggcgtccagatcaccttcggtaccatcccgaccggcggcaacgacctcaagcgcatccgattcagtcgggagatgttcaacaagtgggaggcacagcggtggtggggcgagaactacgaccgcatcgtggagttgtacaacgtggtgatgttcagcggccggcagcaagggtgctccactccggtgtcctccgtcgacgacttggcgctgagggactcgtcctactcccgtggcggctcgacaagcaggggcagcccgatcacagcgccgccgccgccgccgccactgccgccggtggcaagcaaagaaccgatcacccggagcgcgtcgtacaaggcaacggcagcagggtcctcctcggcaccgtacgcggccgcgcattccaccagggcggcagcggcatacttcccgtccgcggccgtgcccgacccgtcggaccacgtctgggcgcaccacttcaacatgctcaactccgctgctgcggcggccggcacgtcagcggcgatgggcggcggggccccgtcgtcctacgacccgtcgcgcgccaccacgtcgtccagggacgaggcctccgtgtccctcagcaacgtgagcgacctggaagccacggagtggatcgaggaagacgagccgggcgtgtgcctcaccatccgcgagctcggcgatggcactcgcgaactccgccgcatccggttcagccgggagatattcggcgaggatagggccaaggtgtggtgggagcagaacagggagagaatacaggcggaatatctgtagcaagcgatcagacactgagctgatgcaattttcaggcctgatgggataatcaaatatgtttgtgagaggatagattagggagatgataccgctatatacatggtgaaaacaacgtgaagggggaaactgtgaaagtgaaagaaatggtacctgtccttagttgcctaaactaataataagtttgtacatcgttggtacaatggtaccgtgtctggtttaaagttactttgtactgtacgtgtactgtacatcttggttccttcggtggtttaatttgtttttttaactctgtccatttcttgcgtgtttattac

SEQ ID NO: 19518 - DNA, 1908 bp, Zea Mays
cttctcttcccaaacccatcccgccgttctcttcctgcttcgttcttctctccacccgtcgctcctccctcctctcggcgagggagacccccctctcttcacagcgtggattattccattcttcgtctgccgtttgccgtggcgcgtcatcgatggcttgactctgatcgtcgtcggcggtgttgctgttttccagagctccaagatcgacaccgacagcatagcacctcctggctgtagcgcgcgccacatagatagtagacaggcgaggggcgatagagcagtgtgcgcgactagctagctagctagcttggggcagccgaagatgctggcatgcattgcgtgctcctccaaggaaggcgcagaggacggctcccgtgccgcggccactacgacgacgcctcacggcaaagaagccgtcaagtctctcacctcacagctcaaggacatggtgctcaagttctccggctccagcaagcagtgcaaggggacggccgggacccagtcgttcaggagcagcggggacaggtaccgccgcccctaccccggcttcatcgacgacacaggcttcacgcccgcgagcaaggttctcggcgaggactactacccaaggaccgcattggcgggggcagcaggcgccgccggtggcgcgcgaacggcttcgtcggatacgttggacatgggcaggagcaaccgcaagagccccgggagtagcggctggattccgggcaccgacgaggcagcggcgggcggggacgatgtcctcgctctggaggacgccgccgcgcccagggagtggacggcgcaggtggagcccggcgtccagatcaccttcggtaccatcccgaccggcggcaacgacctcaagcgcatccgattcagtcgggagatgttcaacaagtgggaggcacagcggtggtggggcgagaactacgaccgcatcgtggagttgtacaacgtggtgatgttcagcggccggcagcaagggtgctccactccggtgtcctccgtcgacgacttggcgctgagggactcgtcctactcccgtggcggctcgacaagcaggggcagcccgatcacagcgccgccgccgccgccgccactgccgccggtggcaagcaaagaaccgatcacccggagcgcgtcgtacaaggcaacggcagcagggtcctcctcggcaccgtacgcggccgcgcattccaccagggcggcagcggcatacttcccgtccgcggccgtgcccgacccgtcggaccacgtctgggcgcaccacttcaacatgctcaactccgctgctgcggcggccggcacgtcagcggcgatgggcggcggggccccgtcgtcctacgacccgtcgcgcgccaccacgtcgtccagggacgaggcctccgtgtccctcagcaacgtgagcgacctggaagccacggagtggatcgaggaagacgagccgggcgtgtgcctcaccatccgcgagctcggcgatggcactcgcgaactccgccgcatccggttcagccgggagatattcggcgaggatagggccaaggtgtggtgggagcagaacagggagagaatacaggcggaatatctgtagcaagcgatcagacactgagctgatgcaattttcaggcctgatgggataatcaaatatgtttgtgagaggatagattagggagatgataccgctatatacatggtgaaaacaacgtgaagggggaaactgtgaaagtgaaagaaatggtacctgtccttagttgcctaaactaataataagtttgtacatcgttggtacaatggtaccgtgtctggtttaaagttactttgtactgtacgtgtactgtacatcttggttccttcggtggtttaatttgtttttttaactctgtccatttcttgcgtgtttattac

SEQ ID NO: 19519 - DNA, 2006 bp, Zea Mays
ctcttcccaaacccatcccgccgttctcttcctgcttcgttcttctctccacccgtcgctcctccctcctctcggcgagggagacccccctctcttcacagcgtggattattccattcttcgtctgccgtttgccgtggcgcgtcatcgatggcttgactctgatcgtcgtcggcggtgttgctgttttccagagctccaagatcgacaccgacagcatagcacctcctgcgtgcatggagttgccccctggacgggacaaggcttcctttgccggcgtgcggtgtggtggaggcctagcttgttgacggcagagcacagcacatttgcaggctgtagcgcgcgccacatagatagtagacaggcgaggggcgatagagcagtgtgcgcgactagctagctagctagcttggggcagccgaagatgctggcatgcattgcgtgctcctccaaggaaggcgcagaggacggctcccgtgccgcggccactacgacgacgcctcacggcaaagaagccgtcaagtctctcacctcacagctcaaggacatggtgctcaagttctccggctccagcaagcagtgcaaggggacggccgggacccagtcgttcaggagcagcggggacaggtaccgccgcccctaccccggcttcatcgacgacacaggcttcacgcccgcgagcaaggttctcggcgaggactactacccaaggaccgcattggcgggggcagcaggcgccgccggtggcgcgcgaacggcttcgtcggatacgttggacatgggcaggagcaaccgcaagagccccgggagtagcggctggattccgggcaccgacgaggcagcggcgggcggggacgatgtcctcgctctggaggacgccgccgcgcccagggagtggacggcgcaggtggagcccggcgtccagatcaccttcggtaccatcccgaccggcggcaacgacctcaagcgcatccgattcagtcgggagatgttcaacaagtgggaggcacagcggtggtggggcgagaactacgaccgcatcgtggagttgtacaacgtggtgatgttcagcggccggcagcaagggtgctccactccggtgtcctccgtcgacgacttggcgctgagggactcgtcctactcccgtggcggctcgacaagcaggggcagcccgatcacagcgccgccgccgccgccgccactgccgccggtggcaagcaaagaaccgatcacccggagcgcgtcgtacaaggcaacggcagcagggtcctcctcggcaccgtacgcggccgcgcattccaccagggcggcagcggcatacttcccgtccgcggccgtgcccgacccgtcggaccacgtctgggcgcaccacttcaacatgctcaactccgctgctgcggcggccggcacgtcagcggcgatgggcggcggggccccgtcgtcctacgacccgtcgcgcgccaccacgtcgtccagggacgaggcctccgtgtccctcagcaacgtgagcgacctggaagccacggagtggatcgaggaagacgagccgggcgtgtgcctcaccatccgcgagctcggcgatggcactcgcgaactccgccgcatccggttcagccgggagatattcggcgaggatagggccaaggtgtggtgggagcagaacagggagagaatacaggcggaatatctgtagcaagcgatcagacactgagctgatgcaattttcaggcctgatgggataatcaaatatgtttgtgagaggatagattagggagatgataccgctatatacatggtgaaaacaacgtgaagggggaaactgtgaaagtgaaagaaatggtacctgtccttagttgcctaaactaataataagtttgtacatcgttggtacaatggtaccgtgtctggtttaaagttactttgtactgtacgtgtactgtacatcttggttccttcggtggtttaatttgtttttttaactctgtccatttcttgcgtgtttattac

SEQ ID NO: 19520 - DNA, 831 bp, Zea Mays
gcaaatatgtgttcgtcctgctgtcgtgctacaagtcgcgctaggccgctggcccattgcacacacggcccaaaatagtcttgcaaagtccaaggaaacgacgggttcacagccgctgcgctcaattgaccctcccctcgccggcgtccggcgatcgccggcatccgagcgatggatcacccatccacgtgatggatccgacagctccttccccggccccccctgcgggcgatggggcacagccatcggaccagaaccggcagcgaccaaggtctgcactccgtggcgccctcggggtggccttccccatcgcggtatcgttcctcttctccttcctcgttgggctcgctgggctcgcgcttggtggcctctcgtccaccgcatcggtctccatgccctccacctgccgcatcctctccagtggcgttgaccttaggtcatcaaaagtttgcgagcttgggttattgaactatagagctaagcatgtcttctacccatcgagtaagaggagattccgctgccatgatgactactactgggcttcagttttacaggttgaatacacagaatatttttctggccaattatcttatgcagtggccgaggccccgaaagaggctcttcctcataattgtcggcctgattttggtgctgcatggtcaacaacattaaagttcaaggtcaatgaatcatacagctgcagatatatgctaggtagtaacaaggctgatattcactcgaacaagctattcaattgtactgctgaggaaccttcgactggggagctgttcaaaaggatacttatactcatcatgcagacttcgatatatg

SEQ ID NO: 19521 - DNA, 1362 bp, Zea Mays
gcaaatatgtgttcgtcctgctgtcgtgctacaagtcgcgctaggccgctggcccattgcacacacggcccaaaatagtcttgcaaagtccaaggaaacgacgggttcacagccgctgcgctcaattgaccctcccctcgccggcgtccggcgatcgccggcatccgagcgatggatcacccatccacgtgatggatccgacagctccttccccggccccccctgcgggcgatggggcacagccatcggaccagaaccggcagcgaccaaggtctgcactccgtggcgccctcggggtggccttccccatcgcggtatcgttcctcttctccttcctcgttgggctcgctgggctcgcgcttggtggcctctcgtccaccgcatcggtctccatgccctccacctgccgcatcctctccagtggcgttgaccttaggtcatcaaaagtttgcgagcttgggttattgaactatagagctaagcatgtcttctacccatcgagtaagaggagattccgctgccatgatgactactactgggcttcagttttacaggttgaatacacagaatatttttctggccaattatcttatgcagtggccgaggccccgaaagaggctcttcctcataattgtcggcctgattttggtgctgcatggtcaacaacattaaagttcaaggtcaatgaatcatacagctgcagatatatgctaggtagtaacaaggctgatattcactcgaacaagctattcaattgtactgctgaggaaccttcgactggggagctgttcaaaaggatacttatactgtgttgtgctgggcatgctgagttcgatgttcattacggccttattcagaggtatgtatgggttgttgctcgctgccgccaggtgggctgtgaggaagcattgcatcagagtatttgccagccggttgaagcgtgcctgccttcttgtcgcctatgtatccgctgttggctggatcaccttgcagtacagcaaatttatcgggttgaaagaactcttgtcggattctgaagtcatggagaggttcttttaggctgtagatgtattcgccggtgtatattgtacttgtaataccattcggttatttaggaaggtttcttcttcttctttttgatgtgaaaccaatgctctgttgtacgagtatgtacatgccagttgccagctacactgctgctctgtcacaaacgtgttgttcatgccacattttatcagggacagctagctgacgacctgagtacctgacgtctctgacgatgcatccttttttctccttgggaaatggatggaattgtatgttgcaaactgttgaatggttccatttcaccaccaattccgt

SEQ ID NO: 19522 - DNA, 1962 bp, Zea Mays
tgagaactgaaagcacttcgcccaatctgccgtgcttccctcgttctccacctgctgcggccaatccgccgtgcttctctcgtggccttgggctccaccacctacaagcccgcgtcatctcgcaacccaaatctgcaaagctgccacgccccagcttcgcaccaccaacccgactcctcgacgcggagagcagattcgcgtgcaaaactccccgcgcgtccgccgccgaaagcccacgccccgacccgcagggtgagaccgggccgaagggtggattctggaccaagtgtatgatttgtgccgaggatcgccccaccatcaatcacggaaggtggccgatgatctccgccccagcctcctcccatgccgtcaatggaaggtggcctcggatccgccccatcggcggcgagggaggtaccggtgccagtggcggcggagggcgacgctgaagaggccgatggtgcggaggaggaggagagggacctgcgggaggcgttcgacgtgttcgacggcaacagggacgggctcatctccgccgaggagctcggcaccgtgctgcgctcgctcgcctgcaccggcagggccgccgccgattgccacgacatgatacgcctcgttacaagggcccattctttggtggaatccgtctgtctctctcttctccatccgtgacacgtccagcagctctatcgaggtcgaggactagccgccgccgccgcacctgcacgcacgccaagggatgggagagcgagagagggatccgaggaggtcaaagatgatctaccgcaagtggtcactgctctcatcgacggtcgtcatctggtgcggcgtcgccaccgccggcctggccggtatcttcctcttgggcggcaaggagaaattcagtcagtagagaggcttaggcagcaggacagagccacgatcggcatgcaaaactagagaggaagcatatctgctaatatatctactttgccatctaagctcggaggtgagaaggtagtttatgatgctaccaagaaaatcttctcaagctccagtggtctagctgaagatattctattcttattcacagattggttgtcactacttagagagattgtcaatattgaaacaagggctcggcgagcgagtcgtttccacccctagccaaggtggtcaagctcggccttgccgctgtgctggcctatgggctgttcgacgccgtcacctacacgacctccgtgctcgcattcctcggctacgagaagagtacagattgttatcctaatgtggactggtaacagcgtcacaaggccattccgtgtcgccggtacggatactttggccccaggctatcaacaaaggcttgaaaagcattcaggagaaacttaaccttccaagccaagtgtatgcctttgcacttgtggttggttctgtggcctcagtatgcttcacagttgttggtgtcttgatcctctcaaagtggggaaagggtcgcctctcatgcacatccacagttttgttctgttgcaatgttctgtttccatgctcttttccatgggtgtgagttttctacacattagtttgaagtaattgatatttgactaattcagttttctgtggataaaatccttctaacttggttaataattaagataatttagttttggtcttttgatttgtgggttaccacattaaaagagcagagtctcaatattcctggttcttaggagtataggaacttgggtttttgtttttgtggaacgattttgaggggttttgagtgttgcaaagcctggaaaaatatttggacaatcttatgtcataagaaatgagacatcttgacttgattagtgttattattcaaaaaaatgtgggtaactcggtattaatacattacaactaagttaatagttcgataatgtgaactatggaaaaacgcttcaataacaattaacaatcagaagtaatggcagaagtttt

SEQ ID NO: 19523 - DNA, 2373 bp, Zea Mays
attgctaaaactgtaaatcacattctcaggacttacttactatgcctgtagaacagatcaaagtttaaaacaaatgaagaggcgcatttccaaaatgttgcataggatactattgctagtgcgtaacacatttacccgtcttaagattttcaggaggcatggatgccaaattaggattttagctctttccatctcggttgttcttcagcagaccaggacactgtaatcttgggttaccgttctacaaaattggcccatggtcaaaaccaaaaaggattaacgcatattgtattcccaccacaaacaaaattactgcataggatatgtaatgccaaggggttttgcacaatataaagaaacacaagtaaaataaaaaatagtacctctctgattgtacaaatgaaagcagagcagccaattgtagaaacacatagcacgatgccatgatcttatcattcaacatattattagggtgtctctgtataggttgcttaactttaaaaaaaatgcaatggagttaatctggtgtagaacactgaacatgttgcaccctacagtgatggagataaaatatgttctcattagcttcggtagaaaacaaatgtttaatgttcaaaacgtggtaaaagatcatggcttcatggggcaactactcaagtagctaaaatcagcgtgccagtcctaagtactaattgattaaaggctagtcacttgttagaaaagcatagtaatcacaatcagagagtggtagtgtgcatctttagtacaaaaccaaacttactggaactatgttgttcgagagctggaaattctaacttctagtaaatgttcctccattaattctctcgttaactaaagtttctcctgtggtccaatagttaagtcataacaaagcaaaatgtagcaagaatctaaaatcctccataaactaaatcatagcagatcaaacacacacgaaatttatcaggaggtgccaccaccatgcctttcaatagcaaagatagctgaaatgaaataatctagaatcaattcaattctatctgaaacaatttcatttatgaatacaacattctaagacaattcatggagtcaaatgttgtagtgcaattgacttcaacgttggagcctaaggaagacatggtggtagcggtttggagtaaaaggagtgaaacagtaagtggtaggagctaattggagagtgagggatgtaaatgaatccaaacatcccctctatttatagattagattccaatttttttatatttatatttttttggtcttcaaaataaggtggatcaatcaaaacgtgacacatgactaaaaatgatcggtataatgtagcaatcggtaccaaccaatttagatctaatatggttggtacaggaccaaccaatcaatagacccattgatcgattaaactgaattacctacgtcactacttattacctcctcgcgttgaaaccagccttactcctttatttgctattgaaaccatcgagaagaaaatggaaggaagagggcgatagaagcggataattggcccctgccacaagtgtgcaggccgacgcaccttcggccttcaaggccccgcccacttgttgcgcactgggttgaatacaatgatacaaagctcggtggcttccactgttctgaattgtctgacccagaatcgtttggaactatcaattcagtactcacagctgacagctacatcaggcctcgttttgttcccgtcggaacgagtaccagaaatggcccttttaggtctaactgtctagccaggctaaccgaatggatctaattcctaaacaatatacattcacatccaagtagcctagcagacgagttgcactgtaaacatcaggctccagtgtactagaacttaaatgcggtatcgtttggatgtccatgtatcttttaatccatgtgtcatgaaatagtttagcctgtatctaacaccaaactatttcaacacatctggagtgagaggaatatatgaccatagccatccaaacaagccacgcatgtgtgcatctccatagcagaaacaaaggggaaaggaaggcttcggaaatctcctgacagcagtaatgagtcaaaagcacgcagaacggcagaaacagtttctgcctctggcgatgatgccgatcacctgacaacagtaatgagtgtaactgctagcctcttcaggaacgagaataaagaaattccttgtatacggcagatggtggttcgtgtgcctactccgtggcaatcagaaacggaagtcctctgaaaggagtaaagacacttcgatcaatttcaagcaccggaggtcaaccagtaaaacagaatccacttaagtcctgaccagtcaaatttggaacaaaggac

SEQ ID NO: 19524 - DNA, 2121 bp, Zea Mays
atgattctggcaaaaatgtgctgcaagtatttctaagtccaccaagtaaaaaagaacatagacttgcagcatacgttctgccctacatattctcaatcgcttcagtcagtcagtcttactagtagccagccattggcttcattttttagccaaagacaaacaggaggagggaggagggatggttctccttcgtccctggcacatcctcttcttcctcacatgcttctccccatcctttgttcatcctatggaaccaggcacctaccgttgctccaatgtttccatcccatatccttttggcgttgctgttgacacaaaacctcaataccgacatgttgtgctcgagtggtctgtgaacggcagcagctgtgaagaggcgaaactgtccggatcatacgcctgcgcagagaatgcctactgctacaactcatcaaacggaatcggttaccgctgcaattgctccagtggattcgaggggaacccatacctgcaagggccaaatggatgcacagatattaatgaatgcatcaccagaaatccgtgcaccaataggtgctcaaacacaataggtggtttccagtgcacgtgcccagcagggatgagcggcgacggcctcaaggaaggaagtggttgcaatggagtaagcacactagtgattgcaatagttgcaggattagctctgctagtgcttctcctcatccttggcttctggactcactggcttgttaagaagaggaaacttgcaaagacaaggcaaaggtacttcatgcaaaatggtggcctgatgctgaagcagcagatgttttctgaggaggcgccgctgcacatattcacctccagtgagcttgacaaggctaccagcaacttcagtgatgacaatattgtcggcagaggagggtttgggactgtgtacagaggcattctgtccaatcaagtggttgtggcgatcaagaaggcgcagcgagttgatcaaacccagacggaacaattcatcaacgagatgatcattctttcacaggcgaaccacaaaaacgtggtccagctattaggctgctgtctcgagactgaggttcccttattggtctatgagttcatcaccaacggggcccttttccaccatcttcacaatacgtcggtccccatgtcatgggagagccgtctaagcatcgcggttgagactgcgtcggcacttgcatacttgcacttagctgcaaagatgccaattattcacagagatgtcaagtcgtccaacatactcctagatgacaacttcactgccaaggtgtccgatttcggtgcctcaaggccaataccgcacaaccagacccatgtgacaacattggtgcaagggacactagggtacatggaccctgagtacttccagacaagccaactgactgagaagagtgatgtgtacagctttggcgtcgtactcatcgagctactgacaagaaagaagcctatcatggatgatatcgcggaagacattagaagcctagcgctgcaatttagtatgctattccatggaaataagctgttggaaatcgttgatcctgtagtagctgaagaagctggagtcagacatgttgaaacggtttcgaagttggcgttacgatgcttaaggttgaaaggggaagaacgcccaaggatgatagatgttgcgattgaacttgaagcactgagaaggctgatgaaacaacacttcatcttgaagaacgagtctttgcttcaggagtcatgttgcaatgaagaaatgagcatcgacgcaccatcaagtttgttccttggcgttgatggcatttctgacgatgaaggcatggagatcattccacttacatgtccatccaaaattctcacatcctatccctaactcgcaactatcacaaataaaaaggattttagctgacttctaccttctcaattgccaattccgtcttagtaatctcttcgtcttatgattagcttccaacgtaactacccggttaatggaatatgactgagttatttggcttatcgtcattcagctatgttctctttttgttcctcttgcagttcaaaaggcgatggtagtttcgctatgttggtatctctactgtatcgactgtcaacaaagaaatcaag

SEQ ID NO: 19525 - DNA, 2672 bp, Zea Mays
atgattctggcaaaaatgtgctgcaagtatttctaagtccaccaagtaaaaaagaacatagacttgcagcatacgttctgccctacatattctcaatcgcttcagtcagtcagtcttactagtagccagccattggcttcattttttagccaaagacaaacaggaggagggaggagggatggttctccttcgtccctggcacatcctcttcttcctcacatgcttctccccatcctttgttcatcctatggaaccaggcacctaccgttgctccaatgtttccatcccatatccttttggcgttgctggtaagagcccctccctgtcccgtggatttaaagttgtgtgtggacacagtggtccgttgctgtccatcggaaacagcatgcttgggattcttgacatctcgttgcttgatggtcttgtgagcatattggctagtgctagttctcagcagtgcataggaggggaggcgaactctagcgttaaccttgaggggaccgtcttcacattctcagacacaaggaacaagttcacagctctgggttgtaacgtggtggccatgcttttgaatggcagcacggggtatagcggtggctgtgcttccttttgctctagcggaaatagcatcatcgacggctcatgctctggtgtggcttgctgccaagcgcctgttcccaaagggctaaagaagctggacttagagttcagtaatattaatataaccaacagcggcatcgattacgggccatgtggtcaggccttcatcgtggagcagaattcatatgtgttttcacttcctgatctgaactacacagttgacacaaaacctcaataccgacatgttgtgctcgagtggtctgtgaacggcagcagctgtgaagaggcgaaactgtccggatcatacgcctgcgcagagaatgcctactgctacaactcatcaaacggaatcggttaccgctgcaattgctccagtggattcgaggggaacccatacctgcaagggccaaatggatgcacagatattaatgaatgcatcaccagaaatccgtgcaccaataggtgctcaaacacaataggtggtttccagtgcacgtgcccagcagggatgagcggcgacggcctcaaggaaggaagtggttgcaatggagtaagcacactagtgattgcaatagttgcaggattagctctgctagtgcttctcctcatccttggcttctggactcactggcttgttaagaagaggaaacttgcaaagacaaggcaaaggtacttcatgcaaaatggtggcctgatgctgaagcagcagatgttttctgaggaggcgccgctgcacatattcacctccagtgagcttgacaaggctaccagcaacttcagtgatgacaatattgtcggcagaggagggtttgggactgtgtacagaggcattctgtccaatcaagtggttgtggcgatcaagaaggcgcagcgagttgatcaaacccagacggaacaattcatcaacgagatgatcattctttcacaggcgaaccacaaaaacgtggtccagctattaggctgctgtctcgagactgaggttcccttattggtctatgagttcatcaccaacggggcccttttccaccatcttcacaatacgtcggtccccatgtcatgggagagccgtctaagcatcgcggttgagactgcgtcggcacttgcatacttgcacttagctgcaaagatgccaattattcacagagatgtcaagtcgtccaacatactcctagatgacaacttcactgccaaggtgtccgatttcggtgcctcaaggccaataccgcacaaccagacccatgtgacaacattggtgcaagggacactagggtacatggaccctgagtacttccagacaagccaactgactgagaagagtgatgtgtacagctttggcgtcgtactcatcgagctactgacaagaaagaagcctatcatggatgatatcgcggaagacattagaagcctagcgctgcaatttagtatgctattccatggaaataagctgttggaaatcgttgatcctgtagtagctgaagaagctggagtcagacatgttgaaacggtttcgaagttggcgttacgatgcttaaggttgaaaggggaagaacgcccaaggatgatagatgttgcgattgaacttgaagcactgagaaggctgatgaaacaacacttcatcttgaagaacgagtctttgcttcaggagtcatgttgcaatgaagaaatgagcatcgacgcaccatcaagtttgttccttggcgttgatggcatttctgacgatgaaggcatggagatcattccacttacatgtccatccaaaattctcacatcctatccctaactcgcaactatcacaaataaaaaggattttagctgacttctaccttctcaattgccaattccgtcttagtaatctcttcgtcttatgattagcttccaacgtaactacccggttaatggaatatgactgagttatttggcttatcgtcattcagctatgttctctttttgttcctcttgcagttcaaaaggcgatggtagtttcgctatgttggtatctctactgtatcgactgtcaacaaagaaatcaagacacatatgcaattgaaggattgaatatacgaccagagaag

SEQ ID NO: 19526 - DNA, 366 bp, Zea Mays
  misc_feature (365)..(366): n is a, c, g, or t
agaattcctcacgtcacctgcaactccaactgctgcacggcttcaccacgtttaactcccaggaaaacccccagccgtcacctgccccagcgttcgctctccatgtttcttagccccggcatccaccctatacttgctcgtttccaagttgtgctccagcgagcttctctgtagttcttccccaaccactcgctctcagcctgagtgtcctgcttcctcacgccaaagtagctcggccctctgcacccgccgtcgattctgcttatgtcctatcgtcttcaacctccggtctctgctcgttcttgcctagtagcaccgatactgtcgtcgtcgctgagctcttggcgcgccgtgacatcatcgtnn

SEQ ID NO: 19527 - DNA, 1377 bp, Zea Mays
aacccatgcacatgtcttaacatgtttggcttccgagcaaactttctccagaccccccaagaaaatgtaagatccgatcagatatgtgtcgatgctcatcccagcgtactcccattgcaacgcacgagcacacaactagttaactataaactctataaatgtaagctactttcgcagtagctttacggatcctgtaattacattattttatggactgagggagggaggagaggatcaataagccacgcgggccccaccatatcttcatccacaaagccaccaccaagctttttcatggtcgtcgctttccgctttcctttgctgctgaccatatatctacggtagcaagacaagacaaggaagtcggctgatccatggcggccttcacggtgcacacgagcgccgccacctcgccctactcgccggcgggcacggccatccttctccgaagccggagtcgagcctaccccaccgccaccatccgcgtgtcgtgctcgaagacggtggtgatcggggtggcggcggactcagggtgcgggaagaccacgttcacgcggcgcctggcgagcgtgttgggcggcggggcggagccaccgagggccggccggaacccgggctccaacacgctcgtcagcgacaccaccacggtgatctgcctggacgactaccactcgctggacagggtcgggcggaaggcgaagggcgtcacggcgctggatccgaggttcgtcgacttcgacctcatgtacgagcaggtgagggccatcaaggagggccgcgccgtcgagaaacccgtctacaaccacgtcaccggcctcctcgacccgcccgagctcatcaccccgccgaacatcctcgtcatcaaggggctgcacccaatgttcgacgagcgcgtgagggacctgctagatttcagcatctacctggacatcagcaacgaggtgaagcttgcatggaaaatccagagagacatgggagagcgtggtgggcacagccttgagagcatcaaggcctccatcgaggcaaggaagcccgacttcgaagcttacattggtgaaagcctgccggcaaccttgcatttgcacgccgaaaattcgcaagtcaaagtgcagagctgagtgctcctcttcttcctgctgctgtgcagagccgcagaagcagtacgcggacgccgtgatcgaggtcctgccgacgcagctgatcccgggcgacgacgagtgcaaggtggtgcgcgtgaagctgatcatgaaggaaggcgtggagcacttcgcccccgtgcacctcttcgacgaaggatccaccgtctactggatcccctgcggccggaagctctcctgctcctaccctggcatcagctagcgtttcagctcactgaca

SEQ ID NO: 19528 - DNA, 1876 bp, Zea Mays
aacccatgcacatgtcttaacatgtttggcttccgagcaaactttctccagaccccccaagaaaatgtaagatccgatcagatatgtgtcgatgctcatcccagcgtactcccattgcaacgcacgagcacacaactagttaactataaactctataaatgtaagctactttcgcagtagctttacggatcctgtaattacattattttatggactgagggagggaggagaggatcaataagccacgcgggccccaccatatcttcatccacaaagccaccaccaagctttttcatggtcgtcgctttccgctttcctttgctgctgaccatatatctacggtagcaagacaagacaaggaagtcggctgatccatggcggccttcacggtgcacacgagcgccgccacctcgccctactcgccggcgggcacggccatccttctccgaagccggagtcgagcctaccccaccgccaccatccgcgtgtcgtgctcgaagacggtggtgatcggggtggcggcggactcagggtgcgggaagaccacgttcacgcggcgcctggcgagcgtgttgggcggcggggcggagccaccgagggccggccggaacccgggctccaacacgctcgtcagcgacaccaccacggtgatctgcctggacgactaccactcgctggacagggtcgggcggaaggcgaagggcgtcacggcgctggatccgaggttcgtcgacttcgacctcatgtacgagcaggtgagggccatcaaggagggccgcgccgtcgagaaacccgtctacaaccacgtcaccggcctcctcgacccgcccgagctcatcaccccgccgaacatcctcgtcatcaaggggctgcacccaatgttcgacgagcgcgtgagggacctgctagatttcagcatctacctggacatcagcaacgaggtgaagcttgcatggaaaatccagagagacatgggagagcgtggtgggcacagccttgagagcatcaaggcctccatcgaggcaaggaagcccgacttcgaagcttacattgagccgcagaagcagtacgcggacgccgtgatcgaggtcctgccgacgcagctgatcccgggcgacgacgagtgcaaggtggtgcgcgtgaagctgatcatgaaggaaggcgtggagcacttcgcccccgtgcacctcttcgacgaaggatccaccgtctactggatcccctgcggccggaagctctcctgctcctaccctggcatcaggtgtcggtggtggagatggacgggcagttcgacaagctggacgagctcatctacgtggagacccacctgagcaacctgtcaaccaagttctacggggaggtgacgcagcagatgctcaggcacgccgacgtccccggcagcaacaacggcacggggctcttccagaccatcgtcgggctcaagatcagggacctctacgagcagatcgtcgcacgtcgctgaccatgacggccaaccctagcaaggtctcgtttttttgtcccatacaaacaatcaaacgcagaccgatacttgatcaatacatgtgcagagcctatttctgctcccacgggcaaccaaacacatcgattgtgttcgtgcgcatcagcacgggtgtagaatggataggcgtgtgtgtagttgtgtacaggctacacgcgtgtccggtccgatctttttgacagattcgtgcaatgtcgcgtgagttggtgtggatgtcggtacgtgggcattcttcttgcaaatgtccaggtcacactagatggagctgtctgtgttcaggaattctctgagagccgatctcttgggagctgagggcatatttgaggatacacatcttgagctgagagtcagctg

SEQ ID NO: 19529 - DNA, 2848 bp, Zea Mays
atttaagaagactgatctttgtctcaaaatcagagatgaaatgattataaagatgaatcagagcatcgcctgcctggatgaaaagaaacacacacacacacacaaagcgatcagtgcagtggtgaagacagtataagggcaaccaaactgttgataaaaaggtcttgaagtatatgtggaatttggcaacatatatgtggtgaccatgatgcaattgcagtgtgataactgaaagtttattcaccaaggaagaaaagtacctattagcacaacgttgattaataagactatatgtaatttgtgcttgaagggaagtcattccatattgcataatatgtattaataacaattaagtccaacgaactatgattctgtaccaacacaagtgagctagtttatgtaagaaacaatttccaccgactattagagttagaaaccaaagttgtgagcacaagcaaccagtatgtattcacaataggcatttatttctcaagcccaagagataaattaaagatacatcacattacaacagctatgacatgtttacacctagaaaatgtagtaggtgtgtagacaatcaaaactatagctagttagacaagagtatctgttatgtacgagtagtaaactaaagaaatttaactgtaggagtgtagtagaattgtaggaacataatacgcaggattcaaactattggtatgcacgcttagacactatcgcatgatgatgacctctcaacataattcacacacgcaaacacctcacccatttgaggttaccatctactctgcgcgctgcagcgcacagtattgaacttaaaagctaacggtcacaagtaaaaaggagccaggtagccctaaactgatcaagccgcacgctgtacgccagaatacaaccgactagggtcggtaaacgaaacgaaacatcattaatgatggaatcatgcggacctggacgacggcgagggcgaggaactgctccagcttgagggctggtttggtgaccggggatcccaagcggaagaaatccttttgctattcaaaattgaattgcaagggaattcctcccccatggatcccctagggatccctaatcaccaaatcagcccagggtgagctggtgccatagctttcgctggtacaggtcggcgagcgccgcgtaccattccgcgagctccggctgggtcgcgccctgcgcctccaggaactccaacgccgctgccatcgacagccaaagtcccccttttctttcgtcccggccaagaagacgagcacgggaagaaccgaagcacgaatgcacgacggaacgatctgctcggtcgcggtcgggctcgcaggcttcgcagcttctcaccgagcctgtatacacttgtatacttagaaggcccaacaccacccataaggcccacaagaggctgtagcgaagttggaatggatcactagtagagtagcaccagaaaggagtactccaccagaaagatagacacgtccgccgtctccgctccggttttcgctgtctcgctgccgtcctaggtttggagccaggtcaccggcgctaggagggcgtgaaatcgagtcgacggtcggcactcggcactcacgcgttctccacctactgctggcgctcctgtgaggcgacgccggaccggccaccccgcatgcgaacagcgcacggaccggccaccggtgtgacccctccatccaaggcttcagctccagaccgagccgccccgccaatcgccgtccgccgaaccgcctaggaatttgttttcctcatctaaagttactgcattgtattccatagaaatggctatggggttgattaatgctaatcctataatccatgagaaaaaagaaagacgcatccgacaggcaccagagaccacagatgaaaatgcggtagagtccatagaccagctggaaatatttgatcacattagagatataaaggatccagagcacccatactcactggaacagcttaatgtggtgactgaagactcaattgaactcaatgatgaaagcaatcatgtcagggttattttcaccccaacagtggagcactgcagtatggcaactattattggcctttgcatacgtgtgaaacttgtacggagtctccctccttattacaaggtggacataagggttgcccctggatcacacgcaactgaagctgctgtgaataagcaactgaatgacaaagaacgtgttgcggctgcattggaaaacccaaacctactggacatggttgaagagtgcttatcaccaacattcgattgaggtctcagttattgcacatctgggagccatggtgtttcatgttcagaagccacacaagcttattgccataggaattcactcctgaatattatatttgagggccatggtgtttcatgtgcatgattttttttgtcctccgtccctttgagttaatacaattgttatctttttggacatttgttggtgcttgtgacctccctgggcaaagggacatgtaatcagatcttgtgtagtagctttcagagcgtttccagtgccacgccattttgtggctgtgtacccccagtcaactgaacttgaccgtttcgcatgaagacgatacacttgcagcagcagcgcccaccaatgaacgcaatatactttcggtttcagtagcatgcaagcggaaagacgcaacagccttcaggcacagactgccagtaggaatagggacgaaaacggatcggtatcggaaccggtgtggtgtattatcgaccgtttcctttgtttatcggtttttgtcgaaaattaccggatttgtgtctcagaatttttcagaattgtgttttgaatcttttcagaatttt

SEQ ID NO: 19530 - DNA, 1352 bp, Zea Mays
gaggagctcatgatccgctaaatatagcgaacaggacggtttgcaggtccttgctggagacaggcacgagcgtggcctaggaggtgaggaccgagaggtgtcaaacctacaagtgctggcacaacagcacacatggttgtctcctcctttcaaagaaacggaatttgttttcctcatctaaagttactgcattgtattccatagaaatggctatggggttgattaatgctaatcctataatccatgagaaaaaagaaagacgcatccgacaggcaccagagaccacagatgaaaatgcggtagagtccatagaccagctggaaatatttgatcacattagagatataaaggatccagagcacccatactcactggaacagcttaatgtggtgactgaagactcaattgaactcaatgatgaaagcaatcatgtcagggttattttcaccccaacagtggagcactgcagtatggcaactattattggcctttgcatacgtgtgaaacttgtggacataagggttgcccctggatcacacgcaactgaagctgctgtgaataagcaactgaatgacaaagaacgtgttgcggctgcattggaaaacccaaacctactggacatggttgaagagtgcttatcaccaacattcgattgaggtctcagttattgcacatctgggagccatggtgtttcatgttcagaagccacacaagcttattgccataggaattcactcctgaatattatatttgagggccatggtgtttcatgtgcatgattttttttgtcctccgtccctttgagttaatacaattgttatctttttggacatttgttggtgcttgtgacctccctgggcaaagggacatgtaatcagatcttgtgtagtagctttcagagcgtttccagtgccacgccattttgtggctgtgtacccccagtcaactgaacttggtaggtgaatcctagaatcctcaagcacgagttgtttatgtctctatacgcaggaaatgttttatcttctcagctcaactgatcatgctaattatttggcttgattgcctcctgtttttcccactggcagaccgtttcgcatgaagacgatacacttgcagcagcagcgcccaccaatgaacgcaatatactttcggtttcagtagcatgcaagcggaaagacgcaacagccttcaggcacagactgccagtaggaatagggacgaaaacggatcggtatcggaaccggtgtggtgtattatcgaccgtttcctttgtttatcggtttttgtcgaaaattaccggatttgtgtctcagaatttttcagaattgtgttttgaatcttttcagaatttt

SEQ ID NO: 19531 - DNA, 1200 bp, Zea Mays
cttgctggagacaggcacgagcgtggcctaggaggtgaggaccgagaggtgtcaaacctacaagtgctggcacaacagcacacatggttgtctcctcctttcaaagaaacggaatttgttttcctcatctaaagttactgcattgtattccatagaaatggctatggggttgattaatgctaatcctataatccatgagaaaaaagaaagacgcatccgacaggcaccagagaccacagatgaaaatgcggtagagtccatagaccagctggaaatatttgatcacattagagatataaaggatccagagcacccatactcactggaacagcttaatgtggtgactgaagactcaattgaactcaatgatgaaagcaatcatgtcagggttattttcaccccaacagtggagcactgcagtatggcaactattattggcctttgcatacgtgtgaaacttgtacggagtctccctccttattacaaggtggacataagggttgcccctggatcacacgcaactgaagctgctgtgaataagcaactgaatgacaaagaacgtgttgcggctgcattggaaaacccaaacctactggacatggttgaagagtgcttatcaccaacattcgattgaggtctcagttattgcacatctgggagccatggtgtttcatgttcagaagccacacaagcttattgccataggaattcactcctgaatattatatttgagggccatggtgtttcatgtgcatgattttttttgtcctccgtccctttgagttaatacaattgttatctttttggacatttgttggtgcttgtgacctccctgggcaaagggacatgtaatcagatcttgtgtagtagctttcagagcgtttccagtgccacgccattttgtggctgtgtacccccagtcaactgaacttgaccgtttcgcatgaagacgatacacttgcagcagcagcgcccaccaatgaacgcaatatactttcggtttcagtagcatgcaagcggaaagacgcaacagccttcaggcacagactgccagtaggaatagggacgaaaacggatcggtatcggaaccggtgtggtgtattatcgaccgtttcctttgtttatcggtttttgtcgaaaattaccggatttgtgtctcagaatttttcagaattgtgttttgaatcttttcagaatttt

SEQ ID NO: 19532 - DNA, 1399 bp, Zea Mays
cttggccccaagtacctaacgaagtgctaatgctgatgctattgtttatgagggagaaggggaatctgcttttggaatttgttttcctcatctaaagttactgcattgtattccatagaaatggctatggggttgattaatgctaatcctataatccatgagaaaaaagaaagacgcatccgacaggcaccagagaccacagatgaaaatgcggtagagtccatagaccagctggaaatatttgatatccttcttaatgatttcccttatataaatgtagtgaagcttgccttttcatttatctgtgaatcctctatcctagcaatttggttgttgcggtccttaacgttcttacatcacattagagatataaaggatccagagcacccatactcactggaacagcttaatgtggtgactgaagactcaattgaactcaatgatgaaagcaatcatggttattttcaccccaacagtggagcactgcagtatggcaactattattggcctttgcatacgtgtgaaacttgtacggagtctccctccttattacaaggtggacataagggttgcccctggatcacacgcaactgaagctgctgtgaataagcaactgaatgacaaagaacgtgttgcggctgcattggaaaacccaaacctactggacatggttgaagagtgcttatcaccaacattcgattgaggtctcagttattgcacatctgggagccatggtgtttcatgttcagaagccacacaagcttattgccataggaattcactcctgaatattatatttgagggccatggtgtttcatgtgcatgattttttttgtcctccgtccctttgagttaatacaattgttatctttttggacatttgttggtgcttgtgacctccctgggcaaagggacatgtaatcagatcttgtgtagtagctttcagagcgtttccagtgccacgccattttgtggctgtgtacccccagtcaactgaacttggtaggtgaatcctagaatcctcaagcacgagttgtttatgtctctatacgcaggaaatgttttatcttctcagctcaactgatcatgctaattatttggcttgattgcctcctgtttttcccactggcagaccgtttcgcatgaagacgatacacttgcagcagcagcgcccaccaatgaacgcaatatactttcggtttcagtagcatgcaagcggaaagacgcaacagccttcaggcacagactgccagtaggaatagggacgaaaacggatcggtatcggaaccggtgtggtgtattatcgaccgtttcctttgtttatcggtttttgtcgaaaattaccggatttgtgtctcagaatttttcagaattgtgttttgaatcttttcagaatttt

SEQ ID NO: 19533 - DNA, 656 bp, Zea Mays
atctcaggaacccaaacagccgacggaatctcacctgctctgctctgctcgccggctccagcccatgccttcgctcttcgctgccccgagccctccgcgtcccgccgtcacccgcccgcgccgcgatgccggcgtgggcccaagcggcgctcgtgctcgcctcgccatcccccgcaaccgtctcctcgaccacgtcgacatttggcgtcaggccgctcgtcgccgtggaatcaagcaggttcttctgcaaggcactcgacctgttgagggctgcattggtctctcgcaatgcgctgaccctcgcctgcctgccgaccaaaccaaagagacggcctaatcatcgctagtagttccaaagacgggcagggagagttcttcttaatggcaatttcagttcattgcagtcttttgcacgtttccggaaagtatatgcattcatttgtggcgaatttgaacttgttccaggaaggcaattgaagtttgagtctgggctgagttttttttgtttgttaccttgtgtttgtcttcataggtctaatgtctttatatttatataaagtgctcagccctttatgacctgttggtttggatttaatccgtaccgacttctgacttctgattctacggtgttttgtctctatggtgcaacagtcaaa

SEQ ID NO: 19534 - DNA, 4561 bp, Zea Mays
ctggttcataccttatttttaagatctcattctagaattttgttacactacatccagttttccctgcagtaaatatcatttttagattcatttgagtctgccctcggtgttcttatctgcttgttggaccaggctgatatttgtgtattgtatgtcatgtgatattttggctggagaaggggactaagttctgtgttccttgctgtgtctgtgaacttgagcatgacagccacgtaggtgtgtccatgtgctgctggcgccctgggagtacatgcacactgagtttttgacaagtgcaggggcatatcccatagttcagctgcttaaagggcatagtctagtagagtttctctcctgccttaagctctaaccgatgaccacagtgaggatgtggtgattcttgtgctcatgccgcagatgtctcacctcactgtggccagcgcagttggagcagttgcaacccaaggccacgtcgccgcagaacgcagccgtggacagctccaccgctggccgtccaatccatgttgattccgactgatcttgcgcgagcactgaaggcgtggatcatcacctgcagtagtgcaagcagctcggtcaagggctcatcaaggatcggggtgcggatatatagcggtggcgagctgtcaacgtgcgaagcggtcggaatgcatgccagttgattgggacggagtacccgcgtttcgttgagtcgctcgggtctttcaaccatagcccggttttttatattgttttttatgcgggcacggggctagtacacataaaccatgtggcggaaacagggcactaccgtttactaaccattaaaccatgtggcggtttagtccaaccacaaatccagacaaagacccgacccgggcatctgaatcgatttaggccttgtttgtttgtgtcgaattgcacccggaatcgttccagctaatcaaagtttatataaattagaaaagcaatccgattaggaattgttccgacccaccaattcagtacaaacgaacaagaccttttttttcaaacacactagtttcatatatgtgctaccaaattagccgccgaccgcgtctggtggcagtaggcctgcaaatggggtgggtataaatgggtattttaggtgggtttaagaaatggttttgttttggtgggtttgtgatgggtttaattattaacgggttgggttgggtgggtttattttatattgcgggtcaaaatggtggatacacatgggtatagatggatttgtataggtatgagtttccatgggtattcaccaatcagactaccaccttaatcagtaccattttatttcaggtttagagaagtctttgatttctttagtcacacacaacacactatactatatcattttatcagtaccattttatttaaaaaatatgaccaactataaagttgtataactttttgatatctacaaattctattttaatagtttctacgtccgagaccgtttacaaaatttgaattttaaatttgaaaacttcacacgaatttttcaattataagatgatttcaaataaaaaagttgacaattacaaagtttcataacattgcaagacctacaacttttattttggtggtttttccatccgaggtagtttgaaaaattcaaaattcaaacatagttttgcatggcaagatgatttcaaaccaaaacattgtcaactacaaagtttcataactcttcaatacctacaactttcatgttggtggttttttatttcgaggttgttttcaaaattcaaattttaaattttttaaattcaggcatagttttcgttgacaatatgacttcaaataaaaaagttgtcaactacaaacttctataactttttacgatctacaaagtttattttggttgtttgatcatttgttcatctcacatgatagttctaacaatatgcacaaattctatacatatctctcgtagttccataaactatgagagagatataggttttatgaacaaatatatttttagtttatcatatgaagaaatgttcaaaatataaaatgtacatcatgatgagttatacaaatttgtagttgaaaactttttcatttgaattattttactgctttaaaatgtgatttttaaaatgtgtatgcagttggcttgatgtgagacaataagctaaacccacgggttttccatgggtttccacccaattacgggttggtttgggatcaataatgttattggatgggttgggtttaacttccctctagtattttttggttgggtgtgggatggatatcaaagtaattagatttgggtatgggtgggagtggattggattttttgccattagcaggcctaggtggcagtgcgaaagcagcgctgggcattgttgatccgagaggaggcaggcacggcagatgatatgctcccgacaagggctgctgcccgaaatcccttagctcaatcacgctgggacagtgcgccttgctggaaagggtctccgtcggcattaggaactcttcgtggtagatggccggtgatggagctgacgaccgtgacggtggagacatcttctttgaaggcaggaactttgctggtagtaggaactcggatccaagtgcatcttccttcttcgaacgcagtgacggccttgctggatcatttgtgccgccaaacggtatgtttcagacttccttgaaggcattgaattgtatgatttcagtcgttgccacgacatagtttaaattataatcaaatacttgtagagtttgacacaggatcacggtaatctaaaacatgtagcttcttgcaagtgatactcacctcaacatggcagtgttaaatagcaaaccaccaaaatataaacgatcaacatgatagaccaatagaggtagcatgtaggaatgtggtccggaggcccaaacacacacacacaagtatagatgaatttgtttttttaatttagcttagtttactgtattttagcatttgtttgaagaaactgttggagtatataccatatttcacctctatttttttaacatgcccctaataataatgttttggaaaaacttttttagcatctttctagagttgctcttaaactatttatcttgaatgtcttggttggctactacacatttaattagccgaagactccacactcttcgttgtgcaccaaggtatatatatataagcgaaaccattttttattaaggaaaatatagacgaaaccaatgtaaagggtgctatttatttattgtattagtgacgtcttttccagctctgttaaagaagcaacatgttaaagacacaataattgaacaaactttcgcaatagatggtctcgagaaagtttgctgcgatgtggtaccagaatataggttttgccaaaaccatatgccacttgcccacttcctcacccaaaattctacagtgctcatttttttttctctcccccttctcaagtttttcattcctggtttggaggatatacagttatacacaaatttaccatttccattagcaaagaaagacattgggctcaagcccagcccaaaccgatgggatcggtcgacaccaagcgaggcaggctgtgtagggcttggcattttaaaccccatgaaccgaatccgaacccgaatagatcgaattggtcggtttttcgggttcgatccacatatcgtacttattcggttatcgagttagggttcggtttttatatcgcgtaagccgaatgtaaaaaaaaaagaacacacaacagtcaccagtcagcccaatagccacttgcccacttaggaagaatatccaacagcgacgccgcccgagaccatcaccatccgcgcggcggagatgcccgaggaagagcagcgctcggggagaggagcggtggtggatccgtggtaagaaacggactgccgtaaaattacgaggattactgcggctaaatctgtcgtagatcgtataattccaaagttcaactaattataatactaaaattttaattattctgtttgagatacctattttcagaagtccagtatcgacgatatcacggttccaaaaaaaaaaaaagctcgtctccctgaccctgaccgcactaccgcagcccgcaggcagccgagaccgcccaggcgcccaccagccaacctagagcctctccactgctcggccgccgcctgccgcagcccgccatccactgctcccgcctcccggcgtccggcgttctgcttctgcgtaggcgcggctgcgctccagctccaactccggcgtccggcctactgctactgctccagctccagctcccagcttcccccgcccgcctatgtccagctccaactccagcgtccgctctagcttcggtgtaccgctccaactcccccgctgcagctccggccacaacgcaagagttcagactccagcgccgtcttcttcacggtcgccttttgcgctccatcccctgggctttccgtcacggtggccgcagccatggtggagatgcggcagcggaggaagccgctggtcctcgcctccacgcaggcgctcctcgactcgcttccgggggatcgc

SEQ ID NO: 19535 - DNA, 2776 bp, Zea Mays
ctgccttaagctctaaccgatgaccacagtgaggatgtggtgattcttgtgctcatgccgcagatgtctcacctcactgtggccagcgcagttggagcagttgcaacccaaggccacgtcgccgcagaacgcagccgtggacagctccaccgctggccgtccaatccatgttgattccgactgatcttgcgcgagcactgaaggcgtggatcatcacctgcagtagtgcaagcagctcggtcaagggctcatcaaggatcggggtgcggatatatagcggtggcgagctgtcaacgtgcgaagcggtcggaatgcatgccagttgattgggacggagtacccgcgtttcgttgagtcgctcgggtctttcaaccatagcccggttttttatattgttttttatgcgggcacggggctagtacacataaaccatgtggcggaaacagggcactaccgtttactaaccattaaaccatgtggcggtttagtccaaccacaaatccagacaaagacccgacccgggcatctgaatcgatttaggccttgtttgtttgtgtcgaattgcacccggaatcgttccagctaatcaaagtttatataaattagaaaagcaatccgattaggaattgttccgacccaccaattcagtacaaacgaacaagaccttttttttcaaacacactagtttcatatatgtgctaccaaattagccgccgaccgcgtctggtggcagtaggcctgcaaatggggtgggtataaatgggtattttaggtgggtttaagaaatggttttgttttggtgggtttgtgatgggtttaattattaacgggttgggttgggtgggtttattttatattgcgggtcaaaatggtggatacacatgggtatagatggatttgtataggtatgagtttccatgggtattcaccaatcagactaccaccttaatcagtaccattttatttcaggtttagagaagtctttgatttctttagtcacacacaacacactatactatatcattttatcagtaccattttatttaaaaaatatgaccaactataaagttgtataactttttgatatctacaaattctattttaatagtttctacgtccgagaccgtttacaaaatttgaattttaaatttgaaaacttcacacgaatttttcaattataagatgatttcaaataaaaaagttgacaattacaaagtttcataacattgcaagacctacaacttttattttggtggtttttccatccgaggtagtttgaaaaattcaaaattcaaacatagttttgcatggcaagatgatttcaaaccaaaacattgtcaactacaaagtttcataactcttcaatacctacaactttcatgttggtggttttttatttcgaggttgttttcaaaattcaaattttaaattttttaaattcaggcatagttttcgttgacaatatgacttcaaataaaaaagttgtcaactacaaacttctataactttttacgatctacaaagtttattttggttgtttgatcatttgttcatctcacatgatagttctaacaatatgcacaaattctatacatatctctcgtagttccataaactatgagagagatataggttttatgaacaaatatatttttagtttatcatatgaagaaatgttcaaaatataaaatgtacatcatgatgagttatacaaatttgtagttgaaaactttttcatttgaattattttactgctttaaaatgtgatttttaaaatgtgtatgcagttggcttgatgtgagacaataagctaaacccacgggttttccatgggtttccacccaattacgggttggtttgggatcaataatgttattggatgggttgggtttaacttccctctagtattttttggttgggtgtgggatggatatcaaagtaattagatttgggtatgggtgggagtggattggattttttgccattagcaggcctaggtggcagtgcgaaagcagcgctgggcattgttgatccgagaggaggcaggcacggcagatgatatgctcccgacaagggctgctgcccgaaatcccttagctcaatcacgctgggacagtgcgccttgctggaaagggtctccgtcggcattaggaactcttcgtggtagatggccggtgatggagctgacgaccgtgacggtggagacatcttctttgaaggcaggaactttgctggtagtaggaactcggatccaagtgcatcttccttcttcgaacgcagtgacggccttgctggatcatttgtgccgccaaacgcccgcaggcagccgagaccgcccaggcgcccaccagccaacctagagcctctccactgctcggccgccgcctgccgcagcccgccatccactgctcccgcctcccggcgtccggcgttctgcttctgcgtaggcgcggctgcgctccagctccaactccggcgtccggcctactgctactgctccagctccagctcccagcttcccccgcccgcctatgtccagctccaactccagcgtccgctctagcttcggtgtaccgctccaactcccccgctgcagctccggccacaacgcaagagttcagactccagcgccgtcttcttcacggtcgccttttgcgctccatcccctgggctttccgtcacggtggccgcagccatggtggagatgcggcagcggaggaagccgctggtcctcgcctccacgcaggcgctcctcgactcgcttccgggggatcgc

SEQ ID NO: 19536 - DNA, 3136 bp, Zea Mays
ctgccttaagctctaaccgatgaccacagtgaggatgtggtgattcttgtgctcatggtgatgctaaccctctcctcagtctcttagttggtcagttccaaagctatgtatgctgtcctcatgtgtccatgaccacagccgcagatgtctcacctcactgtggccagcgcagttggagcagttgcaacccaaggccacgtcgccgcagaacgcagccgtggacagctccaccgctggccgtccaatccatgttgattccgactgatcttgcgcgagcactgaaggcgtggtgagtcaccggtactccttgtatctttgattagagctctatcgtaggggatgcctcgggatcgagttgccgggccaagagggtcatcggcgtcgtgcccagcgtgggtgggtgtttggctcgggcatgaaagccttggagcttgttcacgttagtcatgggcgcatgcgaagacacatgcgaagagatgtgaaagtggagaacgtgcgaagggacacgtcccatgaccattcgtttcatgcgactagtacagtaataactgcttacatcatgtaacaggatcatcacctgcagtagtgcaagcagctcggtcaagggctcatcaaggatcggggtgcggatatatagcggtggcgagctgtcaacgtgcgaagcggtcggaatgcatgccagttgattgggacggagtacccgcgtttcgttgagtcgctcgggtctttcaaccatagcccggttttttatattgttttttatgcgggcacggggctagtacacataaaccatgtggcggaaacagggcactaccgtttactaaccattaaaccatgtggcggtttagtccaaccacaaatccagacaaagacccgacccgggcatctgaatcgatttaggccttgtttgtttgtgtcgaattgcacccggaatcgttccagctaatcaaagtttatataaattagaaaagcaatccgattaggaattgttccgacccaccaattcagtacaaacgaacaagaccttttttttcaaacacactagtttcatatatgtgctaccaaattagccgccgaccgcgtctggtggcagtaggcctgcaaatggggtgggtataaatgggtattttaggtgggtttaagaaatggttttgttttggtgggtttgtgatgggtttaattattaacgggttgggttgggtgggtttattttatattgcgggtcaaaatggtggatacacatgggtatagatggatttgtataggtatgagtttccatgggtattcaccaatcagactaccaccttaatcagtaccattttatttcaggtttagagaagtctttgatttctttagtcacacacaacacactatactatatcattttatcagtaccattttatttaaaaaatatgaccaactataaagttgtataactttttgatatctacaaattctattttaatagtttctacgtccgagaccgtttacaaaatttgaattttaaatttgaaaacttcacacgaatttttcaattataagatgatttcaaataaaaaagttgacaattacaaagtttcataacattgcaagacctacaacttttattttggtggtttttccatccgaggtagtttgaaaaattcaaaattcaaacatagttttgcatggcaagatgatttcaaaccaaaacattgtcaactacaaagtttcataactcttcaatacctacaactttcatgttggtggttttttatttcgaggttgttttcaaaattcaaattttaaattttttaaattcaggcatagttttcgttgacaatatgacttcaaataaaaaagttgtcaactacaaacttctataactttttacgatctacaaagtttattttggttgtttgatcatttgttcatctcacatgatagttctaacaatatgcacaaattctatacatatctctcgtagttccataaactatgagagagatataggttttatgaacaaatatatttttagtttatcatatgaagaaatgttcaaaatataaaatgtacatcatgatgagttatacaaatttgtagttgaaaactttttcatttgaattattttactgctttaaaatgtgatttttaaaatgtgtatgcagttggcttgatgtgagacaataagctaaacccacgggttttccatgggtttccacccaattacgggttggtttgggatcaataatgttattggatgggttgggtttaacttccctctagtattttttggttgggtgtgggatggatatcaaagtaattagatttgggtatgggtgggagtggattggattttttgccattagcaggcctaggtggcagtgcgaaagcagcgctgggcattgttgatccgagaggaggcaggcacggcagatgatatgctcccgacaagggctgctgcccgaaatcccttagctcaatcacgctgggacagtgcgccttgctggaaagggtctccgtcggcattaggaactcttcgtggtagatggccggtgatggagctgacgaccgtgacggtggagacatcttctttgaaggcaggaactttgctggtagtaggaactcggatccaagtgcatcttccttcttcgaacgcagtgacggccttgctggatcatttgtgccgccaaacgcccgcaggcagccgagaccgcccaggcgcccaccagccaacctagagcctctccactgctcggccgccgcctgccgcagcccgccatccactgctcccgcctcccggcgtccggcgttctgcttctgcgtaggcgcggctgcgctccagctccaactccggcgtccggcctactgctactgctccagctccagctcccagcttcccccgcccgcctatgtccagctccaactccagcgtccgctctagcttcggtgtaccgctccaactcccccgctgcagctccggccacaacgcaagagttcagactccagcgccgtcttcttcacggtcgccttttgcgctccatcccctgggctttccgtcacggtggccgcagccatggtggagatgcggcagcggaggaagccgctggtcctcgcctccacgcaggcgctcctcgactcgcttccgggggatcgc

SEQ ID NO: 19537 - DNA, 361 bp, Zea Mays
ccactctccgacggctcgcggtcgtcacgggtgcttgtcaagaatactgacaataatgttgggaggattgtcaaagcagtattgtttggtaacccgtcccttgacaagtcctgctcagaacatactgaccaagtggtctctggtcatgcaatgggcttcttaccttgtcgcacgttccctgctactggttttacatccatggatgaagatgttggttatgttagcccacttttggcattcaacttgggattgcctgtttcttgccttaaactacttattcaaagagaagggcagcctttcaagttctgttctcgagctgaagagatggatgcaactgccagttctggaagtgatctttctc

SEQ ID NO: 19538 - DNA, 368 bp, Zea Mays
acatggccttagcaagttcatctctgacataattcaggtgcttgtcaagaatactgacaataatgttgggaggattgtcaaagcagtattgtttggtaacccgtcccttgacaagtcctgctcagaacatactgaccaagtggtctctggtcatgcaatgggcttcttaccttgtcgcacgttccctgctactggttttacatccatggatgaagatgttggttatgttagcccacttttggcattcaacttgggattgcctgtttcttgccttaaactacttattcaaagagaagggcagcctttcaagttctgttctcgagctgaagagatggatgcaactgccagttctggaagtgatctttctc

SEQ ID NO: 19539 - DNA, 2493 bp, Zea Mays
cgtgctgcactgggcacacccaaagttcctaatgtcaaatgggaggatgttggtgggctagaggatgtgaaaaaggttattctagatactattcagttgcctctgatgtacaagcacctgttttcttctaaattgcgcaagcgatcaggtgtcctgctatatggacctccaggaacagggaagcgtcaaaggtccagaactgataaacatgtatgttggagaatcagagaaaaatgttcgggatatttttgagaaggtctgcacgcccatgtgtcattttctttgatgagcttgattccctcgctcctgcacgaggatcctcagcagattctggcggtgtcatggacagggttgtttcccagttacttgtggagatcgatgggttgagtgacaacagccaggaccttttcattattggggctaccaataggcctgaccttcttgattctgcccttcttcgccctggtcggtttgacaagcttctttatgtcggtgtaaatactgaggcatcatacagggaaaggatccttaaagcacagacgcgcaagtataagctgcacaagaacgtttctctcttgtcagttgcgcagcgttgtccaccaaacttcactggtgctgatatttacgcgctgtgtgcggatgcatggtttcatgcagcaaagcgatcagttgaaacattcgaaaccgatccttcaagaagtaatgacgccagtgccgaagaagtcattgtcgagatcgacgattttatcacagtgttaggagatatcgcaccgtcgctctctctggacgagctacaaaactatgaacagttgaggcagaagatcgaaggaccttctagatgaatgccagcagcgatgcctccttgttcgtgctcggcaagtcggccggtgtgagcaaaatccgtacgtcatcgtctccagtggtgccattctccgtggctctgcacacggtcggggactcggcggccttgctggatcatttgtgccgccaaacggtaaggaaggaggcaggcgaggatgtcgcaccgtaaattcgagcacccgaggcacggttcccttggcttcctccccaggaagcgatcctctcccgccaccgcggaaaggtgaagtccttcccgagggatgacccaaagaagccctgtcacctcaccgccttccttggctacaaggctggaatgacacacattgtggtgaggtcgagaagcctggctccaagctccacaagaaggaaacttgtgaggctgtgactatcattgagactcctccccttgtcattgtcggacttgtggaatgtgaagaccccccgtggcctacgaaccctcaactctgtctgggcccaacaccttagcgaagaagtgcggagaaggttctacaagaactggtgcaagagcaagaagaaggctttctccaagtatgccctcaaatacgacagcgacgcaggcaagaaagaaatccagttgcagcttgagaaaattagaaagatgaagggtttgaagcagaagaaggctcacctcatggagatccaggtcaacggtggcactatagcagacaaggtggactatggttacaagttctttgaggaggtccctgttgatgctgtgttccagaaggacgagatgatcgacatcatcggagttaccaagggcaagggttatgaaggcgtggtcactcgctggggtgttacccggcttccccgcaagacccacaggggcctccgcaaggttgcctgtatcggtgcatggcatcctgctagggtgtcgtacactgttgctcgtgctggtcagaacggataccatcaccgcactgagatgaacaagaaggtttacaagattggcaaggccggacaggaaagccatgacgcctcaactgagtttgacaggaccgagaaggacatcactcccatgggtggtttcccccactacggtatcatcaagggcgactacctgatgatcaagggttgctgcgtcggccccaagaaaagggtggtgactctccgccagtctctgctgaagcagacgtctcggttggccctggaggagatcaagctcaagttcatcgacacctcgtccaagtttggacatgggcgcttccagaccacagacgagaagcagaggttctttggcaagctcaaggcctgagttgctgatggtgtcaagcgaaatggaaatgtattaccagatagttttttgtttttcagattcagctttgttggagatatcataagaacatgtttgatttgctagtctgagttgattctattgcgggcggctgaagttatattacctaatgaactcgaaagtcagcttgctagttgcgtgactttacctgcgctagcacttgccaattttgatggaatctcaaatcttcccgcacgcaatatgctcttgctcaattcagccgtttttttactgtaatcgttgtcagcacatctgtctacagtgaattaacgctgtaattgttctgaatttttaaaacaattatcttattattccat

SEQ ID NO: 19540 - DNA, 2455 bp, Zea Mays
cgtgctgcactgggcacacccaaagttcctaatgtcaaatgggaggatgttggtgggctagaggatgtgaaaaaggttattctagatactattcagttgcctctgatgtacaagcacctgttttcttctaaattgcgcaagcgatcaggtgtcctgctatatggacctccaggaacagggaaggtccagaactgataaacatgtatgttggagaatcagagaaaaatgttcgggatatttttgagaagggttgtttcccagttacttgtggagatcgatgggttgagtgacaacagccaggaccttttcattattggggctaccaataggcctgaccttcttgattctgcccttcttcgccctggtcggtttgacaagcttctttatgtcggtgtaaatactgaggcatcatacagggaaaggatccttaaagcacagacgcgcaagtataagctgcacaagaacgtttctctcttgtcagttgcgcagcgttgtccaccaaacttcactggtgctgatatttacgcgctgtgtgcggatgcatggtttcatgcagcaaagcgatcagttgaaacattcgaaaccgatccttcaagaagtaatgacgccagtgccgaagaagtcattgtcgagatcgacgattttatcacagtgttaggagatatcgcaccgtcgctctctctggacgagctacaaaactatgaacagttgaggcagaagatcgaaggaccttctagatgaatgccagcagcgatgcctccttgttcgtgctcggcaagtcggccggtgtgagcaaaatccgtacgtcatcgtctccagtggtgccattctccgtggctctgcacacggtcggggactcggcggccttgctggatcatttgtgccgccaaacgggtttacctgctccgcctccgcccagccagcgccgccgccgctgccgctagcgctcccctcaggtaaggaaggaggcaggcgaggatgtcgcaccgtaaattcgagcacccgaggcacggttcccttggcttcctccccaggaagcgatcctctcccgccaccgcggaaaggtgaagtccttcccgagggatgacccaaagaagccctgtcacctcaccgccttccttggctacaaggctggaatgacacacattgtggtgaggtcgagaagcctggctccaagctccacaagaaggaaacttgtgaggctgtgactatcattgagactcctccccttgtcattgtcggacttgtggaatgtgaagaccccccgtggcctacgaaccctcaactctgtctgggcccaacaccttagcgaagaagtgcggagaaggttctacaagaactggtgcaagagcaagaagaaggctttctccaagtatgccctcaaatacgacagcgacgcaggcaagaaagaaatccagttgcagcttgagaaaattagaaagatgaagggtttgaagcagaagaaggctcacctcatggagatccaggtcaacggtggcactatagcagacaaggtggactatggttacaagttctttgaggaggtccctgttgatgctgtgttccagaaggacgagatgatcgacatcatcggagttaccaagggcaagggttatgaaggcgtggtcactcgctggggtgttacccggcttccccgcaagacccacaggggcctccgcaaggttgcctgtatcggtgcatggcatcctgctagggtgtcgtacactgttgctcgtgctggtcagaacggataccatcaccgcactgagatgaacaagaaggtttacaagattggcaaggccggacaggaaagccatgacgcctcaactgagtttgacaggaccgagaaggacatcactcccatgggtggtttcccccactacggtatcatcaagggcgactacctgatgatcaagggttgctgcgtcggccccaagaaaagggtggtgactctccgccagtctctgctgaagcagacgtctcggttggccctggaggagatcaagctcaagttcatcgacacctcgtccaagtttggacatgggcgcttccagaccacagacgagaagcagaggttctttggcaagctcaaggcctgagttgctgatggtgtcaagcgaaatggaaatgtattaccagatagttttttgtttttcagattcagctttgttggagatatcataagaacatgtttgatttgctagtctgagttgattctattgcgggcggctgaagttatattacctaatgaactcgaaagtcagcttgctagttgcgtgactttacctgcgctagcacttgccaattttgatggaatctcaaatcttcccgcacgcaatatgctcttgctcaattcagccgtttttttactgtaatcgttgtcagcacatctgtctacagtgaattaacgctgtaattgttctgaatttttaaaacaattatcttattattccat

SEQ ID NO: 19541 - DNA, 2464 bp, Zea Mays
cgtgctgcactgggcacacccaaagttcctaatgtcaaatgggaggatgttggtgggctagaggatgtgaaaaaggttattctagatactattcagttgcctctgatgtacaagcacctgttttcttctaaattgcgcaagcgatcaggtgtcctgctatatggacctccaggaacagggaagcgtcaaaggtccagaactgataaacatgtatgttggagaatcagagaaaaatgttcgggatatttttgagaaggtctgcacgcccatgtgtcattttctttgatgagcttgattccctcgctcctgcacgaggatcctcagcagattctggcggtgtcatggacagggttgtttcccagttacttgtggagatcgatgggttgagtgacaacagccaggcctgaccttcttgattctgcccttcttcgccctggtcggtttgacaagcttctttatgtcggtgtaaatactgaggcatcatacagggaaaggatccttaaagcacagacgcgcaagtataagctgcacaagaacgtttctctcttgtcagttgcgcagcgttgtccaccaaacttcactggtgctgatatttacgcgctgtgtgcggatgcatggtttcatgcagcaaagcgatcagttgaaacattcgaaaccgatccttcaagaagtaatgacgccagtgccgaagaagtcattgtcgagatcgacgattttatcacagtgttaggagatatcgcaccgtcgctctctctggacgagctacaaaactatgaacagttgaggcagaagatcgaaggaccttctagatgaatgccagcagcgatgcctccttgttcgtgctcggcaagtcggccggtgtgagcaaaatccgtacgtcatcgtctccagtggtgccattctccgtggctctgcacacggtcggggactcggcggccttgctggatcatttgtgccgccaaacggtaaggaaggaggcaggcgaggatgtcgcaccgtaaattcgagcacccgaggcacggttcccttggcttcctccccaggaagcgatcctctcccgccaccgcggaaaggtgaagtccttcccgagggatgacccaaagaagccctgtcacctcaccgccttccttggctacaaggctggaatgacacacattgtggtgaggtcgagaagcctggctccaagctccacaagaaggaaacttgtgaggctgtgactatcattgagactcctccccttgtcattgtcggacttgtggaatgtgaagaccccccgtggcctacgaaccctcaactctgtctgggcccaacaccttagcgaagaagtgcggagaaggttctacaagaactggtgcaagagcaagaagaaggctttctccaagtatgccctcaaatacgacagcgacgcaggcaagaaagaaatccagttgcagcttgagaaaattagaaagatgaagggtttgaagcagaagaaggctcacctcatggagatccaggtcaacggtggcactatagcagacaaggtggactatggttacaagttctttgaggaggtccctgttgatgctgtgttccagaaggacgagatgatcgacatcatcggagttaccaagggcaagggttatgaaggcgtggtcactcgctggggtgttacccggcttccccgcaagacccacaggggcctccgcaaggttgcctgtatcggtgcatggcatcctgctagggtgtcgtacactgttgctcgtgctggtcagaacggataccatcaccgcactgagatgaacaagaaggtttacaagattggcaaggccggacaggaaagccatgacgcctcaactgagtttgacaggaccgagaaggacatcactcccatgggtggtttcccccactacggtatcatcaagggcgactacctgatgatcaagggttgctgcgtcggccccaagaaaagggtggtgactctccgccagtctctgctgaagcagacgtctcggttggccctggaggagatcaagctcaagttcatcgacacctcgtccaagtttggacatgggcgcttccagaccacagacgagaagcagaggttctttggcaagctcaaggcctgagttgctgatggtgtcaagcgaaatggaaatgtattaccagatagttttttgtttttcagattcagctttgttggagatatcataagaacatgtttgatttgctagtctgagttgattctattgcgggcggctgaagttatattacctaatgaactcgaaagtcagcttgctagttgcgtgactttacctgcgctagcacttgccaattttgatggaatctcaaatcttcccgcacgcaatatgctcttgctcaattcagccgtttttttactgtaatcgttgtcagcacatctgtctacagtgaattaacgctgtaattgttctgaatttttaaaacaattatcttattattccat

SEQ ID NO: 19542 - DNA, 2399 bp, Zea Mays
gtgctgcactgggcacacccaaagttcctaatgtcaaatgggaggatgttggtgggctagaggatgtgaaaaaggttattctagatactattcagttgcctctgatgtacaagcacctgttttcttctaaattgcgcaagcgatcaggtgtcctgctatatggacctccaggaacagggaagcgtcaaaggtccagaactgataaacatgtatgttggagaatcagagaaaaatgttcgggatatttttgagaagggttgtttcccagttacttgtggagatcgatgggttgagtgacaacagccaggaccttttcattattggggctaccaataggcctgaccttcttgattctgcccttcttcgccctggtcggtttgacaagcttctttatgtcggtgtaaatactgaggcatcatacagggaaaggatccttaaagcacagacgcgcaagtataagctgcacaagaacgtttctctcttgtcagttgcgcagcgttgtccaccaaacttcactggtgctgatatttacgcgctgtgtgcggatgcatggtttcatgcagcaaagcgatcagttgaaacattcgaaaccgatccttcaagaagtaatgacgccagtgccgaagaagtcattgtcgagatcgacgattttatcacagtgttaggagatatcgcaccgtcgctctctctggacgagctacaaaactatgaacagttgaggcagaagatcgaaggaccttctagatgaatgccagcagcgatgcctccttgttcgtgctcggcaagtcggccggtgtgagcaaaatccgtacgtcatcgtctccagtggtgccattctccgtggctctgcacacggtcggggactcggcggccttgctggatcatttgtgccgccaaacggtaaggaaggaggcaggcgaggatgtcgcaccgtaaattcgagcacccgaggcacggttcccttggcttcctccccaggaagcgatcctctcccgccaccgcggaaaggtgaagtccttcccgagggatgacccaaagaagccctgtcacctcaccgccttccttggctacaaggctggaatgacacacattgtggtgaggtcgagaagcctggctccaagctccacaagaaggaaacttgtgaggctgtgactatcattgagactcctccccttgtcattgtcggacttgtggaatgtgaagaccccccgtggcctacgaaccctcaactctgtctgggcccaacaccttagcgaagaagtgcggagaaggttctacaagaactggtgcaagagcaagaagaaggctttctccaagtatgccctcaaatacgacagcgacgcaggcaagaaagaaatccagttgcagcttgagaaaattagaaagatgaagggtttgaagcagaagaaggctcacctcatggagatccaggtcaacggtggcactatagcagacaaggtggactatggttacaagttctttgaggaggtccctgttgatgctgtgttccagaaggacgagatgatcgacatcatcggagttaccaagggcaagggttatgaaggcgtggtcactcgctggggtgttacccggcttccccgcaagacccacaggggcctccgcaaggttgcctgtatcggtgcatggcatcctgctagggtgtcgtacactgttgctcgtgctggtcagaacggataccatcaccgcactgagatgaacaagaaggtttacaagattggcaaggccggacaggaaagccatgacgcctcaactgagtttgacaggaccgagaaggacatcactcccatgggtggtttcccccactacggtatcatcaagggcgactacctgatgatcaagggttgctgcgtcggccccaagaaaagggtggtgactctccgccagtctctgctgaagcagacgtctcggttggccctggaggagatcaagctcaagttcatcgacacctcgtccaagtttggacatgggcgcttccagaccacagacgagaagcagaggttctttggcaagctcaaggcctgagttgctgatggtgtcaagcgaaatggaaatgtattaccagatagttttttgtttttcagattcagctttgttggagatatcataagaacatgtttgatttgctagtctgagttgattctattgcgggcggctgaagttatattacctaatgaactcgaaagtcagcttgctagttgcgtgactttacctgcgctagcacttgccaattttgatggaatctcaaatcttcccgcacgcaatatgctcttgctcaattcagccgtttttttactgtaatcgttgtcagcacatctgtctacagtgaattaacgctgtaattgttctgaatttttaaaacaattatcttattattccat

SEQ ID NO: 19543 - DNA, 2531 bp, Zea Mays
gcactgggcacacccaaagttcctaatgtcaaatgggaggatgttggtgggctagaggatgtgaaaaaggttattctagatactattcagttgcctctgatgtacaagcacctgttttcttctaaattgcgcaagcgatcaggtgtcctgctatatggacctccaggaacagggaagagaaaaatgttcgggatatttttgagaagtttttcactgtcaatctcaggctaggtctgcacgcccatgtgtcattttctttgatgagcttgattccctcgctcctgcacgaggatcctcagcagattctggcggtgtcatggacagggttgtttcccagttacttgtggagatcgatgggttgagtgacaacagccaggaccttttcattattggggctaccaataggcctgaccttcttgattctgcccttcttcgccctggtcggtttgacaagcttctttatgtcggtgtaaatactgaggcatcatacagggaaaggatccttaaagcacagacgcgcaagtataagctgcacaagaacgtttctctcttgtcagttgcgcagcgttgtccaccaaacttcactggtgctgatatttacgcgctgtgtgcggatgcatggtttcatgcagcaaagcgatcagttgaaacattcgaaaccgatccttcaagaagtaatgacgccagtgccgaagaagtcattgtcgagatcgacgattttatcacagtgttaggagatatcgcaccgtcgctctctctggacgagctacaaaactatgaacagttgaggcagaagatcgaaggaccttctagatgaatgccagcagcgatgcctccttgttcgtgctcggcaagtcggccggtgtgagcaaaatccgtacgtcatcgtctccagtggtgccattctccgtggctctgcacacggtcggggactcggcggccttgctggatcatttgtgccgccaaacgggtttacctgctccgcctccgcccagccagcgccgccgccgctgccgctagcgctcccctcaggtaaggaaggaggcaggcgaggatgtcgcaccgtaaattcgagcacccgaggcacggttcccttggcttcctccccaggaagcgatcctctcccgccaccgcggaaaggtgaagtccttcccgagggatgacccaaagaagccctgtcacctcaccgccttccttggctacaaggctggaatgacacacattgtggtgaggtcgagaagcctggctccaagctccacaagaaggaaacttgtgaggctgtgactatcattgagactcctccccttgtcattgtcggacttgtggaatgtgaagaccccccgtggcctacgaaccctcaactctgtctgggcccaacaccttagcgaagaagtgcggagaaggttctacaagaactggtgcaagagcaagaagaaggctttctccaagtatgccctcaaatacgacagcgacgcaggcaagaaagaaatccagttgcagcttgagaaaattagaaagatgaagggtttgaagcagaagaaggctcacctcatggagatccaggtcaacggtggcactatagcagacaaggtggactatggttacaagttctttgaggaggtccctgttgatgctgtgttccagaaggacgagatgatcgacatcatcggagttaccaagggcaagggttatgaaggcgtggtcactcgctggggtgttacccggcttccccgcaagacccacaggggcctccgcaaggttgcctgtatcggtgcatggcatcctgctagggtgtcgtacactgttgctcgtgctggtcagaacggataccatcaccgcactgagatgaacaagaaggtttacaagattggcaaggccggacaggaaagccatgacgcctcaactgagtttgacaggaccgagaaggacatcactcccatgggtggtttcccccactacggtatcatcaagggcgactacctgatgatcaagggttgctgcgtcggccccaagaaaagggtggtgactctccgccagtctctgctgaagcagacgtctcggttggccctggaggagatcaagctcaagttcatcgacacctcgtccaagtttggacatgggcgcttccagaccacagacgagaagcagaggttctttggcaagctcaaggcctgagttgctgatggtgtcaagcgaaatggaaatgtattaccagatagttttttgtttttcagattcagctttgttggagatatcataagaacatgtttgatttgctagtctgagttgattctattgcgggcggctgaagttatattacctaatgaactcgaaagtcagcttgctagttgcgtgactttacctgcgctagcacttgccaattttgatggaatctcaaatcttcccgcacgcaatatgctcttgctcaattcagccgtttttttactgtaatcgttgtcagcacatctgtctacagtgaattaacgctgtaattgttctgaatttttaaaacaattatcttattattccat

SEQ ID NO: 19544 - DNA, 2512 bp, Zea Mays
gcactgggcacacccaaagttcctaatgtcaaatgggaggatgttggtgggctagaggatgtgaaaaaggttattctagatactattcagttgcctctgatgtacaagcacctgttttcttctaaattgcgcaagcgatcaggtgtcctgctatatggacctccaggaacagggaagcgtcaaaggtccagaactgataaacatgtatgttggagaatcagagaaaaatgttcgggatatttttgagaagtttttcactgtcaatctcaggctaggtctgcacgcccatgtgtcattttctttgatgagcttgattccctcgctcctgcacgaggatcctcagcagattctggcggtgtcatggacagggttgtttcccagttacttgtggagatcgatgggttgagtgacaacagccaggaccttttcattattggggctaccaataggcctgaccttcttgattctgcccttcttcgccctggtcggtttgacaagcttctttatgtcggtgtaaatactgaggcatcatacagggaaaggatccttaaagcacagacgcgcaagtataagctgcacaagaacgtttctctcttgtcagttgcgcagcgttgtccaccaaacttcactggtgctgatatttacgcgctgtgtgcggatgcatggtttcatgcagcaaagcgatcagttgaaacattcgaaaccgatccttcaagaagtaatgacgccagtgccgaagaagtcattgtcgagatcgacgattttatcacagtgttaggagatatcgcaccgtcgctctctctggacgagctacaaaactatgaacagttgaggcagaagatcgaaggaccttctagatgaatgccagcagcgatgcctccttgttcgtgctcggcaagtcggccggtgtgagcaaaatccgtacgtcatcgtctccagtggtgccattctccgtggctctgcacacggtcggggactcggcggccttgctggatcatttgtgccgccaaacggtaaggaaggaggcaggcgaggatgtcgcaccgtaaattcgagcacccgaggcacggttcccttggcttcctccccaggaagcgatcctctcccgccaccgcggaaaggtgaagtccttcccgagggatgacccaaagaagccctgtcacctcaccgccttccttggctacaaggctggaatgacacacattgtggtgaggtcgagaagcctggctccaagctccacaagaaggaaacttgtgaggctgtgactatcattgagactcctccccttgtcattgtcggacttgtggaatgtgaagaccccccgtggcctacgaaccctcaactctgtctgggcccaacaccttagcgaagaagtgcggagaaggttctacaagaactggtgcaagagcaagaagaaggctttctccaagtatgccctcaaatacgacagcgacgcaggcaagaaagaaatccagttgcagcttgagaaaattagaaagatgaagggtttgaagcagaagaaggctcacctcatggagatccaggtcaacggtggcactatagcagacaaggtggactatggttacaagttctttgaggaggtccctgttgatgctgtgttccagaaggacgagatgatcgacatcatcggagttaccaagggcaagggttatgaaggcgtggtcactcgctggggtgttacccggcttccccgcaagacccacaggggcctccgcaaggttgcctgtatcggtgcatggcatcctgctagggtgtcgtacactgttgctcgtgctggtcagaacggataccatcaccgcactgagatgaacaagaaggtttacaagattggcaaggccggacaggaaagccatgacgcctcaactgagtttgacaggaccgagaaggacatcactcccatgggtggtttcccccactacggtatcatcaagggcgactacctgatgatcaagggttgctgcgtcggccccaagaaaagggtggtgactctccgccagtctctgctgaagcagacgtctcggttggccctggaggagatcaagctcaagttcatcgacacctcgtccaagtttggacatgggcgcttccagaccacagacgagaagcagaggttctttggcaagctcaaggcctgagttgctgatggtgtcaagcgaaatggaaatgtattaccagatagttttttgtttttcagattcagctttgttggagatatcataagaacatgtttgatttgctagtctgagttgattctattgcgggcggctgaagttatattacctaatgaactcgaaagtcagcttgctagttgcgtgactttacctgcgctagcacttgccaattttgatggaatctcaaatcttcccgcacgcaatatgctcttgctcaattcagccgtttttttactgtaatcgttgtcagcacatctgtctacagtgaattaacgctgtaattgttctgaatttttaaaacaattatcttattattccat

SEQ ID NO: 19545 - DNA, 2544 bp, Zea Mays
ctgggcacacccaaagttcctaatgtcaaatgggaggatgttggtgggctagaggatgtgaaaaaggttattctagatactattcagttgcctctgatgtacaagcacctgttttcttctaaattgcgcaagcgatcaggtgtcctgctatatggacctccaggaacagggaaggtaggtttgaaaaggtttcatccggattcaattgtatttttgtttagctaccaataacaagtgcatccagaagaaacatgacacgagatcgctaaaataattgtcccttggacttctagactttacttgcgaaagcagtagcaacagaatgctcattgaactttcttagcgtcaaaggtccagaactgataaacatgtatgttggagaatcagagaaaaatgttcgggatatttttgagaaggtctgcacgcccatgtgtcattttctttgatgagcttgattccctcgctcctgcacgaggatcctcagcagattctggcggtgtcatggacagggttgtttcccagttacttgtggagatcgatgggttgagtgacaacagccaggaccttttcattattggggctaccaataggcctgaccttcttgattctgcccttcttcgccctggtcggtttgacaagcttctttatgtcggtgtaaatactgaggcatcatacagggaaaggatccttaaagcacagacgcgcaagtataagctgcacaagaacgtttctctcttgtcagttgcgcagcgttgtccaccaaacttcactggtgctgatatttacgcgctgtgtgcggatgcatggtttcatgcagcaaagcgatcagttgaaacattcgaaaccgatccttcaagaagtaatgacgccagtgccgaagaagtcattgtcgagatcgacgattttatcacagtgttaggagatatcgcaccgtcgctctctctggacgagctacaaaactatgaacagttgaggcagaagatcgaaggaccttctagatgaatgccagcagcgatgcctccttgttcgtgctcggcaagtcggccggtgtgagcaaaatccgtacgtcatcgtctccagtggtgccattctccgtggctctgcacacggtcggggactcggcggccttgctggatcatttgtgccgccaaacgtgaagtccttcccgagggatgacccaaagaagccctgtcacctcaccgccttccttggctacaaggctggaatgacacacattgtggtgaggtcgagaagcctggctccaagctccacaagaaggaaacttgtgaggctgtgactatcattgagactcctccccttgtcattgtcggacttgtggaatgtgaagaccccccgtggcctacgaaccctcaactctgtctgggcccaacaccttagcgaagaagtgcggagaaggttctacaagaactggtgcaagagcaagaagaaggctttctccaagtatgccctcaaatacgacagcgacgcaggcaagaaagaaatccagttgcagcttgagaaaattagaaagatgaagggtttgaagcagaagaaggctcacctcatggagatccaggtcaacggtggcactatagcagacaaggtggactatggttacaagttctttgaggaggtccctgttgatgctgtgttccagaaggacgagatgatcgacatcatcggagttaccaagggcaagggttatgaaggcgtggtcactcgctggggtgttacccggcttccccgcaagacccacaggggcctccgcaaggttgcctgtatcggtgcatggcatcctgctagggtgtcgtacactgttgctcgtgctggtcagaacggataccatcaccgcactgagatgaacaagaaggtttacaagattggcaaggccggacaggaaagccatgacgcctcaactgagtttgacaggaccgagaaggacatcactcccatgggtggtttcccccactacggtatcatcaagggcgactacctgatgatcaagggttgctgcgtcggccccaagaaaagggtggtgactctccgccagtctctgctgaagcagacgtctcggttggccctggaggagatcaagctcaagttcatcgacacctcgtccaagtttggacatgggcgcttccagaccacagacgagaagcagaggttctttggcaagctcaaggcctgagttgctgatggtgtcaagcgaaatggaaatgtattaccagatagttttttgtttttcagattcagctttgttggagatatcataagaacatgtttgatttgctagtctgagttgattctattgcgggcggctgaagttatattacctaatgaactcgaaagtcagcttgctagttgcgtgactttacctgcgctagcacttgccaattttgatggaatctcaaatcttcccgcacgcaatatgctcttgctcaattcagccgtttttttactgtaatcgttgtcagcacatctgtctacagtgaattaacgctgtaattgttctgaatttttaaaacaattatcttattattccat

SEQ ID NO: 19546 - DNA, 2240 bp, Zea Mays
cccaaagttcctaatgtcaaatgggaggatgttggtgggctagaggatgtgaaaaaggttattctagatactattcagttgcctctgatgtacaagcacctgttttcttctaaattgcgcaagcgatcaggtgtcctgctatatggacctccaggaacagggaagattctggcggtgtcatggacagggttgtttcccagttacttgtggagatcgatgggttgagtgacaacagccaggaccttttcattattggggctaccaataggcctgaccttcttgattctgcccttcttcgccctggtcggtttgacaagcttctttatgtcggtgtaaatactgaggcatcatacagggaaaggatccttaaagcacagacgcgcaagtataagctgcacaagaacgtttctctcttgtcagttgcgcagcgttgtccaccaaacttcactggtgctgatatttacgcgctgtgtgcggatgcatggtttcatgcagcaaagcgatcagttgaaacattcgaaaccgatccttcaagaagtaatgacgccagtgccgaagaagtcattgtcgagatcgacgattttatcacatgccagcagcgatgcctccttgttcgtgctcggcaagtcggccggtgtgagcaaaatccgtacgtcatcgtctccagtggtgccattctccgtggctctgcacacggtcggggactcggcggccttgctggatcatttgtgccgccaaacggtaaggaaggaggcaggcgaggatgtcgcaccgtaaattcgagcacccgaggcacggttcccttggcttcctccccaggaagcgatcctctcccgccaccgcggaaaggtgaagtccttcccgagggatgacccaaagaagccctgtcacctcaccgccttccttggctacaaggctggaatgacacacattgtggtgaggtcgagaagcctggctccaagctccacaagaaggaaacttgtgaggctgtgactatcattgagactcctccccttgtcattgtcggacttgtggaatgtgaagaccccccgtggcctacgaaccctcaactctgtctgggcccaacaccttagcgaagaagtgcggagaaggttctacaagaactggtgcaagagcaagaagaaggctttctccaagtatgccctcaaatacgacagcgacgcaggcaagaaagaaatccagttgcagcttgagaaaattagaaagatgaagggtttgaagcagaagaaggctcacctcatggagatccaggtcaacggtggcactatagcagacaaggtggactatggttacaagttctttgaggaggtccctgttgatgctgtgttccagaaggacgagatgatcgacatcatcggagttaccaagggcaagggttatgaaggcgtggtcactcgctggggtgttacccggcttccccgcaagacccacaggggcctccgcaaggttgcctgtatcggtgcatggcatcctgctagggtgtcgtacactgttgctcgtgctggtcagaacggataccatcaccgcactgagatgaacaagaaggtttacaagattggcaaggccggacaggaaagccatgacgcctcaactgagtttgacaggaccgagaaggacatcactcccatgggtggtttcccccactacggtatcatcaagggcgactacctgatgatcaagggttgctgcgtcggccccaagaaaagggtggtgactctccgccagtctctgctgaagcagacgtctcggttggccctggaggagatcaagctcaagttcatcgacacctcgtccaagtttggacatgggcgcttccagaccacagacgagaagcagaggttctttggcaagctcaaggcctgagttgctgatggtgtcaagcgaaatggaaatgtattaccagatagttttttgtttttcagattcagctttgttggagatatcataagaacatgtttgatttgctagtctgagttgattctattgcgggcggctgaagttatattacctaatgaactcgaaagtcagcttgctagttgcgtgactttacctgcgctagcacttgccaattttgatggaatctcaaatcttcccgcacgcaatatgctcttgctcaattcagccgtttttttactgtaatcgttgtcagcacatctgtctacagtgaattaacgctgtaattgttctgaatttttaaaacaattatcttattattccat

SEQ ID NO: 19547 - DNA, 2420 bp, Zea Mays
gttcctaatgtcaaatgggaggatgttggtgggctagaggatgtgaaaaaggttattctagatactattcagttgcctctgatgtacaagcacctgttttcttctaaattgcgcaagcgatcaggtgtcctgctatatggacctccaggaacagggaagactttacttgcgaaagcagtagcaacagaatgctcattgaactttcttagcgtcaaaggtccagaactgataaacatgtatgttggagaatcagagaaaaatgttcgggatatttttgagaagattctggcggtgtcatggacagggttgtttcccagttacttgtggagatcgatgggttgagtgacaacagccaggaccttttcattattggggctaccaataggcctgaccttcttgattctgcccttcttcgccctggtcggtttgacaagcttctttatgtcggtgtaaatactgaggcatcatacagggaaaggatccttaaagcacagacgcgcaagtataagctgcacaagaacgtttctctcttgtcagttgcgcagcgttgtccaccaaacttcactggtgctgatatttacgcgctgtgtgcggatgcatggtttcatgcagcaaagcgatcagttgaaacattcgaaaccgatccttcaagaagtaatgacgccagtgccgaagaagtcattgtcgagatcgacgattttatcacatgccagcagcgatgcctccttgttcgtgctcggcaagtcggccggtgtgagcaaaatccgtacgtcatcgtctccagtggtgccattctccgtggctctgcacacggtcggggactcggcggccttgctggatcatttgtgccgccaaacgggtttacctgctccgcctccgcccagccagcgccgccgccgctgccgctagcgctcccctcaggtaaggaaggaggcaggcgaggatgtcgcaccgtaaattcgagcacccgaggcacggttcccttggcttcctccccaggaagcgatcctctcccgccaccgcggaaaggtgaagtccttcccgagggatgacccaaagaagccctgtcacctcaccgccttccttggctacaaggctggaatgacacacattgtggtgaggtcgagaagcctggctccaagctccacaagaaggaaacttgtgaggctgtgactatcattgagactcctccccttgtcattgtcggacttgtggaatgtgaagaccccccgtggcctacgaaccctcaactctgtctgggcccaacaccttagcgaagaagtgcggagaaggttctacaagaactggtgcaagagcaagaagaaggctttctccaagtatgccctcaaatacgacagcgacgcaggcaagaaagaaatccagttgcagcttgagaaaattagaaagatgaagggtttgaagcagaagaaggctcacctcatggagatccaggtcaacggtggcactatagcagacaaggtggactatggttacaagttctttgaggaggtccctgttgatgctgtgttccagaaggacgagatgatcgacatcatcggagttaccaagggcaagggttatgaaggcgtggtcactcgctggggtgttacccggcttccccgcaagacccacaggggcctccgcaaggttgcctgtatcggtgcatggcatcctgctagggtgtcgtacactgttgctcgtgctggtcagaacggataccatcaccgcactgagatgaacaagaaggtttacaagattggcaaggccggacaggaaagccatgacgcctcaactgagtttgacaggaccgagaaggacatcactcccatgggtggtttcccccactacggtatcatcaagggcgactacctgatgatcaagggttgctgcgtcggccccaagaaaagggtggtgactctccgccagtctctgctgaagcagacgtctcggttggccctggaggagatcaagctcaagttcatcgacacctcgtccaagtttggacatgggcgcttccagaccacagacgagaagcagaggttctttggcaagctcaaggcctgagttgctgatggtgtcaagcgaaatggaaatgtattaccagatagttttttgtttttcagattcagctttgttggagatatcataagaacatgtttgatttgctagtctgagttgattctattgcgggcggctgaagttatattacctaatgaactcgaaagtcagcttgctagttgcgtgactttacctgcgctagcacttgccaattttgatggaatctcaaatcttcccgcacgcaatatgctcttgctcaattcagccgtttttttactgtaatcgttgtcagcacatctgtctacagtgaattaacgctgtaattgttctgaatttttaaaacaattatcttattattccat

SEQ ID NO: 19548 - DNA, 1610 bp, Zea Mays
cctaatgtcaaatgggaggatgttggtgggctagaggatgtgaaaaaggttattctagatactattcagttgcctctgatgtacaagcacctgttttcttctaaattgcgcaagcgatcaggtgtcctgctatatggacctccaggaacagggaagcgtcaaaggtccagaactgataaacatgtatgttggagaatcagagaaaaatggtcgggatatttttgagaaggctaggtctgcacgcccatgtgtcattttctttgatgagcttgattccctcgctcctgcacgaggatcctcagcagattctggcggtgtcatggacagggttgtttcccagttacttgtggagatcgatgggttgagtgacaacagccaggaccttttcattattggggctaccaataggcctgaccttcttgattctgcccttcttcgccttggtcggttcgacaagcttctttatgtcggtgtaaatactgaggcatcatacagggaaaggatccttaaagcacagacgcgcaagtataagctgcacaagaacgtttctctcttgtcagttgcacaagaatggtttcatgcagcaaagcgatcagtgagtatttctgccgacccgttacgccatatgttgggctcttcctagctttgctccgttgatcttgcgtgtggtattttttaggttgaaacattcgaaaccgatccttcaagaagtaatgacgccagtgccgaagaagtcatcgtcgagatcgacgattttatcacagtgttaggagatatcgcaccgtcgctctctctggacgagctacaaaactacgaacagttgaggcagaaggtcgaaggaccttctagatgaagttgggtttccactccctgctgacattcttaaactgctaacacaccaaaacattccctgtcttacattttcgtttgtacacaagttttcctccctgaaaacttgggcacttctatatccattcctgatttatacaatcacatccttgtagcagcatctgtattgacatcagaatgacattttctctgaagagaaacatcctgtcattctttgttagcagctctgcaactattctgaagcctttttttttttgcagatgatgcgaatcaactttgtatagttagtttcgtcgatgtacgcttgtaccatgttgtagtaaatgataaagagaataggagtccttggatcatctgctcgtttgaaccattcagttatcagccatcgaaaatagctgtctgctatattttttttcgtcagcgacgatctgtcaggatcagggacttttcattgcaacgagtgctaggtcattttttttgccaaactcaatttatgatatcccttgcttacgtgttatccaacttggtgattttagaaatgcttatcagtatggtagaaacacctcggctgcgcagattataggagtgagtatcaagttggctggacgagcgggagcgaaggggcgccgtgctgccgctcggctcacaggtgaggcagggaacaatcacttcttagattgatcaatgcttccaattgattacagacgcctggactttatagtccaactctaaacagactccttaatcttaggaactctaac

SEQ ID NO: 19549 - DNA, 1080 bp, Zea Mays
cctaatgtcaaatgggaggatgttggtgggctagaggatgtgaaaaaggttattctagatactattcaggttgcctctgatgtacaagcacctgttttcttctaaattgcgcaagcgatcaggtgtcctgctatatggacctccaggaacagggaagcgtcaaaggtccagaactgataaacatgtatgttggagaatcagagaaaaatggtcgggatatttttgagaaggctaggtctgcacgcccatgtgtcattttctttgatgagcttgattccctcgctcctgcacgaggatcctcagcagattctggcggtgtcatggacagggttgtttcccagttacttgtggagatcgatgggttgagtgacaacagccaggaccttttcattattggggctaccaataggcctgaccttcttgattctgcccttcttcgccttggtcggttcgacaagcttctttatgtcggtgtaaatactgaggcatcatacagggaaaggatccttaaagcacagacgcgcaagtataagctgcacaagaacgtttctctcttgtcagttgcacaagaatggtttcatgcagcaaagcgatcagtgagtatttctgccgacccgttacgccatatgttgggctcttcctagctttgctccgttgatcttgcgtgtggtattttttaggttgaaacattcgaaaccgatccttcaagaagtaatgacgccagtgccgaagaagtcatcgtcgagatcgacgattttatcacagtgttaggagatatcgcaccgtcgctctctctggacgagctacaaaactacgaacagttgaggcagaaggtcgaaggaccttctagatgaaaaatgcttatcagtatggtagaaacacctcggctgcgcagattataggagtgagtatcaagttggctggacgagcgggagcgaaggggcgccgtgctgccgctcggctcacaggtgaggcagggaacaatcacttcttagattgatcaatgcttccaattgattacagacgcctggactttatagtccaactctaaacagactccttaatcttaggaactctaac

SEQ ID NO: 19550 - DNA, 2531 bp, Zea Mays
ctaatgtcaaatgggaggatgttggtgggctagaggatgtgaaaaaggttattctagatactattcagttgcctctgatgtacaagcacctgttttcttctaaattgcgcaagcgatcaggtgtcctgctatatggacctccaggaacagggaaggtccagaactgataaacatgtatgttggagaatcagagaaaaatgttcgggatatttttgagaaggtacagaatttacacagccatgtaattgtgtgaaacgttcatagtttttttttcagtttttcactgtcaatctcaggctaggtctgcacgcccatgtgtcattttctttgatgagcttgattccctcgctcctgcacgaggatcctcagcagattctggcggtgtcatggacagggttgtttcccagttacttgtggagatcgatgggttgagtgacaacagccaggaccttttcattattggggctaccaataggcctgaccttcttgattctgcccttcttcgccctggtcggtttgacaagcttctttatgtcggtgtaaatactgaggcatcatacagggaaaggatccttaaagcacagacgcgcaagtataagctgcacaagaacgtttctctcttgtcagttgcgcagcgttgtccaccaaacttcactggtgctgatatttacgcgctgtgtgcggatgcatggtttcatgcagcaaagcgatcagttgaaacattcgaaaccgatccttcaagaagtaatgacgccagtgccgaagaagtcattgtcgagatcgacgattttatcacagagatatcgcaccgtcgctctctctggacgagctacaaaactatgaacagttgaggcagaagatcgaaggaccttctagatgaatgccagcagcgatgcctccttgttcgtgctcggcaagtcggccggtgtgagcaaaatccgtacgtcatcgtctccagtggtgccattctccgtggctctgcacacggtcggggactcggcggccttgctggatcatttgtgccgccaaacggtaaggaaggaggcaggcgaggatgtcgcaccgtaaattcgagcacccgaggcacggttcccttggcttcctccccaggaagcgatcctctcccgccaccgcggaaaggtgaagtccttcccgagggatgacccaaagaagccctgtcacctcaccgccttccttggctacaaggctggaatgacacacattgtggtgaggtcgagaagcctggctccaagctccacaagaaggaaacttgtgaggctgtgactatcattgagactcctccccttgtcattgtcggacttgtggaatgtgaagaccccccgtggcctacgaaccctcaactctgtctgggcccaacaccttagcgaagaagtgcggagaaggttctacaagaactggtgcaagagcaagaagaaggctttctccaagtatgccctcaaatacgacagcgacgcaggcaagaaagaaatccagttgcagcttgagaaaattagaaagatgaagggtttgaagcagaagaaggctcacctcatggagatccaggtcaacggtggcactatagcagacaaggtggactatggttacaagttctttgaggaggtccctgttgatgctgtgttccagaaggacgagatgatcgacatcatcggagttaccaagggcaagggttatgaaggcgtggtcactcgctggggtgttacccggcttccccgcaagacccacaggggcctccgcaaggttgcctgtatcggtgcatggcatcctgctagggtgtcgtacactgttgctcgtgctggtcagaacggataccatcaccgcactgagatgaacaagaaggtttacaagattggcaaggccggacaggaaagccatgacgcctcaactgagtttgacaggaccgagaaggacatcactcccatgggtggtttcccccactacggtatcatcaagggcgactacctgatgatcaagggttgctgcgtcggccccaagaaaagggtggtgactctccgccagtctctgctgaagcagacgtctcggttggccctggaggagatcaagctcaagttcatcgacacctcgtccaagtttggacatgggcgcttccagaccacagacgagaagcagaggttctttggcaagctcaaggcctgagttgctgatggtgtcaagcgaaatggaaatgtattaccagatagttttttgtttttcagattcagctttgttggagatatcataagaacatgtttgatttgctagtctgagttgattctattgcgggcggctgaagttatattacctaatgaactcgaaagtcagcttgctagttgcgtgactttacctgcgctagcacttgccaattttgatggaatctcaaatcttcccgcacgcaatatgctcttgctcaattcagccgtttttttactgtaatcgttgtcagcacatctgtctacagtgaattaacgctgtaattgttctgaatttttaaaacaattatcttattattccat

SEQ ID NO: 19551 - DNA, 2472 bp, Zea Mays
tgtcaaatgggaggatgttggtgggctagaggatgtgaaaaaggttattctagatactattcagttgcctctgatgtacaagcacctgttttcttctaaattgcgcaagcgatcaggtgtcctgctatatggacctccaggaacagggaagaactgataaacatgtatgttggagaatcagagaaaaatgttcgggatatttttgagaagtttttcactgtcaatctcaggctaggtctgcacgcccatgtgtcattttctttgatgagcttgattccctcgctcctgcacgaggatcctcagcagattctggcggtgtcatggacagggttgtttcccagttacttgtggagatcgatgggttgagtgacaacagccaggaccttttcattattggggctaccaataggcctgaccttcttgattctgcccttcttcgccctggtcggtttgacaagcttctttatgtcggtgtaaatactgaggcatcatacagggaaaggatccttaaagcacagacgcgcaagtataagctgcacaagaacgtttctctcttgtcagttgcgcagcgttgtccaccaaacttcactggtgctgatatttacgcgctgtgtgcggatgcatggtttcatgcagcaaagcgatcagttgaaacattcgaaaccgatccttcaagaagtaatgacgccagtgccgaagaagtcattgtcgagatcgacgattttatcacagtgttaggagatatcgcaccgtcgctctctctggacgagctacaaaactatgaacagttgaggcagaagatcgaaggaccttctagatgaatgccagcagcgatgcctccttgttcgtgctcggcaagtcggccggtgtgagcaaaatccgtacgtcatcgtctccagtggtgccattctccgtggctctgcacacggtcggggactcggcggccttgctggatcatttgtgccgccaaacggtaaggaaggaggcaggcgaggatgtcgcaccgtaaattcgagcacccgaggcacggttcccttggcttcctccccaggaagcgatcctctcccgccaccgcggaaaggtgaagtccttcccgagggatgacccaaagaagccctgtcacctcaccgccttccttggctacaaggctggaatgacacacattgtggtgaggtcgagaagcctggctccaagctccacaagaaggaaacttgtgaggctgtgactatcattgagactcctccccttgtcattgtcggacttgtggaatgtgaagaccccccgtggcctacgaaccctcaactctgtctgggcccaacaccttagcgaagaagtgcggagaaggttctacaagaactggtgcaagagcaagaagaaggctttctccaagtatgccctcaaatacgacagcgacgcaggcaagaaagaaatccagttgcagcttgagaaaattagaaagatgaagggtttgaagcagaagaaggctcacctcatggagatccaggtcaacggtggcactatagcagacaaggtggactatggttacaagttctttgaggaggtccctgttgatgctgtgttccagaaggacgagatgatcgacatcatcggagttaccaagggcaagggttatgaaggcgtggtcactcgctggggtgttacccggcttccccgcaagacccacaggggcctccgcaaggttgcctgtatcggtgcatggcatcctgctagggtgtcgtacactgttgctcgtgctggtcagaacggataccatcaccgcactgagatgaacaagaaggtttacaagattggcaaggccggacaggaaagccatgacgcctcaactgagtttgacaggaccgagaaggacatcactcccatgggtggtttcccccactacggtatcatcaagggcgactacctgatgatcaagggttgctgcgtcggccccaagaaaagggtggtgactctccgccagtctctgctgaagcagacgtctcggttggccctggaggagatcaagctcaagttcatcgacacctcgtccaagtttggacatgggcgcttccagaccacagacgagaagcagaggttctttggcaagctcaaggcctgagttgctgatggtgtcaagcgaaatggaaatgtattaccagatagttttttgtttttcagattcagctttgttggagatatcataagaacatgtttgatttgctagtctgagttgattctattgcgggcggctgaagttatattacctaatgaactcgaaagtcagcttgctagttgcgtgactttacctgcgctagcacttgccaattttgatggaatctcaaatcttcccgcacgcaatatgctcttgctcaattcagccgtttttttactgtaatcgttgtcagcacatctgtctacagtgaattaacgctgtaattgttctgaatttttaaaacaattatcttattattccat

SEQ ID NO: 19552 - DNA, 1513 bp, Zea Mays
ggtgggctagaggatgtgaaaaaggttattctagatactattcagttgcctctgatgtacaagcacctgttttcttctaaattgcgcaagcgatcaggtgtcctgctatatggacctccaggaacagggaaggctaggtctgcacgcccatgtgtcattttctttgatgagcttgattccctcgctcctgcacgaggatcctcagcagattctggcggtgtcatggacagggttgtttcccagttacttgtggagatcgatgggttgagtgacaacagccaggaccttttcattattggggctaccaataggcctgaccttcttgattctgcccttcttcgccttggtcggttcgacaagcttctttatgtcggtgtaaatactgaggcatcatacagggaaaggatccttaaagcacagacgcgcaagtataagctgcacaagaacgtttctctcttgtcagttgcacaagaatggtttcatgcagcaaagcgatcagtgagtatttctgccgacccgttacgccatatgttgggctcttcctagctttgctccgttgatcttgcgtgtggtattttttaggttgaaacattcgaaaccgatccttcaagaagtaatgacgccagtgccgaagaagtcatcgtcgagatcgacgattttatcacagtgttaggagatatcgcaccgtcgctctctctggacgagctacaaaactacgaacagttgaggcagaaggtcgaaggaccttctagatgaagttgggtttccactccctgctgacattcttaaactgctaacacaccaaaacattccctgtcttacattttcgtttgtacacaagttttcctccctgaaaacttgggcacttctatatccattcctgatttatacaatcacatccttgtagcagcatctgtattgacatcagaatgacattttctctgaagagaaacatcctgtcattctttgttagcagctctgcaactattctgaagcctttttttttttgcagatgatgcgaatcaactttgtatagttagtttcgtcgatgtacgcttgtaccatgttgtagtaaatgataaagagaataggagtccttggatcatctgctcgtttgaaccattcagttatcagccatcgaaaatagctgtctgctatattttttttcgtcagcgacgatctgtcaggatcagggacttttcattgcaacgagtgctaggtcattttttttgccaaactcaatttatgatatcccttgcttacgtgttatccaacttggtgattttagaaatgcttatcagtatggtagaaacacctcggctgcgcagattataggagtgagtatcaagttggctggacgagcgggagcgaaggggcgccgtgctgccgctcggctcacaggtgaggcagggaacaatcacttcttagattgatcaatgcttccaattgattacagacgcctggactttatagtccaactctaaacagactccttaatcttaggaactctaac

SEQ ID NO: 19553 - DNA, 2544 bp, Zea Mays
ctagaggatgtgaaaaaggttattctagatactattcagttgcctctgatgtacaagcacctgttttcttctaaattgcgcaagcgatcaggtgtcctgctatatggacctccaggaacagggaaggtccagaactgataaacatgtatgttggagaatcagagaaaaatgttcgggatatttttgagaaggtacagaatttacacagccatgtaattgtgtgaaacgttcatagtttttttttcagtttttcactgtcaatctcaggctaggtctgcacgcccatgtgtcattttctttgatgagcttgattccctcgctcctgcacgaggatcctcagcagattctggcggtgtcatggacagggttgtttcccagttacttgtggagatcgatgggttgagtgacaacagccaggaccttttcattattggggctaccaataggcctgaccttcttgattctgcccttcttcgccctggtcggtttgacaagcttctttatgtcggtgtaaatactgaggcatcatacagggaaaggatccttaaagcacagacgcgcaagtataagctgcacaagaacgtttctctcttgtcagttgcgcagcgttgtccaccaaacttcactggtgctgatatttacgcgctgtgtgcggatgcatggtttcatgcagcaaagcgatcagttgaaacattcgaaaccgatccttcaagaagtaatgacgccagtgccgaagaagtcattgtcgagatcgacgattttatcacatgccagcagcgatgcctccttgttcgtgctcggcaagtcggccggtgtgagcaaaatccgtacgtcatcgtctccagtggtgccattctccgtggctctgcacacggtcggggactcggcggccttgctggatcatttgtgccgccaaacgggtttacctgctccgcctccgcccagccagcgccgccgccgctgccgctagcgctcccctcagattctagaaatcgtcgtgtcctgatcctggatctaattgttttatcggaaatgattgcttcaggtaaggaaggaggcaggcgaggatgtcgcaccgtaaattcgagcacccgaggcacggttcccttggcttcctccccaggaagcgatcctctcccgccaccgcggaaaggtgaagtccttcccgagggatgacccaaagaagccctgtcacctcaccgccttccttggctacaaggctggaatgacacacattgtggtgaggtcgagaagcctggctccaagctccacaagaaggaaacttgtgaggctgtgactatcattgagactcctccccttgtcattgtcggacttgtggaatgtgaagaccccccgtggcctacgaaccctcaactctgtctgggcccaacaccttagcgaagaagtgcggagaaggttctacaagaactggtgcaagagcaagaagaaggctttctccaagtatgccctcaaatacgacagcgacgcaggcaagaaagaaatccagttgcagcttgagaaaattagaaagatgaagggtttgaagcagaagaaggctcacctcatggagatccaggtcaacggtggcactatagcagacaaggtggactatggttacaagttctttgaggaggtccctgttgatgctgtgttccagaaggacgagatgatcgacatcatcggagttaccaagggcaagggttatgaaggcgtggtcactcgctggggtgttacccggcttccccgcaagacccacaggggcctccgcaaggttgcctgtatcggtgcatggcatcctgctagggtgtcgtacactgttgctcgtgctggtcagaacggataccatcaccgcactgagatgaacaagaaggtttacaagattggcaaggccggacaggaaagccatgacgcctcaactgagtttgacaggaccgagaaggacatcactcccatgggtggtttcccccactacggtatcatcaagggcgactacctgatgatcaagggttgctgcgtcggccccaagaaaagggtggtgactctccgccagtctctgctgaagcagacgtctcggttggccctggaggagatcaagctcaagttcatcgacacctcgtccaagtttggacatgggcgcttccagaccacagacgagaagcagaggttctttggcaagctcaaggcctgagttgctgatggtgtcaagcgaaatggaaatgtattaccagatagttttttgtttttcagattcagctttgttggagatatcataagaacatgtttgatttgctagtctgagttgattctattgcgggcggctgaagttatattacctaatgaactcgaaagtcagcttgctagttgcgtgactttacctgcgctagcacttgccaattttgatggaatctcaaatcttcccgcacgcaatatgctcttgctcaattcagccgtttttttactgtaatcgttgtcagcacatctgtctacagtgaattaacgctgtaattgttctgaatttttaaaacaattatcttattattccat

SEQ ID NO: 19554 - DNA, 2262 bp, Zea Mays
aaaaaggttattctagatactattcagtcagttgcctctgatgtacaagcacctgttttcttctaaattgcgcaagcgatcaggtgtcctgctatatggacctccaggaacagggaagggttgtttcccagttacttgtggagatcgatgggttgagtgacaacagccaggaccttttcattattggggctaccaataggcctgaccttcttgattctgcccttcttcgccctggtcggtttgacaagcttctttatgtcggtgtaaatactgaggcatcatacagggaaaggatccttaaagcacagacgcgcaagtataagctgcacaagaacgtttctctcttgtcagttgcgcagcgttgtccaccaaacttcactggtgctgatatttacgcgctgtgtgcggatgcatggtttcatgcagcaaagcgatcagttgaaacattcgaaaccgatccttcaagaagtaatgacgccagtgccgaagaagtcattgtcgagatcgacgattttatcacagtgttaggagatatcgcaccgtcgctctctctggacgagctacaaaactatgaacagttgaggcagaagatcgaaggaccttctagatgaatgccagcagcgatgcctccttgttcgtgctcggcaagtcggccggtgtgagcaaaatccgtacgtcatcgtctccagtggtgccattctccgtggctctgcacacggtcggggactcggcggccttgctggatcatttgtgccgccaaacggtaaggaaggaggcaggcgaggatgtcgcaccgtaaattcgagcacccgaggcacggttcccttggcttcctccccaggaagcgatcctctcccgccaccgcggaaaggtgaagtccttcccgagggatgacccaaagaagccctgtcacctcaccgccttccttggctacaaggctggaatgacacacattgtggtgaggtcgagaagcctggctccaagctccacaagaaggaaacttgtgaggctgtgactatcattgagactcctccccttgtcattgtcggacttgtggaatgtgaagaccccccgtggcctacgaaccctcaactctgtctgggcccaacaccttagcgaagaagtgcggagaaggttctacaagaactggtgcaagagcaagaagaaggctttctccaagtatgccctcaaatacgacagcgacgcaggcaagaaagaaatccagttgcagcttgagaaaattagaaagatgaagggtttgaagcagaagaaggctcacctcatggagatccaggtcaacggtggcactatagcagacaaggtggactatggttacaagttctttgaggaggtccctgttgatgctgtgttccagaaggacgagatgatcgacatcatcggagttaccaagggcaagggttatgaaggcgtggtcactcgctggggtgttacccggcttccccgcaagacccacaggggcctccgcaaggttgcctgtatcggtgcatggcatcctgctagggtgtcgtacactgttgctcgtgctggtcagaacggataccatcaccgcactgagatgaacaagaaggtttacaagattggcaaggccggacaggaaagccatgacgcctcaactgagtttgacaggaccgagaaggacatcactcccatgggtggtttcccccactacggtatcatcaagggcgactacctgatgatcaagggttgctgcgtcggccccaagaaaagggtggtgactctccgccagtctctgctgaagcagacgtctcggttggccctggaggagatcaagctcaagttcatcgacacctcgtccaagtttggacatgggcgcttccagaccacagacgagaagcagaggttctttggcaagctcaaggcctgagttgctgatggtgtcaagcgaaatggaaatgtattaccagatagttttttgtttttcagattcagctttgttggagatatcataagaacatgtttgatttgctagtctgagttgattctattgcgggcggctgaagttatattacctaatgaactcgaaagtcagcttgctagttgcgtgactttacctgcgctagcacttgccaattttgatggaatctcaaatcttcccgcacgcaatatgctcttgctcaattcagccgtttttttactgtaatcgttgtcagcacatctgtctacagtgaattaacgctgtaattgttctgaatttttaaaacaattatcttattattccat

SEQ ID NO: 19555 - DNA, 2155 bp, Zea Mays
gcggtgtcatggacagggttgtttcccagttacttgtggagatcgatgggttgagtgacaacagccaggaccttttcattattggggctaccaataggcctgaccttcttgattctgcccttcttcgccctggtcggtttgacaagcttctttatgtcggtgtaaatactgaggcatcatacagggaaaggatccttaaagcacagacgcgcaagtataagctgcacaagaacgtttctctcttgtcagttgcgcagcgttgtccaccaaacttcactggtgctgatatttacgcgctgtgtgcggatgcatggtttcatgcagcaaagcgatcagttgaaacattcgaaaccgatccttcaagaagtaatgacgccagtgccgaagaagtcattgtcgagatcgacgattttatcacagtgttaggagatatcgcaccgtcgctctctctggacgagctacaaaactatgaacagttgaggcagaagatcgaaggaccttctagatgaatgccagcagcgatgcctccttgttcgtgctcggcaagtcggccggtgtgagcaaaatccgtacgtcatcgtctccagtggtgccattctccgtggctctgcacacggtcggggactcggcggccttgctggatcatttgtgccgccaaacggtaaggaaggaggcaggcgaggatgtcgcaccgtaaattcgagcacccgaggcacggttcccttggcttcctccccaggaagcgatcctctcccgccaccgcggaaaggtccttcccgagggatgacccaaagaagccctgtcacctcaccgccttccttggctacaaggctggaatgacacacattgtggtgaggtcgagaagcctggctccaagctccacaagaaggaaacttgtgaggctgtgactatcattgagactcctccccttgtcattgtcggacttgtggaatgtgaagaccccccgtggcctacgaaccctcaactctgtctgggcccaacaccttagcgaagaagtgcggagaaggttctacaagaactggtgcaagagcaagaagaaggctttctccaagtatgccctcaaatacgacagcgacgcaggcaagaaagaaatccagttgcagcttgagaaaattagaaagatgaagggtttgaagcagaagaaggctcacctcatggagatccaggtcaacggtggcactatagcagacaaggtggactatggttacaagttctttgaggaggtccctgttgatgctgtgttccagaaggacgagatgatcgacatcatcggagttaccaagggcaagggttatgaaggcgtggtcactcgctggggtgttacccggcttccccgcaagacccacaggggcctccgcaaggttgcctgtatcggtgcatggcatcctgctagggtgtcgtacactgttgctcgtgctggtcagaacggataccatcaccgcactgagatgaacaagaaggtttacaagattggcaaggccggacaggaaagccatgacgcctcaactgagtttgacaggaccgagaaggacatcactcccatgggtggtttcccccactacggtatcatcaagggcgactacctgatgatcaagggttgctgcgtcggccccaagaaaagggtggtgactctccgccagtctctgctgaagcagacgtctcggttggccctggaggagatcaagctcaagttcatcgacacctcgtccaagtttggacatgggcgcttccagaccacagacgagaagcagaggttctttggcaagctcaaggcctgagttgctgatggtgtcaagcgaaatggaaatgtattaccagatagttttttgtttttcagattcagctttgttggagatatcataagaacatgtttgatttgctagtctgagttgattctattgcgggcggctgaagttatattacctaatgaactcgaaagtcagcttgctagttgcgtgactttacctgcgctagcacttgccaattttgatggaatctcaaatcttcccgcacgcaatatgctcttgctcaattcagccgtttttttactgtaatcgttgtcagcacatctgtctacagtgaattaacgctgtaattgttctgaatttttaaaacaattatcttattattccat

SEQ ID NO: 19556 - DNA, 2086 bp, Zea Mays
gcggtgtcatggacagggttgtttcccagttacttgtggagatcgatgggttgagtgacaacagccaggaccttttcattattggggctaccaataggcctgaccttcttgattctgcccttcttcgccctggtcggtttgacaagcttctttatgtcggtgtaaatactgaggcatcatacagggaaaggatccttaaagcacagacgcgcaagtataagctgcacaagaacgtttctctcttgtcagttgcgcagcgttgtccaccaaacttcactggtgctgatatttacgcgctgtgtgcggatgcatggtttcatgcagcaaagcgatcagttgaaacattcgaaaccgatccttcaagaagtaatgacgccagtgccgaagaagtcattgtcgagatcgacgattttatcacatgccagcagcgatgcctccttgttcgtgctcggcaagtcggccggtgtgagcaaaatccgtacgtcatcgtctccagtggtgccattctccgtggctctgcacacggtcggggactcggcggccttgctggatcatttgtgccgccaaacgggtttacctgctccgcctccgcccagccagcgccgccgccgctgccgctagcgctcccctcagattctagaaatcgtcgtgtcctgatcctggatctaattgttttatcggaaatgattgcttcagtgaagtccttcccgagggatgacccaaagaagccctgtcacctcaccgccttccttggctacaaggctggaatgacacacattgtggtgaggtcgagaagcctggctccaagctccacaagaaggaaacttgtgaggctgtgactatcattgagactcctccccttgtcattgtcggacttgtggaatgtgaagaccccccgtggcctacgaaccctcaactctgtctgggcccaacaccttagcgaagaagtgcggagaaggttctacaagaactggtgcaagagcaagaagaaggctttctccaagtatgccctcaaatacgacagcgacgcaggcaagaaagaaatccagttgcagcttgagaaaattagaaagatgaagggtttgaagcagaagaaggctcacctcatggagatccaggtcaacggtggcactatagcagacaaggtggactatggttacaagttctttgaggaggtccctgttgatgctgtgttccagaaggacgagatgatcgacatcatcggagttaccaagggcaagggttatgaaggcgtggtcactcgctggggtgttacccggcttccccgcaagacccacaggggcctccgcaaggttgcctgtatcggtgcatggcatcctgctagggtgtcgtacactgttgctcgtgctggtcagaacggataccatcaccgcactgagatgaacaagaaggtttacaagattggcaaggccggacaggaaagccatgacgcctcaactgagtttgacaggaccgagaaggacatcactcccatgggtggtttcccccactacggtatcatcaagggcgactacctgatgatcaagggttgctgcgtcggccccaagaaaagggtggtgactctccgccagtctctgctgaagcagacgtctcggttggccctggaggagatcaagctcaagttcatcgacacctcgtccaagtttggacatgggcgcttccagaccacagacgagaagcagaggttctttggcaagctcaaggcctgagttgctgatggtgtcaagcgaaatggaaatgtattaccagatagttttttgtttttcagattcagctttgttggagatatcataagaacatgtttgatttgctagtctgagttgattctattgcgggcggctgaagttatattacctaatgaactcgaaagtcagcttgctagttgcgtgactttacctgcgctagcacttgccaattttgatggaatctcaaatcttcccgcacgcaatatgctcttgctcaattcagccgtttttttactgtaatcgttgtcagcacatctgtctacagtgaattaacgctgtaattgttctgaatttttaaaacaattatcttattattccat

SEQ ID NO: 19557 - DNA, 1266 bp, Zea Mays
gcggtgtcatggacagggttgtttcccagttacttgtggagatcgatgggttgagtgacaacagccaggaccttttcattattggggctaccaataggcctgaccttcttgattctgcccttcttcgccctggtcggtttgacaagcttctttatgtcggtgtaaatactgaggcatcatacagggaaaggatccttaaagcacagacgcgcaagtataagctgcacaagaacgtttctctcttgtcagttgcgcagcgttgtccaccaaacttcactggtgctgatatttacgcgctgtgtgcggatgcatggtttcatgcagcaaagcgatcagttgaaacattcgaaaccgatccttcaagaagtaatgacgccagtgccgaagaagtcattgtcgagatcgacgattttatcacagtgttaggagatatcgcaccgtcgctctctctggacgagctacaaaactacgaacagttgaggcagaaggtcgaaggaccttctagatgaagttgggtttccactccctgctgacattcttaaactgctaacacaccaaaacattccctgtcttacattttcgtttgtacacaagttttcctccctgaaaacttgggcacttctatatccattcctgatttatacaatcacatccttgtagcagcatctgtattgacatcagaatgacattttctctgaagagaaacatcctgtcattctttgttagcagctctgcaactattctgaagcctttttttttttgcagatgatgcgaatcaactttgtatagttagtttcgtcgatgtacgcttgtaccatgttgtagtaaatgataaagagaataggagtccttggatcatctgctcgtttgaaccattcagttatcagccatcgaaaatagctgtctgctatattttttttcgtcagcgacgatctgtcaggatcagggacttttcattgcaacgagtgctaggtcattttttttgccaaactcaatttatgatatcccttgcttacgtgttatccaacttggtgattttagaaatgcttatcagtatggtagaaacacctcggctgcgcagattataggagtgagtatcaagttggctggacgagcgggagcgaaggggcgccgtgctgccgctcggctcacaggtgaggcagggaacaatcacttcttagattgatcaatgcttccaattgattacagacgcctggactttatagtccaactctaaacagactccttaatcttaggaactctaac

SEQ ID NO: 19558 - DNA, 2250 bp, Zea Mays
caatcacatccttgtagcagcatctgcattgacatcagaatgacattttctctgaagagaaacatcctgtcattcttcgttagcagctctgcaactattttgaagccttttttttgcagatgatgcgaatcaactttgtatagttagtttcgttgatgtacgcctgtaccatgttgtagtaaatgataaagagaataggagtcctcggatcatctgctcgtttgaaccattcagtcatcagccatcgaaaatagctgtctgctatattttttttcgtcagcgacgatctgtcagggtcagggacttttcattgcaacgagtgggacgaacttgtccactgaaaatgatgaggcccgacccgaagggacgcatcaaatccgaatgagcctgtgaagtcaagcactcgaagccttatctgggaaacaaaatgctattcctgatctgacggaagcatccaccaatacagctagtttgggtacacacgctgaaccagctagttcgcctgggagaggtctctgtcttgtttacatgccatcgtctagaagttgtctcggaaaaattttaagcgaatgttgcaatgaacagagttccttttgttgctgtgatttgtcattggtcgaagaggactaactgcagcgtttgtctacctacaatacttgtttctttgttgttgctgtcttgtagtgccagcagcgatgcctccttgttcgtgctcggcaagtcggccggtgtgagcaaaatccgtacgtcatcgtctccagtggtgccattctccgtggctctgcacacggtcggggactcggcggccttgctggatcatttgtgccgccaaacggtaaggaaggaggcaggcgaggatgtcgcaccgtaaattcgagcacccgaggcacggttcccttggcttcctccccaggaagcgatcctctcccgccaccgcggaaaggtgaagtccttcccgagggatgacccaaagaagccctgtcacctcaccgccttccttggctacaaggctggaatgacacacattgtggtgaggtcgagaagcctggctccaaccccccgtggcctacgaaccctcaactctgtctgggcccaacaccttagcgaagaagtgcggagaaggttctacaagaactggtgcaagagcaagaagaaggctttctccaagtatgccctcaaatacgacagcgacgcaggcaagaaagaaatccagttgcagcttgagaaaattagaaagatgaagggtttgaagcagaagaaggctcacctcatggagatccaggtcaacggtggcactatagcagacaaggtggactatggttacaagttctttgaggaggtccctgttgatgctgtgttccagaaggacgagatgatcgacatcatcggagttaccaagggcaagggttatgaaggcgtggtcactcgctggggtgttacccggcttccccgcaagacccacaggggcctccgcaaggttgcctgtatcggtgcatggcatcctgctagggtgtcgtacactgttgctcgtgctggtcagaacggataccatcaccgcactgagatgaacaagaaggtttacaagattggcaaggccggacaggaaagccatgacgcctcaactgagtttgacaggaccgagaaggacatcactcccatgggtggtttcccccactacggtatcatcaagggcgactacctgatgatcaagggttgctgcgtcggccccaagaaaagggtggtgactctccgccagtctctgctgaagcagacgtctcggttggccctggaggagatcaagctcaagttcatcgacacctcgtccaagtttggacatgggcgcttccagaccacagacgagaagcagaggttctttggcaagctcaaggcctgagttgctgatggtgtcaagcgaaatggaaatgtattaccagatagttttttgtttttcagattcagctttgttggagatatcataagaacatgtttgatttgctagtctgagttgattctattgcgggcggctgaagttatattacctaatgaactcgaaagtcagcttgctagttgcgtgactttacctgcgctagcacttgccaattttgatggaatctcaaatcttcccgcacgcaatatgctcttgctcaattcagccgtttttttactgtaatcgttgtcagcacatctgtctacagtgaattaacgctgtaattgttctgaatttttaaaacaattatcttattattccat

SEQ ID NO: 19559 - DNA, 2161 bp, Zea Mays
caatcacatccttgtagcagcatctgcattgacatcagaatgacattttctctgaagagaaacatcctgtcattcttcgttagcagctctgcaactattttgaagccttttttttgcagatgatgcgaatcaactttgtatagttagtttcgttgatgtacgcctgtaccatgttgtagtaaatgataaagagaataggagtcctcggatcatctgctcgtttgaaccattcagtcatcagccatcgaaaatagctgtctgctatattttttttcgtcagcgacgatctgtcagggtcagggacttttcattgcaacgagtgggacgaacttgtccactgaaaatgatgaggcccgacccgaagggacgcatcaaatccgaatgagcctgtgaagtcaagcactcgaagccttatctgggaaacaaaatgctattcctgatctgacggaagcatccaccaatacagctagtttgggtacacacgctgaaccagctagttcgcctgggagagtgccagcagcgatgcctccttgttcgtgctcggcaagtcggccggtgtgagcaaaatccgtacgtcatcgtctccagtggtgccattctccgtggctctgcacacggtcggggactcggcggccttgctggatcatttgtgccgccaaacggtaaggaaggaggcaggcgaggatgtcgcaccgtaaattcgagcacccgaggcacggttcccttggcttcctccccaggaagcgatcctctcccgccaccgcggaaaggtgaagtccttcccgagggatgacccaaagaagccctgtcacctcaccgccttccttggctacaaggctggaatgacacacattgtggtgaggtcgagaagcctggctccaagctccacaagaaggaaacttgtgaggctgtgactatcattgagactcctccccttgtcattgtcggacttgtggaatgtgaagaccccccgtggcctacgaaccctcaactctgtctgggcccaacaccttagcgaagaagtgcggagaaggttctacaagaactggtgcaagagcaagaagaaggctttctccaagtatgccctcaaatacgacagcgacgcaggcaagaaagaaatccagttgcagcttgagaaaattagaaagatgaagggtttgaagcagaagaaggctcacctcatggagatccaggtcaacggtggcactatagcagacaaggtggactatggttacaagttctttgaggaggtccctgttgatgctgtgttccagaaggacgagatgatcgacatcatcggagttaccaagggcaagggttatgaaggcgtggtcactcgctggggtgttacccggcttccccgcaagacccacaggggcctccgcaaggttgcctgtatcggtgcatggcatcctgctagggtgtcgtacactgttgctcgtgctggtcagaacggataccatcaccgcactgagatgaacaagaaggtttacaagattggcaaggccggacaggaaagccatgacgcctcaactgagtttgacaggaccgagaaggacatcactcccatgggtggtttcccccactacggtatcatcaagggcgactacctgatgatcaagggttgctgcgtcggccccaagaaaagggtggtgactctccgccagtctctgctgaagcagacgtctcggttggccctggaggagatcaagctcaagttcatcgacacctcgtccaagtttggacatgggcgcttccagaccacagacgagaagcagaggttctttggcaagctcaaggcctgagttgctgatggtgtcaagcgaaatggaaatgtattaccagatagttttttgtttttcagattcagctttgttggagatatcataagaacatgtttgatttgctagtctgagttgattctattgcgggcggctgaagttatattacctaatgaactcgaaagtcagcttgctagttgcgtgactttacctgcgctagcacttgccaattttgatggaatctcaaatcttcccgcacgcaatatgctcttgctcaattcagccgtttttttactgtaatcgttgtcagcacatctgtctacagtgaattaacgctgtaattgttctgaatttttaaaacaattatcttattattccat

SEQ ID NO: 19560 - DNA, 2397 bp, Zea Mays
caatcacatccttgtagcagcatctgcattgacatcagaatgacattttctctgaagagaaacatcctgtcattcttcgttagcagctctgcaactattttgaagccttttttttgcagatgatgcgaatcaactttgtatagttagtttcgttgatgtacgcctgtaccatgttgtagtaaatgataaagagaataggagtcctcggatcatctgctcgtttgaaccattcagtcatcagccatcgaaaatagctgtctgctatattttttttcgtcagcgacgatctgtcagggtcagggacttttcattgcaacgagtgggacgaacttgtccactgaaaatgatgaggcccgacccgaagggacgcatcaaatccgaatgagcctgtgaagtcaagcactcgaagccttatctgggaaacaaaatgctattcctgatctgacggaagcatccaccaatacagctagtttgggtacacacgctgaaccagctagttcgcctgggagaggtctctgtcttgtttacatgccatcgtctagaagttgtctcggaaaaattttaagcgaatgttgcaatgaacagagttccttttgttgctgtgatttgtcattggtcgaagaggactaactgcagcgtttgtctacctacaatacttgtttctttgttgttgctgtcttgtagtgccagcagcgatgcctccttgttcgtgctcggcaagtcggccggtgtgagcaaaatccgtacgtcatcgtctccagtggtgccattctccgtggctctgcacacggtcggggactcggcggccttgctggatcatttgtgccgccaaacgggtttacctgctccgcctccgcccagccagcgccgccgccgctgccgctagcgctcccctcaggtaaggaaggaggcaggcgaggatgtcgcaccgtaaattcgagcacccgaggcacggttcccttggcttcctccccaggaagcgatcctctcccgccaccgcggaaaggtgaagtccttcccgagggatgacccaaagaagccctgtcacctcaccgccttccttggctacaaggctggaatgacacacattgtggtgaggtcgagaagcctggctccaagctccacaagaaggaaacttgtgaggctgtgactatcattgagactcctccccttgtcattgtcggacttgtggaatgtgaagaccccccgtggcctacgaaccctcaactctgtctgggcccaacaccttagcgaagaagtgcggagaaggttctacaagaactggtgcaagagcaagaagaaggctttctccaagtatgccctcaaatacgacagcgacgcaggcaagaaagaaatccagttgcagcttgagaaaattagaaagatgaagggtttgaagcagaagaaggctcacctcatggagatccaggtcaacggtggcactatagcagacaaggtggactatggttacaagttctttgaggaggtccctgttgatgctgtgttccagaaggacgagatgatcgacatcatcggagttaccaagggcaagggttatgaaggcgtggtcactcgctggggtgttacccggcttccccgcaagacccacaggggcctccgcaaggttgcctgtatcggtgcatggcatcctgctagggtgtcgtacactgttgctcgtgctggtcagaacggataccatcaccgcactgagatgaacaagaaggtttacaagattggcaaggccggacaggaaagccatgacgcctcaactgagtttgacaggaccgagaaggacatcactcccatgggtggtttcccccactacggtatcatcaagggcgactacctgatgatcaagggttgctgcgtcggccccaagaaaagggtggtgactctccgccagtctctgctgaagcagacgtctcggttggccctggaggagatcaagctcaagttcatcgacacctcgtccaagtttggacatgggcgcttccagaccacagacgagaagcagaggttctttggcaagctcaaggcctgagttgctgatggtgtcaagcgaaatggaaatgtattaccagatagttttttgtttttcagattcagctttgttggagatatcataagaacatgtttgatttgctagtctgagttgattctattgcgggcggctgaagttatattacctaatgaactcgaaagtcagcttgctagttgcgtgactttacctgcgctagcacttgccaattttgatggaatctcaaatcttcccgcacgcaatatgctcttgctcaattcagccgtttttttactgtaatcgttgtcagcacatctgtctacagtgaattaacgctgtaattgttctgaatttttaaaacaattatcttattattccat

SEQ ID NO: 19561 - DNA, 2124 bp, Zea Mays
aatcacatccttgtagcagcatctgcattgacatcagaatgacattttctctgaagagaaacatcctgtcattcttcgttagcagctctgcaactattttgaagccttttttttgcagatgatgcgaatcaactttgtatagttagtttcgttgatgtacgcctgtaccatgttgtagtaaatgataaagagaataggagtcctcggatcatctgctcgtttgaaccattcagtcatcagccatcgaaaatagctgtctgctatattttttttcgtcagcgacgatctgtcagggtcagggacttttcattgcaacgagtgggacgaacttgtccactgaaaatgatgaggcccgacccgaagggacgcatcaaatccgaatgagcctgtgaagtcaagcactcgaagccttatctgggaaacaaaatgctattcctgatctgacggaagcatccaccaatacagctagtttggtgccagcagcgatgcctccttgttcgtgctcggcaagtcggccggtgtgagcaaaatccgtacgtcatcgtctccagtggtgccattctccgtggctctgcacacggtcggggactcggcggccttgctggatcatttgtgccgccaaacggtaaggaaggaggcaggcgaggatgtcgcaccgtaaattcgagcacccgaggcacggttcccttggcttcctccccaggaagcgatcctctcccgccaccgcggaaaggtgaagtccttcccgagggatgacccaaagaagccctgtcacctcaccgccttccttggctacaaggctggaatgacacacattgtggtgaggtcgagaagcctggctccaagctccacaagaaggaaacttgtgaggctgtgactatcattgagactcctccccttgtcattgtcggacttgtggaatgtgaagaccccccgtggcctacgaaccctcaactctgtctgggcccaacaccttagcgaagaagtgcggagaaggttctacaagaactggtgcaagagcaagaagaaggctttctccaagtatgccctcaaatacgacagcgacgcaggcaagaaagaaatccagttgcagcttgagaaaattagaaagatgaagggtttgaagcagaagaaggctcacctcatggagatccaggtcaacggtggcactatagcagacaaggtggactatggttacaagttctttgaggaggtccctgttgatgctgtgttccagaaggacgagatgatcgacatcatcggagttaccaagggcaagggttatgaaggcgtggtcactcgctggggtgttacccggcttccccgcaagacccacaggggcctccgcaaggttgcctgtatcggtgcatggcatcctgctagggtgtcgtacactgttgctcgtgctggtcagaacggataccatcaccgcactgagatgaacaagaaggtttacaagattggcaaggccggacaggaaagccatgacgcctcaactgagtttgacaggaccgagaaggacatcactcccatgggtggtttcccccactacggtatcatcaagggcgactacctgatgatcaagggttgctgcgtcggccccaagaaaagggtggtgactctccgccagtctctgctgaagcagacgtctcggttggccctggaggagatcaagctcaagttcatcgacacctcgtccaagtttggacatgggcgcttccagaccacagacgagaagcagaggttctttggcaagctcaaggcctgagttgctgatggtgtcaagcgaaatggaaatgtattaccagatagttttttgtttttcagattcagctttgttggagatatcataagaacatgtttgatttgctagtctgagttgattctattgcgggcggctgaagttatattacctaatgaactcgaaagtcagcttgctagttgcgtgactttacctgcgctagcacttgccaattttgatggaatctcaaatcttcccgcacgcaatatgctcttgctcaattcagccgtttttttactgtaatcgttgtcagcacatctgtctacagtgaattaacgctgtaattgttctgaatttttaaaacaattatcttattattccat

SEQ ID NO: 19562 - DNA, 2224 bp, Zea Mays
aatcacatccttgtagcagcatctgcattgacatcagaatgacattttctctgaagagaaacatcctgtcattcttcgttagcagctctgcaactattttgaagccttttttttgcagatgatgcgaatcaactttgtatagttagtttcgttgatgtacgcctgtaccatgttgtagtaaatgataaagagaataggagtcctcggatcatctgctcgtttgaaccattcagtcatcagccatcgaaaatagctgtctgctatattttttttcgtcagcgacgatctgtcagggtcagggacttttcattgcaacgagtgggacgaacttgtccactgaaaatgatgaggcccgacccgaagggacgcatcaaatccgaatgagcctgtgaagtcaagcactcgaagccttatctgggaaacaaaatgctattcctgatctgacggaagcatccaccaatacagctagtttgggtacacacgctgaaccagctagttcgcctgggagaggtctctgtcttgtttacatgccatcgtctagaagttgtctcggaaaaattttaagcgaatgttgcaatgaacagagttccttttgttgctgtgatttgtcattggtcgaagaggactaactgcagcgtttgtctacctacaatacttgtttctttgttgttgctgtcttgtagtgccagcagcgatgcctccttgttcgtgctcggcaagtcggccggtgtgagcaaaatccgtacgtcatcgtctccagtggtgccattctccgtggctctgcacacggtcggggactcggcggccttgctggatcatttgtgccgccaaacgtgaagtccttcccgagggatgacccaaagaagccctgtcacctcaccgccttccttggctacaaggctggaatgacacacattgtggtgaggtcgagaagcctggctccaagctccacaagaaggaaacttgtgaggctgtgactatcattgagactcctccccttgtcattgtcggacttgtggaatgtgaagaccccccgtggcctacgaaccctcaactctgtctgggcccaacaccttagcgaagaagtgcggagaaggttctacaagaactggtgcaagagcaagaagaaggctttctccaagtatgccctcaaatacgacagcgacgcaggcaagaaagaaatccagttgcagcttgagaaaattagaaagatgaagggtttgaagcagaagaaggctcacctcatggagatccaggtcaacggtggcactatagcagacaaggtggactatggttacaagttctttgaggaggtccctgttgatgctgtgttccagaaggacgagatgatcgacatcatcggagttaccaagggcaagggttatgaaggcgtggtcactcgctggggtgttacccggcttccccgcaagacccacaggggcctccgcaaggttgcctgtatcggtgcatggcatcctgctagggtgtcgtacactgttgctcgtgctggtcagaacggataccatcaccgcactgagatgaacaagaaggtttacaagattggcaaggccggacaggaaagccatgacgcctcaactgagtttgacaggaccgagaaggacatcactcccatgggtggtttcccccactacggtatcatcaagggcgactacctgatgatcaagggttgctgcgtcggccccaagaaaagggtggtgactctccgccagtctctgctgaagcagacgtctcggttggccctggaggagatcaagctcaagttcatcgacacctcgtccaagtttggacatgggcgcttccagaccacagacgagaagcagaggttctttggcaagctcaaggcctgagttgctgatggtgtcaagcgaaatggaaatgtattaccagatagttttttgtttttcagattcagctttgttggagatatcataagaacatgtttgatttgctagtctgagttgattctattgcgggcggctgaagttatattacctaatgaactcgaaagtcagcttgctagttgcgtgactttacctgcgctagcacttgccaattttgatggaatctcaaatcttcccgcacgcaatatgctcttgctcaattcagccgtttttttactgtaatcgttgtcagcacatctgtctacagtgaattaacgctgtaattgttctgaatttttaaaacaattatcttattattccat

SEQ ID NO: 19563 - DNA, 140 bp, Zea Mays
aagtacactaaatctacaatgttacatacttggcagcatgggttgctgggcagtatgcccatatcaacttttcagaccagaacaattttcgtcaggctatgcactgtattgtctcaggaatgtgtgatccagatcttcca

SEQ ID NO: 19564 - DNA, 1511 bp, Zea Mays
cttgcttgtttcatgtactagcacaagaagaaaccgtaccacttcatcaggccaaatcgccagcaatccaccatggctaaaccagaggggccaaccattggcgtgaagctgttcgtggacaaagagaagaagaaggtgctctttgctgagtccgacaaggagttcgtcgatgtgctcttcagcttcctcaccatgccgctcggcaccatcgtccgcctgctggacaagcagtctcagatggggtgtctcgaccagctgtacaagagcgtggaggacctcaacttggagtacttccaaaccagtgcttgcaaggcgatgcttctgaaaccgctcaacgcggcttccggccactgctgccgcctcaagatcaacgttgatggaagctttccaagggtggtctatgtctgcaaggacacgtcgtgcagcgcactcagcgacaacgcgtttagttcgttccctggcacggtctgcaaatgtggtaaggtcatggagttcgttgggcggtgcccaaaatacgatggtgacactgaaaccgccgccgccgcttgttcagaggatggagtttttgtgataggttgcttgaagtttatcgtcaccgatgatctccaggttgcgccagcatctacctctcttatgatgtctttcttcgagaaatttggtgtgcttgatccagctgtcctagagcagcaggttctgcagttcagttctgaaaagataaaatgcttgttgaagagattgttgacgtccaagcaacctctcactgatcattatttcgaagctcttgttccacaagatgatgcaagcctagaagcgcttgttcagaacttacatcctaaacaagaaaacgaggaccaggaaatgccaggaaaccagaagatcagggttcttcagacgaaggacaactctgccctgctgtatgatgaagttggtgtcgattttgtggactctctcttcggcttattaagcattccactgggatcggcaattaagttatattgccagtgctcggcaaaaggctgcctcggtaatgcttacaggagcatagatggtagtgtcaaagaattcgtcagagaggagtgccagagtctccttctggacccaaagttttttgcgcgaataaggtgaagtccattaaactttgtgaggcgaacccaaaacgacaaaacggcggaagcgggcagacgaattttgtggtgaaagaaatcaaactaaaggttatggagctacagagggctgtccttgtgctgagtcgcaatatactcagctctgtgcttctgcatcctaagaagaccaagaagctgcaccattaccgtcgcatgtaatagtcgtcgttgttgctttactctataattagccccaataataacaatctatgtctgtgttttcctgctgaatttgtaagttatcattttggccactggtacttggtaactactataacagttcgagcatataataaactagtgcatcaggcgcgcccatgcgcgcgtaccaagcagctgtcaattatt

SEQ ID NO: 19565 - DNA, 1059 bp, Zea Mays
ctagcacaattgtgatagtctgcacgtacatgtgtatacatatatgggctcgtgtacacacatgcatatatatatgtatatggattatggaatgcaacgagattgatagaacaaggagaagagagggaaaagggggaaaacaggacctgcacattgtaaattgaacaccggggaggtatagaacgcgtaatccatgggccaaagaaaatgcatcaaggttttacattttccaaccaaaaaagaatcgtgaaatcctaaaaaaacaaagtctggacaatagattcaaacacagagagaattaggagatggagggaagcagagtggcgttcaaaggaaggagtgggctttctggcttgtatttccaaaataaagttaaaaaagaaaacagaggcaaacatcgttgaataagaagtcataagagaacagaatgaaacacgattgtagaaaatagcacggaaagggaaaaatattgcagagaataatgtgtaagtggaggattggcggatgaggcaaaaataaggagctccaaagtggaagacgccggatatggcagaagcaaagaacttgggtaaaaaaggaaagcaaacatttttaaagaacacaatggagctttcaagaaaataaaaaatcgtgaaatcataaaaaacaaagtctgcacgtcgtagattcaaaagcagagagaaacaggagatggagggaagtcgagtggcgtccaaaggaaggagtgggttttctggcttgtatttccaaaataagtttaaacagaaaatagaggcaaacatcgttgaagaaaaagccatatgagaacggaatgaaacacgattgtagaaaatagcacgcaaaaggaaacaatattgtagaaaataatgcgtaagtggaaggtagatggatgagcaaaaaaaggaaaccaaacatttttaaagaacctgacggagcgaagctgataaacaaagcgatgcgactgagagagggacgatgtagaaagaaggaaaataatggaagacgaagcgactgccgattagaagtggaccgagggcatgaggcggagggagcaaggag

SEQ ID NO: 19566 - DNA, 2028 bp, Zea Mays
gacttggaccggacccctagaaaaagccgaaaagaggtgtggccagatcgagcgagcccccgcacgtcgccacttcaccgcccccacccaaaatcgtctcgatggaaccgctgcggcgcgtgctgcgcctccgactcggacggcctctcgctataaaccccgcccactgaatacggccgttccatttttgactctattccccgcttcccgattcaagtcagcggtttttagggttcgagatctcggcatcgtgtcgcggaagccatggcgacaagcatgcttagtaccgtgaaggtgagcaatgtatcactgaaagcagcacaacgtgatataaaggaattcttttccttttctggtgacattgtgcatgttgaaatgcagagtttcgatgagctttctcaagttgcctacattacttttaaagacaaacaaggagcagagacggcaatgcttctcacggtatttcttttttatctcatctggaagtgttggaggcttcataattttgtgtattttcatggattgaagatttgctggctgtattatcctgaaagtatggtatgcatttttttcatcttaattggttaatcatctgatttttttttttgaacgaaagcatcatctgaatttatcaatgtgccattgtactgcaatttattgccattatattcttaagtcccaaccgaagactgtatccctctttcgtttgttgtttcatgtgatacctttgcctgctcattgaatgttgccttttacatagccaaacgttccaattaagtttttcaacattgtttctacctagatctgtttgctgtagcttgaaagccaagccgtctttgatgtcaatgagaactttgtttgcaaatagacatcaggcagattctaacatatgctttgattgctatcaaagggggccaccatagttgatatggctgtaatcgtcacaccagcaaatgattatgagctaccatcttctgttttagctgctcttgagcccaaagacacaaaaccttctgcccttcaaaaggccgaggacattgttgggaccatgctggcaaagggatttatcctcggtagggatgcactggacaaagcgaaagctttggatgagaagcatcagctgacgtcgactgccacagctagagtatcttccttcgacaagagaatcggtctaagtgagaagatcagtgttggcacttcagttgtaaacgataaagtgaaggaaatggatcagaaataccaagtctctgagaagacaaagtcagcactggcagctgctgaacatagtgtctcgactgctggatctgctatcatgaagaacaggtatgtgctaaccggagctgcatgggtaactggtgctttcagcaaggtcaccagtgcagccaacgaggccggtgcaaaggctaaggaaaaaatagcagtcgagcaggagcacaagaatgctgagggtggacctgcacaagcgaacatctcagagacccatgaagcgcacaggggtttggacggcggattctcaaggctacatgactctgaaacccctgaagatatccccatctctactgcgagtgtcccagctgttacggatgaggagcccagcaaggcttctccaccagctggtgttcctgaaaagccagaagctgcgcacgaattggtactataattgatgcggttttgcttcatacatgcatgtaaatagacatgaaatgggatagccctggaactcattctgtggtcttgtggttggcatcttcagattgaaaacctctttgaaggttgaaagttattgggatctaaaggagtttgcaatttgtacctggtctttttgatcaattagtaatcagtattacccggcagtggggaaatgaactttaatgcttgtgtaattgtactgttgttggtcatctattgtttcctggtatagtaactgcttctgtttaagaaattattctggctgttaacgagggagctctagtacccagggagaggaaatggaattgtactccatttacccagctcgttacggaactg

SEQ ID NO: 19567 - DNA, 1701 bp, Zea Mays
gacttggaccggacccctagaaaaagccgaaaagaggtgtggccagatcgagcgagcccccgcacgtcgccacttcaccgcccccacccaaaatcgtctcgatggaaccgctgcggcgcgtgctgcgcctccgactcggacggcctctcgctataaaccccgcccactgaatacggccgttccatttttgactctattccccgcttcccgattcaagtcagcggtttttagggttcgagatctcggcatcgtgtcgcggaagccatggcgtgatagccgcatctccccagcctgtcatggtagcaaagaaacatggggtaactgttggtaggaagcgaaaggggaaactggggcgtctgtggaactgggaaactgacgcgcgggatgctctttgacaagcatgcttagtaccgtgaaggtgagcaatgtatcactgaaagcagcacaacgtgatataaaggaattcttttccttttctggtgacattgtgcatgttgaaatgcagagtttcgatgagctttctcaagttgcctacattacttttaaagacaaacaaggagcagagacggcaatgcttctcacgggggccaccatagttgatatggctgtaatcgtcacaccagcaaatgattatgagctaccatcttctgttttagctgctcttgagcccaaagacacaaaaccttctgcccttcaaaaggccgaggacattgttgggaccatgctggcaaagggatttatcctcggtagggatgcactggacaaagcgaaagctttggatgagaagcatcagctgacgtcgactgccacagctagagtatcttccttcgacaagagaatcggtctaagtgagaagatcagtgttggcacttcagttgtaaacgataaagtgaaggaaatggatcagaaataccaagtctctgagaagacaaagtcagcactggcagctgctgaacatagtgtctcgactgctggatctgctatcatgaagaacaggtatgtgctaaccggagctgcatgggtaactggtgctttcagcaaggtcaccagtgcagccaacgaggccggtgcaaaggctaaggaaaaaatagcagtcgagcaggagcacaagaatgctgagggtggacctgcacaagcgaacatctcagagacccatgaagcgcacaggggtttggacggcggattctcaaggctacatgactctgaaacccctgaagatatccccatctctactgcgagtgtcccagctgttacggatgaggagcccagcaaggcttctccaccagctggtgttcctgaaaagccagaagctgcgcacgaattggtactataattgatgcggttttgcttcatacatgcatgtaaatagacatgaaatgggatagccctggaactcattctgtggtcttgtggttggcatcttcagattgaaaacctctttgaaggttgaaagttattgggatctaaaggagtttgcaatttgtacctggtctttttgatcaattagtaatcagtattacccggcagtggggaaatgaactttaatgcttgtgtaattgtactgttgttggtcatctattgtttcctggtatagtaactgcttctgtttaagaaattattctggctgttaacgagggagctctagtacccagggagaggaaatggaattgtactccatttacccagctcgttacggaactg

SEQ ID NO: 19568 - DNA, 900 bp, Zea Mays
tggctgccgagatcaatgggggcatcctcaccgtcggcaggcccaggcagcactgagttgcgctctgctgcggccgctacttccagatggatggatttgatcaaacagtgaatgtgaaggttgtaatggcaactaatagggcagatactctagatcctgctttgctgtggccaggtagacttgacacgaaagttgagttcccttgtcctgattggcggcaaaagaggcttgtgttccaagtctatactgctaagatggatttgagtgacgaggttgatttggaagattatgtttgcagaccggataagatcagtgctgctgatgttgagttggtttcatggcacataccaagatttttatgcatttgttgttttctaactactgtattgctagggtacttatgtcctgtgctggccaaagctctcaaaaccatgaaaaggcaaagaaggtgctccttatagtaaagccacattaccaacagttggagaggaaggtgttgtgatgagcatcatcttgttctacatcatcactaatgaactggttgaacttttggttgctttggtgaatggaggcgacggcatgcagattgccatgtccggatgttatgcgggacctatgtttaatacacttgctggtttgggtacgttgttgctagattgatctgggctcttgttatgctgctgagaggtgacatgcagcctaacaagatacttggagttggcctcatcgctctttactcaaattttctttttattagagtaagcaatgttggtggaatattgctactacctagagttagataattatttgcttgtaaagtttgatttacatcaaagtacttgcccatggcttccatttttataaatgaaatgaagttatatagtgttgctctgttctata

SEQ ID NO: 19569 - DNA, 1688 bp, Zea Mays
tggctgccgagatcaatgggggcatcctcaccgtcggcaggcccaggcagcactgagttgcgctctgctgcggccgctacttccagatggatggatttgatcaaacagtgaatgtgaaggttgtaatggcaactaatagggcagatactctagatcctgctttgctgtggccaggtagacttgacacgaaagttgagttcccttgtcctgattggcggcaaaagaggcttgtgttccaagtctatactgctaagatggatttgagtgacgaggttgatttggaagattatgtttgcagaccggataagatcagtgctgctgatgttgagttggtttcatggcacataccaagatttttatgcatttgttgttttctaactactgtattgctagggtacttatgtcctgtgctggccaaagctctcaaaaccatgaaaaggcaaagaaggtgctccttatagtaaagccacattatggatttggtgagaagggtagaccaacagttggagaggaaggtgttgtgatgagcatcatcttgttctacatcatcactaatgaactggttgaacttttggttgctttggtagagacaagatatctgaatgctagcattcgggagcttggtgatcattttcagacaaaacgtgatggtgaaaatggtgttgatgcatcaattgaaaagagaacacctaagctacttcagtttacttttcaagagttgaaatctgccacgcttaacttcaggccaggcaatattcttggggagggtgggttcggttatgtattcaatgggtggattgagccaaacagcactgctcctgcaaaacctggcacaggggttactgtggcagtaaaaagtttgaagccagatgcgcttcaaggtcatagagaatgggtgaagttgactttctgggacagttgcatcataaacaccttgttaagttgattggatattgtattgaggatgatcaaaggttacttgtatatgaattcatggcacggggaagtcttgaaaatcatcttttcagaagggctcttcccctaccttggtccaacaggatgaagattgttctaggtgccgcgaaaggagtagccttcctccatggaggtcccaaacctgttatttacagggattttaagacatcgaatgttcttcttgatgtggagtacaacgcaaaactatccgatttcagtttagcaaaagctggtcctcagggtgataaaactcatgtatatactcgggttgttggcacctatggttatgctgcaccagagtatgtaatgacagatgcgttttttttgggaccaagccctatgggcaacaatggagatgaccagcgtcttggtttatcaagaggaagttaatccctctcaactgaaactcccatcaaatttggggcatagtgtgtcgattcaattgtaactattatatgtcattttgggttagcaaactgtatctactaatttctcagccttaagccttttgagctagaaacttgtgtaaggatttgttgcactaagtgacatgctgatatttgaactatttaggctgccaaatctgaattttttaactatcaagtatctcaacatttctctcattctaacactcccctttttttggggcatgttttaacatctccctcatcgttgaaccctttcaaactcaaagaataatgagtactattgac

SEQ ID NO: 19570 - DNA, 2990 bp, Zea Mays
cgttctgccgcgcgcagcccgcatcccgcccgcggccggacctcgccccgcatcccgccgccctcccgcgctccttccatcctccgccctcatcctgccgccctctccttccattttgagctttgacggcgcggatccccaacgctcgcttccatcctcgtggatccccacccacgaatcccgcgctcccttccatcctcgtggcttccttcaacagcgcggatcccccaccctcgaatcccattgccgcaatggaaggtcgtctgtaccacgccgtggatccgccacccagtaccgcgccgtggatggcagacctcccaaccctaccgtctgcggattccgatgaaggcgcgaacccgtgacatggttgtatctctgctcgccgctcgatactccggttccggtaaaacctagcagccgccacttcgtcggactcggacctcagtgacacgcgcagcgtggcgccggcgttgcgcatccggatccggccagcagccagccacgcagtgtcgcggtcgtcggtcgtcgacgcaacttctcaggcgccgatgcagcacccggcagctggctgctcgtcttgggtatgtggcctcgacccccaactaacctgattcaatgggtgctcgatctggcgctgcagtccaacggcaagcctggcggcatcttcgacaccgccgaggagcgctcccaggagggaggtcaagaatcctaagaagccgctgtcgcgcgtggcctcgcggggcgtgcttccggccgacggtgacggcagcggctcgaccaagggcagctacgttcatgatgcagtagagacaagatatctgaatgctagcattcgggagcttggtgatcattttcagacaaaacgtgatggtgaaaatggtgttgatgcatcaattgaaaagagaacacctaagctacttcagtttacttttcaagagttgaaatctgccacgcttaacttcaggccaggcaatattcttggggagggtgggttcggttatgtattcaatgggtggattgagccaaacagcactgctcctgcaaaacctggcacaggggttactgtggcagtaaaaagtttgaagccagatgcgcttcaaggtcatagagaatgggtgaagttgactttctgggacagttgcatcataaacaccttgttaagttgattggatattgtattgaggatgatcaaaggttacttgtatatgaattcatggcacggggaagtcttgaaaatcatcttttcagaagtaagcaatcacctaacagagttaatgctttaagttaagtagatttagtgcctttattactaatttgtttccccacttaggcctaaccagtttttttcttcactaagtcttctttcatttttccgagcaaccttggattttttttgttctctatcctctgtgacatcagagataagtacattctaacttgatttgattatggtaatgtagacatgaacattttagcctgcccttattaagtttgatttgtgccagttacacctgttcagatcttcttagttaaatactagatgcatttcgcacacacaaaaaagttgcaatagtactgtagtgagcaaggatgcatgcctactaccaatggtggtgttcattctattgctaacttttatattggtattaggtcatacccatgtaaccattattatttggaacaattggatttataccattaaaagatccaaactttagatatataccatggaccccatatgtcattgactcatgtggacccacatgtaagtgagatagtaatggtatggatctaaaatgatgatcttttaatggtatggatccaaatttcccttattattttgaagggggtagggacattgccagcttttcacaaaagttgattttatttttatgtgcctaatcttgtcaaccataatctttctatctgctcgttcttatgatcctgtcatcttactttgtttaatcttgaaggggctcttcccctaccttggtccaacaggatgaagattgttctaggtgccgcgaaaggagtagccttcctccatggaggtcccaaacctgttatttacagggattttaagacatcgaatgttcttcttgatgtggagtacaacgcaaaactatccgatttcagtttagcaaaagctggtcctcagggtgataaaactcatgtatatactcgggttgttggcacctatggttatgctgcaccagagtatgtaatgacaggtatcagggataaactgaaggacttcagtagctacctgtagcagaaattctatagcttgcttatctgttgcatgttggttctttacactgtttttctgagcttgtagttattcttgtgttcactccatattggatagtaaattggcttaacatttttgtccgaagacataaaactagggtgccattacaaatgttcttctttcaagtgaaactgtgtttttcgtttttacatgcagtaaaggctgtaaggttgtagacttatataatgaatcttctgctccacttctttgggacacgttttaacatttcttaacatttaactctgtaacgctttctgacacttttcatatgttttttagatgcgttttttttgggaccaagccctatgggcaacaatggagatgaccagcgtcttggtttatcaagaggaagttaatccctctcaactgaaactcccatcaaatttggggcatagtgtgtcgattcaattgtaactattatatgtcattttgggttagcaaactgtatctactaatttctcagccttaagccttttgagctagaaacttgtgtaaggatttgttgcactaagtgacatgctgatatttgaactatttaggctgccaaatctgaattttttaactatcaagtatctcaacatttctctcattctaacactcccctttttttggggcatgttttaacatctccctcatcgttgaaccctttcaaactcaaagaataatgagtactattgac

SEQ ID NO: 19571 - DNA, 2267 bp, Zea Mays
cgttctgccgcgcgcagcccgcatcccgcccgcggccggacctcgccccgcatcccgccgccctcccgcgctccttccatcctccgccctcatcctgccgccctctccttccattttgagctttgacggcgcggatccccaacgctcgcttccatcctcgtggatccccacccacgaatcccgcgctcccttccatcctcgtggcttccttcaacagcgcggatcccccaccctcgaatcccattgccgcaatggaaggtcgtctgtaccacgccgtggatccgccacccagtaccgcgccgtggatggcagacctcccaaccctaccgtctgcggattccgatgaaggcgcgaacccgtgacatggttgtatctctgctcgccgctcgatactccggttccggtaaaacctagcagccgccacttcgtcggactcggacctcagtgacacgcgcagcgtggcgccggcgttgcgcatccggatccggccagcagccagccacgcagtgtcgcggtcgtcggtcgtcgacgcaacttctcaggcgccgatgcagcacccggcagctggctgctcgtcttgggtatgtggcctcgacccccaactaacctgattcaatgggtgctcgatctggcgctgcagtccaacggcaagcctggcggcatcttcgacaccgccgaggagcgctcccaggagggaggtcaagaatcctaagaagccgctgtcgcgcgtggcctcgcggggcgtgcttccggccgacggtgacggcagcggctcgaccaagggcagctacgttcatgatgcagtagagacaagatatctgaatgctagcattcgggagcttggtgatcattttcagacaaaacgtgatggtgaaaatggtgttgatgcatcaattgaaaagagaacacctaagctacttcagtttacttttcaagagttgaaatctgccacgcttaacttcaggccaggcaatattcttggggagggtgggttcggttatgtattcaatgggtggattgagccaaacagcactgctcctgcaaaacctggcacaggggttactgtggcagtaaaaagtttgaagccagatgcgcttcaaggtcatagagaatgggtgaagttgactttctgggacagttgcatcataaacaccttgttaagttgattggatattgtattgaggatgatcaaaggttacttgtatatgaattcatggcacggggaagtcttgaaaatcatcttttcagaagggctcttcccctaccttggtccaacaggatgaagattgttctaggtgccgcgaaaggagtagccttcctccatggaggtcccaaacctgttatttacagggattttaagacatcgaatgttcttcttgatgtggagtacaacgcaaaactatccgatttcagtttagcaaaagctggtcctcagggtgataaaactcatgtatatactcgggttgttggcacctatggttatgctgcaccagagtatgtaatgacaggtatcagggataaactgaaggacttcagtagctacctgtagcagaaattctatagcttgcttatctgttgcatgttggttctttacactgtttttctgagcttgtagttattcttgtgttcactccatattggatagtaaattggcttaacatttttgtccgaagacataaaactagggtgccattacaaatgttcttctttcaagtgaaactgtgtttttcgtttttacatgcagtaaaggctgtaaggttgtagacttatataatgaatcttctgctccacttctttgggacacgttttaacatttcttaacatttaactctgtaacgctttctgacacttttcatatgttttttagatgcgttttttttgggaccaagccctatgggcaacaatggagatgaccagcgtcttggtttatcaagaggaagttaatccctctcaactgaaactcccatcaaatttggggcatagtgtgtcgattcaattgtaactattatatgtcattttgggttagcaaactgtatctactaatttctcagccttaagccttttgagctagaaacttgtgtaaggatttgttgcactaagtgacatgctgatatttgaactatttaggctgccaaatctgaattttttaactatcaagtatctcaacatttctctcattctaacactcccctttttttggggcatgttttaacatctccctcatcgttgaaccctttcaaactcaaagaataatgagtactattgac

SEQ ID NO: 19572 - DNA, 1880 bp, Zea Mays
cgttctgccgcgcgcagcccgcatcccgcccgcggccggacctcgccccgcatcccgccgccctcccgcgctccttccatcctccgccctcatcctgccgccctctccttccattttgagctttgacggcgcggatccccaacgctcgcttccatcctcgtggatccccacccacgaatcccgcgctcccttccatcctcgtggcttccttcaacagcgcggatcccccaccctcgaatcccattgccgcaatggaaggtcgtctgtaccacgccgtggatccgccacccagtaccgcgccgtggatggcagacctcccaaccctaccgtctgcggattccgatgaaggcgcgaacccgtgacatggttgtatctctgctcgccgctcgatactccggttccggtaaaacctagcagccgccacttcgtcggactcggacctcagtgacacgcgcagcgtggcgccggcgttgcgcatccggatccggccagcagccagccacgcagtgtcgcggtcgtcggtcgtcgacgcaacttctcaggcgccgatgcagcacccggcagctggctgctcgtcttgggtatgtggcctcgacccccaactaacctgattcaatgggtgctcgatctggcgctgcagtccaacggcaagcctggcggcatcttcgacaccgccgaggagcgctcccaggagggaggtcaagaatcctaagaagccgctgtcgcgcgtggcctcgcggggcgtgcttccggccgacggtgacggcagcggctcgaccaagggcagctacgttcatgatgcagtagagacaagatatctgaatgctagcattcgggagcttggtgatcattttcagacaaaacgtgatggtgaaaatggtgttgatgcatcaattgaaaagagaacacctaagctacttcagtttacttttcaagagttgaaatctgccacgcttaacttcaggccaggcaatattcttggggagggtgggttcggttatgtattcaatgggtggattgagccaaacagcactgctcctgcaaaacctggcacaggggttactgtggcagtaaaaagtttgaagccagatgcgcttcaaggtcatagagaatgggtgaagttgactttctgggacagttgcatcataaacaccttgttaagttgattggatattgtattgaggatgatcaaaggttacttgtatatgaattcatggcacggggaagtcttgaaaatcatcttttcagaagatgaagattgttctaggtgccgcgaaaggagtagccttcctccatggaggtcccaaacctgttatttacagggattttaagacatcgaatgttcttcttgatgtggagtacaacgcaaaactatccgatttcagtttagcaaaagctggtcctcagggtgataaaactcatgtatatactcgggttgttggcacctatggttatgctgcaccagagtatgtaatgacagatgcgttttttttgggaccaagccctatgggcaacaatggagatgaccagcgtcttggtttatcaagaggaagttaatccctctcaactgaaactcccatcaaatttggggcatagtgtgtcgattcaattgtaactattatatgtcattttgggttagcaaactgtatctactaatttctcagccttaagccttttgagctagaaacttgtgtaaggatttgttgcactaagtgacatgctgatatttgaactatttaggctgccaaatctgaattttttaactatcaagtatctcaacatttctctcattctaacactcccctttttttggggcatgttttaacatctccctcatcgttgaaccctttcaaactcaaagaataatgagtactattgac

SEQ ID NO: 19573 - DNA, 2631 bp, Zea Mays
cgttctgccgcgcgcagcccgcatcccgcccgcggccggacctcgccccgcatcccgccgccctcccgcgctccttccatcctccgccctcatcctgccgccctctccttccattttgagctttgacggcgcggatccccaacgctcgcttccatcctcgtggatccccacccacgaatcccgcgctcccttccatcctcgtggcttccttcaacagcgcggatcccccaccctcgaatcccattgccgcaatggaaggtcgtctgtaccacgccgtggatccgccacccagtaccgcgccgtggatggcagacctcccaaccctaccgtctgcggattccgatgaaggcgcgaacccgtgacatggttgtatctctgctcgccgctcgatactccggttccggtaaaacctagcagccgccacttcgtcggactcggacctcagtgacacgcgcagcgtggcgccggcgttgcgcatccggatccggccagcagccagccacgcagtgtcgcggtcgtcggtcgtcgacgcaacttctcaggcgccgatgcagcacccggcagctggctgctcgtcttgggtatgtggcctcgacccccaactaacctgattcaatgggtgctcgatctggcgctgcagtccaacggcaagcctggcggcatcttcgacaccgccgaggagcgctcccaggagggaggtcaagaatcctaagaagccgctgtcgcgcgtggcctcgcggggcgtgcttccggccgacggtgacggcagcggctcgaccaagggcagctacgttcatgatgcagtagagacaagatatctgaatgctagcattcgggagcttggtgatcattttcagacaaaacgtgatggtgaaaatggtgttgatgcatcaattgaaaagagaacacctaagctacttcagtttacttttcaagagttgaaatctgccacgcttaacttcaggccaggcaatattcttggggagggtgggttcggttatgtattcaatgggtggattgagccaaacagcactgctcctgcaaaacctggcacaggggttactgtggcagtaaaaagtttgaagccagatgcgcttcaaggtcatagagaatgggtgaagttgactttctgggacagttgcatcataaacaccttgttaagttgattggatattgtattgaggatgatcaaaggttacttgtatatgaattcatggcacggggaagtcttgaaaatcatcttttcagaagtaagcaatcacctaacagagttaatgctttaagttaagtagatttagtgcctttattactaatttgtttccccacttaggcctaaccagtttttttcttcactaagtcttctttcatttttccgagcaaccttggattttttttgttctctatcctctgtgacatcagagataagtacattctaacttgatttgattatggtaatgtagacatgaacattttagcctgcccttattaagtttgatttgtgccagttacacctgttcagatcttcttagttaaatactagatgcatttcgcacacacaaaaaagttgcaatagtactgtagtgagcaaggatgcatgcctactaccaatggtggtgttcattctattgctaacttttatattggtattaggtcatacccatgtaaccattattatttggaacaattggatttataccattaaaagatccaaactttagatatataccatggaccccatatgtcattgactcatgtggacccacatgtaagtgagatagtaatggtatggatctaaaatgatgatcttttaatggtatggatccaaatttcccttattattttgaagggggtagggacattgccagcttttcacaaaagttgattttatttttatgtgcctaatcttgtcaaccataatctttctatctgctcgttcttatgatcctgtcatcttactttgtttaatcttgaaggggctcttcccctaccttggtccaacaggatgaagattgttctaggtgccgcgaaaggagtagccttcctccatggaggtcccaaacctgttatttacagggattttaagacatcgaatgttcttcttgatgtggagtacaacgcaaaactatccgatttcagtttagcaaaagctggtcctcagggtgataaaactcatgtatatactcgggttgttggcacctatggttatgctgcaccagagtatgtaatgacagatgcgttttttttgggaccaagccctatgggcaacaatggagatgaccagcgtcttggtttatcaagaggaagttaatccctctcaactgaaactcccatcaaatttggggcatagtgtgtcgattcaattgtaactattatatgtcattttgggttagcaaactgtatctactaatttctcagccttaagccttttgagctagaaacttgtgtaaggatttgttgcactaagtgacatgctgatatttgaactatttaggctgccaaatctgaattttttaactatcaagtatctcaacatttctctcattctaacactcccctttttttggggcatgttttaacatctccctcatcgttgaaccctttcaaactcaaagaataatgagtactattgac

SEQ ID NO: 19574 - DNA, 2239 bp, Zea Mays
cgttctgccgcgcgcagcccgcatcccgcccgcggccggacctcgccccgcatcccgccgccctcccgcgctccttccatcctccgccctcatcctgccgccctctccttccattttgagctttgacggcgcggatccccaacgctcgcttccatcctcgtggatccccacccacgaatcccgcgctcccttccatcctcgtggcttccttcaacagcgcggatcccccaccctcgaatcccattgccgcaatggaaggtcgtctgtaccacgccgtggatccgccacccagtaccgcgccgtggatggcagacctcccaaccctaccgtctgcggattccgatgaaggcgcgaacccgtgacatggttgtatctctgctcgccgctcgatactccggttccggtaaaacctagcagccgccacttcgtcggactcggacctcagtgacacgcgcagcgtggcgccggcgttgcgcatccggatccggccagcagccagccacgcagtgtcgcggtcgtcggtcgtcgacgcaacttctcaggcgccgatgcagcacccggcagctggctgctcgtcttgggtatgtggcctcgacccccaactaacctgattcaatgggtgctcgatctggcgctgcagtccaacggcaagcctggcggcatcttcgacaccgccgaggagcgctcccaggagggaggtcaagaatcctaagaagccgctgtcgcgcgtggcctcgcggggcgtgcttccggccgacggtgacggcagcggctcgaccaagggcagctacgttcatgatgcagtagagacaagatatctgaatgctagcattcgggagcttggtgatcattttcagacaaaacgtgatggtgaaaatggtgttgatgcatcaattgaaaagagaacacctaagctacttcagtttacttttcaagagttgaaatctgccacgcttaacttcaggccaggcaatattcttggggagggtgggttcggttatgtattcaatgggtggattgagccaaacagcactgctcctgcaaaacctggcacaggggttactgtggcagtaaaaagtttgaagccagatgcgcttcaaggtcatagagaatgggtgaagttgactttctgggacagttgcatcataaacaccttgttaagttgattggatattgtattgaggatgatcaaaggttacttgtatatgaattcatggcacggggaagtcttgaaaatcatcttttcagaagatgaagattgttctaggtgccgcgaaaggagtagccttcctccatggaggtcccaaacctgttatttacagggattttaagacatcgaatgttcttcttgatgtggagtacaacgcaaaactatccgatttcagtttagcaaaagctggtcctcagggtgataaaactcatgtatatactcgggttgttggcacctatggttatgctgcaccagagtatgtaatgacaggtatcagggataaactgaaggacttcagtagctacctgtagcagaaattctatagcttgcttatctgttgcatgttggttctttacactgtttttctgagcttgtagttattcttgtgttcactccatattggatagtaaattggcttaacatttttgtccgaagacataaaactagggtgccattacaaatgttcttctttcaagtgaaactgtgtttttcgtttttacatgcagtaaaggctgtaaggttgtagacttatataatgaatcttctgctccacttctttgggacacgttttaacatttcttaacatttaactctgtaacgctttctgacacttttcatatgttttttagatgcgttttttttgggaccaagccctatgggcaacaatggagatgaccagcgtcttggtttatcaagaggaagttaatccctctcaactgaaactcccatcaaatttggggcatagtgtgtcgattcaattgtaactattatatgtcattttgggttagcaaactgtatctactaatttctcagccttaagccttttgagctagaaacttgtgtaaggatttgttgcactaagtgacatgctgatatttgaactatttaggctgccaaatctgaattttttaactatcaagtatctcaacatttctctcattctaacactcccctttttttggggcatgttttaacatctccctcatcgttgaaccctttcaaactcaaagaataatgagtactattgac

SEQ ID NO: 19575 - DNA, 3217 bp, Zea Mays
aaaaaaaaaaaagttgttttgctgctggcgggacacgcttcgggcgcgacagtcgtcaccccgctttcccctactggatccagccacttgacttcgcttaaaccctgatcctcttcctccctctcctccggtcctcccgcgccgccacccccatctcccaccgcaaaaccttaggtccgacgagcccccgccgttgccgtgggcgccagaagcagccatggcttcgagttcgacgtgtgttcttaagaagaactaccgctgcgaccgctccctgcagcagttttacactggtgggccctttgcggtcgggcttgcccccggcggcgatggcgagggcggcgccgaggctgaggccttcctcgcatgcgcctgcggtggagaggtgcgcgtggtgtcctccgcggacgcctctgccataggggagcccgtcgacggcgactcggaggccatcaccgcgctggcgctgtcccccgactcacggctcctctttgccgcggggcacagcaggcttattagggcctgggacctcgcgtcccgagcttgcatacgcagctggaagggacatgatggtcctatcatggccatggcatgccatgtttctggtggtttgcttgcaactgccggagcagacaagaaggtctgcgtatgggatgtggatggtggattttgcacccatttccttagaggccatacaggggttgtgacatccgttatgttccacaaagatccaaagcgccttctgttgttttcaggaagtgaagatggcaccgtgcgagtgtggaaccttgaaactaaaaaatgtgttgctgtgcttaaagagcatttttcagcagttacttcattggcattgtctgatgatggacaaacattgctgagcgctgggagggataagattgttaccgcgtgggatattcgtaaatacagctcaaagaagacaataccgacatatgaaatgatagaagctgtttccttcattggaccaggaagtgagtttttggcttgtttgggcatagaactggcaaacaaaaaggagaaagatactgcttatttccttacagttggtgaacgtggggtcgtgcgcatctggtgcttggagagttgtctttgcgtatttgagcagcaaacatctgatgtaactgttaactcagagaacaaggaaacaaggaggggctttacatctgctgttatgttgccaaatgaacaaggattgctatgtgttactgctgatcagcagtttttgttctattgtcccaaaaggactgatgatgggacctttgaactgtccctatatagacgactaataggttataatgatgagattcttgacttaaagtttattggggaggaggaacaatatcttgctgtagctaccaacttggagcaggtccgtgtttatgatgttgcgtcaatgtcatgttcttatgtgcttgctggccacaccgaaataattgtttgcattgacacatgtgtctctgcttccgggaagacacttgttgtaactgggagcaaggataacactgtgaggttatgggatgctgaaagaaaaagctgtattggcattggcaaaggccatctgggagctgttggttctgttgccttctcgaagaaaacaaaggacttttttgttagtggcagcagcgatcgaaccatcaaggtatggacctgggacaacacacttggtgatgctgaggatgaagtccctcttaaagcaaaggctgttgtagctgcacatgataaagatattaattatctgacagtttcacctaatgatggtcttgtttgcagtggttctgaggtaagattttagcaaggaccggactgcttgcatatggaaactccctaatctagtgttctctgttgcccttaaggggcacaaaagaggaatctggtcagttgagttttctcctgttgaacaatgtgtcatgacatcctcgggtgatagaacaatcaaaatatggtccgttgctgatggctcttgtttgaagacatttgagggtcatacatcaagtgttctgcgagcgtctttcctttcacgtggaactcaagttgtttcttgtggaagtgatggtctagtgaagctatggacaattaagacaaatgaatgcattgctacttatgataagcatgatgggaaggtctgggcattggctgttggcaggaaaactgaaatggttgctactggtggaaccgatgctgtcctcaatctgtggcatgattgcaccatggaagataagcaggaagatttccgtaagaaggagcaagaagttttaagaggccaggaattggaaaatgctgtgtcagattctgactatgcaaaggcaatacaacttgcatttgagcttagaagaccacacaagcttctagatttattctcacagcttgccaggcgagctgacgcagaggatccaatagaaaaggctcttcttggtcttccaaaggatggccttcgtgtgcttctagagtacgcccgtgaatggaatacgaagcccaagttctgtcatgttgcgcagtttgtgctttttcgggtattgaggagtttctctcccactgatatcctggagataaagggcatcagtgagctcctcgagggccttattccgtattcgcagaggcatttcagcagagtggacagactagtccgaagcacgtttctgttggactatacgctgacgcgaatgtccgtggtagacccagatgtggatgcggggtcaatcaaagacgaaatgaatggttcgtctgtggagaacggtgaacttgcagagcctcggcctgcttcacctgtgccagagaagtcaagcaagaagagaaaatctggcaaatcaagtaaaaagggaaaggagaaggtgatgaagcttgcctcgagtggacttggcaagggtgtttctgttgaagcctgaaaatctagctgagaatctggttttgcttatgcatgcatgcatccaattttgtagcagctgttgaaactgacgttgcccaacgcacgaatcacatttgatgtaaatgcagttttttgctgcgtttattagaaggccgcagcgcatttaatgcattggagtgtatgatttgctatcaaaatttggcacgccaaaggttttgataagccaaagttgctaaaagttgggcaaaatatgttatatagatatagcaagccaaatgtggcaagtttttgtgcgaaccaaatagctagcaaaaagcccacactgagattgacaaaata

SEQ ID NO: 19576 - DNA, 3151 bp, Zea Mays
aaaaaaaaaaaagttgttttgctgctggcgggacacgcttcgggcgcgacagtcgtcaccccgctttcccctactggatccagccacttgacttcgcttaaaccctgatcctcttcctccctctcctccggtcctcccgcgccgccacccccatctcccaccgcaaaaccttaggtccgacgagcccccgccgttgccgtgggcgccagaagcagccatggcttcgagttcgacgtgtgttcttaagaagaactaccgctgcgaccgctccctgcagcagttttacactggtgggccctttgcggtcgggcttgcccccggcggcgatggcgagggcggcgccgaggctgaggccttcctcgcatgcgcctgcggtggagaggtgcgcgtggtgtcctccgcggacgcctctgccataggggagcccgtcgacggcgactcggaggccatcaccgcgctggcgctgtcccccgactcacggctcctctttgccgcggggcacagcaggcttattagggcctgggacctcgcgtcccgagcttgcatacgcagctggaagggacatgatggtcctatcatggccatggcatgccatgtttctggtggtttgcttgcaactgccggagcagacaagaaggtctgcgtatgggatgtggatggtggattttgcacccatttccttagaggccatacaggggttgtgacatccgttatgttccacaaagatccaaagcgccttctgttgttttcaggaagtgaagatggcaccgtgcgagtgtggaaccttgaaactaaaaaatgtgttgctgtgcttaaagagcatttttcagcagttacttcattggcattgtctgatgatggacaaacattgctgagcgctgggagggataagattgttaccgcgtgggatattcgtaaatacagctcaaagaagacaataccgacatatgaaatgatagaagctgtttccttcattggaccaggaagtgagtttttggcttgtttgggcatagaactggcaaacaaaaaggagaaagatactgcttatttccttacagttggtgaacgtggggtcgtgcgcatctggtgcttggagagagaacaaggaaacaaggaggggctttacatctgctgttatgttgccaaatgaacaaggattgctatgtgttactgctgatcagcagtttttgttctattgtcccaaaaggactgatgatgggacctttgaactgtccctatatagacgactaataggttataatgatgagattcttgacttaaagtttattggggaggaggaacaatatcttgctgtagctaccaacttggagcaggtccgtgtttatgatgttgcgtcaatgtcatgttcttatgtgcttgctggccacaccgaaataattgtttgcattgacacatgtgtctctgcttccgggaagacacttgttgtaactgggagcaaggataacactgtgaggttatgggatgctgaaagaaaaagctgtattggcattggcaaaggccatctgggagctgttggttctgttgccttctcgaagaaaacaaaggacttttttgttagtggcagcagcgatcgaaccatcaaggtatggacctgggacaacacacttggtgatgctgaggatgaagtccctcttaaagcaaaggctgttgtagctgcacatgataaagatattaattatctgacagtttcacctaatgatggtcttgtttgcagtggttctgaggaccggactgcttgcatatggaaactccctaatctagtgttctctgttgcccttaaggggcacaaaagaggaatctggtcagttgagttttctcctgttgaacaatgtgtcatgacatcctcgggtgatagaacaatcaaaatatggtccgttgctgatggctcttgtttgaagacatttgagggtcatacatcaagtgttctgcgagcgtctttcctttcacgtggaactcaagttgtttcttgtggaagtgatggtctagtgaagctatggacaattaagacaaatgaatgcattgctacttatgataagcatgatgggaaggtctgggcattggctgttggcaggaaaactgaaatggttgctactggtggaaccgatgctgtcctcaatctgtggcatgattgcaccatggaagataagcaggaagatttccgtaagaaggagcaagaagttttaagaggccaggaattggaaaatgctgtgtcagattctgactatgcaaaggcaatacaacttgcatttgagcttagaagaccacacaagcttctagatttattctcacagcttgccaggcgagctgacgcagaggatccaatagaaaaggctcttcttggtcttccaaaggatggccttcgtgtgcttctagagtacgcccgtgaatggaatacgaagcccaagttctgtcatgttgcgcagtttgtgctttttcgggtattgaggagtttctctcccactgatatcctggagataaagggcatcagtgagctcctcgagggccttattccgtattcgcagaggcatttcagcagagtggacagactagtccgaagcacgtttctgttggactatacgctgacgcgaatgtccgtggtagacccagatgtggatgcggggtcaatcaaagacgaaatgaatggttcgtctgtggagaacggtgaacttgcagagcctcggcctgcttcacctgtgccagagaagtcaagcaagaagagaaaatctggcaaatcaagtaaaaagggaaaggagaaggtgatgaagcttgcctcgagtggacttggcaagggtgtttctgttgaagcctgaaaatctagctgagaatctggttttgcttatgcatgcatgcatccaattttgtagcagctgttgaaactgacgttgcccaacgcacgaatcacatttgatgtaaatgcagttttttgctgcgtttattagaaggccgcagcgcatttaatgcattggagtgtatgatttgctatcaaaatttggcacgccaaaggttttgataagccaaagttgctaaaagttgggcaaaatatgttatatagatatagcaagccaaatgtggcaagtttttgtgcgaaccaaatagctagcaaaaagcccacactgagattgacaaaata

SEQ ID NO: 19577 - DNA, 3552 bp, Zea Mays
aaaaaaaaaaaagttgttttgctgctggcgggacacgcttcgggcgcgacagtcgtcaccccgctttcccctactggatccagccacttgacttcgcttaaaccctgatcctcttcctccctctcctccggtcctcccgcgccgccacccccatctcccaccgcaaaaccttaggtccgacgagcccccgccgttgccgtgggcgccagaagcagccatggcttcgagttcgacgtgtgttcttaagaagaactaccgctgcgaccgctccctgcagcagttttacactggtgggccctttgcggtcgggcttgcccccggcggcgatggcgagggcggcgccgaggctgaggccttcctcgcatgcgcctgcggtggagaggtgcgcgtggtgtcctccgcggacgcctctgccataggggagcccgtcgacggcgactcggaggccatcaccgcgctggcgctgtcccccgactcacggctcctctttgccgcggggcacagcaggcttattagggcctgggacctcgcgtcccgagcttgcatacgcagctggaagggacatgatggtcctatcatggccatggcatgccatgtttctggtggtttgcttgcaactgccggagcagacaagaaggtctgcgtatgggatgtggatggtggattttgcacccatttccttagaggccatacaggggttgtgacatccgttatgttccacaaagatccaaagcgccttctgttgttttcaggaagtgaagatggcaccgtgcgagtgtggaaccttgaaactaaaaaatgtgttgctgtgcttaaagagcatttttcagcagttacttcattggcattgtctgatgatggacaaacattgctgagcgctgggagggataagattgttaccgcgtgggatattcgtaaatacagctcaaagaagacaataccgacatatgaaatgatagaagctgtttccttcattggaccaggaagtgagtttttggcttgtttgggcatagaactggcaaacaaaaaggagaaagatactgcttatttccttacagttggtgaacgtggggtcgtgcgcatctggtgcttggagagttgtctttgcgtatttgagcagcaaacatctgatgtaactgttaactcagagaacaaggaaacaaggaggggctttacatctgctgttatgttgccaaatgaacaaggattgctatgtgttactgctgatcagcagtttttgttctattgtcccaaaaggactgatgatgggacctttgaactgtccctatatagacgactaataggttataatgatgagattcttgacttaaagtttattggggaggaggaacaatatcttgctgtagctaccaacttggagcaggtccgtgtttatgatgttgcgtcaatgtcatgttcttatgtgcttgctggccacaccgaaataattgtttgcattgacacatgtgtctctgcttccgggaagacacttgttgtaactgggagcaaggataacactgtgaggttatgggatgctgaaagaaaaagctgtattggcattggcaaaggccatctgggagctgttggttctgttgccttctcgaagaaaacaaaggacttttttgttagtggcagcagcgatcgaaccatcaaggtatggacctgggacaacacacttggtgatgctgaggatgaagtccctcttaaagcaaaggctgttgtagctgcacatgataaagatattaattatctgacagtttcacctaatgatggtcttgtttgcagtggttctgaggtaagattttagcaaggtactccctccactccaaattatgtcactttcgttttgtccgaagtcaaacttctctgaatttgagctggtttattgaaaaagttactatatctacgacactaaattaatttaactaaattcaccagaaatatgtcttcatgcgtttttttggtattacatatgctaatatttttttctaaaaacctggccagaatgtatgaatttggcttaggacagttgaagtgacctataatttggaaaggagagggtatagttttttttagatgtgacacatctttttatatggcttatatcatgtgattttcattatatattatcacctttattttgtaggaccggactgcttgcatatggaaactccctaatctagtgttctctgttgcccttaaggggcacaaaagaggaatctggtcagttgagttttctcctgttgaacaatgtgtcatgacatcctcgggtgatagaacaatcaaaatatggtccgttgctgatggctcttgtttgaagacatttgagggtcatacatcaagtgttctgcgagcgtctttcctttcacgtggaactcaagttgtttcttgtggaagtgatggtctagtgaagctatggacaattaagacaaatgaatgcattgctacttatgataagcatgatgggaaggtctgggcattggctgttggcaggaaaactgaaatggttgctactggtggaaccgatgctgtcctcaatctgtggcatgattgcaccatggaagataagcaggaagatttccgtaagaaggagcaagaagttttaagaggccaggaattggaaaatgctgtgtcagattctgactatgcaaaggcaatacaacttgcatttgagcttagaagaccacacaagcttctagatttattctcacagcttgccaggcgagctgacgcagaggatccaatagaaaaggctcttcttggtcttccaaaggatggccttcgtgtgcttctagagtacgcccgtgaatggaatacgaagcccaagttctgtcatgttgcgcagtttgtgctttttcgggtattgaggagtttctctcccactgatatcctggagataaagggcatcagtgagctcctcgagggccttattccgtattcgcagaggcatttcagcagagtggacagactagtccgaagcacgtttctgttggactatacgctgacgcgaatgtccgtggtagacccagatgtggatgcggggtcaatcaaagacgaaatgaatggttcgtctgtggagaacggtgaacttgcagagcctcggcctgcttcacctgtgccagagaagtcaagcaagaagagaaaatctggcaaatcaagtaaaaagggaaaggagaaggtgatgaagcttgcctcgagtggacttggcaagggtgtttctgttgaagcctgaaaatctagctgagaatctggttttgcttatgcatgcatgcatccaattttgtagcagctgttgaaactgacgttgcccaacgcacgaatcacatttgatgtaaatgcagttttttgctgcgtttattagaaggccgcagcgcatttaatgcattggagtgtatgatttgctatcaaaatttggcacgccaaaggttttgataagccaaagttgctaaaagttgggcaaaatatgttatatagatatagcaagccaaatgtggcaagtttttgtgcgaaccaaatagctagcaaaaagcccacactgagattgacaaaata

SEQ ID NO: 19578 - DNA, 3509 bp, Zea Mays
aaaaaaaaaaaagttgttttgctgctggcgggacacgcttcgggcgcgacagtcgtcaccccgctttcccctactggatccagccacttgacttcgcttaaaccctgatcctcttcctccctctcctccggtcctcccgcgccgccacccccatctcccaccgcaaaaccttaggtccgacgagcccccgccgttgccgtgggcgccagaagcagccatggcttcgagttcgacgtgtgttcttaagaagaactaccgctgcgaccgctccctgcagcagttttacactggtgggccctttgcggtcgggcttgcccccggcggcgatggcgagggcggcgccgaggctgaggccttcctcgcatgcgcctgcggtggagaggtgcgcgtggtgtcctccgcggacgcctctgccataggggagcccgtcgacggcgactcggaggccatcaccgcgctggcgctgtcccccgactcacggctcctctttgccgcggggcacagcaggcttattagggcctgggacctcgcgtcccgagcttgcatacgcagctggaagggacatgatggtcctatcatggccatggcatgccatgtttctggtggtttgcttgcaactgccggagcagacaagaaggtctgcgtatgggatgtggatggtggattttgcacccatttccttagaggccatacaggggttgtgacatccgttatgttccacaaagatccaaagcgccttctgttgttttcaggaagtgaagatggcaccgtgcgagtgtggaaccttgaaactaaaaaatgtgttgctgtgcttaaagagcatttttcagcagttacttcattggcattgtctgatgatggacaaacattgctgagcgctgggagggataagattgttaccgcgtgggatattcgtaaatacagctcaaagaagacaataccgacatatgaaatgatagaagctgtttccttcattggaccaggaagtgagtttttggcttgtttgggcatagaactggcaaacaaaaaggagaaagatactgcttatttccttacagttggtgaacgtggggtcgtgcgcatctggtgcttggagagcaaacatctgatgtaactgttaactcagagaacaaggaaacaaggaggggctttacatctgctgttatgttgccaaatgaacaaggattgctatgtgttactgctgatcagcagtttttgttctattgtcccaaaaggactgatgatgggacctttgaactgtccctatatagacgactaataggttataatgatgagattcttgacttaaagtttattggggaggaggaacaatatcttgctgtagctaccaacttggagcaggtccgtgtttatgatgttgcgtcaatgtcatgttcttatgtgcttgctggccacaccgaaataattgtttgcattgacacatgtgtctctgcttccgggaagacacttgttgtaactgggagcaaggataacactgtgaggttatgggatgctgaaagaaaaagctgtattggcattggcaaaggccatctgggagctgttggttctgttgccttctcgaagaaaacaaaggacttttttgttagtggcagcagcgatcgaaccatcaaggtatggacctgggacaacacacttggtgatgctgaggatgaagtccctcttaaagcaaaggctgttgtagctgcacatgataaagatattaattatctgacagtttcacctaatgatggtcttgtttgcagtggttctgaggtaagattttagcaaggtactccctccactccaaattatgtcactttcgttttgtccgaagtcaaacttctctgaatttgagctggtttattgaaaaagttactatatctacgacactaaattaatttaactaaattcaccagaaatatgtcttcatgcgtttttttggtattacatatgctaatatttttttctaaaaacctggccagaatgtatgaatttggcttaggacagttgaagtgacctataatttggaaaggagagggaccggactgcttgcatatggaaactccctaatctagtgttctctgttgcccttaaggggcacaaaagaggaatctggtcagttgagttttctcctgttgaacaatgtgtcatgacatcctcgggtgatagaacaatcaaaatatggtccgttgctgatggctcttgtttgaagacatttgagggtcatacatcaagtgttctgcgagcgtctttcctttcacgtggaactcaagttgtttcttgtggaagtgatggtctagtgaagctatggacaattaagacaaatgaatgcattgctacttatgataagcatgatgggaaggtctgggcattggctgttggcaggaaaactgaaatggttgctactggtggaaccgatgctgtcctcaatctgtggcatgattgcaccatggaagataagcaggaagatttccgtaagaagggatctatacacgcctatgtcactgtcaggcatctgcaacactctaaaactcatcagtgttgcaggagcaagaagttttaagaggccaggaattggaaaatgctgtgtcagattctgactatgcaaaggcaatacaacttgcatttgagcttagaagaccacacaagcttctagatttattctcacagcttgccaggcgagctgacgcagaggatccaatagaaaaggctcttcttggtcttccaaaggatggccttcgtgtgcttctagagtacgcccgtgaatggaatacgaagcccaagttctgtcatgttgcgcagtttgtgctttttcgggtattgaggagtttctctcccactgatatcctggagataaagggcatcagtgagctcctcgagggccttattccgtattcgcagaggcatttcagcagagtggacagactagtccgaagcacgtttctgttggactatacgctgacgcgaatgtccgtggtagacccagatgtggatgcggggtcaatcaaagacgaaatgaatggttcgtctgtggagaacggtgaacttgcagagcctcggcctgcttcacctgtgccagagaagtcaagcaagaagagaaaatctggcaaatcaagtaaaaagggaaaggagaaggtgatgaagcttgcctcgagtggacttggcaagggtgtttctgttgaagcctgaaaatctagctgagaatctggttttgcttatgcatgcatgcatccaattttgtagcagctgttgaaactgacgttgcccaacgcacgaatcacatttgatgtaaatgcagttttttgctgcgtttattagaaggccgcagcgcatttaatgcattggagtgtatgatttgctatcaaaatttggcacgccaaaggttttgataagccaaagttgctaaaagttgggcaaaatatgttatatagatatagcaagccaaatgtggcaagtttttgtgcgaaccaaatagctagcaaaaagcccacactgagattgacaaaata

SEQ ID NO: 19579 - DNA, 1368 bp, Zea Mays
attccagctctccccctcggcccctcttctctccctccctccctccgtccccgcattaaactcggcgaacgggccaagaaaagcaaaccgagggaggagaaaggcaaggaaagtgggaaggtaggagagagagggagacagggaaagctctcttcctcctcctcctcctctcgaattcgtctcttgtccctgtcgtcctcgcccggtttccccggtttttgagaggggaaagaggaggcggaggagagggatggggagggacgagaggttcccggtgtgggaggccgcgctcggcgccggagtcgccgccgccttcgccgctggactcgtcggtgtctacctttccatgccggactccgactacagcttcctcaagttgccacgtaatctcgaggaactccaaatcctcacggacaatattcatgtcactgcttgctggtgctctatttgggcaactgcgtggccttgcactggtggtctttgctgccactgcaggtgcttcttcgtgctatttcctgtcaaagatgattgggaagccactggtgttcacactgtggccagataagctcagcttcttccagagacaggttgctaaaagaagagagaagttgttgaattacatgcttttcctcagggtgaccccaacattgccaaataccttcatcaacttagcttcacccatagtagatgtcccctaccatatattcttactgggaactctcattggtcttatcccagctgcttatgtcactgtcagggctggaattgctcttggagagttaacttcgctgagtgacctttacgacacccagtcgatagcactgctattcctgatcggtgttgtttcagtcacaccagcattgctgggcaaggatgaggcacaagagaaaccaccagaaatggcggtaggcgcgtcatgatcaccaaagcacctagcggtgtccacgtcacctgtatatatgtcaacatccagcatgcagtggcttcattagttcggatcaacgggcccttgtggctggatgataaaaacggttcgcatggccacacagcttggcgggacctcggcctaaactccctccactgctggcctagagaggcgcctgtgttgccatcatcagaacatgattcggtagccattcaccacattattaatgaatgaacctgggaagcagaattgcctgtagacgagctgctctgatgtgtaaacgagtagcgctgttcggataggacaggcatttagtccaatccctgtatatattaaccagattcattcaatccatattcagtggttcaaagataatgccctgttcagctgctgtgttcttgaatgttttgctctatttcccttctgtgcctgattgactatgg

SEQ ID NO: 19580 - DNA, 1185 bp, Zea Mays
ctcagctttactttaggaaattctgaaagacatagcatggatccggtgaaacttgctgtcccccttgtcaattcgaaattgcaaacggatgatttgtttgtgtcaattatggacttgccttcagattaggaagtggccatcttgagaactatactagtgactacaccctacaggtgttggtaggttattgcgctgtgtacatcttcatgcagaccttcatgatcccagggacaatattcatgtcactgcttgctggtgctctatttgggcaactgcgtggccttgcactggtggtctttgctgccactgcaggtgcttcttcgtgctatttcctgtcaaagatgattgggaagccactggtgttcacactgtggccagataagctcagcttcttccagagacaggttgctaaaagaagagagaagttgttgaattacatgcttttcctcagggtgaccccaacattgccaaataccttcatcaacttagcttcacccatagtagatgtcccctaccatatattcttactgggaactctcattggtcttatcccagctgcttatgtcactgtcagggctggaattgctcttggagagttaacttcgctgagtgacctttacgacacccagtcgatagcactgctattcctgatcggtgttgtttcagtcacaccagcattgctgggcaaggatgaggcacaagagaaaccaccagaaatggcggtaggcgcgtcatgatcaccaaagcacctagcggtgtccacgtcacctgtatatatgtcaacatccagcatgcagtggcttcattagttcggatcaacgggcccttgtggctggatgataaaaacggttcgcatggccacacagcttggcgggacctcggcctaaactccctccactgctggcctagagaggcgcctgtgttgccatcatcagaacatgattcggtagccattcaccacattattaatgaatgaacctgggaagcagaattgcctgtagacgagctgctctgatgtgtaaacgagtagcgctgttcggataggacaggcatttagtccaatccctgtatatattaaccagattcattcaatccatattcagtggttcaaagataatgccctgttcagctgctgtgttcttgaatgttttgctctatttcccttctgtgcctgattgactatgg

SEQ ID NO: 19581 - DNA, 1552 bp, Zea Mays
gtgctgcgatacttgtcgttgctgctgcctgctttttccccggtctacaaagacctcagctttcctacctccacttcttctttcttccaaagccttcgcctttttcctctcgtcttcctctctctcccccgctccaaatcccaccctctctctttctctctccacattctccctgctgtgcaccttgcagcagccttgggctgtggatcggaaatggcaatcgacgatgaatcgccgctcagagtcaacaccagaggcggcgccatgggaggaggggagcgtgacggcggggagaaccagcggtggccgccgtggctgaagccgctgctggggacgagcttcttcggccaatgcaagctgcacgcggacgcgcacaagagcgagtgcaacatgtactgcctcgactgcatcagcggcgtgcagacctacatcatcaacagcgcgcgcgtggtgttcctgaacgagcggccgcagccgaggcccggcaagggcgtcaccaacacctgcgaggtctgcgagcgcagcctcctcgacaccttccgcttctgctccctcggctgcaagatcgtcaggacctccggcgacttccgcatccggaagaagcacgccatcgtcgcaaagaagaagagggagaagaagcatgcgccgcagcagaagcagcacaggggcgcggcggactcggcggacgacgacgacgacgactcgtccaccagcaccagcggcggcagcgacaagagcagcgtggtgcagagcttcaccccgtcgaccccgccggcgacgaccgccaacagcttccgcgccgggaagcggcgcaagggcgtgccgcaccggtcgccgttcggcagcctcgtggtggagttctagacaaaaaaaaaggcgcgccgcccggtcgcgatggacgctcaccaaaaaaaaaacacacacacacagcggtacaccactgtagcatacgcacttcttctacataccattaccatctataggtgctgccggatcgaccgggctacatacataagtacatagccagcccaaaaataggagcaagcaataaccagggccccatttgcacgccgcccgcgcttctggacggacgaggacgagggggccggtgcaatgcggctcgtgcggggtacggttacttccacttccatatagcagttactgtgctgggtaacaatggtttgggtttggtgcctcactgctagcagttactcttgtcgtcgtcagcctcagctactactaagttttgcgagttttacctataggtgtttgctagttttttttaccagttgcttggtataccgtatacgcgagtagaatgtacatgtacgtatactgtcagagatgggggaatggtggtagggggtgtagctcctggtgtagtggtgttcatattcgtgtgttgccttgctggcctgtaataataataaaaataaaaaagggataaggatgctgctcctggatggtcttcgatgtgaagggttgtgcttgcttgcttgattttggtggtgctttctctctctctctctctctctctctctctctctctctc

SEQ ID NO: 19582 - DNA, 1972 bp, Zea Mays
gtgctgcgatacttgtcgttgctgctgcctgctttttccccggtctacaaagacctcagctttcctacctccacttcttctttcttccaaagccttcgcctttttcctctcgtcttcctctctctcccccgctccaaatcccaccctctctctttctctctccacattctccctgctgtgcaccttgcagcagccttgggctgtggatcggaaatggcaatcgacgatgaatcgccgctcagagtcaacaccagaggcggcgccatgggaggaggggagcgtgacggcggggagaaccagcggtggccgccgtggctgaagccgctgctggggacgagcttcttcggccaatgcaagctgcacgcggacgcgcacaagagcgagtgcaacatgtactgcctcgactgcatgaacggcgcgctctgctcccagtgcctcgcctaccaccgcgaccaccacgccatccaggtgagcttgggactggagcagctagccggcgccgggcccttcctttgaaagaaacggcagtagctccggcgcccctgcgtccatccaagagactcttcttcttgttgtgctatcggtcggtcttgttggttgcatccaaggccgcaacggccagtctttcctcctccttacacgcgttattagttgcatcaaggaacagggtagcttgaccttgttggactgtctgtcagcaaatgcgcccttctcgctgacggcgatgcatgctctgcctgaggctgtgttttggttggtggtctgcagatacggaggtcctcctaccacgacgtgatccgggtgtcggagatccagaaggtgctggacatcagcggcgtgcagacctacatcatcaacagcgcgcgcgtggtgttcctgaacgagcggccgcagccgaggcccggcaagggcgtcaccaacacctgcgaggtctgcgagcgcagcctcctcgacaccttccgcttctgctccctcggctgcaagatcgtcaggacctccggcgacttccgcatccggaagaagcacgccatcgtcgcaaagaagaagagggagaagaagcatgcgccgcagcagaagcagcacaggggcgcggcggactcggcggacgacgacgacgacgactcgtccaccagcaccagcggcggcagcgacaagagcagcgtggtgcagagcttcaccccgtcgaccccgccggcgacgaccgccaacagcttccgcgccgggaagcggcgcaagggcgtgccgcaccggtcgccgttcggcagcctcgtggtggagttctagacaaaaaaaaaggcgcgccgcccggtcgcgatggacgctcaccaaaaaaaaaacacacacacacagcggtacaccactgtagcatacgcacttcttctacataccattaccatctataggtgctgccggatcgaccgggctacatacataagtacatagccagcccaaaaataggagcaagcaataaccagggccccatttgcacgccgcccgcgcttctggacggacgaggacgagggggccggtgcaatgcggctcgtgcggggtacggttacttccacttccatatagcagttactgtgctgggtaacaatggtttgggtttggtgcctcactgctagcagttactcttgtcgtcgtcagcctcagctactactaagttttgcgagttttacctataggtgtttgctagttttttttaccagttgcttggtataccgtatacgcgagtagaatgtacatgtacgtatactgtcagagatgggggaatggtggtagggggtgtagctcctggtgtagtggtgttcatattcgtgtgttgccttgctggcctgtaataataataaaaataaaaaagggataaggatgctgctcctggatggtcttcgatgtgaagggttgtgcttgcttgcttgattttggtggtgctttctctctctctctctctctctctctctctctctctctc

SEQ ID NO: 19583 - DNA, 954 bp, Zea Mays
cccagttcccagcccgaaccaccggcgacgcacgctccgcttcgctatggcgctctcgctcgcgcgcagccccaaccccgccgcggcgctccccgccccgcgtgttccccactttgcccttcctctcctcacgctccgctgccctcgccgccagaaccaggcacgcctccgcgtcgcagcatcctcgcccccggaggcgcaggctgcccccgtggcggaggatgagcagggggagaagcggcggaagctatacgttgccaacctgccctggtcgttcccggcgccggagatcgagaagctcttcgcgcagcacggcactgtcaaggacgtcgaggtcatcaaggggaaggatggaagaaacagggggttcgcgttcgtgacgatgtcgacagcggaggaggcggccgccgccgctgataagcttaactcccatgatgtaatggggcggacaatcaaggtggagttttcaaagagcttcagaagaccagctccgcctcctcctccaggcactattatagagaggcacaagctttacgtgtccaatctcccatggaaagcaagggctcccaatgttaaagaattctttgcaaactttaacccgctttctgctaacgttatattcgacaatggaaaagcagctgggtacggtttcgtttcctttgggacaaaagaagaagcagaggctgctctcactgagcttgatggaaaggaacttctgggaaggcctgtacgcttgaattggcgggaaagtggtgatgataaggttgaagttgcaaaggctgacagtgaagttgaagctgtaaatattgaaggagcatgcgttgatgatgccagcacggatggaggtgaagataaacaggaatagtaaaaaaaaatattatagtggcctacggcaagaaagtttcatctgccttattgattcttgcagcatgagcagttagcaatcagcttgag

SEQ ID NO: 19584 - DNA, 2715 bp, Zea Mays
agcttctgtgacggtgctggttcgctttagtcacgaatctcatcgttcacctatgttttctcttcttcccttcgtggagcagaagttggggttccctgatccacgcttggaggagactctagacccttctctcagtgtgtcaaagagagcatcgaggtttaaagaggaaagcaacagcagcaggggcaaaggaaaaggaaaaggaaagaagagctgcagcgccaaaaacaaaagcaaataagatgaggcccccaaccaccaccatctccacgtctccttccatccaccctgaacaagcttccctgcctctcagagtctcaaatccagcagcgtcatctgatctctccccccatatcctctcacaattcccgacaccgagaaaggagcatggatccaaggcacctagcatgtcctctctcttccgaccacaatgatttatcccagaagaagatcactcgtggagatgctctgctagcacctggacactcatcagtctcagagactgaggagtgaagtagctaccatctcgcctcgtttctcccagtctgccgttgctgctgctgccagatcccagagttcgtggtaggtggcaatggcctcgtcaccgcttgcaatctcggggacgcagcctacctgggtcccctatgaaccaaccaaagattgctctcagggcctgtgcagcatgtactgcccccagtggtgctacttcatcttccctccgcctccgccgttcgacgtgggcgggcccagcccggacgactcctccggccccgtcttctctccgctcgtcatcgctatcatcggcgtcctggcgatcgccttcctcctcgtcagctactacactttcatctccaggtactgtggcaccttccgttccttccggggccgggtcttcagttccagctcaggtggtggcggtggtgcccgcggcagcggcggcggcggcggcggaggaggaggccagggacagtccaggagccaagagtcgtggaacatctcgccgtcgacggggctggacgagaccctgatcagcaagatcgccctgtgcaagtacaggcgcggtgacgcgtcgtcggtccacgccacggactgccccgtgtgcctcggcgagttcagggacggggagagcctgcggctgctgcccaagtgcagccacgccttccaccagcagtgcatcgacaagtggctcaagtcgcactccaactgcccgctgtgccgctccaacatcacgttcatcaccgtgggggcggggcagatgctgccgacgccgcaggacgctgcgggccgccgtggtccaggcgagggtgttgggagagatgccgccgccgccgccgccgccgccgcccatgaggtggttgtggcgatggacgacttggagatcatgtgcgaagagcagcagagcatggcgggcagcacggacggtgatgagcgggaggcgagtggtggcccggagggaccggacgaggccgacagcaaggccgaggagatcagagaagagcgcccgccgccgccgccgatgaagctgtgggggccttcgtcgtcggagccagacccgatcagccacgacgtccgcatgtccatcgccgacgtcctgcatgccagcatggaggacgagcggatggcggccagggacggcggcgccggcacgtcgaggcggtggtgccatggcgagaacagcaaggggggacgcagcagcagccggcgtgcgctgcaggacggcacggacacgaagcggttgcctcctgctgggcggtcctgcttcagcagcaacagcaagagcgggagggggaggggcccggatcatccgatgtgaggaggctcagagctgtttcagattttacctaggattttactgggcgggttcttgtccgctcgcaagtcgcaacatggagaatgtggacggggaaaagcagggaccgacaccacagtctatggcgcctcgtgagacgtgggtcgtgacaatgttcatccctacgtacaatgtggtgatcgatgccagggtccaatagttcgtctgcattgctcggtgaggcctctgcagctggttcttttctcttgtcatatttttttttggttggctcttccacctctcatgtattgccaagacccacattccattatttcagagaacatgttactggctttgcaatgaaatgggtgagggaccctttctttgcacttaaacacacagcagtttgcgttcggaatttcccatcgtcatagccacccacgtaggctctgttgtcgctgaagttgcctgtggcccgtcatcacacccccacccatgaggccatgcatgaccatgaaccaaagcttactcccaagaagcaacaaagctgcaaaccgactgcgcttcagggtgtgtttggatggagggacgaggaaggatgaagaggatgagatgagatcattttaatttgacccgcgtttggtttggaggtccagagtcagggtcaagcaatattgttcaaaaatggtggatggggctatccctcaaaaaaataagggacagagtcaaccaagggttgatctcgtcccatccctcgttgacaccgaaccaaacactaccttacctaccggtcccggccggggctggagcgacttgtttgtttgtgtctacccttatcatactcctgcactgcactgttactgcatgatccgtgctcagatcttagcctgtgacgggcgatcagaatctgatccccttccgctttg

SEQ ID NO: 19585 - DNA, 3172 bp, Zea Mays
ctcatgagcctctgcgctgccagaggcaatggggtccacccatctgaaccccctgcgcagcaggccagcagcagccccaccgccaagtcaagggtagggcagcaacagcatcctgtccacctaaacctgcgtccactgcctcggcatcatcagccaccacctcccacactggactgaaggttgacatcaatagatcacattcagatgttcgatggaatacccatatggtaatatcacatccttgcctccatgtatatgtcatgaatcaatacttgtctcagctgtgtttgagatgtttattgcaatttgcagtactgcttctaggctttctagccagtcctcttacagtgctcactgtgatgcatgtgtgtgtgtcgtgaatgattaatcagtggatgtctgaaacaaactgttcgcgcttcaacagtggaataatgtctaccaatgtgtgcagatcgtctttggtactgtttatgatttagataattgtaaattataagcttaacatatattggttttacttacaatgatgtacaaacttgctcgaaagttggtttataaaaattgcaggtaattaagttgatattagtcgtcactccatcgggctaatccaccatcactccatcaagagggtagttcattatgttacactgctcttcattgctgtggagctatatatgtttgagggatttaggtttgtgtacaacaaaaaagaaaacagctcatatatgtagttcatataatttttctagcaagatgacatattctttctttacaatgaggtcaggtgacacaaacatatatatatttctataaacactaacatcatcatcctaacaagacatctgcaatgaggccaggtgagacctgttttctgtgatattaccacatatgattgacatgttgaacgctattattcagattttgacaattatttaagtgtatttaactaaatatcttcaaactttccttggattatatctctgagtttagacttttcatgtttctgtataggtggaataatttgagatgcactctatacaatttattctaagataatgtccagtccaaacatgtgccaacaacaaaattccagatagaacagccatttttctaacctatgacaaaaaatatggcctcagatattatctctgaaatttcaatggaatggtaatggttcacatatttcctttaagttgatctattgctatttattgtgcctgtattatctctgaagtttaatggtgcaatcctctgatcataataaccatttctctctatgttctctcacattcaactcgttgttaaatgtccagttgcatcatcgcggctggatatcgtagcactatcagcctatcaggtacatctattctcaacaggcacaaaattaaaggaacttggcaagaaaaccaagtacctaaggctaagagtgccattcgtggatcttaatataacttcatgcttgtttctacaatagttataaaataattgagcctttgccatgcttatcaaggcgtcgccttagcgctaaggcgtgcgcgcagcaaagcgtccagctcgccttgcgccgggaactaaggcgtccgccacggtgtaaggcgtcgccggggcgtgagtggggtgacgctttacggtttcgtagggttttgaggggggttaaatgaaggcatacctatcggtctcggctgggacagggcttacctgcgggctgtggcggcggtcgtgtccagttctcggctgcgcgcagggcaccgcggcggcctccacaggcccggcaacagcctccagcaagcgcgtgcgtgctccctcagcagtgtgcggcgtcggggtccagcctccaggcgcttctctcccacagctcaggtctcggcggctgtcgggctccaggaggctctgctctgctcaggcgttcgttgtgccctgtcctctgtcttcaatccctcagcccgtccctggtatagcctctgccctgtcctctatctctgttctcttcctccactgctagtactggtccaacctctgttctctgccatgtcctctgtagcttgctgatctgaaaaaatggagagtgccggctctgttggtggtggtccaactgatgctgctggtactggtagtgctggtgcatatgatgctatggctgatccgaagcgtagagcaaagtccaacagtcctggatggaagtattggtattggacagaaattgggaaccgggataaggtcgtatgcaacctttgcaagaccgtgacaactggaggaatcaaaaggttgaaaaacaccttgtgggtggttatgcggatacattaatgtgttcaaagaccacaacagagattagaaaagtaatgaaaccatatttggacaagaataagagatacagactcattttccttgatgacgatgatggtcatgagcagcaggggcaggaggggcagcaggataccacttctgttcatcaacctagctcggggacagccgctaaaaggaagagagctgcatttcaatttagaacagcagctccacaaccatccaacatggaaaaagaaaaaggaaaggttgcaaccatgcttaggagaactcctgaacaagttgtggatgataggcgctccttcctcagggtcacaccaaaccaccatagaggtcaaaatagctactttggttatgctcaaatccatttcttggtacttatttagcttggcatttatatttttaacatttatagatgcgtacaaagaagagaaaccggctgttgcacaagaggttgaatgacttggtctatgtttcatacaaccggaagatgaaaagtaggttccaaaagagaagggagaaagcaggctcaagttatgtctcattagttattgaagactgttagagtatatgctatgtgtctaggtccatgtggcccatgtacatcactatatagctacccattagggttagcctgaggtatgatgaatagtttccaacatggtatcagagggctagggtttcctccctccagccgccagctccctgcaggcgccgccgccccctgctggcgaccctgccgcgcgccgcacctcctcttccctgcgcgcgcgcctcctcccagtccccgcgccgcgcgcgcttcctccgcgtccgcgcgcgcctgcgccgcgccgtcgtccacgtgctgcggcgggtcgcgccgcgc

SEQ ID NO: 19586 - DNA, 472 bp, Zea Mays
aaggataattctcaagaatccgaagaaaaattcattttcgagatgaacgaacagtccagaacccactgctcgaaaccgcagccactggccagtcgatgcccatgactgcggtgcccaggaccggccccggttgcctggggtcgccgccggctcaggctctgtcgagctcactagccggggttcaaggcgccccgaagcgactgggcgcatcgaagccgtcgtggatcgttcgcactgagtcaaacgtgaggagggagagagcaaaacgacctgatcctccttgcaccatctgcaagggcacagggagaatagactgccgcaactgctttggccgaggaagaacaaaccatgccgatgtggccatgcttccgaacggcgaatggccacaatggtgtcgaatttgtggtggtagtggactggattactgcctccggtgccatggaactgccttcatcacaaaagccatggaaag

SEQ ID NO: 19587 - DNA, 790 bp, Zea Mays
aagaaaggagggagagagcaaaacgacctgatcctccttgcaccatctgcaagggcacagggagaatagactgccgcaactgctttggccgaggaagaacaaaccatgccgatgtggccatgcttccgaacggcgaatggccacaatggtgtcgaatttgtggtggtagtggactggattactgcctccggtgccatggaactgaggaatcgcctgggggctgggggtccagtttccagccgttctcgagatcgaatctgcatgccatgacgtcccagggcccggcgtcgaacgaggtcttggcgaacgccttccagtggctgtcgcccaggtccgtcaccgcctgccgcgccgtgtgcctcaggtggtccgagctgctctcttcgccccgtctcgagtttctcgccgacgtcgacgacggcaacgccgactcgtccgcatgcttcgctggcctcggcggtgccagcgcgggccgcgcccggcgccggcgcaggcgcaggcgcggcgacaccgttccagcagcaacttggtttccgtcgctgcccaaacttcagcagaggcgatctaagaagaagcaagcgtaccggcgcatgttctgacggccgagcgcatgttctgacggccgtgttcacgtggtgtaagttctgtgtcgagtccaatctgtgtgtcccttgtttgtcaggtttagattctgctattctactactatagtcagagtgcacgatgcacgcaactgtacgtctctatcgttgttttcaacatgatgaacatgcgaatttcgtggtattaa

SEQ ID NO: 19588 - DNA, 822 bp, Zea Mays
ctaggtgcatcccctaatggaatttcagtcaaacgtgaggagggagagagcaaaacgacctgatcctccttgcaccatctgcaagggcacagggagaatagactgccgcaactgctttggccgaggaagaacaaaccatgccgatgtggccatgcttccgaacggcgaatggccacaatggtgtcgaatttgtggtggtagtggactggattactgcctccggtgccatggaactgaggaatcgcctgggggctgggggtccagtttccagccgttctcgagatcgaatctgcatgccatgacgtcccagggcccggcgtcgaacgaggtcttggcgaacgccttccagtggctgtcgcccaggtccgtcaccgcctgccgcgccgtgtgcctcaggtggtccgagctgctctcttcgccccgtctcgagtttctcgccgacgtcgacgacggcaacgccgactcgtccgcatgcttcgctggcctcggcggtgccagcgcgggccgcgcccggcgccggcgcaggcgcaggcgcggcgacaccgttccagcagcaacttggtttccgtcgctgcccaaacttcagcagaggcgatctaagaagaagcaagcgtaccggcgcatgttctgacggccgagcgcatgttctgacggccgtgttcacgtggtgtaagttctgtgtcgagtccaatctgtgtgtcccttgtttgtcaggtttagattctgctattctactactatagtcagagtgcacgatgcacgcaactgtacgtctctatcgttgttttcaacatgatgaacatgcgaatttcgtggtattaa

SEQ ID NO: 19589 - DNA, 815 bp, Zea Mays
tgctattctccctgacggcattctggcagcaaggacattccaagttgtgggaacttcaaaatatggaggaactagaaatatgttttggcagcatcacaagtattggttttgatcattggtctcctcatatggccactgcttccaccattgctgaacaaggaggtacaccacacgaggcaatcaattgtgacacacaagaagatggtgacaccaatgaatgtgaagtttcaccggtcaatccaaatggcaagtgaccgccaaggttcaatcaaaacaaaggcaagaagcagaaaacagaaaatagggacaacactaatcatcgttcaataaacagttacatctatgtctgtttcaactaattcttatgctgcaaaaaagggaaaaatttccattgatgaagtgatgaaacatgtgcttgcttgtggtgccacctatggtagtaacgagcacttcattgcaactgaattatttgtcaaactgacccaaaaagagatgttcatgacctttcttaccgaacatagattcaactggctttcagggaaatacataaccaagtatggtaattataaagggccatgggtgtgatatgagttgtaaatgtttgtttttttatctcgttatgtgagacttatttgtttcttgttactttcatttctttatgtgagactcaatggatcattgtatctgctatctcatttgatgatggttatgtattattgtactattacttgtgtttgtataaaatctcatatttgctatcttatttgacattattatacgtttgtttgatatgggggttaatgaaaaggagtttc

SEQ ID NO: 19590 - DNA, 778 bp, Zea Mays
agccaagctcaccagagcagagaaactcgcacgcactcactctcttccccccctcctgcccactctccaaagcggcgcaagcatctagcaaagctgcgcagcgcagccagcaagcttggtctggagagacagatatagccagccagagagcagcagacgaggcatggcgacgtccgtggcttgcgccttcttcttcaagccgctgagccgcaacagcgacatcttcatgtacaagggcgacaccccgttctgcagcgaggactgccgctacgagcagatgggcctcgtccgtgggcgccaaggcggacgtgtccgtggccagctagtcagtagtaaaagcaagcacagcgacgccgagaaaggaggaggaggaggaggagaagaagaaggccgtgctggttgaagcagcgttacagctgcaagagatcccgttgggggggcggcgctccgctccgctcctggctggccgggcggggcgctgcgccgcacaacgagtttcgtgcgcggaacagaggcaagcggaggtggatggatctgaagaccgaagaaggtgacagatcgaacctgatctgcgggttggaagcttaaaccgacgccatacgtgctctgctccccttgtttatgtgttcccctgacgggatcttctgggctgtgtgtgctagagcttgaggcgtgagggtgtgtgcgggagcaccatcggcctgtaataactgtacgaatcattccagcatatgttatgtgctagccctaaaattttgatcgcagacatgttcttgtt

SEQ ID NO: 19591 - DNA, 956 bp, Zea Mays
acctcctgtctcccctttaaacacaccgatacagcacaccgtccatctctcccctccccctcgcaccgccgcgcggacacgaacacgcgagccaccgaacgggtccgggcccgatcgcaccgaccagccgcgcccgcggggcggggaggtggatccagtccagggaggtgacatcccgttctgcaccgaggattgcaggagggagcagatcgaaatggacgaggagatggagcggaaggagagcaaacccaagaacgtggcgccgagaggagctccatcccccaaggacgtggactccccgccgaggcctcccaaggcccgggccgggtcaatccttgccggctaacaccgtgaagaagaaaaaaaaaagctcacaaacgagctctcacgtatgcgcgctccccctccccaaaaccaagagatcagaccccctcttaccaccacgaactaccaccgctacagttacgtatatgggtttgtgctttttgtttaaaccccttgcgccattggtggcgccgtgacctgctcagtgtcagtgcctgcctacctgtatggctgtgatgatgtatagagatgggggaggggaggggaggggaggagagcgcgctggtgtttaggaccgcatgcagctcttattgcgctgctgtgtcgttcgttgtatcatgtgtgggtgtttctgcctccgtttacaggggatttttgtgaaatttctgtgtgctacgtagtagtagtagtagtcggtaatgatggttttaggcttatggtttcccgtaatgatgacgacggaaaatggaaaacatatgtctacagaaagaaatagacatcaagtacatgactagctcctgtgccatcgtggatgatcctgatttccttttttttaaagtaccttctgattggcaacaagtgtgtactgttcttggtcgatacatccaatgttttgttttttattagtggcg

SEQ ID NO: 19592 - DNA, 1117 bp, Zea Mays
acctcctgtctcccctttaaacacaccgatacagcacaccgtccatctctcccctccccctcgcaccgccgcgcggacacgaacacgcgagccaccgaacgggtccgggcccgatcgcaccgaccagccgcgcccgcggggcggggaggtggatccagtccaggggtgggctcctcttcaccgccgccgatggacttgggcctcagcgtcgcgggtaggaccggcagcggaggaggaagagggggcctgccgctgggccactttttggaggcctgcttcctctgccggaagcccctccccagcaaccgcgacatatttatgtacagaggtgacatcccgttctgcaccgaggattgcaggagggagcagatcgaaatggacgaggagatggagcggaaggagagcaaacccaagaacgtggcgccgagaggagctccatcccccaaggacgtggactccccgccgaggcctcccaaggcccgggccgggtcaatccttgccggctaacaccgtgaagaagaaaaaaaaaagctcacaaacgagctctcacgtatgcgcgctccccctccccaaaaccaagagatcagaccccctcttaccaccacgaactaccaccgctacagttacgtatatgggtttgtgctttttgtttaaaccccttgcgccattggtggcgccgtgacctgctcagtgtcagtgcctgcctacctgtatggctgtgatgatgtatagagatgggggaggggaggggaggggaggagagcgcgctggtgtttaggaccgcatgcagctcttattgcgctgctgtgtcgttcgttgtatcatgtgtgggtgtttctgcctccgtttacaggggatttttgtgaaatttctgtgtgctacgtagtagtagtagtagtcggtaatgatggttttaggcttatggtttcccgtaatgatgacgacggaaaatggaaaacatatgtctacagaaagaaatagacatcaagtacatgactagctcctgtgccatcgtggatgatcctgatttccttttttttaaagtaccttctgattggcaacaagtgtgtactgttcttggtcgatacatccaatgttttgttttttattagtggcg

SEQ ID NO: 19593 - DNA, 1977 bp, Zea Mays
atctttaggtatagccagctcgttacattctactaggtcttcaggcttgtgaggctcgattgtgtactcgtatagtcgtatgaatgaaatcattttttttttgcctactagtatcgtatgaatgaaaacatgttctagtgcctccgtttcaatgctcatgtaatcccaggctgcagttggagcttgggaggagagtccgtcgtctcccgtcccaccggcatgttgcggtcccggcgtgtcacatgtggggctctgatcacgcgaggaaattcatcgctgattctcggcggttccgacatttgaacgacgtcgacgggccatcacacgtgcccgttctgacgaggggaccgggaggtccgctccgcaaaccgcaaccgccccgcgctagagccgctgaaactgaactcctgacatggccaggccagcacgcaaagccctgataggcgcgccctccgccgcgcgctcgcgcggcctacggaggcacgcgtttccaagatctgctgtcgctctcttcctcgccctcctcgtcgcgctgtccttggcggtgctataccgtgccgccgtctcgcgctcgctggggacgtcctggtcctgggggtgggactcgctggcgctgccctcgttcgccacatcccaggaggaggagggcgcggaaggcgacgatctggacagtgaagatctcaaacttgagcgagtcctaaagaaggcttcaatgcgagacaatacagttatcttgactacacttaatgctgcatgggcttctcctgggtcattgatagaccttttcatcgatagcttccgttctggtgttagaacaaatttgctgttgaaacaccttgtaattgtagcatttgattggaaagcatatgaggaatgtgttaaaatccatccctattgctttgctctgggaaccgatggtgtggatttctctgaagagaagaggttcctgacttctggatatctcgagatgatgtggagaaggctagatttcctgcggctggttcttgagaaaggatgcagacattatgtggtttcgcaatccattcccacatttctatcccgatgtagactttcagattgcatgtgatcactatgtcaggaatgcaaccgacttgagaaatattgctaatggaggcttcagctatgtgaaatcaaatgagcgtagcatagagttttacagtttctggtattcgtcaagattgaggtatcctggctaccatgatcaggatgtattcaatgctataaagcatgatccttacattgtacacattggattgacatttaagtttctgagtacaaagtactttggagggttctgtgaaccaagcagagatctgaacgaagtctgcactatgcatgctaactgttgcattgggctgcaaagcaagattcatgatctgaagattatgatggaggattggaggagttatttgtccttgcctccaaatttgaaaagattgcaaatatctacttggcgggtaccacaaaattgcagccttgcatggtcgcgccattaaggcaacaaagcatgctgaggatcatgaaaagcatgtgagatcactagttgaaagattgcacctccccccctcctctcccggccaaacttataactgacctaactgataggtttcatctgtaaacaaaagctgcttcatttctgtgtgttctggaacttggattctttgaggggaaaacgtgataaatcatcaaatgagttgtagtttcttgatgttattgttgttgttgtgcatctcatcggagcaaagaagattcaagatatgtcccttttacttcccagatgctttacctggatatgcagtaagcacggtaagccgagcattagattgcatcagtttagaacctgactgcttaattggttgcccgtatcattttattctgtatcaacgtgtgcgttgactttatgtgagccactgtttggttacctgtacgtaggagacgtgacttgcataagcagat

SEQ ID NO: 19594 - DNA, 3626 bp, Zea Mays
gcaagaagtgcgatgacagccagacgaagttaaacatgtatgtcagtgaggcgtgcagcttccagagccagcagggttcttctcgttcgcaagggctaccgctagtcgctaccggcccctcacaagtcacatctaccccgtgcagcctctgataggaagcaactggccaactgccaactaagctgctccagaacaatagcgcacgtatgatgttgagctggaggatgggctcctaaagaatacccaagcagtccttcggagtcgggactagacatgaagtccatgctccaggtttggggcatcttctgctgtgtgtgttcctgtgcacttggacaaaatacttctgcgcggcccagtgtcgtgaacgttggagctctcttcacgttccactcgacgattgggagagccgccaaggtggccatcgctgctgcggtcaatgacatcaacagagatccaagcgttcttcaggggacgaagctggttgttcagatgcaagataccaactacagcggtttcatcagcattgttcaagccttgcaattcatggagaaagacacgatcgcgatcatcgggccacagtcttcagtcgttgcgcacgtcatatcccacgtcgcaaatgaactccaggtgcctctgatgtccttcgctgcaaccgatccgactctgacaccgcttcagtatcctttctttgtgcgcactgtccacagcgaccagttccagatggcttccgtggctgcgatagttgattactacgggtggaagatggtgacagccgtgtacatcgatgacgactacggaagaaacggcgtgtcctccttagacgacgagcttgccaagaggagactgaagatcctgtacaaagctgcgatcaggccaggggcaagaaagagcgagatggccgccgtgctggtcaaggctgcgatgatggagtcccgggttttcgtgctgcacgcgcgtgacgattctggaatcgacgtgttctcgctggcgtacaatctgagcatgacatccggtggatacgtgtggatcgcgacagattggctcaccgcgtgcctcgactcagctcctcgtcttggaactggattactgaacacgatgcagggtgttctcacgttgcgtcagcacacggagaacaccagtaggaagaaggcgttggtttcgcgatggagtgaagtggcgaaggaggaggaggaggaggacggcggcagcttgcccaatacctatggcctctatgcttatgacactgtctggatgcttgcccatgggttggatgcgtttttcaacagtggcggaaacatttccttctctccagaccccagactgcgtgcggttgtaggaggagctctgaatctggacgcactgagcgtcttcgacgaggggacgctgttgctagaaagaatccgcaacgtgagtttcatgggtgcgactggccctgtaaagttggactcagatggtaaccttatccagcctgcatatgacattgtaaacgtagtagggtctggtttgaggacgattggctattggtccaactactctgggctgtccgttgtgtcccctgagactctgtacaagaaaccattcaatgtcagtgcaaaccaggagctccacgctgccatctggccaggcgagactgtaacgaggccccggggatgggtgttccctaacaacgggaatgagctgaggattggagttcccgacagggtaagctaccgtcagtttatatcagtagacaatcaaactggaacggtgggaggtttctgcatcgatgtgtttgctgctgcgataaacctgctgcagtacccagtcacatataggtttgtgccttttggcaatggccgtgagaatccaagctacacggaacttatcggtcgaattctgacgaatgaatttgatgctgttgttggggatgtagctattgtcacgaatcggacaaaagttgttgatttcacccagccatacgttgcttctggcctcgtcatacttaccgccgtcaagacacagagctcggatgcatgggctttcctgcagccgtttaccatcagaatgtggtctgtgacaggggtgttctttctggtcgtaggagcagtgatttggttgctcgagcacagaatcaacgacgacttccgtggtcctccagcgaagcaggttattactgttttctggttcagtttctcaactctgttctttgcccacagagaggacacgaggagcacgctgggccgcgtcgtggtcatcatctggctgttcgtagtcctgatcatccagtccagctacaccgcgagcctgacctccatcctcaccgtgcagcagctgacgtccccgatcaagggcatcgacagcctgatcgccagcgacgagcccatcgggttccaggttgggtccttcgcggagagctacctggtgcacgagctgggcgtctccccgtccaggctcaaggcgctcggcaccccggacgagtacaagaacgcgctagagctcgggcctcgcaagggaggcgtcgtggccatcgtcgacgagcgcccgtacgtcgaggtcttcctggtgcagcacgacaagttcgccatcgtgggcgcggagttcaccaagagcggctggggcttcgcgttcccgcgtgactcgcctctggccgtggacctgtcgacggcgatcctggcgctgtcggagaacggcgacctgcagaggatccacgacaagtggctgtcgaacgggccgtcgccccagtccacgaccgacctggagccggaacggctgcgggtgcagagcttctcggcgctgttcctcctctgcggcgcggcgtgcctcgcggcgctggccatccacggctgcatcctggcccggcagtactccctccacgtggcgtcccagccgccggacgcggtggccacgggggccgacggcgccatccgccgctccagccgcagcagcatccggtcgttcctgtccttcgcggaccgccgggaggcgcagtgcccgagggggagctgcaaggaccccgccgcggcgctgggagggtcctccagcagcggcgtcagcagcttcacgtcaagcaacgccagcgtatcgaggtagccgcgtccgatggaccggcatacgcacggcacgatacgtcgatgcctcagcacagatagtccacactactgtacgtgcgcgtaggccgtagatgccggcgtgtaaatggtcgtatcgtagagacattgattcgattttgctaccgtctggggtccatggtgcagtgaatttggatccccgtgtgctgaggaattgtatacgtacgagtaaagcagcgcgcatggggggcaggcgggcagggcagtttcgcggccttgcagttgcagcacacgttgcggagattaatgtccgatcctaggcatttgattaaagaacactaccagcctgcgtacataaacatggagatggtaggcatgcaaagcaacgtttgtcggtaacctccccttccgcacaccaaaactagcagcagcagcagcactcgtatggctacccggcggccccctggcaagtttggatggtctggcccagacagtcccagctattgcagttaaactagacttttgcaaaggccttcgacactgtcaattggcgcgcgttaatgaacattatgagagccc

SEQ ID NO: 19595 - DNA, 3486 bp, Zea Mays
gagccagcagggttcttctcgttcgcaagggctaccgctagtcgctaccggcccctcacaagtcacatctaccccgtgcagcctctgataggaagcaactggccaactgccaactaagctgctccagaacaatagcgcacgtatgatgttgagctggaggatgggctcctaaagaatacccaagcagtccttcggagtcgggactagacatgaagtccatgctccaggtttggggcatcttctgctgtgtgtgttcctgtgcacttggacaaaatacttctgcgcggcccagtgtcgtgaacgttggagctctcttcacgttccactcgacgattgggagagccgccaaggtggccatcgctgctgcggtcaatgacatcaacagagatccaagcgttcttcaggggacgaagctggttgttcagatgcaagataccaactacagcggtttcatcagcattgttcaagccttgcaattcatggagaaagacacgatcgcgatcatcgggccacagtcttcagtcgttgcgcacgtcatatcccacgtcgcaaatgaactccagcgaccagttccagatggcttccgtggctgcgatagttgattactacgggtggaagatggtgacagccgtgtacatcgatgacgactacggaagaaacggcgtgtcctccttagacgacgagcttgccaagaggagactgaagatcctgtacaaagctgcgatcaggccaggggcaagaaagagcgagatggccgccgtgctggtcaaggctgcgatgatggagtcccgggttttcgtgctgcacgcgcgtgacgattctggaatcgacgtgttctcgctggcgtacaatctgagcatgacatccggtggatacgtgtggatcgcgacagattggctcaccgcgtgcctcgactcagctcctcgtcttggaactggattactgaacacgatgcagggtgttctcacgttgcgtcagcacacggagaacaccagtaggaagaaggcgttggtttcgcgatggagtgaagtggcgaaggaggaggaggaggaggacggcggcagcttgcccaatacctatggcctctatgcttatgacactgtctggatgcttgcccatgggttggatgcgtttttcaacagtggcggaaacatttccttctctccagaccccagactgcgtgcggttgtaggaggagctctgaatctggacgcactgagcgtcttcgacgaggggacgctgttgctagaaagaatccgcaacgtgagtttcatgggtgcgactggccctgtaaagttggactcagatggtaaccttatccagcctgcatatgacattgtaaacgtagtagggtctggtttgaggacgattggctattggtccaactactctgggctgtccgttgtgtcccctgagactctgtacaagaaaccattcaatgtcagtgcaaaccaggagctccacgctgccatctggccaggcgagactgtaacgaggccccggggatgggtgttccctaacaacgggaatgagctgaggattggagttcccgacagggtaagctaccgtcagtttatatcagtagacaatcaaactggaacggtgggaggtttctgcatcgatgtgtttgctgctgcgataaacctgctgcagtacccagtcacatataggtttgtgccttttggcaatggccgtgagaatccaagctacacggaacttatcggtcgaattctgacgaatgaatttgatgctgttgttggggatgtagctattgtcacgaatcggacaaaagttgttgatttcacccagccatacgttgcttctggcctcgtcatacttaccgccgtcaagacacagagctcggatgcatgggctttcctgcagccgtttaccatcagaatgtggtctgtgacaggggtgttctttctggtcgtaggagcagtgatttggttgctcgagcacagaatcaacgacgacttccgtggtcctccagcgaagcaggttattactgttttctggttcagtttctcaactctgttctttgcccacagagaggacacgaggagcacgctgggccgcgtcgtggtcatcatctggctgttcgtagtcctgatcatccagtccagctacaccgcgagcctgacctccatcctcaccgtgcagcagctgacgtccccgatcaagggcatcgacagcctgatcgccagcgacgagcccatcgggttccaggttgggtccttcgcggagagctacctggtgcacgagctgggcgtctccccgtccaggctcaaggcgctcggcaccccggacgagtacaagaacgcgctagagctcgggcctcgcaagggaggcgtcgtggccatcgtcgacgagcgcccgtacgtcgaggtcttcctggtgcagcacgacaagttcgccatcgtgggcgcggagttcaccaagagcggctggggcttcgtgagcgttcccgcgtgactcgcctctggccgtggacctgtcgacggcgatcctggcgctgtcggagaacggcgacctgcagaggatccacgacaagtggctgtcgaacgggccgtcgccccagtccacgaccgacctggagccggaacggctgcgggtgcagagcttctcggcgctgttcctcctctgcggcgcggcgtgcctcgcggcgctggccatccacggctgcatcctggcccggcagtactccctccacgtggcgtcccagccgccggacgcggtggccacgggggccgacggcgccatccgccgctccagccgcagcagcatccggtcgttcctgtccttcgcggaccgccgggaggcgcagtgcccgagggggagctgcaaggaccccgccgcggcgctgggagggtcctccagcagcggcgtcagcagcttcacgtcaagcaacgccagcgtatcgaggtagccgcgtccgatggaccggcatacgcacggcacgatacgtcgatgcctcagcacagatagtccacactactgtacgtgcgcgtaggccgtagatgccggcgtgtaaatggtcgtatcgtagagacattgattcgattttgctaccgtctggggtccatggtgcagtgaatttggatccccgtgtgctgaggaattgtatacgtacgagtaaagcagcgcgcatggggggcaggcgggcagggcagtttcgcggccttgcagttgcagcacacgttgcggagattaatgtccgatcctaggcatttgattaaagaacactaccagcctgcgtacataaacatggagatggtaggcatgcaaagcaacgtttgtcggtaacctccccttccgcacaccaaaactagcagcagcagcagcactcgtatggctacccggcggccccctggcaagtttggatggtctggcccagacagtcccagctattgcagttaaactagacttttgcaaaggccttcgacactgtcaattggcgcgcgttaatgaacattatgagagccc

SEQ ID NO: 19596 - DNA, 3670 bp, Zea Mays
cgttcgcaagggctaccgctagtcgctaccggcccctcacaagtcacatctaccccgtgcagcctctgataggaagcaactggccaactgccaactaagctgctccagaacaatagcggtaagagcaaccatgcctcaacccacaacaagacagcgctgaaagggtagacgagggttcccgggacaattatttgcggatcatgcatgctccacgcttttggatttaccctgttgttttctccaaacacgtatgatgttgagctggaggatgggctcctaaagaatacccaagcagtccttcggagtcgggactagacatgaagtccatgctccaggtttggggcatcttctgctgtgtgtgttcctgtgcacttggacaaaatacttctgcgcggcccagtgtcgtgaacgttggagctctcttcacgttccactcgacgattgggagagccgccaaggtggccatcgctgctgcggtcaatgacatcaacagagatccaagcgttcttcaggggacgaagctggttgttcagatgcaagataccaactacagcggtttcatcagcattgttcaagccttgcaattcatggagaaagacacgatcgcgatcatcgggccacagtcttcagtcgttgcgcacgtcatatcccacgtcgcaaatgaactccaggtgcctctgatgtccttcgctgcaaccgatccgactctgacaccgcttcagtatcctttctttgtgcgcactgtccacagcgaccagttccagatggcttccgtggctgcgatagttgattactacgggtggaagatggtgacagccgtgtacatcgatgacgactacggaagaaacggcgtgtcctccttagacgacgagcttgccaagaggagactgaagatcctgtacaaagctgcgatcaggccaggggcaagaaagagcgagatggccgccgtgctggtcaaggctgcgatgatggagtcccgggttttcgtgctgcacgcgcgtgacgattctggaatcgacgtgttctcgctggcgtacaatctgagcatgacatccggtggatacgtgtggatcgcgacagattggctcaccgcgtgcctcgactcagctcctcgtcttggaactggattactgaacacgatgcagggtgttctcacgttgcgtcagcacacggagaacaccagtaggaagaaggcgttggtttcgcgatggagtgaagtggcgaaggaggaggaggaggaggacggcggcagcttgcccaatacctatggcctctatgcttatgacactgtctggatgcttgcccatgggttggatgcgtttttcaacagtggcggaaacatttccttctctccagaccccagactgcgtgcggttgtaggaggagctctgaatctggacgcactgagcgtcttcgacgaggggacgctgttgctagaaagaatccgcaacgtgagtttcatgggtgcgactggccctgtaaagttggactcagatggtaaccttatccagcctgcatatgacattgtaaacgtagtagggtctggtttgaggacgattggctattggtccaactactctgggctgtccgttgtgtcccctgagactctgtacaagaaaccattcaatgtcagtgcaaaccaggagctccacgctgccatctggccaggcgagactgtaacgaggccccggggatgggtgttccctaacaacgggaatgagctgaggattggagttcccgacagggtaagctaccgtcagtttatatcagtagacaatcaaactggaacggtgggaggtttctgcatcgatgtgtttgctgctgcgataaacctgctgcagtacccagtcacatataggtttgtgccttttggcaatggccgtgagaatccaagctacacggaacttatcggtcgaattctgacgaatgaatttgatgctgttgttggggatgtagctattgtcacgaatcggacaaaagttgttgatttcacccagccatacgttgcttctggcctcgtcatacttaccgccgtcaagacacagagctcggatgcatgggctttcctgcagccgtttaccatcagaatgtggtctgtgacaggggtgttctttctggtcgtaggagcagtgatttggttgctcgagcacagaatcaacgacgacttccgtggtcctccagcgaagcaggttattactgttttctggttcagtttctcaactctgttctttgcccacagagaggacacgaggagcacgctgggccgcgtcgtggtcatcatctggctgttcgtagtcctgatcatccagtccagctacaccgcgagcctgacctccatcctcaccgtgcagcagctgacgtccccgatcaagggcatcgacagcctgatcgccagcgacgagcccatcgggttccaggttgggtccttcgcggagagctacctggtgcacgagctgggcgtctccccgtccaggctcaaggcgctcggcaccccggacgagtacaagaacgcgctagagctcgggcctcgcaagggaggcgtcgtggccatcgtcgacgagcgcccgtacgtcgaggtcttcctggtgcagcacgacaagttcgccatcgtgggcgcggagttcaccaagagcggctggggcttcgcgttcccgcgtgactcgcctctggccgtggacctgtcgacggcgatcctggcgctgtcggagaacggcgacctgcagaggatccacgacaagtggctgtcgaacgggccgtcgccccagtccacgaccgacctggagccggaacggctgcgggtgcagagcttctcggcgctgttcctcctctgcggcgcggcgtgcctcgcggcgctggccatccacggctgcatcctggcccggcagtactccctccacgtggcgtcccagccgccggacgcggtggccacgggggccgacggcgccatccgccgctccagccgcagcagcatccggtcgttcctgtccttcgcggaccgccgggaggcgcagtgcccgagggggagctgcaaggaccccgccgcggcgctgggagggtcctccagcagcggcgtcagcagcttcacgtcaagcaacgccagcgtatcgaggtagccgcgtccgatggaccggcatacgcacggcacgatacgtcgatgcctcagcacagatagtccacactactgtacgtgcgcgtaggccgtagatgccggcgtgtaaatggtcgtatcgtagagacattgattcgattttgctaccgtctggggtccatggtgcagtgaatttggatccccgtgtgctgaggaattgtatacgtacgagtaaagcagcgcgcatggggggcaggcgggcagggcagtttcgcggccttgcagttgcagcacacgttgcggagattaatgtccgatcctaggcatttgattaaagaacactaccagcctgcgtacataaacatggagatggtaggcatgcaaagcaacgtttgtcggtaacctccccttccgcacaccaaaactagcagcagcagcagcactcgtatggctacccggcggccccctggcaagtttggatggtctggcccagacagtcccagctattgcagttaaactagacttttgcaaaggccttcgacactgtcaattggcgcgcgttaatgaacattatgagagccc

SEQ ID NO: 19597 - DNA, 3827 bp, Zea Mays
cgttcgcaagggctaccgctagtcgctaccggcccctcacaagtcacatctaccccgtgcagcctctgataggaagcaactggccaactgccaactaagctgctccagaacaatagcggtaagagcaaccatgcctcaacccacaacaagacagcgctgaaagggtagacgagggttcccgggacaattatttgcggatcatgcatgctccacgcttttggatttaccctgttgttttctccaaagtgagattttagtcccatgtcccttcgtacctgatcctcttgcccccctcgtgctcatatagagaattatgcggtcaaacccatctcagctcatgctcgggtctatgttctaattttgcttcttatgccgatagttcatggccaagtcttaagcacgtatgatgttgagctggaggatgggctcctaaagaatacccaagcagtccttcggagtcgggactagacatgaagtccatgctccaggtttggggcatcttctgctgtgtgtgttcctgtgcacttggacaaaatacttctgcgcggcccagtgtcgtgaacgttggagctctcttcacgttccactcgacgattgggagagccgccaaggtggccatcgctgctgcggtcaatgacatcaacagagatccaagcgttcttcaggggacgaagctggttgttcagatgcaagataccaactacagcggtttcatcagcattgttcaagccttgcaattcatggagaaagacacgatcgcgatcatcgggccacagtcttcagtcgttgcgcacgtcatatcccacgtcgcaaatgaactccaggtgcctctgatgtccttcgctgcaaccgatccgactctgacaccgcttcagtatcctttctttgtgcgcactgtccacagcgaccagttccagatggcttccgtggctgcgatagttgattactacgggtggaagatggtgacagccgtgtacatcgatgacgactacggaagaaacggcgtgtcctccttagacgacgagcttgccaagaggagactgaagatcctgtacaaagctgcgatcaggccaggggcaagaaagagcgagatggccgccgtgctggtcaaggctgcgatgatggagtcccgggttttcgtgctgcacgcgcgtgacgattctggaatcgacgtgttctcgctggcgtacaatctgagcatgacatccggtggatacgtgtggatcgcgacagattggctcaccgcgtgcctcgactcagctcctcgtcttggaactggattactgaacacgatgcagggtgttctcacgttgcgtcagcacacggagaacaccagtaggaagaaggcgttggtttcgcgatggagtgaagtggcgaaggaggaggaggaggaggacggcggcagcttgcccaatacctatggcctctatgcttatgacactgtctggatgcttgcccatgggttggatgcgtttttcaacagtggcggaaacatttccttctctccagaccccagactgcgtgcggttgtaggaggagctctgaatctggacgcactgagcgtcttcgacgaggggacgctgttgctagaaagaatccgcaacgtgagtttcatgggtgcgactggccctgtaaagttggactcagatggtaaccttatccagcctgcatatgacattgtaaacgtagtagggtctggtttgaggacgattggctattggtccaactactctgggctgtccgttgtgtcccctgagactctgtacaagaaaccattcaatgtcagtgcaaaccaggagctccacgctgccatctggccaggcgagactgtaacgaggccccggggatgggtgttccctaacaacgggaatgagctgaggattggagttcccgacagggtaagctaccgtcagtttatatcagtagacaatcaaactggaacggtgggaggtttctgcatcgatgtgtttgctgctgcgataaacctgctgcagtacccagtcacatataggtttgtgccttttggcaatggccgtgagaatccaagctacacggaacttatcggtcgaattctgacgaatgaatttgatgctgttgttggggatgtagctattgtcacgaatcggacaaaagttgttgatttcacccagccatacgttgcttctggcctcgtcatacttaccgccgtcaagacacagagctcggatgcatgggctttcctgcagccgtttaccatcagaatgtggtctgtgacaggggtgttctttctggtcgtaggagcagtgatttggttgctcgagcacagaatcaacgacgacttccgtggtcctccagcgaagcaggttattactgttttctggttcagtttctcaactctgttctttgcccacagagaggacacgaggagcacgctgggccgcgtcgtggtcatcatctggctgttcgtagtcctgatcatccagtccagctacaccgcgagcctgacctccatcctcaccgtgcagcagctgacgtccccgatcaagggcatcgacagcctgatcgccagcgacgagcccatcgggttccaggttgggtccttcgcggagagctacctggtgcacgagctgggcgtctccccgtccaggctcaaggcgctcggcaccccggacgagtacaagaacgcgctagagctcgggcctcgcaagggaggcgtcgtggccatcgtcgacgagcgcccgtacgtcgaggtcttcctggtgcagcacgacaagttcgccatcgtgggcgcggagttcaccaagagcggctggggcttcgtgagcgttcccgcgtgactcgcctctggccgtggacctgtcgacggcgatcctggcgctgtcggagaacggcgacctgcagaggatccacgacaagtggctgtcgaacgggccgtcgccccagtccacgaccgacctggagccggaacggctgcgggtgcagagcttctcggcgctgttcctcctctgcggcgcggcgtgcctcgcggcgctggccatccacggctgcatcctggcccggcagtactccctccacgtggcgtcccagccgccggacgcggtggccacgggggccgacggcgccatccgccgctccagccgcagcagcatccggtcgttcctgtccttcgcggaccgccgggaggcgcagtgcccgagggggagctgcaaggaccccgccgcggcgctgggagggtcctccagcagcggcgtcagcagcttcacgtcaagcaacgccagcgtatcgaggtagccgcgtccgatggaccggcatacgcacggcacgatacgtcgatgcctcagcacagatagtccacactactgtacgtgcgcgtaggccgtagatgccggcgtgtaaatggtcgtatcgtagagacattgattcgattttgctaccgtctggggtccatggtgcagtgaatttggatccccgtgtgctgaggaattgtatacgtacgagtaaagcagcgcgcatggggggcaggcgggcagggcagtttcgcggccttgcagttgcagcacacgttgcggagattaatgtccgatcctaggcatttgattaaagaacactaccagcctgcgtacataaacatggagatggtaggcatgcaaagcaacgtttgtcggtaacctccccttccgcacaccaaaactagcagcagcagcagcactcgtatggctacccggcggccccctggcaagtttggatggtctggcccagacagtcccagctattgcagttaaactagacttttgcaaaggccttcgacactgtcaattggcgcgcgttaatgaacattatgagagccc

SEQ ID NO: 19598 - DNA, 2383 bp, Zea Mays
ggaatccaaagccgttgcgcatcgcccatcgccgcccacacctcttctgcagttctacttcacgtcttgaccacgtccgcctcggcccctggtctcctactctcctccccactcctccctcggcctggagtccagtcctcgactccgcctgccgcctgctgcctgacaagccacgcgctgcggcagccgtacgggcactagggttttcttccacttcgaccgcgggctcgggatctcgcgccgcaccgcaatgcagcacacgtgccgctgatcccgtggccgcctccttcctttcctcctcctgcggtcctgcgccgcctctgctgcagcgggcagccgccatggcgcggcgccacgggtggcagctccccgcccacaccctgcaggtggtggctataacagtgtactctgtgctttgtatagcattctatgctttcttctctccatttcttgggaaggacttgtatcaatatatcgctgtcggtatttatagttttttgatgtactgcgattgatcctgctgactctggcatcctgatttccatggatgacatactaatttataaatcagaagcacatgtagacactcaagatgaagctggtaagccaggattgaggaacgatgaggatatccgaaagcataaatcatgctttggaagggtttgtttttgttgcgctatttttacaactggggactgtcgcggaggggatgaagctaaccatcaagaagattatggtgaagaggcactcttttgcaccctttgcaacgcagaggtgcgcaaacatagcaagcactgtcgaagttgcgacaagtgtgttgatgggtttgatcatcactgccggcttgctgctgagtgtggagttggtattgctgtttttgttcgttgcttcactgacaagacagtcatagaagatcagattggggaaaagctgggttacggtctttcacgtgcaccctttgcaaccattgtagccctggctacagctctttcaatgcttgcttcagtaccactaggagaactatttttcttccatatgatattaatccggaagggcataacaacttatgaatatgttgtggccatgagggctcagagtgaacctcctggaccttctgtcaatgatgaccaacaaagcttggcatcttctccaatgagttctgcaccaacagcttttagtgggagctcgtttgcacggcactacaaaggcgcatggtgcactcccccacgtatcttcattgaccaggacgaaatcatcccacacctggagcctggccgagttccttcaactgttgatcctgataccacagacccaatggaaagaaccaaaacccatcctaaacggccagtccgcatcagtgcgtggaagcttgcgaagctcgattcaaatgaggccatgaaagcagcagcgaaagccagagcctcttcgtccgtgctgaaaccgatcaatactcgcaaccagtatgaggcagacagtgatagcctcagtagcagaaacagtgtcataagtgctgataccggacaccataggtaccctcggtcttgcgggaattcgcagtacaagccctcttatccaccaagcagagcaagtgcagatgacatcgagttgtacccccagacaccgagcagcttccagagcaactcacggacttcaactcccatagccgagcaccatccatccaagcatttcaacccaatctaccagacatcagcaaacaggtctccattctcagcaaaagcaagtgtcagtgaagctcctgtctctgaaatcaccaatgcagggaggtcctaccccccaccacaagcggacagatcctcccggtcatctgtttactgggatcaggaagctggcaggttcgtgtctgctcaggcaaaccagggatctagctctcgccctgcctatcctgatcttctatacaccgggcagaatatattctttggtggacctctgattgcagatcccgcagcaagaagcttcagagatcctggtggctcgagccaaaggtctgccgggcctcggtcgcaccagctcccggtgttcgttcccagtgacccccagaaagatcagctgtccaggttaccgtgaaatgctatatcttttttttttggggggggggggggggtagtagtcttccgaaacacatgttgccctgccgggttattaatgtatagttattagctcttagacctgacagaatagttcatgactttgtatcgggttcatggaaattaagacctatttaggcactatcaaccataagcactgaagttatggaagtgctgcggagtagtagtgaagtgaaactgacaaggatgttctgtcaccaaacctaattagcttcacctcgccatatactcaaaacaaggcgataactaccaacgtg

SEQ ID NO: 19599 - DNA, 2485 bp, Zea Mays
cccacacctcttctgcagttctacttcacgtcttgaccacgtccgcctcggcccctggtctcctactctcctccccactcctccctcggcctggagtccagtcctcgactccgcctgccgcctgctgcctgacaagccacgcgctgcggcagccgtacgggcactagggttttcttccacttcgaccgcgggctcgggatctcgcgccgcaccgcaatgcagcacacgtgccgctgatcccgtggccgcctccttcctttcctcctcctgcggtcctgcgccgcctctgctgcagcgggcagccgccatggcgcggcgccacgggtggcagctccccgcccacaccctgcagagctacatcctgatcttctgcggcatagaaggtggtggctataacagtgtactctgtgctttgtatagcattctatgctttcttctctccatttcttgggaaggacttgtatcaatatatcgctgtcggtatttatagttttttgccaggctttatctgtgctgattctatatgtcagatgtactgcgattgatcctgctgactctggcatcctgatttccatggatgacatactaatttataaatcagaagcacatgtagacactcaagatgaagctggtaagccaggattgaggaacgatgaggatatccgaaagcataaatcatgctttggaagggtttgtttttgttgcgctatttttacaactggggactgtcgcggaggggatgaagctaaccatcaagaagattatggtgaagaggcactcttttgcaccctttgcaacgcagaggtgcgcaaacatagcaagcactgtcgaagttgcgacaagtgtgttgatgggtttgatcatcactgccggtggctgaacaattgtgttggaagaaaaaattatatcacatttttatgccttatggctgtgagtctggcttggcttgctgctgagtgtggagttggtattgctgtttttgttcgttgcttcactgacaagacagtcatagaagatcagattggggaaaagctgggttacggtctttcacgtgcaccctttgcaaccattgtagccctggctacagctctttcaatgcttgcttcagtaccactaggagaactatttttcttccatatgatattaatccggaagggcataacaacttatgaatatgttgtggccatgagggctcagagtgaacctcctggaccttctgtcaatgatgaccaacaaagcttggcatcttctccaatgagttctgcaccaacagcttttagtgggagctcgtttgcacggcactacaaaggcgcatggtgcactcccccacgtatcttcattgaccaggacgaaatcatcccacacctggagcctggccgagttccttcaactgttgatcctgataccacagacccaatggaaagaaccaaaacccatcctaaacggccagtccgcatcagtgcgtggaagcttgcgaagctcgattcaaatgaggccatgaaagcagcagcgaaagccagagcctcttcgtccgtgctgaaaccgatcaatactcgcaaccagtatgaggcagacagtgatagcctcagtagcagaaacagtgtcataagtgctgataccggacaccataggtaccctcggtcttgcgggaattcgcagtacaagccctcttatccaccaagcagagcaagtgcagatgacatcgagttgtacccccagacaccgagcagcttccagagcaactcacggacttcaactcccatagccgagcaccatccatccaagcatttcaacccaatctaccagacatcagcaaacaggtctccattctcagcaaaagcaagtgtcagtgaagctcctgtctctgaaatcaccaatgcagggaggtcctaccccccaccacaagcggacagatcctcccggtcatctgtttactgggatcaggaagctggcaggttcgtgtctgctcaggcaaaccagggatctagctctcgccctgcctatcctgatcttctatacaccgggcagaatatattctttggtggacctctgattgcagatcccgcagcaagaagcttcagagatcctggtggctcgagccaaaggtctgccgggcctcggtcgcaccagctcccggtgttcgttcccagtgacccccagaaagatcagctgtccaggttaccgtgaaatgctatatcttttttttttggggggggggggggggtagtagtcttccgaaacacatgttgccctgccgggttattaatgtatagttattagctcttagacctgacagaatagttcatgactttgtatcgggttcatggaaattaagacctatttaggcactatcaaccataagcactgaagttatggaagtgctgcggagtagtagtgaagtgaaactgacaaggatgttctgtcaccaaacctaattagcttcacctcgccatatactcaaaacaaggcgataactaccaacgtg

SEQ ID NO: 19600 - DNA, 2375 bp, Zea Mays
ctcggcccctggtctcctactctcctccccactcctccctcggcctggagtccagtcctcgactccgcctgccgcctgctgcctgacaagccacgcgctgcggcagccgtacgggcactagggttttcttccacttcgaccgcgggctcgggatctcgcgccgcaccgcaatgcagcacacgtgccgctgatcccgtggccgcctccttcctttcctcctcctgcggtcctgcgccgcctctgctgcagcgggcagccgccatggcgcggcgccacgggtggcagctccccgcccacaccctgcaggtggtggctataacagtgtactctgtgctttgtatagcattctatgctttcttctctccatttcttgggaaggacttgtatcaatatatcgctgtcggtatttatagttttttgatgtactgcgattgatcctgctgactctggcatcctgatttccatggatgacatactaatttataaatcagaagcacatgtagacactcaagatgaagctggtaagccaggattgaggaacgatgaggatatccgaaagcataaatcatgctttggaagggtttgtttttgttgcgctatttttacaactggggactgtcgcggaggggatgaagctaaccatcaagaagattatggtgaagaggcactcttttgcaccctttgcaacgcagaggtgcgcaaacatagcaagcactgtcgaagttgcgacaagtgtgttgatgggtttgatcatcactgccggtggctgaacaattgtgttggaagaaaaaattatatcacatttttatgccttatggctgtgagtctggcttggcttgctgctgagtgtggagttggtattgctgtttttgttcgttgcttcactgacaagacagtcatagaagatcagattggggaaaagctgggttacggtctttcacgtgcaccctttgcaaccattgtagccctggctacagctctttcaatgcttgcttcagtaccactaggagaactatttttcttccatatgatattaatccggaagggcataacaacttatgaatatgttgtggccatgagggctcagagtgaacctcctggaccttctgtcaatgatgaccaacaaagcttggcatcttctccaatgagttctgcaccaacagcttttagtgggagctcgtttgcacggcactacaaaggcgcatggtgcactcccccacgtatcttcattgaccaggacgaaatcatcccacacctggagcctggccgagttccttcaactgttgatcctgataccacagacccaatggaaagaaccaaaacccatcctaaacggccagtccgcatcagtgcgtggaagcttgcgaagctcgattcaaatgaggccatgaaagcagcagcgaaagccagagcctcttcgtccgtgctgaaaccgatcaatactcgcaaccagtatgaggcagacagtgatagcctcagtagcagaaacagtgtcataagtgctgataccggacaccataggtaccctcggtcttgcgggaattcgcagtacaagccctcttatccaccaagcagagcaagtgcagatgacatcgagttgtacccccagacaccgagcagcttccagagcaactcacggacttcaactcccatagccgagcaccatccatccaagcatttcaacccaatctaccagacatcagcaaacaggtctccattctcagcaaaagcaagtgtcagtgaagctcctgtctctgaaatcaccaatgcagggaggtcctaccccccaccacaagcggacagatcctcccggtcatctgtttactgggatcaggaagctggcaggttcgtgtctgctcaggcaaaccagggatctagctctcgccctgcctatcctgatcttctatacaccgggcagaatatattctttggtggacctctgattgcagatcccgcagcaagaagcttcagagatcctggtggctcgagccaaaggtctgccgggcctcggtcgcaccagctcccggtgttcgttcccagtgacccccagaaagatcagctgtccaggttaccgtgaaatgctatatcttttttttttggggggggggggggggtagtagtcttccgaaacacatgttgccctgccgggttattaatgtatagttattagctcttagacctgacagaatagttcatgactttgtatcgggttcatggaaattaagacctatttaggcactatcaaccataagcactgaagttatggaagtgctgcggagtagtagtgaagtgaaactgacaaggatgttctgtcaccaaacctaattagcttcacctcgccatatactcaaaacaaggcgataactaccaacgtg

SEQ ID NO: 19601 - DNA, 2332 bp, Zea Mays
cggcccctggtctcctactctcctccccactcctccctcggcctggagtccagtcctcgactccgcctgccgcctgctgcctgacaagccacgcgctgcggcagccgtacgggcactagggttttcttccacttcgaccgcgggctcgggatctcgcgccgcaccgcaatgcagcacacgtgccgctgatcccgtggccgcctccttcctttcctcctcctgcggtcctgcgccgcctctgctgcagcgggcagccgccatggcgcggcgccacgggtggcagctccccgcccacaccctgcagagctacatcctgatcttctgcggcatagaaggtggtggctataacagtgtactctgtgctttgtatagcattctatgctttcttctctccatttcttgggaaggacttgtatcaatatatcgctgtcggtatttatagttttttgatgtactgcgattgatcctgctgactctggcatcctgatttccatggatgacatactaatttataaatcagaagcacatgtagacactcaagatgaagctggtaagccaggattgaggaacgatgaggatatccgaaagcataaatcatgctttggaagggtttgtttttgttgcgctatttttacaactggggactgtcgcggaggggatgaagctaaccatcaagaagattatggtgaagaggcactcttttgcaccctttgcaacgcagaggtgcgcaaacatagcaagcactgtcgaagttgcgacaagtgtgttgatgggtttgatcatcactgccggcttgctgctgagtgtggagttggtattgctgtttttgttcgttgcttcactgacaagacagtcatagaagatcagattggggaaaagctgggttacggtctttcacgtgcaccctttgcaaccattgtagccctggctacagctctttcaatgcttgcttcagtaccactaggagaactatttttcttccatatgatattaatccggaagggcataacaacttatgaatatgttgtggccatgagggctcagagtgaacctcctggaccttctgtcaatgatgaccaacaaagcttggcatcttctccaatgagttctgcaccaacagcttttagtgggagctcgtttgcacggcactacaaaggcgcatggtgcactcccccacgtatcttcattgaccaggacgaaatcatcccacacctggagcctggccgagttccttcaactgttgatcctgataccacagacccaatggaaagaaccaaaacccatcctaaacggccagtccgcatcagtgcgtggaagcttgcgaagctcgattcaaatgaggccatgaaagcagcagcgaaagccagagcctcttcgtccgtgctgaaaccgatcaatactcgcaaccagtatgaggcagacagtgatagcctcagtagcagaaacagtgtcataagtgctgataccggacaccataggtaccctcggtcttgcgggaattcgcagtacaagccctcttatccaccaagcagagcaagtgcagatgacatcgagttgtacccccagacaccgagcagcttccagagcaactcacggacttcaactcccatagccgagcaccatccatccaagcatttcaacccaatctaccagacatcagcaaacaggtctccattctcagcaaaagcaagtgtcagtgaagctcctgtctctgaaatcaccaatgcagggaggtcctaccccccaccacaagcggacagatcctcccggtcatctgtttactgggatcaggaagctggcaggttcgtgtctgctcaggcaaaccagggatctagctctcgccctgcctatcctgatcttctatacaccgggcagaatatattctttggtggacctctgattgcagatcccgcagcaagaagcttcagagatcctggtggctcgagccaaaggtctgccgggcctcggtcgcaccagctcccggtgttcgttcccagtgacccccagaaagatcagctgtccaggttaccgtgaaatgctatatcttttttttttggggggggggggggggtagtagtcttccgaaacacatgttgccctgccgggttattaatgtatagttattagctcttagacctgacagaatagttcatgactttgtatcgggttcatggaaattaagacctatttaggcactatcaaccataagcactgaagttatggaagtgctgcggagtagtagtgaagtgaaactgacaaggatgttctgtcaccaaacctaattagcttcacctcgccatatactcaaaacaaggcgataactaccaacgtg

SEQ ID NO: 19602 - DNA, 2405 bp, Zea Mays
ggcccctggtctcctactctcctccccactcctccctcggcctggagtccagtcctcgactccgcctgccgcctgctgcctgacaagccacgcgctgcggcagccgtacgggcactagggttttcttccacttcgaccgcgggctcgggatctcgcgccgcaccgcaatgcagcacacgtgccgctgatcccgtggccgcctccttcctttcctcctcctgcggtcctgcgccgcctctgctgcagcgggcagccgccatggcgcggcgccacgggtggcagctccccgcccacaccctgcaggtggtggctataacagtgtactctgtgctttgtatagcattctatgctttcttctctccatttcttgggaaggacttgtatcaatatatcgctgtcggtatttatagttttttgccaggctttatctgtgctgattctatatgtcagatgtactgcgattgatcctgctgactctggcatcctgatttccatggatgacatactaatttataaatcagaagcacatgtagacactcaagatgaagctggtaagccaggattgaggaacgatgaggatatccgaaagcataaatcatgctttggaagggtttgtttttgttgcgctatttttacaactggggactgtcgcggaggggatgaagctaaccatcaagaagattatggtgaagaggcactcttttgcaccctttgcaacgcagaggtgcgcaaacatagcaagcactgtcgaagttgcgacaagtgtgttgatgggtttgatcatcactgccggtggctgaacaattgtgttggaagaaaaaattatatcacatttttatgccttatggctgtgagtctggcttggcttgctgctgagtgtggagttggtattgctgtttttgttcgttgcttcactgacaagacagtcatagaagatcagattggggaaaagctgggttacggtctttcacgtgcaccctttgcaaccattgtagccctggctacagctctttcaatgcttgcttcagtaccactaggagaactatttttcttccatatgatattaatccggaagggcataacaacttatgaatatgttgtggccatgagggctcagagtgaacctcctggaccttctgtcaatgatgaccaacaaagcttggcatcttctccaatgagttctgcaccaacagcttttagtgggagctcgtttgcacggcactacaaaggcgcatggtgcactcccccacgtatcttcattgaccaggacgaaatcatcccacacctggagcctggccgagttccttcaactgttgatcctgataccacagacccaatggaaagaaccaaaacccatcctaaacggccagtccgcatcagtgcgtggaagcttgcgaagctcgattcaaatgaggccatgaaagcagcagcgaaagccagagcctcttcgtccgtgctgaaaccgatcaatactcgcaaccagtatgaggcagacagtgatagcctcagtagcagaaacagtgtcataagtgctgataccggacaccataggtaccctcggtcttgcgggaattcgcagtacaagccctcttatccaccaagcagagcaagtgcagatgacatcgagttgtacccccagacaccgagcagcttccagagcaactcacggacttcaactcccatagccgagcaccatccatccaagcatttcaacccaatctaccagacatcagcaaacaggtctccattctcagcaaaagcaagtgtcagtgaagctcctgtctctgaaatcaccaatgcagggaggtcctaccccccaccacaagcggacagatcctcccggtcatctgtttactgggatcaggaagctggcaggttcgtgtctgctcaggcaaaccagggatctagctctcgccctgcctatcctgatcttctatacaccgggcagaatatattctttggtggacctctgattgcagatcccgcagcaagaagcttcagagatcctggtggctcgagccaaaggtctgccgggcctcggtcgcaccagctcccggtgttcgttcccagtgacccccagaaagatcagctgtccaggttaccgtgaaatgctatatcttttttttttggggggggggggggggtagtagtcttccgaaacacatgttgccctgccgggttattaatgtatagttattagctcttagacctgacagaatagttcatgactttgtatcgggttcatggaaattaagacctatttaggcactatcaaccataagcactgaagttatggaagtgctgcggagtagtagtgaagtgaaactgacaaggatgttctgtcaccaaacctaattagcttcacctcgccatatactcaaaacaaggcgataactaccaacgtg

SEQ ID NO: 19603 - DNA, 2360 bp, Zea Mays
ggcccctggtctcctactctcctccccactcctccctcggcctggagtccagtcctcgactccgcctgccgcctgctgcctgacaagccacgcgctgcggcagccgtacgggcactagggttttcttccacttcgaccgcgggctcgggatctcgcgccgcaccgcaatgcagcacacgtgccgctgatcccgtggccgcctccttcctttcctcctcctgcggtcctgcgccgcctctgctgcagcgggcagccgccatggcgcggcgccacgggtggcagctccccgcccacaccctgcagagctacatcctgatcttctgcggcatagaaggtggtggctataacagtgtactctgtgctttgtatagcattctatgctttcttctctccatttcttgggaaggacttgtatcaatatatcgctgtcggtatttatagttttttggctttatctgtgctgattctatatgtcagatgtactgcgattgatcctgctgactctggcatcctgatttccatggatgacatactaatttataaatcagaagcacatgtagacactcaagatgaagctggtaagccaggattgaggaacgatgaggatatccgaaagcataaatcatgctttggaagggtttgtttttgttgcgctatttttacaactggggactgtcgcggaggggatgaagctaaccatcaagaagattatggtgaagaggcactcttttgcaccctttgcaacgcagaggtgcgcaaacatagcaagcactgtcgaagttgcgacaagtgtgttgatgggtttgatcatcactgccggcttgctgctgagtgtggagttggtattgctgtttttgttcgttgcttcactgacaagacagtcatagaagatcagattggggaaaagctgggttacggtctttcacgtgcaccctttgcaaccattgtagccctggctacagctctttcaatgcttgcttcagtaccactaggagaactatttttcttccatatgatattaatccggaagggcataacaacttatgaatatgttgtggccatgagggctcagagtgaacctcctggaccttctgtcaatgatgaccaacaaagcttggcatcttctccaatgagttctgcaccaacagcttttagtgggagctcgtttgcacggcactacaaaggcgcatggtgcactcccccacgtatcttcattgaccaggacgaaatcatcccacacctggagcctggccgagttccttcaactgttgatcctgataccacagacccaatggaaagaaccaaaacccatcctaaacggccagtccgcatcagtgcgtggaagcttgcgaagctcgattcaaatgaggccatgaaagcagcagcgaaagccagagcctcttcgtccgtgctgaaaccgatcaatactcgcaaccagtatgaggcagacagtgatagcctcagtagcagaaacagtgtcataagtgctgataccggacaccataggtaccctcggtcttgcgggaattcgcagtacaagccctcttatccaccaagcagagcaagtgcagatgacatcgagttgtacccccagacaccgagcagcttccagagcaactcacggacttcaactcccatagccgagcaccatccatccaagcatttcaacccaatctaccagacatcagcaaacaggtctccattctcagcaaaagcaagtgtcagtgaagctcctgtctctgaaatcaccaatgcagggaggtcctaccccccaccacaagcggacagatcctcccggtcatctgtttactgggatcaggaagctggcaggttcgtgtctgctcaggcaaaccagggatctagctctcgccctgcctatcctgatcttctatacaccgggcagaatatattctttggtggacctctgattgcagatcccgcagcaagaagcttcagagatcctggtggctcgagccaaaggtctgccgggcctcggtcgcaccagctcccggtgttcgttcccagtgacccccagaaagatcagctgtccaggttaccgtgaaatgctatatcttttttttttggggggggggggggggtagtagtcttccgaaacacatgttgccctgccgggttattaatgtatagttattagctcttagacctgacagaatagttcatgactttgtatcgggttcatggaaattaagacctatttaggcactatcaaccataagcactgaagttatggaagtgctgcggagtagtagtgaagtgaaactgacaaggatgttctgtcaccaaacctaattagcttcacctcgccatatactcaaaacaaggcgataactaccaacgtg

SEQ ID NO: 19604 - DNA, 1471 bp, Zea Mays
ccggtctgtccggataggcaccatggcagcctccgacaccgacctccgtctctctccatccccacctcggccttgagcacaccgagcccaaaccccaaagcctcctgaccctggttagcttctgttttttactccatgcaaggacgacaatggcgaccgcctccgtcgccacctccctccccttcggcctccttctccctccgcggctattccgtgggaggctggtgaggtggccgcggcagattagggcttcggcgtcgagcaacgcgagtaacgtcgcaggcggggagaggaaattgggggctctcaagggcagggtaggagatctgagggcgcttgtcgcctctatgcctgatgccgttggctcgatccagaaaaacattggcccaaattttgttgctggtttctgtgttggcattgcatttttggctgctgttgcaagacagatcaccttaagaagtcgagagcatgataataaaggttctgttgctgatctagtaaggcgtggacagttaaaatcagggcaacgagggactgcaaagccccgcacattcgatgatcctttcaataatccattagtcaagattgatgagggtacatctactgtgcaaatgtttggcaaggagtaccgtctggctcctgttaggcttacaaaagaggaacaagaaatgcatcagaagaggagatcacgtgcatatcagtggaaaaggccaaccgtgtttctcagggaaggtgattccttacctccagatgttgatccagatacagttagatggattccagcaaaccatccttttgctgctgcgtcaagtgaagtagacgaggagaccgccaaacaaaatgtctatcaaaaggatggcgtcccatcccgtgttaaggctgagcatgaagctttgcaggcaaggctagaggcttcaaacgatactccctccggatccaaggagtatgcagcgtaatgagagacaaatggaattgtcaggcaagccatctgaaaatcttcagggctccaagtttgagaaccaagatagacaactggttatcgagtctggtaaacatagctccgatggaagtttacaatcaaatgagccggaagggcaataaaatttgtgtactcaagcgctttgatgacatttgctttgttgcgtagtgttatcagctttgtggctgtagctgtagatagagaagtgttggaacagtgggcttaccggtttacatagtgagcagttaatatggaagtcgcttgacgtgttgtgaatggatatttatttttgacgagtacgtgggtactgggtaccttcaccgaacgactccggactagggtaggccaggccaattggccaaggacaaacctggctcggggtgtctcacccacttggcgcactcaggtagctgatgaaagtttgtacgggatacattatattgtgtattcagaaccaataatgcacaggaggaagtccacaatattatcgac

SEQ ID NO: 19605 - DNA, 1290 bp, Zea Mays
atggcagcctccgacaccgacctccgtctctctccatccccacctcggccttgagcacaccgagcccaaaccccaaagcctcctgaccctggttagcttctgttttttactccatgcaaggacgacaatggcgaccgcctccgtcgccacctccctccccttcggcctccttctccctccgcggctattccgtgggaggctggtgaggtggccgcggcagattagggcttcggcgtcgagcaacgcgagtaacgtcgcaggcggggagaggaaattgggggctctcaagggcagggtaggagatctgagggcgcttgtcgcctctatgcctgatgccgttggctcgtgcaaagccccgcacattcgatgatcctttcaataatccattagtcaagattgatgagggtacatctactgtgcaaatgtttggcaaggagtaccgtctggctcctgttaggcttacaaaagaggaacaagaaatgcatcagaagaggagatcacgtgcatatcagtggaaaaggccaaccgtgtttctcagggaaggtgattccttacctccagatgttgatccagatacagttagatggattccagcaaaccatccttttgctgctgcgtcaagtgaagtagacgaggagaccgccaaacaaaatgtctatcaaaaggatggcgtcccatcccgtgttaaggctgagcatgaagctttgcaggcaaggctagaggcttcaaacgatgttaccagactccctccggatccaaggagtatgcagcgtaatgagagacaaatggaattgtcaggcaagccatctgaaaatcttcagggctccaagtttgagaaccaagatagacaactggttatcgagtctggtaaacatagctccgatggaagtttacaatcaaatgagccggaagggcaataaaatttgtgtactcaagcgctttgatgacatttgctttgttgcgtagtgttatcagctttgtggctgtagctgtagatagagaagtgttggaacagtgggcttaccggtttacatagtgagcagttaatatggaagtcgcttgacgtgttgtgaatggatatttatttttgacgagtacgtgggtactgggtaccttcaccgaacgactccggactagggtaggccaggccaattggccaaggacaaacctggctcggggtgtctcacccacttggcgcactcaggtagctgatgaaagtttgtacgggatacattatattgtgtattcagaaccaataatgcacaggaggaagtccacaatattatcgac

SEQ ID NO: 19606 - DNA, 1788 bp, Zea Mays
atggcagcctccgacaccgacctccgtctctctccatccccacctcggccttgagcacaccgagcccaaaccccaaagcctcctgaccctggttagcttctgttttttactccatgcaaggacgacaatggcgaccgcctccgtcgccacctccctccccttcggcctccttctccctccgcggctattccgtgggaggctggtgaggtggccgcggcagattagggcttcggcgtcgagcaacgcgagtaacgtcgcaggcggggagaggaaattgggggctctcaagggcagggtaggagatctgagggcgcttgtcgcctctatgcctgatgccgttggctcggtaaggactcgattatttggttagtgccaccattaggtgttattattgtggtggtgggggtcctatagttctatgagcaactaagtggcagactgatcttaatttggacggacaatttgttgaattgattagtacacagtgccacagtgatagtacgaacctagtgcctatatagataggatgaagacacaatgtacaatgcatttgtgaatgtgatttggcatcccctgtttctatgtccgtgatcctcagcgaaccttcaatttttttcagcacatcaggggttgaaaggtgtagcccttcttctttctgaacatctgccctgccatttatccagaaaaacattggcccaaattttgttgctggtttctgtgttggcattgcatttttggctgctgttgcaagacagatcaccttaagaagtcgagagcatgataataaaggttctgttgctgatctagtaaggcgtggacagttaaaatcagggcaacgagggactgcaaagccccgcacattcgatgatcctttcaataatccattagtcaagattgatgagggtacatctactgtgcaaatgtttggcaaggagtaccgtctggctcctgttaggcttacaaaagaggaacaagaaatgcatcagaagaggagatcacgtgcatatcagtggaaaaggccaaccgtgtttctcagggaaggtgattccttacctccagatgttgatccagatacagttagatggattccagcaaaccatccttttgctgctgcgtcaagtgaagtagacgaggagaccgccaaacaaaatgtctatcaaaaggatggcgtcccatcccgtgttaaggctgagcatgaagctttgcaggcaaggctagaggcttcaaacgatgttaccagactccctccggatccaaggagtatgcagcgtaatgagagacaaatggaattgtcaggcaagccatctgaaaatcttcagggctccaagtttgagaaccaagatagacaactggttatcgagtctggtaaacatagctccgatggaagtttacaatcaaatgagccggaagggcaataaaatttgtgtactcaagcgctttgatgacatttgctttgttgcgtagtgttatcagctttgtggctgtagctgtagatagagaagtgttggaacagtgggcttaccggtttacatagtgagcagttaatatggaagtcgcttgacgtgttgtgaatggatatttatttttgacgagtacgtgggtactgggtaccttcaccgaacgactccggactagggtaggccaggccaattggccaaggacaaacctggctcggggtgtctcacccacttggcgcactcaggtagctgatgaaagtttgtacgggatacattatattgtgtattcagaaccaataatgcacaggaggaagtccacaatattatcgac

SEQ ID NO: 19607 - DNA, 4395 bp, Zea Mays
gaaaatccaaggttttgtgcagtggagaggacgagcacccacgcgaacacttttcaaagccctccctccctcactggcacacgctaaccgaagagcgagcgcaccaggcgtaggagtatggttgtttggtagctagacaaagaattgagggggtggccagaaccgccagatgctgcgaaggcgcagagcccggagcacccagcagcgacctgttccgttggcgttggctcaccacccgaccaccgtgcgcgcgagcaaagagagcccctgcccccctgctgctctccgcgcccactgttccctcttcatccaggcacagctcattttgcaagacacggacagctctctccttttcgtgctccctttgctcccttttctttcagtcgcttcacactccacggactcgagctttggctttgtggcgcctgtgaatctgccaacaaagaaaggactgaagggggagggaggagagggctgatccaagtgctttcacccatctgcttgtttctccatttgttggcctgcaatggcggggagcttcgacctgaggacgccaaccagaggcgtcgagcaggctatcgttgctctgaagaaaggcgcacatctcctgaaatgtggcaagagggggaagcctaaattctgcgccttcagaatatcatctgatgagacaacattaatatggtactcaaaagggagggaaaaacacttgagcttaagctccgtgtcagctgtggttcttggccagaagacgataaaatttctgcgacagcgttgtccagagaaggaaccccattccttttcacttatatacaaaaacggagagcgctcacttgacttgatctgcagcgatagagatcaagctgaaaactggtatctgggcttgagggccctattaccaactccttgtaatccatgttcatcaattgaatcaaggagcagtaggcagatcgacagttgtacaaatactcccagcagctatattcagcttaagagtaagttactaagtgtgcatggcacaccaaggcacatacaggtatgttcatcgcaaaggaagcccaagaaggcacacggaacattttttggtggtagcgctgattgttcagaatcattattttacacaaggcagcgaacattctctgacataggtacctacttggaaaatcttacacgcaagatgtcaaatccagaaatacatgatttgaaggatgttatggttggtaaccaagaaaaggagcagaaaattacccaaacacctaaactgaaaacctttgaaggaccccgtgcagcatgtaggttagattctctgaaggatgtttttttctggggtgatgcttttggaagtattttagagtgtggtgatacctcaaaaccccttccaatgttagtggactcaacgaacatgcttgatgtacaaagcattgcttgcggagagactcatgcggccataatcactaagcaaggagaggtctactcctggggaaatgagagcagtggcagaattggaaatcaagtaaatatcaaagtctcccggcccaaggtcgttcaatctcttgcctctttacatgtgaaggatgtggcctatggatcaaagcacacttgtgcagtaactgtttctggtgaacttattgaatggggagaaggaccctatatgggccagttggacagctatgcgaggaatcaatggtttccgcataaattgtttagtccactggacggcatatctgttgtgaagattgcttgtggtccttggcacacagcaataataacgtcttctggtcagttatacacatatggggatggaacatttggtgttcttggtcatggagatacacaaggaactacccggcctaaagaagtagagtctttgaaaggctcaagagtgaaatgtgtggcatgtgggccatggcacacagctgccattgtggaagtgatcagtgatttcaagagcaattcaccaagaagcaagctgttcacatggggcgatgcagatcgggggaagctgggtcatgctgacaaaaagatgaagcttataccaacatgtgttgattcactcacagactatgattttattcaggtgtcctgcgggacggcactcactgttgctctctctgttactggtgtggtctttactagtggcagttcgatgcatgggcaattagggaacccccatgcagatggtaaaactgtttctgctgttgaaggactacttaagagcgagtttgtcagacatatatcatcaggttcttcccatgtagcagtggtgactacaaatgggaaagtgtttacatggggtaaaggcaaggaagggcagcttggtttaggtgacttccttaataggagcactccaactttagtagatgcattggaaggtaggcatgtggaaagcctatcttgtggttacaactacactgcagcagtatgtctgcataaagtaatctcaaggaaggacctctctgtatgtagtggttgcaagatggcttttggtttcactagaaagaagcacaactgttaccattgtggatccatgttctgtaattcctgtagtagtaacaaggttgccaaggcagcacttgcaccagataagagcagaaggtatcgtgtgtgtgatgggtgtttcagtcagctactgaaagttgtggattctggtaaggtaaagtctgaactaaataccagcaaaggagctgaaattataaggtcatacacaccaaagttgtctcgtatattcagggatgtaaacttacctgtggaaaaggaaaaggtggctttagtacaacgctccaatcagagaaatgaggtcctgtacactccagtccaagcgaaatctcagagatgggggcaagttgagtgcccagctcaatttctatctgcagaagacagttctcattatcaatctatatcgaagaatcacatgtatagtgcctctgtttccgagagaatgcatgaccccacagtgctgaagtctggcagatctttgcaacagcctaatgatgaccagaggaaagatcttaacagcatagaagaaaccttgctcactgaagaagtaaagcagcttcgttcacagatgacacttctcatggagcaataccatcagaaagctcttcaggttgaactgtataaacaaaaactcgatgagacatggctaattgttaggaatgaggctgcaaaatgcaaagctgccaaagatatcataaaggttctaactgatcagtgtaaggccttgtcagagaaacttttggtcggtcagcaatatgagaaccttgagacaaaatctaatatcagccaaggacaaacattttcagcagatttgcaacatcatcccagtgaaaaatttgccacaggcaaattcggacaactcgacaacaccaaaaatcaccagaccagcagccaaggagacgaagaatatacaccttcttcaagttctgatgtgcagaagggaattccattgttgctcgcgtcacctccaatggtgtgatcgagcaaatcgagcgtggggtgtatgtcacatttgctgtatcaccttgtggcaagaaagacataaaacgtgtacgattcagtcggaagcattttggcgagaaggaagctcaacactggtgggaagagaataagggcagcgtctatgcaaagtacagcactgaaaaagcgcaacatcagctagaggttacaatcaagagtgtacaagagtaaccacaagttggattgggttacctactgctgagcaagatgaaaaaatgacatggagcaaataagatgatattaacggaacagataactgaccgtcctttttcaatgaaaataggcagtttaacttattgtagatacgaatgtacagataagaatgagtgaatgacggctggatgcctcctttcttttctccatttcctcctgattcagttggcatgatctagtctgatgaacaatgcagtgctgaattgaaccagtatcagtcgtaattttctggcagaaagtagaatttgttcagtattagttgtttcccttgattcttcagagcaactaaacctgcaacaatggaagtttcagacacaaagctaatagttgtcagcgttcatattctgacggagaaagcatccaactgaaaacagttctaacactcggcgccaataggaaggcaaggcttatcctttcgagtctccaccataccaccaccaacaatggcgagcattcacgccggctttgcctccaccatcgttgcttgcagaagctttagcttcactatcgtggcatgcccctccccctcgcccgcgcattgtacggcctcctcttccagtggggtccgcaaccagcggcgcaaatccactcccccagccgccgagtgcctcccatggcgccgccaccaggttgcacgtcagcggtaggcgccccgatctcactgcactc

SEQ ID NO: 19608 - DNA, 4937 bp, Zea Mays
aaagccctccctccctcactggcacacgctaaccgaagagcgagcgcaccaggcgtaggagtatggttgtttggtagctagacaaagaattgagggggtggccagaaccgccagatgctgcgaaggcgcagagcccggagcacccagcagcgacctgttccgttggcgttggctcaccacccgaccaccgtgcgcgcgagcaaagagagcccctgcccccctgctgctctccgcgcccactgttccctcttcatccaggcacaggtgacacgggcacctgttcacctttgcagggccctgagcccctgcggccggcctgtagccctgaactgatgaacctgcagttgcagctcattttgcaagacacggacagctctctccttttcgtgctccctttgctcccttttctttcagtcgcttcacactccacggactcgagctttggctttgtggcgcctgtgaatctgccaacaaagaaaggactgaagggggagggaggagagggctgatccaagtgctttcacccatctgcttgtttctccatttgttggcctgcaatggcggggagcttcgacctgaggacgccaaccagaggcgtcgagcaggctatcgttgctctgaagaaaggcgcacatctcctgaaatgtggcaagagggggaagcctaaattctgcgccttcagaatatcatctgatgagacaacattaatatggtactcaaaagggagggaaaaacacttgagcttaagctccgtgtcagctgtggttcttggccagaagacgataaaatttctgcgacagcgttgtccagagaaggaaccccattccttttcacttatatacaaaaacggagagcgctcacttgacttgatctgcagcgatagagatcaagctgaaaactggtatctgggcttgagggccctattaccaactccttgtaatccatgttcatcaattgaatcaaggagcagtaggcagatcgacagttgtacaaatactcccagcagctatattcagcttaagagtaagttactaagtgtgcatggcacaccaaggcacatacaggttagttcaggaagttacattgtagcatctgaatgataacacttgtatagctcgctttggcatttttctctggtatttcatgtagcaacatttgttttttttctcgggaaaggggattcacgtggcaactacagggcagggactgtctgaatttgaaattcaggaggccaattgataaacacaacattcttaagttgtaccaacttatatcaatctcagcaaaccacacatctatgaattatgattgcaagggtactagtaaatgagatcaacattgaaatgattttgactttatgaacccaacaatttgtgtagtttaatcttgtccatatgtaagtaggcataccttactgatgcgcttttctgtttctaaacacttaattctcttggttaaattacagtcttctgtttgggtctaacaattcgtctaatgcacttcatgttaaggtatgttcatcgcaaaggaagcccaagaaggcacacggaacattttttggtggtagcgctgattgttcagaatcattattttacacaaggcagcgaacattctctgacataggtacctacttggaaaatcttacacgcaagatgtcaaatccagaaatacatgatttgaaggatgttatggttggtaaccaagaaaaggagcagaaaattacccaaacacctaaactgaaaacctttgaaggaccccgtgcagcatgtaggttagattctctgaaggatgtttttttctggggtgatgcttttggaagtattttagagtgtggtgatacctcaaaaccccttccaatgttagtggactcaacgaacatgcttgatgtacaaagcattgcttgcggagagactcatgcggccataatcactaagcaaggagaggtctactcctggggaaatgagagcagtggcagaattggaaatcaagtaaatatcaaagtctcccggcccaaggtcgttcaatctcttgcctctttacatgtgaaggatgtggcctatggatcaaagcacacttgtgcagtaactgtttctggtgaacttattgaatggggagaaggaccctatatgggccagttggacagctatgcgaggaatcaatggtttccgcataaattgtttagtccactggacggcatatctgttgtgaagattgcttgtggtccttggcacacagcaataataacgtcttctggtcagttatacacatatggggatggaacatttggtgttcttggtcatggagatacacaaggaactacccggcctaaagaagtagagtctttgaaaggctcaagagtgaaatgtgtggcatgtgggccatggcacacagctgccattgtggaagtgatcagtgatttcaagagcaattcaccaagaagcaagctgttcacatggggcgatgcagatcgggggaagctgggtcatgctgacaaaaagatgaagcttataccaacatgtgttgattcactcacagactatgattttattcaggtgtcctgcgggacggcactcactgttgctctctctgttactggtgtggtctttactagtggcagttcgatgcatgggcaattagggaacccccatgcagatggtaaaactgtttctgctgttgaaggactacttaagagcgagtttgtcagacatatatcatcaggttcttcccatgtagcagtggtgactacaaatgggaaagtgtttacatggggtaaaggcaaggaagggcagcttggtttaggtgacttccttaataggagcactccaactttagtagatgcattggaaggtaggcatgtggaaagcctatcttgtggttacaactacactgcagcagtatgtctgcataaagtaatctcaaggaaggacctctctgtatgtagtggttgcaagatggcttttggtttcactagaaagaagcacaactgttaccattgtggatccatgttctgtaattcctgtagtagtaacaaggttgccaaggcagcacttgcaccagataagagcagaaggtatcgtgtgtgtgatgggtgtttcagtcagctactgaaagttgtggattctggtaaggtaaagtctgaactaaataccagcaaaggagctgaaattataaggtcatacacaccaaagttgtctcgtatattcagggatgtaaacttacctgtggaaaaggaaaaggtggctttagtacaacgctccaatcagagaaatgaggtcctgtacactccagtccaagcgaaatctcagagatgggggcaagttgagtgcccagctcaatttctatctgcagaagacagttctcattatcaatctatatcgaagaatcacatgtatagtgcctctgtttccgagagaatgcatgaccccacagtgctgaagtctggcagatctttgcaacagcctaatgatgaccagaggaaagatcttaacagcatagaagaaaccttgctcactgaagaagtaaagcagcttcgttcacagatgacacttctcatggagcaataccatcagaaagctcttcaggttgaactgtataaacaaaaactcgatgagacatggctaattgttaggaatgaggctgcaaaatgcaaagctgccaaagatatcataaaggttctaactgatcagtgtaaggccttgtcagagaaacttttggtcggtcagcaatatgagaaccttgagacaaaatctaatatcagccaaggacaaacattttcagcagatttgcaacatcatcccagtgaaaaatttgccacaggcaaattcggacaactcgacaacaccaaaaatcaccagaccagcagccaaggagacgaagaatatacaccttcttcaagttctgatgtgcaggtagaaggattgtgtggtcatttgaatggttcaagaacatttgacagtaatggccgtattacagaagggaattccattgttgctcgcgtcacctccaatggtgtgatcgagcaaatcgagcgtggggtgtatgtcacatttgctgtatcaccttgtggcaagaaagacataaaacgtgtacgattcagtcggaagcattttggcgagaaggaagctcaacactggtgggaagagaataagggcagcgtctatgcaaagtacagcactgaaaaagcgcaacatcagctagaggttacaatcaagagtgtacaagagtaaccacaagttggattgggttacctactgctgagcaagatgaaaaaatgacatggagcaaataagatgatattaacggaacagataactgaccgtcctttttcaatgaaaataggcagtttaacttattgtagatacgaatgtacagataagaatgagtgaatgacggctggatgcctcctttcttttctccatttcctcctgattcagttggcatgatctagtctgatgaacaatgcagtgctgaattgaaccagtatcagtcgtaattttctggcagaaagtagaatttgttcagtattagttgtttcccttgattcttcagagcaactaaacctgcaacaatggaagtttcagacacaaagctaatagttgtcagcgttcatattctgacggagaaagcatccaactgaaaacagttctaacactcggcgccaataggaaggcaaggcttatcctttcgagtctccaccataccaccaccaacaatggcgagcattcacgccggctttgcctccaccatcgttgcttgcagaagctttagcttcactatcgtggcatgcccctccccctcgcccgcgcattgtacggcctcctcttccagtggggtccgcaaccagcggcgcaaatccactcccccagccgccgagtgcctcccatggcgccgccaccaggttgcacgtcagcggtaggcgccccgatctcactgcactc

SEQ ID NO: 19609 - DNA, 4183 bp, Zea Mays
aagagagcccctgcccccctgctgctctccgcgcccactgttccctcttcatccaggcacaggtgacacgggcacctgttcacctttgcagggccctgagcccctgcggccggcctgtagccctgaactgatgaacctgcagttgcagctcattttgcaagacacggacagctctctccttttcgtgctccctttgctcccttttctttcagtcgcttcacactccacggactcgagctttggctttgtggcgcctgtgaatctgccaacaaagaaaggactgaagggggagggaggagagggctgatccaagtgctttcacccatctgcttgtttctccatttgttggcctgcaatggcggggagcttcgacctgaggacgccaaccagaggcgtcgagcaggctatcgttgctctgaagaaaggcgcacatctcctgaaatgtggcaagagggggaagcctaaattctgcgccttcagaatatcatctgatgagacaacattaatatggtactcaaaagggagggaaaaacacttgagcttaagctccgtgtcagctgtggttcttggccagaagacgataaaatttctgcgacagcgttgtccagagaaggaaccccattccttttcacttatatacaaaaacggagagcgctcacttgacttgatctgcagcgatagagatcaagctgaaaactggtatctgggcttgagggccctattaccaactccttgtaatccatgttcatcaattgaatcaaggagcagtaggcagatcgacagttgtacaaatactcccagcagctatattcagcttaagagtatgttcatcgcaaaggaagcccaagaaggcacacggaacattttttggtggtagcgctgattgttcagaatcattattttacacaaggcagcgaacattctctgacataggtacctacttggaaaatcttacacgcaagatgtcaaatccagaaatacatgatttgaaggatgttatggttggtaaccaagaaaaggagcagaaaattacccaaacacctaaactgaaaacctttgaaggaccccgtgcagcatgtaggttagattctctgaaggatgtttttttctggggtgatgcttttggaagtattttagagtgtggtgatacctcaaaaccccttccaatgttagtggactcaacgaacatgcttgatgtacaaagcattgcttgcggagagactcatgcggccataatcactaagcaaggagaggtctactcctggggaaatgagagcagtggcagaattggaaatcaagtaaatatcaaagtctcccggcccaaggtcgttcaatctcttgcctctttacatgtgaaggatgtggcctatggatcaaagcacacttgtgcagtaactgtttctggtgaacttattgaatggggagaaggaccctatatgggccagttggacagctatgcgaggaatcaatggtttccgcataaattgtttagtccactggacggcatatctgttgtgaagattgcttgtggtccttggcacacagcaataataacgtcttctggtcagttatacacatatggggatggaacatttggtgttcttggtcatggagatacacaaggaactacccggcctaaagaagtagagtctttgaaaggctcaagagtgaaatgtgtggcatgtgggccatggcacacagctgccattgtggaagtgatcagtgatttcaagagcaattcaccaagaagcaagctgttcacatggggcgatgcagatcgggggaagctgggtcatgctgacaaaaagatgaagcttataccaacatgtgttgattcactcacagactatgattttattcaggtgtcctgcgggacggcactcactgttgctctctctgttactggtgtggtctttactagtggcagttcgatgcatgggcaattagggaacccccatgcagatggtaaaactgtttctgctgttgaaggactacttaagagcgagtttgtcagacatatatcatcaggttcttcccatgtagcagtggtgactacaaatgggaaagtgtttacatggggtaaaggcaaggaagggcagcttggtttaggtgacttccttaataggagcactccaactttagtagatgcattggaaggtaggcatgtggaaagcctatcttgtggttacaactacactgcagcagtatgtctgcataaagtaatctcaaggaaggacctctctgtatgtagtggttgcaagatggcttttggtttcactagaaagaagcacaactgttaccattgtggatccatgttctgtaattcctgtagtagtaacaaggttgccaaggcagcacttgcaccagataagagcagaaggtatcgtgtgtgtgatgggtgtttcagtcagctactgaaagttgtggattctggtaaggtaaagtctgaactaaataccagcaaaggagctgaaattataaggtcatacacaccaaagttgtctcgtatattcagggatgtaaacttacctgtggaaaaggaaaaggtggctttagtacaacgctccaatcagagaaatgaggtcctgtacactccagtccaagcgaaatctcagagatgggggcaagttgagtgcccagctcaatttctatctgcagaagacagttctcattatcaatctatatcgaagaatcacatgtatagtgcctctgtttccgagagaatgcatgaccccacagtgctgaagtctggcagatctttgcaacagcctaatgatgaccagaggaaagatcttaacagcatagaagaaaccttgctcactgaagaagtaaagcagcttcgttcacagatgacacttctcatggagcaataccatcagaaagctcttcaggttgaactgtataaacaaaaactcgatgagacatggctaattgttaggaatgaggctgcaaaatgcaaagctgccaaagatatcataaaggttctaactgatcagtgtaaggccttgtcagagaaacttttggtcggtcagcaatatgagaaccttgagacaaaatctaatatcagccaaggacaaacattttcagcagatttgcaacatcatcccagtgaaaaatttgccacaggcaaattcggacaactcgacaacaccaaaaatcaccagaccagcagccaaggagacgaagaatatacaccttcttcaagttctgatgtgcagaagggaattccattgttgctcgcgtcacctccaatggtgtgatcgagcaaatcgagcgtggggtgtatgtcacatttgctgtatcaccttgtggcaagaaagacataaaacgtgtacgattcagtcggaagcattttggcgagaaggaagctcaacactggtgggaagagaataagggcagcgtctatgcaaagtacagcactgaaaaagcgcaacatcagctagaggttacaatcaagagtgtacaagagtaaccacaagttggattgggttacctactgctgagcaagatgaaaaaatgacatggagcaaataagatgatattaacggaacagataactgaccgtcctttttcaatgaaaataggcagtttaacttattgtagatacgaatgtacagataagaatgagtgaatgacggctggatgcctcctttcttttctccatttcctcctgattcagttggcatgatctagtctgatgaacaatgcagtgctgaattgaaccagtatcagtcgtaattttctggcagaaagtagaatttgttcagtattagttgtttcccttgattcttcagagcaactaaacctgcaacaatggaagtttcagacacaaagctaatagttgtcagcgttcatattctgacggagaaagcatccaactgaaaacagttctaacactcggcgccaataggaaggcaaggcttatcctttcgagtctccaccataccaccaccaacaatggcgagcattcacgccggctttgcctccaccatcgttgcttgcagaagctttagcttcactatcgtggcatgcccctccccctcgcccgcgcattgtacggcctcctcttccagtggggtccgcaaccagcggcgcaaatccactcccccagccgccgagtgcctcccatggcgccgccaccaggttgcacgtcagcggtaggcgccccgatctcactgcactc

SEQ ID NO: 19610 - DNA, 4137 bp, Zea Mays
cagctctctccttttcgtgctccctttgctcccttttctttcagtcgcttcacactccacggactcgagctttggctttgtggcgcctgtgaatctgccaacaaagaaaggactgaagggggagggaggagagggctgatccaagtgctttcacccatctgcttgtttctccatttgttggcctgcaatggcggggagcttcgacctgaggacgccaaccagaggcgtcgagcaggctatcgttgctctgaagaaaggcgcacatctcctgaaatgtggcaagagggggaagcctaaattctgcgccttcagaatatcatctgatgagacaacattaatatggtactcaaaagggagggaaaaacacttgagcttaagctccgtgtcagctgtggttcttggccagaagacgatttcagaattttgcagataaaatttctgcgacagcgttgtccagagaaggaaccccattccttttcacttatatacaaaaacggagagcgctcacttgacttgatctgcagcgatagagatcaagctgaaaactggtatctgggcttgagggccctattaccaactccttgtaatccatgttcatcaattgaatcaaggagcagtaggcagatcgacagttgtacaaatactcccagcagctatattcagcttaagagtaagttactaagtgtgcatggcacaccaaggcacatacaggtatgttcatcgcaaaggaagcccaagaaggcacacggaacattttttggtggtagcgctgattgttcagaatcattattttacacaaggcagcgaacattctctgacataggtacctacttggaaaatcttacacgcaagatgtcaaatccagaaatacatgatttgaaggatgttatggttggtaaccaagaaaaggagcagaaaattacccaaacacctaaactgaaaacctttgaaggaccccgtgcagcatgtaggttagattctctgaaggatgtttttttctggggtgatgcttttggaagtattttagagtgtggtgatacctcaaaaccccttccaatgttagtggactcaacgaacatgcttgatgtacaaagcattgcttgcggagagactcatgcggccataatcactaagcaaggagaggtctactcctggggaaatgagagcagtggcagaattggaaatcaagtaaatatcaaagtctcccggcccaaggtcgttcaatctcttgcctctttacatgtgaaggatgtggcctatggatcaaagcacacttgtgcagtaactgtttctggtgaacttattgaatggggagaaggaccctatatgggccagttggacagctatgcgaggaatcaatggtttccgcataaattgtttagtccactggacggcatatctgttgtgaagattgcttgtggtccttggcacacagcaataataacgtcttctggtcagttatacacatatggggatggaacatttggtgttcttggtcatggagatacacaaggaactacccggcctaaagaagtagagtctttgaaaggctcaagagtgaaatgtgtggcatgtgggccatggcacacagctgccattgtggaagtgatcagtgatttcaagagcaattcaccaagaagcaagctgttcacatggggcgatgcagatcgggggaagctgggtcatgctgacaaaaagatgaagcttataccaacatgtgttgattcactcacagactatgattttattcaggtgtcctgcgggacggcactcactgttgctctctctgttactggtgtggtctttactagtggcagttcgatgcatgggcaattagggaacccccatgcagatggtaaaactgtttctgctgttgaaggactacttaagagcgagtttgtcagacatatatcatcaggttcttcccatgtagcagtggtgactacaaatgggaaagtgtttacatggggtaaaggcaaggaagggcagcttggtttaggtgacttccttaataggagcactccaactttagtagatgcattggaaggtaggcatgtggaaagcctatcttgtggttacaactacactgcagcagtatgtctgcataaagtaatctcaaggaaggacctctctgtatgtagtggttgcaagatggcttttggtttcactagaaagaagcacaactgttaccattgtggatccatgttctgtaattcctgtagtagtaacaaggttgccaaggcagcacttgcaccagataagagcagaaggtatcgtgtgtgtgatgggtgtttcagtcagctactgaaagttgtggattctggtaaggtaaagtctgaactaaataccagcaaaggagctgaaattataaggtcatacacaccaaagttgtctcgtatattcagggatgtaaacttacctgtggaaaaggaaaaggtggctttagtacaacgctccaatcagagaaatgaggtcctgtacactccagtccaagcgaaatctcagagatgggggcaagttgagtgcccagctcaatttctatctgcagaagacagttctcattatcaatctatatcgaagaatcacatgtatagtgcctctgtttccgagagaatgcatgaccccacagtgctgaagtctggcagatctttgcaacagcctaatgatgaccagaggaaagatcttaacagcatagaagaaaccttgctcactgaagaagtaaagcagcttcgttcacagatgacacttctcatggagcaataccatcagaaagctcttcaggttgaactgtataaacaaaaactcgatgagacatggctaattgttaggaatgaggctgcaaaatgcaaagctgccaaagatatcataaaggttctaactgatcagtgtaaggccttgtcagagaaacttttggtcggtcagcaatatgagaaccttgagacaaaatctaatatcagccaaggacaaacattttcagcagatttgcaacatcatcccagtgaaaaatttgccacaggcaaattcggacaactcgacaacaccaaaaatcaccagaccagcagccaaggagacgaagaatatacaccttcttcaagttctgatgtgcaggtagaaggattgtgtggtcatttgaatggttcaagaacatttgacagtaatggccgtattacagaagggaattccattgttgctcgcgtcacctccaatggtgtgatcgagcaaatcgagcgtggggtgtatgtcacatttgctgtatcaccttgtggcaagaaagacataaaacgtgtacgattcagtcggaagcattttggcgagaaggaagctcaacactggtgggaagagaataagggcagcgtctatgcaaagtacagcactgaaaaagcgcaacatcagctagaggttacaatcaagagtgtacaagagtaaccacaagttggattgggttacctactgctgagcaagatgaaaaaatgacatggagcaaataagatgatattaacggaacagataactgaccgtcctttttcaatgaaaataggcagtttaacttattgtagatacgaatgtacagataagaatgagtgaatgacggctggatgcctcctttcttttctccatttcctcctgattcagttggcatgatctagtctgatgaacaatgcagtgctgaattgaaccagtatcagtcgtaattttctggcagaaagtagaatttgttcagtattagttgtttcccttgattcttcagagcaactaaacctgcaacaatggaagtttcagacacaaagctaatagttgtcagcgttcatattctgacggagaaagcatccaactgaaaacagttctaacactcggcgccaataggaaggcaaggcttatcctttcgagtctccaccataccaccaccaacaatggcgagcattcacgccggctttgcctccaccatcgttgcttgcagaagctttagcttcactatcgtggcatgcccctccccctcgcccgcgcattgtacggcctcctcttccagtggggtccgcaaccagcggcgcaaatccactcccccagccgccgagtgcctcccatggcgccgccaccaggttgcacgtcagcggtaggcgccccgatctcactgcactc

SEQ ID NO: 19611 - DNA, 4084 bp, Zea Mays
gcttcacactccacggactcgagctttggctttgtggcgcctgtgaatctgccaacaaagaaaggactgaagggggagggaggagagggctgatccaagtgctttcacccatctgcttgtttctccatttgttggcctgcaatggcggggagcttcgacctgaggacgccaaccagaggcgtcgagcaggctatcgttgctctgaagaaaggcgcacatctcctgaaatgtggcaagagggggaagcctaaattctgcgccttcagaatatcatctgatgagacaacattaatatggtactcaaaagggagggaaaaacacttgagcttaagctccgtgtcagctgtggttcttggccagaagacgaattttgcagataaaatttctgcgacagcgttgtccagagaaggaaccccattccttttcacttatatacaaaaacggagagcgctcacttgacttgatctgcagcgatagagatcaagctgaaaactggtatctgggcttgagggccctattaccaactccttgtaatccatgttcatcaattgaatcaaggagcagtaggcagatcgacagttgtacaaatactcccagcagctatattcagcttaagagtaagttactaagtgtgcatggcacaccaaggcacatacaggtatgttcatcgcaaaggaagcccaagaaggcacacggaacattttttggtggtagcgctgattgttcagaatcattattttacacaaggcagcgaacattctctgacataggtacctacttggaaaatcttacacgcaagatgtcaaatccagaaatacatgatttgaaggatgttatggttggtaaccaagaaaaggagcagaaaattacccaaacacctaaactgaaaacctttgaaggaccccgtgcagcatgtaggttagattctctgaaggatgtttttttctggggtgatgcttttggaagtattttagagtgtggtgatacctcaaaaccccttccaatgttagtggactcaacgaacatgcttgatgtacaaagcattgcttgcggagagactcatgcggccataatcactaagcaaggagaggtctactcctggggaaatgagagcagtggcagaattggaaatcaagtaaatatcaaagtctcccggcccaaggtcgttcaatctcttgcctctttacatgtgaaggatgtggcctatggatcaaagcacacttgtgcagtaactgtttctggtgaacttattgaatggggagaaggaccctatatgggccagttggacagctatgcgaggaatcaatggtttccgcataaattgtttagtccactggacggcatatctgttgtgaagattgcttgtggtccttggcacacagcaataataacgtcttctggtcagttatacacatatggggatggaacatttggtgttcttggtcatggagatacacaaggaactacccggcctaaagaagtagagtctttgaaaggctcaagagtgaaatgtgtggcatgtgggccatggcacacagctgccattgtggaagtgatcagtgatttcaagagcaattcaccaagaagcaagctgttcacatggggcgatgcagatcgggggaagctgggtcatgctgacaaaaagatgaagcttataccaacatgtgttgattcactcacagactatgattttattcaggtgtcctgcgggacggcactcactgttgctctctctgttactggtgtggtctttactagtggcagttcgatgcatgggcaattagggaacccccatgcagatggtaaaactgtttctgctgttgaaggactacttaagagcgagtttgtcagacatatatcatcaggttcttcccatgtagcagtggtgactacaaatgggaaagtgtttacatggggtaaaggcaaggaagggcagcttggtttaggtgacttccttaataggagcactccaactttagtagatgcattggaaggtaggcatgtggaaagcctatcttgtggttacaactacactgcagcagtatgtctgcataaagtaatctcaaggaaggacctctctgtatgtagtggttgcaagatggcttttggtttcactagaaagaagcacaactgttaccattgtggatccatgttctgtaattcctgtagtagtaacaaggttgccaaggcagcacttgcaccagataagagcagaaggtatcgtgtgtgtgatgggtgtttcagtcagctactgaaagttgtggattctggtaaggtaaagtctgaactaaataccagcaaaggagctgaaattataaggtcatacacaccaaagttgtctcgtatattcagggatgtaaacttacctgtggaaaaggaaaaggtggctttagtacaacgctccaatcagagaaatgaggtcctgtacactccagtccaagcgaaatctcagagatgggggcaagttgagtgcccagctcaatttctatctgcagaagacagttctcattatcaatctatatcgaagaatcacatgtatagtgcctctgtttccgagagaatgcatgaccccacagtgctgaagtctggcagatctttgcaacagcctaatgatgaccagaggaaagatcttaacagcatagaagaaaccttgctcactgaagaagtaaagcagcttcgttcacagatgacacttctcatggagcaataccatcagaaagctcttcaggttgaactgtataaacaaaaactcgatgagacatggctaattgttaggaatgaggctgcaaaatgcaaagctgccaaagatatcataaaggttctaactgatcagtgtaaggccttgtcagagaaacttttggtcggtcagcaatatgagaaccttgagacaaaatctaatatcagccaaggacaaacattttcagcagatttgcaacatcatcccagtgaaaaatttgccacaggcaaattcggacaactcgacaacaccaaaaatcaccagaccagcagccaaggagacgaagaatatacaccttcttcaagttctgatgtgcaggtagaaggattgtgtggtcatttgaatggttcaagaacatttgacagtaatggccgtattacagaagggaattccattgttgctcgcgtcacctccaatggtgtgatcgagcaaatcgagcgtggggtgtatgtcacatttgctgtatcaccttgtggcaagaaagacataaaacgtgtacgattcagtcggaagcattttggcgagaaggaagctcaacactggtgggaagagaataagggcagcgtctatgcaaagtacagcactgaaaaagcgcaacatcagctagaggttacaatcaagagtgtacaagagtaaccacaagttggattgggttacctactgctgagcaagatgaaaaaatgacatggagcaaataagatgatattaacggaacagataactgaccgtcctttttcaatgaaaataggcagtttaacttattgtagatacgaatgtacagataagaatgagtgaatgacggctggatgcctcctttcttttctccatttcctcctgattcagttggcatgatctagtctgatgaacaatgcagtgctgaattgaaccagtatcagtcgtaattttctggcagaaagtagaatttgttcagtattagttgtttcccttgattcttcagagcaactaaacctgcaacaatggaagtttcagacacaaagctaatagttgtcagcgttcatattctgacggagaaagcatccaactgaaaacagttctaacactcggcgccaataggaaggcaaggcttatcctttcgagtctccaccataccaccaccaacaatggcgagcattcacgccggctttgcctccaccatcgttgcttgcagaagctttagcttcactatcgtggcatgcccctccccctcgcccgcgcattgtacggcctcctcttccagtggggtccgcaaccagcggcgcaaatccactcccccagccgccgagtgcctcccatggcgccgccaccaggttgcacgtcagcggtaggcgccccgatctcactgcactc

SEQ ID NO: 19612 - DNA, 3965 bp, Zea Mays
ctttcacccatctgcttgtttctccatttgttggcctgcaatggcggggagcttcgacctgaggacgccaaccagaggcgtcgagcaggctatcgttgctctgaagaaaggcgcacatctcctgaaatgtggcaagagggggaagcctaaattctgcgccttcagaatatcatctgatgagacaacattaatatggtactcaaaagggagggaaaaacacttgagcttaagctccgtgtcagctgtggttcttggccagaagacgatctgcagcgatagagatcaagctgaaaactggtatctgggcttgagggccctattaccaactccttgtaatccatgttcatcaattgaatcaaggagcagtaggcagatcgacagttgtacaaatactcccagcagctatattcagcttaagagtaagttactaagtgtgcatggcacaccaaggcacatacaggtatgttcatcgcaaaggaagcccaagaaggcacacggaacattttttggtggtagcgctgattgttcagaatcattattttacacaaggcagcgaacattctctgacataggtacctacttggaaaatcttacacgcaagatgtcaaatccagaaatacatgatttgaaggatgttatggttggtaaccaagaaaaggagcagaaaattacccaaacacctaaactgaaaacctttgaaggaccccgtgcagcatgtaggttagattctctgaaggatgtttttttctggggtgatgcttttggaagtattttagagtgtggtgatacctcaaaaccccttccaatgttagtggactcaacgaacatgcttgatgtacaaagcattgcttgcggagagactcatgcggccataatcactaagcaaggagaggtctactcctggggaaatgagagcagtggcagaattggaaatcaagtaaatatcaaagtctcccggcccaaggtcgttcaatctcttgcctctttacatgtgaaggatgtggcctatggatcaaagcacacttgtgcagtaactgtttctggtgaacttattgaatggggagaaggaccctatatgggccagttggacagctatgcgaggaatcaatggtttccgcataaattgtttagtccactggacggcatatctgttgtgaagattgcttgtggtccttggcacacagcaataataacgtcttctggtcagttatacacatatggggatggaacatttggtgttcttggtcatggagatacacaaggaactacccggcctaaagaagtagagtctttgaaaggctcaagagtgaaatgtgtggcatgtgggccatggcacacagctgccattgtggaagtgatcagtgatttcaagagcaattcaccaagaagcaagctgttcacatggggcgatgcagatcgggggaagctgggtcatgctgacaaaaagatgaagcttataccaacatgtgttgattcactcacagactatgattttattcaggtgtcctgcgggacggcactcactgttgctctctctgttactggtgtggtctttactagtggcagttcgatgcatgggcaattagggaacccccatgcagatggtaaaactgtttctgctgttgaaggactacttaagagcgagtttgtcagacatatatcatcaggttcttcccatgtagcagtggtgactacaaatgggaaagtgtttacatggggtaaaggcaaggaagggcagcttggtttaggtgacttccttaataggagcactccaactttagtagatgcattggaaggtaggcatgtggaaagcctatcttgtggttacaactacactgcagcagtatgtctgcataaagtaatctcaaggaaggacctctctgtatgtagtggttgcaagatggcttttggtttcactagaaagaagcacaactgttaccattgtggatccatgttctgtaattcctgtagtagtaacaaggttgccaaggcagcacttgcaccagataagagcagaaggtatcgtgtgtgtgatgggtgtttcagtcagctactgaaagttgtggattctggtaaggtaaagtctgaactaaataccagcaaaggagctgaaattataaggtcatacacaccaaagttgtctcgtatattcagggatgtaaacttacctgtggaaaaggaaaaggtggctttagtacaacgctccaatcagagaaatgaggtcctgtacactccagtccaagcgaaatctcagagatgggggcaagttgagtgcccagctcaatttctatctgcagaagacagttctcattatcaatctatatcgaagaatcacatgtatagtgcctctgtttccgagagaatgcatgaccccacagtgctgaagtctggcagatctttgcaacagcctaatgatgaccagaggaaagatcttaacagcatagaagaaaccttgctcactgaagaagtaaagcagcttcgttcacagatgacacttctcatggagcaataccatcagaaagctcttcaggttgaactgtataaacaaaaactcgatgagacatggctaattgttaggaatgaggctgcaaaatgcaaagctgccaaagatatcataaaggttctaactgatcaggtaaggccttgtcagagaaacttttggtcggtcagcaatatgagaaccttgagacaaaatctaatatcagccaaggacaaacattttcagcagatttgcaacatcatcccagtgaaaaatttgccacaggcaaattcggacaactcgacaacaccaaaaatcaccagaccagcagccaaggagacgaagaatatacaccttcttcaagttctgatgtgcaggtagaaggattgtgtggtcatttgaatggttcaagaacatttgacagtaatggccgtattacagaagggaattccattgttgctcgcgtcacctccaatggtgtgatcgagcaaatcgagcgtggggtgtatgtcacatttgctgtatcaccttgtggcaagaaagacataaaacgtgtacgattcaggtggggtcctagaatgacttactggtgcttcattttacctttcacatttgcagtaacctaaccaggcattcttggtgcagtcggaagcattttggcgagaaggaagctcaacactggtgggaagagaataagggcagcgtctatgcaaagtacagcactgaaaaagcgcaacatcagctagaggttacaatcaagagtgtacaagagtaaccacaagttggattgggttacctactgctgagcaagatgaaaaaatgacatggagcaaataagatgatattaacggaacagataactgaccgtcctttttcaatgaaaataggcagtttaacttattgtagatacgaatgtacagataagaatgagtgaatgacggctggatgcctcctttcttttctccatttcctcctgattcagttggcatgatctagtctgatgaacaatgcagtgctgaattgaaccagtatcagtcgtaattttctggcagaaagtagaatttgttcagtattagttgtttcccttgattcttcagagcaactaaacctgcaacaatggaagtttcagacacaaagctaatagttgtcagcgttcatattctgacggagaaagcatccaactgaaaacagttctaacactcggcgccaataggaaggcaaggcttatcctttcgagtctccaccataccaccaccaacaatggcgagcattcacgccggctttgcctccaccatcgttgcttgcagaagctttagcttcactatcgtggcatgcccctccccctcgcccgcgcattgtacggcctcctcttccagtggggtccgcaaccagcggcgcaaatccactcccccagccgccgagtgcctcccatggcgccgccaccaggttgcacgtcagcggtaggcgccccgatctcactgcactc

SEQ ID NO: 19613 - DNA, 5194 bp, Zea Mays
caatttagtaacagaaattcaccgcaatgggtgtaccagccaagccaaagagtctaagttacagattttgaggaggcagagtggctgggagggagtctcatttcagaataggtcctatgttgaacaacgcataagcagcttctccatgctaagtagtcgagcagaataatatgcgagcaatgactcgtaccagctgttgggcatatcggagcggggcatgccgtcagccttcttcgcgtggcggtcgcagcacgggacgtcgctggtgggcatcctcttctctgcgttgggcgtctttggcgtaggcagggaagtagctcggcacgacttccgcccgacgtccttgggccaccgcgaggcccgtgtgccttgggactgcctcacatggagctcggccaggttatgcaaggacaagcacagcgtgtggttcaacgcacacgtcgaggtggagcgtcttagcctccacgactaccacgccgttcccgccaaggagggcctcgctgtcgaatgggaattggtatcggctgcacaggggaagggatttgattcactggtcatcctggtgtttggtgcatttggcagacacggaatcgctgacaagcggcagggactggactgcggactgccgctggcaactccgacctcgcgacgctgtactcggcttgctttgaggacagaacgatgcaatgcagcctatgctctagtcgtccagatgattagtcatggttgtacactacggggtgttataatcttgctagtcttagcgttgcgtgttcggcgacctactactgacaacgctactcgcgttgccggacgactccaaagagcaaaagtgaggaggaagatgaatggcaatggatatgataagcgctcgtggaagaagaagcggcgaaggcagacggaggggttcgaggctgtggccatgtactgggcgagggcgaagaaggacggcaagtttggtctcagctaccttgacaaccaggtcttctcttggtctgtcagcgacatcttcgacagggatctcctcaggaaaaaggtcaagcggataccggatactttcacgtcatttgagagttacttggattcgtttacttggccgctgattgaagaagtacatgctgatgtattctcatcgctagatggttattctgaggcaaactttatagaagtaacacaggtgggaaatcttgatgctagtaaaccaatactcggttttcgagttgcagaaccagtgaaggatgagaagtcaagggagacatatgtaccagtggagaatgatataattgtcctgtcctcacataagccaaggcatgtgtctgatttgacacaaaacaagtcatcatttgtgttaggttcggtaattaaaactggagaagaagatgggttccctccggactggtgtgttgttcacttgtcatctgccattctcgttgaggcagactgtcatacaaaaattccaaaaaggccactgtttcttgtgttccttataaatatgaagacatacaatcgcatatggagatgccttcatttgggacaaaattgtagtaatctctttgagcttcagaacaaaaagagtagtggtcccgtaactaaggcgtgggagttcaagccaaagcccgcggaagcggaaagttcccaatgctcccaaccatctcaatgttttgatggtaggttgattgaatggcttggccttgagaaattcggtctaaatgattcacagttgaatgcagtgtcagattgtgtatcattaatggatagcaactcttcatctataaagctattatggggtccccctgggacaggtaaaactaaaactatcagctctatattatgggccatgctcatcaagggcaggaggacacttgcctgtgcacctacgaatactgctgtgttagagattgcggctcggatcgtcagtctaactgtgaagtcttcggatggcaccgtcttcctgaatgacattgttctgtttggaaacaaaaagaagatgaagatagataatgactattatctttcaaaggtgtatcttaactttcgtgctgagcgcctgttgccatgcttcaagtcaaatacaggctggaggcattgtttatgcgtgctgatagatcttcttgtcaattctgtgaccaagtaccagttgaacaatgaggataaaacattcaaacaacatttgaaagatgattacaataaactttctcggaatttacatagttacataactatactatacaatgatcatccaagaaacctggaaacaggacagagctttcaatgtatgctggaggtccgtgagttgctcaaaattcttcacactttgataaatgctggtaatggtggtgatatatggagcgatgaactgctcagaagcactatagaagaggaggtcaaccctgagctttggccttcacagctagcctgcatacggaccaactcatgcaataaatccaagtttgtggctgcaagatctttgtgtctgcaagaattaatatatctttgtaagaacatggagctcccaaattgttacagtgcacaagatgttcgactatacctgctgtcaagaactagattgattatctgtacagtttgtagctcattcaagttgtacaatatacctatgagaaattcttctccaagtttacatcagctgctaaacaaacccaaaatattgattcctctggagttgctgataattgatgaggctgctcagctcaaagagtgtgaaaccttaattcctctgcagttgcctggcataaggcatgctgttctcatcggcgatgagtatcaattaccttcccttgtgaagagcaaaatatctgatagtgctaactttggacgaagtgtttttgagaggttgagttccctaggctatagtaagcaccttctcaatatccagtacaggatgcatccagacattagcaggtttccagttggaaaactgtttaggccatattcatttataaatattgatggcagccatgaaacaaatgaaatgcatggtcggagccttaaaaactcattagaagtcgatgcagttgtgatgatagtgcagagtttgttaaaagagacgctttctacacgaagcaagctttctattggtgttgtgtgtccatacaatgctcaagttagagctatacaggaaaaggttgggaagccctgcaggaagtatgattatttctcagtgaaagtaaaatctgtggatggtttccaaggcgcggaggaagatataattatcatatcaacagtcaggagtaatggagctggtacagttgggtttctatcaaacttacagaggactaacgtggctctaacaagggccaagcattgcttatggattgtggggaatggaaccactctgttcaacagcaattccgtttggcagaagatcgtcaaggacacaagagatagaggttgtttttttaatgccactgatgagaaagagttgctgaatgcaattttcaagcctgctgttgagtatcctcatgctgacaatttagctaaacatgagcaacacggacagaatatatccgacttatcagctactgacacaattcagcaacttgcatgtcagtttacccctggaagtgatctcccaccaaagttctctatcacactcaatgttggttatactacaagaaaattcagttcatcaagcaccctgcttaacagctctcctttgcaactcacagcaacagcggtaccaaacgcagaaccagcttctcatggctcttcagctactggagcagttgaattgcctgtaaccgaagatgggcgcttggttgatgggaaaatctcctttcagaatactgtgaggagcactttgatcagaatcgaccacgaccctagacttgcatttgactttctggcagtagcaactacacgggagcaagcagcacctcttacccgggagcagtttaagaagcatgacagaatggtcgaatctcctgctccagttaccgctgagggttcggaatgctgcatcagactcaatgaacaggagcaagtagcacctcctaccaagctgcaatcgaagaagcgtggtagaaatgttaaagatcctgctgcagctactacaggggctttgaaatgcagcatcggactcgatgaaatagctacccgccagcaagcagcacctcctactcctgagcaatctaagaagcgtggtagaaagagcgaacctcttcctcaagttatcacagagggtttgagacgcagcagccgacttagtgaaaaaggcaagcaccatcaagtagcgccgtctcaggagcaagccaagaagcatggtagaaagggagcgacactttctccagttaccacagaggccctgagacgcagcagcagactgaatgaaaagggcacgcatcagcagatagcgctttctatcccagagcaagctaagaagtgtggtagaaaggccaaaaggcttcctcgagtaaccatagagggtttgaaacgcagcaaaagaatgagtagaaacaacagcgaagaattggctgatgtggattgcaatccataaatggcaaggaagcgacgcctacctgccgagtgccgactacatcaaaggaggttacaacagaattgtataggttgggacatgtctgcagcaagcaacatgatcgacccttctcgcactacaggaaactggttaaagaacgtgggtgaaaaaccgtcaaacttaatgtaataggccgtcgaacttaccgtaagaacgtgggtttaccgacgaatatagccgacggcgatttttggacgaacttagagaagtaagttcgacggtacccacgttcttaaccttaagaacgtgggtaccgtcgaacttaacattaagaacgtgggtaccgtcgaacttaacattaagaacgtgcgtttttaagttcgacgggggccgtcgaattttttcccataagttcgacagcacccacgttcttaaggttaagttcgacggggtcacgtggccgtcgaacttatgtgtcctgcagaggtctgcgcggaatgcacaataagttcgacggtacccacgttcttaaccttaagaacgtgggtacccacgttcttaaccctttttcagaaaaaaaaaataaaaacacaaaaatgaaaaattagacacataatatcatatgcaacacaatatatcacatacaatacatatttcaaacacattgatatatgttcatatcacaaattcacacaagttcca

SEQ ID NO: 19614 - DNA, 5061 bp, Zea Mays
aggtcctatgttgaacaacgcataagcagcttctccatgctaagtagtcgagcagaataatatgcgagcaatgactcgtaccagctgttgggcatatcggagcggggcatgccgtcagccttcttcgcgtggcggtcgcagcacgggacgtcgctggtgggcatcctcttctctgcgttgggcgtctttggcgtaggcagggaagtagctcggcacgacttccgcccgacgtccttgggccaccgcgaggcccgtgtgccttgggactgcctcacatggagctcggccaggttatgcaaggacaagcacagcgtgtggttcaacgcacacgtcgaggtggagcgtcttagcctccacgactaccacgccgttcccgccaaggagggcctcgctgtcgaatgggaattggtatcggctgcacaggggaagggatttgattcactggtcatcctggtgtttggtgcatttggcagacacggaatcgctgacaagcggcagggactggactgcggactgccgctggcaactccgacctcgcgacgctgtactcggcttgctttgaggacagaacgatgcaatgcagcctatgctctagtcgtccagatgattagtcatggttgtacactacggggtgttataatcttgctagtcttagcgttgcgtgttcggcgacctactactgacaacgctactcgcgttgccggacgactccaaagagcaaaagtgaggaggaagatgaatggcaatggatatgataagcgctcgtggaagaagaagcggcgaaggcagacggaggggttcgaggctgtggccatgtactgggcgagggcgaagaaggacggcaagtttggtctcagctaccttgacaaccaggtcttctcttggtctgtcagcgacatcttcgacagggatctcctcaggaaaaaggtcaagcggataccggatactttcacgtcatttgagagttacttggattcgtttacttggccgctgattgaagaagtacatgctgatgtattctcatcgctagatggttattctgaggcaaactttatagaagtaacacaggtgggaaatcttgatgctagtaaaccaatactcggttttcgagttgcagaaccagtgaaggatgagaagtcaagggagacatatgtaccagtggagaatgatataattgtcctgtcctcacataagccaaggcatgtgtctgatttgacacaaaacaagtcatcatttgtgttaggttcggtaattaaaactggagaagaagatgggttccctccggactggtgtgttgttcacttgtcatctgccattctcgttgaggcagactgtcatacaaaaattccaaaaaggccactgtttcttgtgttccttataaatatgaagacatacaatcgcatatggagatgccttcatttgggacaaaattgtagtaatctctttgagcttcagaacaaaaagagtagtggtcccgtaactaaggcgtgggagttcaagccaaaggtgtgttggtcctatgcacacaaacccgcggaagcggaaagttcccaatgctcccaaccatctcaatgttttgatggtaggttgattgaatggcttggccttgagaaattcggtctaaatgattcacagttgaatgcagtgtcagattgtgtatcattaatggatagcaactcttcatctataaagctattatggggtccccctgggacaggtaaaactaaaactatcagctctatattatgggccatgctcatcaagggcaggaggacacttgcctgtgcacctacgaatactgctgtgttagagattgcggctcggatcgtcagtctaactgtgaagtcttcggatggcaccgtcttcctgaatgacattgttctgtttggaaacaaaaagaagatgaagatagataatgactattatctttcaaaggtgtatcttaactttcgtgctgagcgcctgttgccatgcttcaagtcaaatacaggctggaggcattgtttatgcgtgctgatagatcttcttgtcaattctgtgaccaagtaccagttgaacaatgaggataaaacattcaaacaacatttgaaagatgattacaataaactttctcggaatttacatagttacataactatactatacaatgatcatccaagaaacctggaaacaggacagagctttcaatgtatgctggaggtccgtgagttgctcaaaattcttcacactttgataaatgctggtaatggtggtgatatatggagcgatgaactgctcagaagcactatagaagaggaggtcaaccctgagctttggccttcacagctagcctgcatacggaccaactcatgcaataaatccaagtttgtggctgcaagatctttgtgtctgcaagaattaatatatctttgtaagaacatggagctcccaaattgttacagtgcacaagatgttcgactatacctgctgtcaagaactagattgattatctgtacagtttgtagctcattcaagttgtacaatatacctatgagaaattcttctccaagtttacatcagctgctaaacaaacccaaaatattgattcctctggagttgctgataattgatgaggctgctcagctcaaagagtgtgaaaccttaattcctctgcagttgcctggcataaggcatgctgttctcatcggcgatgagtatcaattaccttcccttgtgaagagcaaaatatctgatagtgctaactttggacgaagtgtttttgagaggttgagttccctaggctatagtaagcaccttctcaatatccagtacaggatgcatccagacattagcaggtttccagttggtacattttatgatggcaagctatctgatggccccaatgtcagtcacaaggactataataagatgtttttagcaggaaaactgtttaggccatattcatttataaatattgatggcagccatgaaacaaatgaaatgcatggtcggagccttaaaaactcattagaagtcgatgcagttgtgatgatagtgcagagtttgttaaaagagacgctttctacacgaagcaagctttctattggtgttgtgtgtccatacaatgctcaagttagagctatacaggaaaaggttgggaagccctgcaggaagtatgattatttctcagtgaaagtaaaatctgtggatggtttccaaggcgcggaggaagatataattatcatatcaacagtcaggagtaatggagctggtacagttgggtttctatcaaacttacagaggactaacgtggctctaacaagggccaagcattgcttatggattgtggggaatggaaccactctgttcaacagcaattccgtttggcagaagatcgtcaaggacacaagagatagaggttgtttttttaatgccactgatgagaaagagttgctgaatgcaattttcaagcctgctgttgagtatcctcatgctgacaatttagctaaacatgagcaacacggacagaatatatccgacttatcagctactgacacaattcagcaacttgcatcaacagcggtaccaaacgcagaaccagcttctcatggctcttcagctactggagcagttgaattgcctgtaaccgaagatgggcgcttggttgatgggaaaatctcctttcagaatactgtgaggagcactttgatcagaatcgaccacgaccctagacttgcatttgactttctggcagtagcaactacacgggagcaagcagcacctcttacccgggagcagtttaagaagcatgacagaatggtcgaatctcctgctccagttaccgctgagggttcggaatgctgcatcagactcaatgaacaggagcaagtagcacctcctaccaagctgcaatcgaagaagcgtggtagaaatgttaaagatcctgctgcagctactacaggggctttgaaatgcagcatcggactcgatgaaatagctacccgccagcaagcagcacctcctactcctgagcaatctaagaagcgtggtagaaagagcgaacctcttcctcaagttatcacagagggtttgagacgcagcagccgacttagtgaaaaaggcaagcaccatcaagtagcgccgtctcaggagcaagccaagaagcatggtagaaagggagcgacactttctccagttaccacagaggccctgagacgcagcagcagactgaatgaaaagggcacgcatcagcagatagcgctttctatcccagagcaagctaagaagtgtggtagaaaggccaaaaggcttcctcgagtaaccatagagggtttgaaacgcagcaaaagaatgagtagaaacaacagcgaagaattggctgatgtggattgcaatccataaatggcaaggaagcgacgcctacctgccgagtgccgactacatcaaaggaggttacaacagaattgtataggttgggacatgtctgcagcaagcaacatgatcgacccttctcgcactacaggaaactggttaaagaacgtgggtgaaaaaccgtcaaacttaatgtaataggccgtcgaacttaccgtaagaacgtgggtttaccgacgaatatagccgacggcgatttttggacgaacttagagaagtaagttcgacggtacccacgttcttaaccttaagaacgtgggtaccgtcgaacttaacattaagaacgtgggtaccgtcgaacttaacattaagaacgtgcgtttttaagttcgacgggggccgtcgaattttttcccataagttcgacagcacccacgttcttaaggttaagttcgacggggtcacgtggccgtcgaacttatgtgtcctgcagaggtctgcgcggaatgcacaataagttcgacggtacccacgttcttaaccttaagaacgtgggtacccacgttcttaaccctttttcagaaaaaaaaaataaaaacacaaaaatgaaaaattagacacataatatcatatgcaacacaatatatcacatacaatacatatttcaaacacattgatatatgttcatatcacaaattcacacaagttcca

SEQ ID NO: 19615 - DNA, 4470 bp, Zea Mays
agctcgtagcccacgtccatttagggctcatcaactttggcccagctaggcccatcccagtctccacaccttcgtcctccgtagcggctacttgctcatcgccgcagcccgctggtaccggcggtcgctcgccggccagaaacagaatgtttcgatcgatctacgagatggagtgcgtagctgcaacgacgatagagtttcgatgtcgcgtcggtccagtgcctgctccgggaccaggtcaagcggataccggatactttcacgtcatttgagagttacttggattcgtttacttggccgctgattgaagaagtacatgctgatgtattctcatcgctagatggttattctgaggcaaactttatagaagtaacacaggtgggaaatcttgatgctagtaaaccaatactcggttttcgagttgcagaaccagtgaaggatgagaagtcaagggagacatatgtaccagtggagaatgatataattgtcctgtcctcacataagccaaggcatgtgtctgatttgacacaaaacaagtcatcatttgtgttaggttcggtaattaaaactggagaagaagatgggttccctccggactggtgtgttgttcacttgtcatctgccattctcgttgaggcagactgtcatacaaaaattccaaaaaggccactgtttcttgtgttccttataaatatgaagacatacaatcgcatatggagatgccttcatttgggacaaaattgtagtaatctctttgagcttcagaacaaaaagagtagtggtcccgtaactaaggcgtgggagttcaagccaaagcccgcggaagcggaaagttcccaatgctcccaaccatctcaatgttttgatggtaggttgattgaatggcttggccttgagaaattcggtctaaatgattcacagttgaatgcagtgtcagattgtgtatcattaatggatagcaactcttcatctataaagctattatggggtccccctgggacaggtaaaactaaaactatcagctctatattatgggccatgctcatcaagggcaggaggacacttgcctgtgcacctacgaatactgctgtgttagagattgcggctcggatcgtcagtctaactgtgaagtcttcggatggcaccgtcttcctgaatgacattgttctgtttggaaacaaaaagaagatgaagatagataatgactattatctttcaaaggtgtatcttaactttcgtgctgagcgcctgttgccatgcttcaagtcaaatacaggctggaggcattgtttatgcgtgctgatagatcttcttgtcaattctgtgaccaagtaccagttgaacaatgaggataaaacattcaaacaacatttgaaagatgattacaataaactttctcggaatttacatagttacataactatactatacaatgatcatccaagaaacctggaaacaggacagagctttcaatgtatgctggaggtccgtgagttgctcaaaattcttcacactttgataaatgctggtaatggtggtgatatatggagcgatgaactgctcagaagcactatagaagaggaggtcaaccctgagctttggccttcacagctagcctgcatacggaccaactcatgcaataaatccaagtttgtggctgcaagatctttgtgtctgcaagaattaatatatctttgtaagaacatggagctcccaaattgttacagtgcacaagatgttcgactatacctgctgtcaagaactagattgattatctgtacagtttgtagctcattcaagttgtacaatatacctatgagaaattcttctccaagtttacatcagctgctaaacaaacccaaaatattgattcctctggagttgctgataattgatgaggctgctcagctcaaagagtgtgaaaccttaattcctctgcagttgcctggcataaggcatgctgttctcatcggcgatgagtatcaattaccttcccttgtgaagagcaaaatatctgatagtgctaactttggacgaagtgtttttgagaggttgagttccctaggctatagtaagcaccttctcaatatccagtacaggatgcatccagacattagcaggtttccagttggtacattttatgatggcaagctatctgatggccccaatgtcagtcacaaggactataataagatgtttttagcaggaaaactgtttaggccatattcatttataaatattgatggcagccatgaaacaaatgaaatgcatggtcggagccttaaaaactcattagaagtcgatgcagttgtgatgatagtgcagagtttgttaaaagagacgctttctacacgaagcaagctttctattggtgttgtgtgtccatacaatgctcaagttagagctatacaggaaaaggttgggaagccctgcaggaagtatgattatttctcagtgaaagtaaaatctgtggatggtttccaaggcgcggaggaagatataattatcatatcaacagtcaggagtaatggagctggtacagttgggtttctatcaaacttacagaggactaacgtggctctaacaagggccaagcattgcttatggattgtggggaatggaaccactctgttcaacagcaattccgtttggcagaagatcgtcaaggacacaagagatagaggttgtttttttaatgccactgatgagaaagagttgctgaatgcaattttcaagcctgctgttgagtatcctcatgctgacaatttagctaaacatgagcaacacggacagaatatatccgacttatcagctactgacacaattcagcaacttgcatgtcagtttacccctggaagtgatctcccaccaaagttctctatcacactcaatgttggttatactacaagaaaattcagttcatcaagcaccctgcttaacagctctcctttgcaactcacagcaacagcggtaccaaacgcagaaccagcttctcatggctcttcagctactggagcagttgaattgcctgtaaccgaagatgggcgcttggttgatgggaaaatctcctttcagaatactgtgaggagcactttgatcagaatcgaccacgaccctagacttgcatttgactttctggcagtagcaactacacgggagcaagcagcacctcttacccgggagcagtttaagaagcatgacagaatggtcgaatctcctgctccagttaccgctgagggttcggaatgctgcatcagactcaatgaacaggagcaagtagcacctcctaccaagctgcaatcgaagaagcgtggtagaaatgttaaagatcctgctgcagctactacaggggctttgaaatgcagcatcggactcgatgaaatagctacccgccagcaagcagcacctcctactcctgagcaatctaagaagcgtggtagaaagagcgaacctcttcctcaagttatcacagagggtttgagacgcagcagccgacttagtgaaaaaggcaagcaccatcaagtagcgccgtctcaggagcaagccaagaagcatggtagaaagggagcgacactttctccagttaccacagaggccctgagacgcagcagcagactgaatgaaaagggcacgcatcagcagatagcgctttctatcccagagcaagctaagaagtgtggtagaaaggccaaaaggcttcctcgagtaaccatagagggtttgaaacgcagcaaaagaatgagtagaaacaacagcgaagaattggctgatgtggattgcaatccataaatggcaaggaagcgacgcctacctgccgagtgccgactacatcaaaggaggttacaacagaattgtataggttgggacatgtctgcagcaagcaacatgatcgacccttctcgcactacaggaaactggttaaagaacgtgggtgaaaaaccgtcaaacttaatgtaataggccgtcgaacttaccgtaagaacgtgggtttaccgacgaatatagccgacggcgatttttggacgaacttagagaagtaagttcgacggtacccacgttcttaaccttaagaacgtgggtaccgtcgaacttaacattaagaacgtgggtaccgtcgaacttaacattaagaacgtgcgtttttaagttcgacgggggccgtcgaattttttcccataagttcgacagcacccacgttcttaaggttaagttcgacggggtcacgtggccgtcgaacttatgtgtcctgcagaggtctgcgcggaatgcacaataagttcgacggtacccacgttcttaaccttaagaacgtgggtacccacgttcttaaccctttttcagaaaaaaaaaataaaaacacaaaaatgaaaaattagacacataatatcatatgcaacacaatatatcacatacaatacatatttcaaacacattgatatatgttcatatcacaaattcacacaagttcca

SEQ ID NO: 19616 - DNA, 4344 bp, Zea Mays
cacaccttcgtcctccgtagcggctacttgctcatcgccgcagcccgctggtaccggcggtcgctcgccggccagaaacagaatgtttcgatcgatctacgagatggagtgcgtagctgcaacgacgatagagtttcgatgtcgcgtcggtccagtgcctgctccgggaccaggtcaagcggataccggatactttcacgtcatttgagagttacttggattcgtttacttggccgctgattgaagaagtacatgctgatgtattctcatcgctagatggttattctgaggcaaactttatagaagtaacacaggtgggaaatcttgatgctagtaaaccaatactcggttttcgagttgcagaaccagtgaaggatgagaagtcaagggagacatatgtaccagtggagaatgatataattgtcctgtcctcacataagccaaggcatgtgtctgatttgacacaaaacaagtcatcatttgtgttaggttcggtaattaaaactggagaagaagatgggttccctccggactggtgtgttgttcacttgtcatctgccattctcgttgaggcagactgtcatacaaaaattccaaaaaggccactgtttcttgtgttccttataaatatgaagacatacaatcgcatatggagatgccttcatttgggacaaaattgtagtaatctctttgagcttcagaacaaaaagagtagtggtcccgtaactaaggcgtgggagttcaagccaaaggtgtgttggtcctatgcacacaaacccgcggaagcggaaagttcccaatgctcccaaccatctcaatgttttgatggtaggttgattgaatggcttggccttgagaaattcggtctaaatgattcacagttgaatgcagtgtcagattgtgtatcattaatggatagcaactcttcatctataaagctattatggggtccccctgggacaggtaaaactaaaactatcagctctatattatgggccatgctcatcaagggcaggaggacacttgcctgtgcacctacgaatactgctgtgttagagattgcggctcggatcgtcagtctaactgtgaagtcttcggatggcaccgtcttcctgaatgacattgttctgtttggaaacaaaaagaagatgaagatagataatgactattatctttcaaaggtgtatcttaactttcgtgctgagcgcctgttgccatgcttcaagtcaaatacaggctggaggcattgtttatgcgtgctgatagatcttcttgtcaattctgtgaccaagtaccagttgaacaatgaggataaaacattcaaacaacatttgaaagatgattacaataaactttctcggaatttacatagttacataactatactatacaatgatcatccaagaaacctggaaacaggacagagctttcaatgtatgctggaggtccgtgagttgctcaaaattcttcacactttgataaatgctggtaatggtggtgatatatggagcgatgaactgctcagaagcactatagaagaggaggtcaaccctgagctttggccttcacagctagcctgcatacggaccaactcatgcaataaatccaagtttgtggctgcaagatctttgtgtctgcaagaattaatatatctttgtaagaacatggagctcccaaattgttacagtgcacaagatgttcgactatacctgctgtcaagaactagattgattatctgtacagtttgtagctcattcaagttgtacaatatacctatgagaaattcttctccaagtttacatcagctgctaaacaaacccaaaatattgattcctctggagttgctgataattgatgaggctgctcagctcaaagagtgtgaaaccttaattcctctgcagttgcctggcataaggcatgctgttctcatcggcgatgagtatcaattaccttcccttgtgaagagcaaaatatctgatagtgctaactttggacgaagtgtttttgagaggttgagttccctaggctatagtaagcaccttctcaatatccagtacaggatgcatccagacattagcaggaaaactgtttaggccatattcatttataaatattgatggcagccatgaaacaaatgaaatgcatggtcggagccttaaaaactcattagaagtcgatgcagttgtgatgatagtgcagagtttgttaaaagagacgctttctacacgaagcaagctttctattggtgttgtgtgtccatacaatgctcaagttagagctatacaggaaaaggttgggaagccctgcaggaagtatgattatttctcagtgaaagtaaaatctgtggatggtttccaaggcgcggaggaagatataattatcatatcaacagtcaggagtaatggagctggtacagttgggtttctatcaaacttacagaggactaacgtggctctaacaagggccaagcattgcttatggattgtggggaatggaaccactctgttcaacagcaattccgtttggcagaagatcgtcaaggacacaagagatagaggttgtttttttaatgccactgatgagaaagagttgctgaatgcaattttcaagcctgctgttgagtatcctcatgctgacaatttagctaaacatgagcaacacggacagaatatatccgacttatcagctactgacacaattcagcaacttgcatgtcagtttacccctggaagtgatctcccaccaaagttctctatcacactcaatgttggttatactacaagaaaattcagttcatcaagcaccctgcttaacagctctcctttgcaactcacagcaacagcggtaccaaacgcagaaccagcttctcatggctcttcagctactggagcagttgaattgcctgtaaccgaagatgggcgcttggttgatgggaaaatctcctttcagaatactgtgaggagcactttgatcagaatcgaccacgaccctagacttgcatttgactttctggcagtagcaactacacgggagcaagcagcacctcttacccgggagcagtttaagaagcatgacagaatggtcgaatctcctgctccagttaccgctgagggttcggaatgctgcatcagactcaatgaacaggagcaagtagcacctcctaccaagctgcaatcgaagaagcgtggtagaaatgttaaagatcctgctgcagctactacaggggctttgaaatgcagcatcggactcgatgaaatagctacccgccagcaagcagcacctcctactcctgagcaatctaagaagcgtggtagaaagagcgaacctcttcctcaagttatcacagagggtttgagacgcagcagccgacttagtgaaaaaggcaagcaccatcaagtagcgccgtctcaggagcaagccaagaagcatggtagaaagggagcgacactttctccagttaccacagaggccctgagacgcagcagcagactgaatgaaaagggcacgcatcagcagatagcgctttctatcccagagcaagctaagaagtgtggtagaaaggccaaaaggcttcctcgagtaaccatagagggtttgaaacgcagcaaaagaatgagtagaaacaacagcgaagaattggctgatgtggattgcaatccataaatggcaaggaagcgacgcctacctgccgagtgccgactacatcaaaggaggttacaacagaattgtataggttgggacatgtctgcagcaagcaacatgatcgacccttctcgcactacaggaaactggttaaagaacgtgggtgaaaaaccgtcaaacttaatgtaataggccgtcgaacttaccgtaagaacgtgggtttaccgacgaatatagccgacggcgatttttggacgaacttagagaagtaagttcgacggtacccacgttcttaaccttaagaacgtgggtaccgtcgaacttaacattaagaacgtgggtaccgtcgaacttaacattaagaacgtgcgtttttaagttcgacgggggccgtcgaattttttcccataagttcgacagcacccacgttcttaaggttaagttcgacggggtcacgtggccgtcgaacttatgtgtcctgcagaggtctgcgcggaatgcacaataagttcgacggtacccacgttcttaaccttaagaacgtgggtacccacgttcttaaccctttttcagaaaaaaaaaataaaaacacaaaaatgaaaaattagacacataatatcatatgcaacacaatatatcacatacaatacatatttcaaacacattgatatatgttcatatcacaaattcacacaagttcca

SEQ ID NO: 19617 - DNA, 4078 bp, Zea Mays
acaccttcgtcctccgtagcggctacttgctcatcgccgcagcccgctggtaccggcggtcgctcgccggccagaaacagaatgtttcgatcgatctacgagatggagtgcgtagctgcaacgacgatagagtttcgatgtcgcgtcggtccagtgcctgctccgggaccaggtcaagcggataccggatactttcacgtcatttgagagttacttggattcgtttacttggccgctgattgaagaagtacatgctgatgtattctcatcgctagatggttattctgaggcaaactttatagaagtaacacagcccgcggaagcggaaagttcccaatgctcccaaccatctcaatgttttgatggtaggttgattgaatggcttggccttgagaaattcggtctaaatgattcacagttgaatgcagtgtcagattgtgtatcattaatggatagcaactcttcatctataaagctattatggggtccccctgggacaggtaaaactaaaactatcagctctatattatgggccatgctcatcaagggcaggaggacacttgcctgtgcacctacgaatactgctgtgttagagattgcggctcggatcgtcagtctaactgtgaagtcttcggatggcaccgtcttcctgaatgacattgttctgtttggaaacaaaaagaagatgaagatagataatgactattatctttcaaaggtgtatcttaactttcgtgctgagcgcctgttgccatgcttcaagtcaaatacaggctggaggcattgtttatgcgtgctgatagatcttcttgtcaattctgtgaccaagtaccagttgaacaatgaggataaaacattcaaacaacatttgaaagatgattacaataaactttctcggaatttacatagttacataactatactatacaatgatcatccaagaaacctggaaacaggacagagctttcaatgtatgctggaggtccgtgagttgctcaaaattcttcacactttgataaatgctggtaatggtggtgatatatggagcgatgaactgctcagaagcactatagaagaggaggtcaaccctgagctttggccttcacagctagcctgcatacggaccaactcatgcaataaatccaagtttgtggctgcaagatctttgtgtctgcaagaattaatatatctttgtaagaacatggagctcccaaattgttacagtgcacaagatgttcgactatacctgctgtcaagaactagattgattatctgtacagtttgtagctcattcaagttgtacaatatacctatgagaaattcttctccaagtttacatcagctgctaaacaaacccaaaatattgattcctctggagttgctgataattgatgaggctgctcagctcaaagagtgtgaaaccttaattcctctgcagttgcctggcataaggcatgctgttctcatcggcgatgagtatcaattaccttcccttgtgaagagcaaaatatctgatagtgctaactttggacgaagtgtttttgagaggttgagttccctaggctatagtaagcaccttctcaatatccagtacaggatgcatccagacattagcaggtttccagttggtacattttatgatggcaagctatctgatggccccaatgtcagtcacaaggactataataagatgtttttagcaggaaaactgtttaggccatattcatttataaatattgatggcagccatgaaacaaatgaaatgcatggtcggagccttaaaaactcattagaagtcgatgcagttgtgatgatagtgcagagtttgttaaaagagacgctttctacacgaagcaagctttctattggtgttgtgtgtccatacaatgctcaagttagagctatacaggaaaaggttgggaagccctgcaggaagtatgattatttctcagtgaaagtaaaatctgtggatggtttccaaggcgcggaggaagatataattatcatatcaacagtcaggagtaatggagctggtacagttgggtttctatcaaacttacagaggactaacgtggctctaacaagggccaagcattgcttatggattgtggggaatggaaccactctgttcaacagcaattccgtttggcagaagatcgtcaaggacacaagagatagaggttgtttttttaatgccactgatgagaaagagttgctgaatgcaattttcaagcctgctgttgagtatcctcatgctgacaatttagctaaacatgagcaacacggacagaatatatccgacttatcagctactgacacaattcagcaacttgcatgtcagtttacccctggaagtgatctcccaccaaagttctctatcacactcaatgttggttatactacaagaaaattcagttcatcaagcaccctgcttaacagctctcctttgcaactcacagcaacagcggtaccaaacgcagaaccagcttctcatggctcttcagctactggagcagttgaattgcctgtaaccgaagatgggcgcttggttgatgggaaaatctcctttcagaatactgtgaggagcactttgatcagaatcgaccacgaccctagacttgcatttgactttctggcagtagcaactacacgggagcaagcagcacctcttacccgggagcagtttaagaagcatgacagaatggtcgaatctcctgctccagttaccgctgagggttcggaatgctgcatcagactcaatgaacaggagcaagtagcacctcctaccaagctgcaatcgaagaagcgtggtagaaatgttaaagatcctgctgcagctactacaggggctttgaaatgcagcatcggactcgatgaaatagctacccgccagcaagcagcacctcctactcctgagcaatctaagaagcgtggtagaaagagcgaacctcttcctcaagttatcacagagggtttgagacgcagcagccgacttagtgaaaaaggcaagcaccatcaagtagcgccgtctcaggagcaagccaagaagcatggtagaaagggagcgacactttctccagttaccacagaggccctgagacgcagcagcagactgaatgaaaagggcacgcatcagcagatagcgctttctatcccagagcaagctaagaagtgtggtagaaaggccaaaaggcttcctcgagtaaccatagagggtttgaaacgcagcaaaagaatgagtagaaacaacagcgaagaattggctgatgtggattgcaatccatgtgagtgctaccataaaaagcccttctagtttcttttgtcagcactagatgatcatgactataactcatattttttttatttcttgaatgactcttttcatgaaccacaagaaatggcaaggaagcgacgcctacctgccgagtgccgactacatcaaaggaggttacaacagaattgtataggttgggacatgtctgcagcaagcaacatgatcgacccttctcgcactacaggaaactggttaaagaacgtgggtgaaaaaccgtcaaacttaatgtaataggccgtcgaacttaccgtaagaacgtgggtttaccgacgaatatagccgacggcgatttttggacgaacttagagaagtaagttcgacggtacccacgttcttaaccttaagaacgtgggtaccgtcgaacttaacattaagaacgtgggtaccgtcgaacttaacattaagaacgtgcgtttttaagttcgacgggggccgtcgaattttttcccataagttcgacagcacccacgttcttaaggttaagttcgacggggtcacgtggccgtcgaacttatgtgtcctgcagaggtctgcgcggaatgcacaataagttcgacggtacccacgttcttaaccttaagaacgtgggtacccacgttcttaaccctttttcagaaaaaaaaaataaaaacacaaaaatgaaaaattagacacataatatcatatgcaacacaatatatcacatacaatacatatttcaaacacattgatatatgttcatatcacaaattcacacaagttcca

SEQ ID NO: 19618 - DNA, 4686 bp, Zea Mays
ggcggtcgctcgccggccagaaacagaatgtttcgatcgatctacgagatggagtgcgtagctgcaacgacgatagagtttcgatgtcgcgtcggtccagtgcctgctccgggaccaggtcaagcggataccggatactttcacgtcatttgagagttacttggattcgtttacttggccgctgattgaagaagtacatgctgatgtattctcatcgctagatggttattctgaggcaaactttatagaagtaacacaggtgggaaatcttgatgctagtaaaccaatactcggttttcgagttgcagaaccagtgaaggatgagaagtcaagggagacatatgtaccagtggagaatgatataattgtcctgtcctcacataagccaaggcatgtgtctgatttgacacaaaacaagtcatcatttgtgttaggttcggtaattaaaactggagaagaagatgggttccctccggactggtgtgttgttcacttgtcatctgccattctcgttgaggcagactgtcatacaaaaattccaaaaaggccactgtttcttgtgttccttataaatatgaagacatacaatcgcatatggagatgccttcatttgggacaaaattgtagtaatctctttgagcttcagaacaaaaagagtagtggtcccgtaactaaggcgtgggagttcaagccaaaggtgtgttggtcctatgcacacaaagtaagcgatacaatgtgtctttttgacatattaatattcctaatattagcatttatatagggcttagaaacttcaatatcacaatccgtgtgtaaattgctgttttgccaagctttagccaccttgttttccatggagatttttctcaagagtacaacagtttttttggctaaaatttcctgcatatcgaattttgtaataatgacattttgtatgcatttgaagtaatatacttctcccttgttcttttacaattcagtgtatgtatcacacattatccatgatgtctgattttatcgtttttcttgaagcccgcggaagcggaaagttcccaatgctcccaaccatctcaatgttttgatggtaggttgattgaatggcttggccttgagaaattcggtctaaatgattcacagttgaatgcagtgtcagattgtgtatcattaatggatagcaactcttcatctataaagctattatggggtccccctgggacaggtaaaactaaaactatcagctctatattatgggccatgctcatcaagggcaggaggacacttgcctgtgcacctacgaatactgctgtgttagagattgcggctcggatcgtcagtctaactgtgaagtcttcggatggcaccgtcttcctgaatgacattgttctgtttggaaacaaaaagaagatgaagatagataatgactattatctttcaaaggtgtatcttaactttcgtgctgagcgcctgttgccatgcttcaagtcaaatacaggctggaggcattgtttatgcgtgctgatagatcttcttgtcaattctgtgaccaagtaccagttgaacaatgaggataaaacattcaaacaacatttgaaagatgattacaataaactttctcggaatttacatagttacataactatactatacaatgatcatccaagaaacctggaaacaggacagagctttcaatgtatgctggaggtccgtgagttgctcaaaattcttcacactttgataaatgctggtaatggtggtgatatatggagcgatgaactgctcagaagcactatagaagaggaggtcaaccctgagctttggccttcacagctagcctgcatacggaccaactcatgcaataaatccaagtttgtggctgcaagatctttgtgtctgcaagaattaatatatctttgtaagaacatggagctcccaaattgttacagtgcacaagatgttcgactatacctgctgtcaagaactagattgattatctgtacagtttgtagctcattcaagttgtacaatatacctatgagaaattcttctccaagtttacatcagctgctaaacaaacccaaaatattgattcctctggagttgctgataattgatgaggctgctcagctcaaagagtgtgaaaccttaattcctctgcagttgcctggcataaggcatgctgttctcatcggcgatgagtatcaattaccttcccttgtgaagagcaaaatatctgatagtgctaactttggacgaagtgtttttgagaggttgagttccctaggctatagtaagcaccttctcaatatccagtacaggatgcatccagacattagcaggtttccagttggtacattttatgatggcaagctatctgatggccccaatgtcagtcacaaggactataataagatgtttttagcaggaaaactgtttaggccatattcatttataaatattgatggcagccatgaaacaaatgaaatgcatggtcggagccttaaaaactcattagaagtcgatgcagttgtgatgatagtgcagagtttgttaaaagagacgctttctacacgaagcaagctttctattggtgttgtgtgtccatacaatgctcaagttagagctatacaggaaaaggttgggaagccctgcaggaagtatgattatttctcagtgaaagtaaaatctgtggatggtttccaaggcgcggaggaagatataattatcatatcaacagtcaggagtaatggagctggtacagttgggtttctatcaaacttacagaggactaacgtggctctaacaagggccaagcattgcttatggattgtggggaatggaaccactctgttcaacagcaattccgtttggcagaagatcgtcaaggacacaagagatagaggttgtttttttaatgccactgatgagaaagagttgctgaatgcaattttcaagcctgctgttgagtatcctcatgctgacaatttagctaaacatgagcaacacggacagaatatatccgacttatcagctactgacacaattcagcaacttgcatgtcagtttacccctggaagtgatctcccaccaaagttctctatcacactcaatgttggttatactacaagaaaattcagttcatcaagcaccctgcttaacagctctcctttgcaactcacagcaacagcggtaccaaacgcagaaccagcttctcatggctcttcagctactggagcagttgaattgcctgtaaccgaagatgggcgcttggttgatgggaaaatctcctttcagaatactgtgaggagcactttgatcagaatcgaccacgaccctagacttgcatttgactttctggcagtagcaactacacgggagcaagcagcacctcttacccgggagcagtttaagaagcatgacagaatggtcgaatctcctgctccagttaccgctgagggttcggaatgctgcatcagactcaatgaacaggagcaagtagcacctcctaccaagctgcaatcgaagaagcgtggtagaaatgttaaagatcctgctgcagctactacaggggctttgaaatgcagcatcggactcgatgaaatagctacccgccagcaagcagcacctcctactcctgagcaatctaagaagcgtggtagaaagagcgaacctcttcctcaagttatcacagagggtttgagacgcagcagccgacttagtgaaaaaggcaagcaccatcaagtagcgccgtctcaggagcaagccaagaagcatggtagaaagggagcgacactttctccagttaccacagaggccctgagacgcagcagcagactgaatgaaaagggcacgcatcagcagatagcgctttctatcccagagcaagctaagaagtgtggtagaaaggccaaaaggcttcctcgagtaaccatagagggtttgaaacgcagcaaaagaatgagtagaaacaacagcgaagaattggctgatgtggattgcaatccataaatggcaaggaagcgacgcctacctgccgagtgccgactacatcaaaggaggttacaacagaattgtataggttgggacatgtctgcagcaagcaacatgatcgacccttctcgcactacaggaaactggttaaagaacgtgggtgaaaaaccgtcaaacttaatgtaataggccgtcgaacttaccgtaagaacgtgggtttaccgacgaatatagccgacggcgatttttggacgaacttagagaagtaagttcgacggtacccacgttcttaaccttaagaacgtgggtaccgtcgaacttaacattaagaacgtgggtaccgtcgaacttaacattaagaacgtgcgtttttaagttcgacgggggccgtcgaattttttcccataagttcgacagcacccacgttcttaaggttaagttcgacggggtcacgtggccgtcgaacttatgtgtcctgcagaggtctgcgcggaatgcacaataagttcgacggtacccacgttcttaaccttaagaacgtgggtacccacgttcttaaccctttttcagaaaaaaaaaataaaaacacaaaaatgaaaaattagacacataatatcatatgcaacacaatatatcacatacaatacatatttcaaacacattgatatatgttcatatcacaaattcacacaagttcca

SEQ ID NO: 19619 - DNA, 978 bp, Zea Mays
ctccactagctagcttgcctcagctcttttctaatcggcggccgtggcgtctgagccctgagtcagctacacgccctcgtgcgctcctcccgccactcatcggcggaaagcgcgcacggccacgggcaccggaacctcaaaagcgagggtgtggtgatgccataactaggaccgcgcgcacatgctggcatgcatccatgtccaggatatgcaacgacgcaaggatcatcccacatccacatccacatccaagcatggccggcgttgtctttttggcgatagctagcttagcttggcttggcacagtcgatcgtctccgatggcggcggacatgcagattgtcctggccgcggggaggaagatcgaggcgcagtatgtggagatgaaggtgccgctctactcctacggctgcgagaagaagatcaagaaggcactgtcacatctcaaaggtatacattcggttcaggcagactaccacgagcagaaggtgaccgtgtgggggatctgcgaccgcgacgacgtgctcgctgccgtccggaagaagcgccgagccgcgcggttctgggatgatgatggcggcgaactgggtccacgcgagcgtgcgccgacgcccggccgagaagctcccaagcagtacctggcagccttcgccgcgtacaggtggaggaagtcgtggaagaagcttttcccgctgatccgcctctgaagctcaccgtgtgtgcttaagcttattggcttctagcttctccacaagtgagcagtgtgtgtgcctgcgtcttgacgacgtctcaggaaccggaaaaaggggttggaacatggaacttaagttctaacagtagcccgtgcttcttggtagcaaataaacatgcttcgttaccgaagccttttggtagggctttgccttgtctagggggcgtttggttgccttctccggtggtgcagctgcatctacacatgcaaaaagtagtgtttgtttgg

SEQ ID NO: 19620 - DNA, 4646 bp, Zea Mays
cagctcgctttacccctcccaacaagcgccaccaatcgctggagactggagagagagaagaaccagccacacaactctaattaccacgcactctctctctctctccgtcctatcgatcccggcctccctcccccagccccagcggatcggagcccccggctggcttcctaccctgccccctcttcctccgacgcgcgggcggaggagttcgatccgagcgcgagagggaaggagagagaaactaaagaaagagaggggcagagagcagacagataggagtggtagatatagataggctggggctggcctcatcgcggatagatccccctcctcctcctcctcactctccccagcgagcaagcaaccaagcagccagctagtcagtctccgccaagcagggaccgcgtcgcatcaaagccgctgcccgcaacagggacaaggcaggccagcgcgcgctcgaaaggggaggcgtcgttctacacgaagacgaggaggaggagccctgcagggcgtagctagctatggagttcgcgagctcttcgagtaggttttccagggaggaggacgaggaggaagagcaggaggaagaggaggaggaggaggaggcgtctccgcgcgagatccccttcatgacagcggcagcgacggccgacaccggagccgccgcctcctcgtcctcgccttccgcggcggcctcatcgggtcctgctgctgccccccgctcgagcgacggcgccggggcgtccgggagcggcggcggcgggagcgacgacgtgcaggtgatcgagaaggagcacatgttcgacaaggtggtgacgcccagcgacgtggggaagctcaaccggctggtgatcccgaagcagcacgcggagaagtacttcccgctggacgcggcggccaacgagaagggccagctgctcagcttcgaggaccgcgccggtaagctctggcgcttccgctactcctactggaacagcagccagagctacgtcatgaccaagggctggagccgcttcgtcaaggagaagcgcctcgacgccggcgacaccgtctccttctgccgcggcgccggcgacaccgcgcgggaccgcctcttcatcgactggaagcgccgcgccgactcccgcgacccgcaccgcatgccgcgcctcccgctccccatggcgcccgtcgcgtcgccctacggcccctggggcggcggcggcggcggcggcgcgggcggtttcttcatgccgcccgcgccgcccgccacactctacgagcaccaccgcttccgccaggccctcgacttccgcaacatcaacgccgcggccgcgccggccaggcagctcctcttcttcggctcagccggcatgcccccgcgcgcgtccatgccgcagcagcagcagccgcctccgcccccgcacccgcctctgcacagcattatgttggtgcaacccagccccgcgccgcccacggccagcgtgcccatgcttctcgactcggtaccgctcgtcaacagcccaacggcagcgtcgaagcgcgtccgcctgtttggggtcaacctcgacaacccgcaaccaggcacaagtgcggagtcaagccaagatgccaacgcattgtcgctgaggacaccgggatggcaaaggccggggccgttgaggttcttcgaatcgcctcaacgcggcgccgagtcatctgcagcctcctcgccgtcgtcatcgtcgtcctccaagagagaagcgcactcgtccttggatctcgatctgtgagcgagagatcgatcagctggcgaactcgatcgatcgggggagtaaaaaaggaaagttgaaaatttcctccttccgtctgctaccttcttcttcaccttttgagattccattataacttttgatcataggatctagagtagccttcttaacacttgttctccgatttttctttcggccattcaaattcttgtgctggcttgacaatatatatagagagaagttaggcgaattaattaatcaattattgttgctttcatatggcttgaaatctgactcggtttttgcttcgctactattgctttatcctttttttgctggtatgattggactccttaaggtaccatttcactcttatgtagtttggttgcacaattccgattgtcgtatgttcctactccctacatatgataacacaactccaaattcgcgctctccacaccatcactgctaagatctgaatccctagcaccatgaatgcggtgcaatatacatcgtgcctttcttgcatcatatgtgtgatctgttctcgtcctagattggagttgcaaccgcagtgttctcagaaagcatggcaagacaagaacattgacagtccatgtccatcagcagcactcaacttacagccggcaaagcctatggagctagctagaagcatttgcaggtcagttgtttaacttctgaatcgtctcatcttctttcatcggtactgctcaccatctctcttgtttatattatgagtcctggtgctggcactcttgttttcattttcgtgcttttgccggttgccacttttctgtactgttgctcactctttgtccatactacatatgtataccatggtgcatcatgccataatgtagtagatcgtatggtaggcagttagttgctacgcgcgcaccaccacacaagcaaactggaagacttctcttgtgcttttacgcaaggtcaactgaaaattaaccctaccgtgggctaaatcatgtcatgtgtagtacgtttgatttgtctgggccttgagtggtatagactccaatagttctttatggccctctggcagtctgtaaaggagagggtgagccagaggggaaggcattgctactggccttaacttctttgtacgtctgatggacgatttattggggaagagccgaagagggccagcctcagtactaacactactgtttctgtagtagtaggaacagtgctgcgtcgatatgcatctctctctcatggagatggagagccttggttgcgttctgtgttcttgtcctttgtgtgcgagagacagtgaggagagagactgtacattaccgtctctcctcttttttttttctctctctctcctttcactgcattgagtaggtacggcgtgtgtgctagctccttgctgggagcaatggaggcaaatgccacgtaccggctcagcaataggtatccttaactagtaaggtgtaggagggggatctttttgcactgctgaggctagaatagacatgtatagatgctgtgtctactgacaaaagtacctttggtacgttgtaagctggaaaaggcaatggggagttatgggggagggaaaaaaaaagagccaggagcagtgtctgcatgcatgtttttgcttgttatacgttctttctaccctttgcatatggttgttcaattcatctttcttttctgatcatacagccctgagtcggggtattatctcaagaacagcgtcttgtgacctcgatctcacaaagaatataggaagtcctccatataaactacatttgtggaaacaaaaaattgaaaatcatgtgtaatttagactcttacaggcgaaatatgtaaatgctaattaactaacatattctgtcgtttagcaaggaagatgcattgagatgaatagccaagttcgttaattgtccaagcataagttgcactccattgccattttttgtagaacacatgttggcgcataccataccttggttaatcacgctgtcactgtgatatgttagacctactatagccaatgaccattatctcaaataatgatgtgatgactgaatgatcaggctaattattgcataatgcgtatactagttccgtattgatttttctgcggttattatcctccttcatattcctagagagaaagggctgaattttggcgctcatataaagaacataaccacatctctgttatattactctttgtacgtacatgcaagatatgttacacatacaaaaaagatgaggtggatatcatgtatctgtatagcttgaaatgctgaggtatattgatatttattgcttttgacagtttcattgacatctccatcgctatggaaatcatttcatgcactacatttctgaagaaacttattagctaggtctaatggattaacaatgcgcatacagaagggctaaagattttaagtatatcatcacagtacttgtgtttattttgtattacactttatggtcttttttttgcgtattgttaccgtttacatgttggggaagcaattgttggaatgtactaccttcgttttaaataattgtcacccgctattatttttgaattaaacagcgacaaataaaaaagaacggagggagtaacaatctagcccgtggattgtcaaaacttatattggttacaatctgggaattcttaaagtcaacttgtagattttaacaaagctggaagctgcatatataatctgtgcaagctaaaaacatatatatgtgtggccttagtctgtgtcaacatcttatttgtaaagaaatcaaatcatactgttacatgcatgacctcaatagtctgtacctcaagagcttcaactgatcaggtactttatagaacataccatgtagttgcacaactaaatgatttaccatggcatccct

SEQ ID NO: 19621 - DNA, 2212 bp, Zea Mays
aacgaagcatgctatcagccagcactaaactacagctaacactgcagccccaagatcgatcgagcgtccacagccccaaggaacatagtataacatggccccagccatttccaagcctctccttaccgatctcgttgcacagatcgggaaggtcccatcgagccacatcaggcctgtcggagaccgcccggacctcgccaatgtcgacaacgagtccggcgccgggatcccgctcatcgacctcaagaagctcaacggcccggagcgccgtaaggtggtggaggccatcggcaaggcctgcgaatccgacggcttcttcatggtgacgaaccacggcatcccggcggcggtcgtggagggcatgctgcgcgtggcgcgggagttcttccacctgccggagtcggagcggctcaagtgctactccgacgaccccaacaaggcgatccggctgtccaccagcttcaacgtgcgcacggagaaggtcagcaactggcgcgacttcctgcgcctgcattgctaccccctccagagcttcgtcgaccagtggccgtcaaacccgccgtccttcaggtgaccgttccatcctccctcaatccgtctctcaatttgctttcgtctctctctctctctctctctctctgcgtctctctctgcggtgaagctgactttacggctctctgatttttctcgtctccggtcctccgatcgtaccaaatcaactcgaacggttgttttgtcaaactcagcttttttttcttttctttttttccttttcaaaaggaaggacttgtcaaaccgaaacttgaaacgacttacatgttcgacgttgaccattcctgaaaaagcatgaaaaaaaaagaaaaacgatcgaacgactgtcacacagaaagtcgaccatgctggtaactgttattccgtcgccgagaaatacagctcagctcgagtgctcgacgcatgcatgcagcagcaagcagcatcgcaaattgacaagtcgtacgcgtggtggctgctttgctttgacaggcaagtggtgggcacctacgcgacggaggccagggcgctggcgctgaggctgctggaggccatatcggagagcctgggcctggagcggagccacatggtggcggccatggggaggcacgcgcagcacatggcggtgaactactacccgccgtgcccgcagccggagctcacctacgggctgccgggccacaaggaccccaatgccatcacgctgctgctgcaggacggcgtctccggcctccaggtgcagcgtggcggccgctgggtggccgtcaaccccgtgcccaacgcgctggtcatcaacatcggagaccagatgcaggcactgagcaacgaccggtacaagagcgtgctccaccgcgtgatcgtcaacagcgagagcgagcggatctcggtgccgacgttctactgcccgtccccggacgcggtgatcgcgccggccgacgcgctggtggacgacggccaccctctggcctaccgccccttcacttaccaggagtactacgacgcgttctggaacatgggcctccagtcggccagctgcctcgaccggtttaggcccggaggatcgttggagtgagtgaactacgccggccacgacagggaaaaaaaaatgaagacctttttgtattcttgagcatctgccaataactggatctttgaaatcctcctctggactggagtcttggattcccttcgggtcccacctaacattacgttgggtccaccctgaagatgcagacaaggtttaggttgacaaattccgatgtaaggatgattttgtccaacttattactatttccttgtgctaattacaaagtacagatgtaagcttccacaaaacattgcttttgatagatgttgatccatccattacaaattctaagttaattagacttttctgagaataaaaagtatataacttttgttatgtacctaaatatggtctcttttcagatatgtatcaaacaccaattgtttagagaagtaatggaagtacaaacaatgtatgtcacgttattgaaaaaaagacaggagttgaaaatcaatttgagaggcagattaaacatctttaggtccgatcatggtggagagtatttctcaaacgaattcaactcatcctgtgaagaacaagagatcattcatgagaagacacctctctattcgccacaattcaattggattgcgg

SEQ ID NO: 19622 - DNA, 1567 bp, Zea Mays
atggttgcggcctcgccagagaagctccactgcggcgcggcggggtcaagtgacaaagaaaaggaggtggcggggagggatgatgccgaggttatgttgccgcagctctcggatgagccgctgcgggagaaggcgcagcgcatccaggtcatgctcaccggaggcatgtccgaacgcctccctgaccgcggcaagaagctgctcgccacactcgatgccatccaccgggagcaagaccgccgccaggcccaaggcgacggggcacgagcgccgctgggatctctgaccagtggaaactggaatgctgtaattgtacaatatagtgacggcttgggctttgtggccaagccggcgatgctgccggatggttctgtcaatctcatgctctggaactgcgtcgtccccggcaaggaaggcgtcatgctgtcaggcaagcagcacctggttgcagatgtaccaggacagtagttaatccctgtgctatagctagtagtattttattgaaccttacttgtggccagatgtaacatttgaaacgagctgatcgatttgtaactaaatgaatcagaagcatgattgaatcaactgaaaatctgaaagactgttgctgcggagcaggacgagccattattaaagactggttagaaaagttttcttagtattcttaagaatttgtacttttttataaaaactctgatggatgtacctgttaggtaatcatacaattaagttgttctgctttcttgcgctggccgcaaagcgcgggctggtgggttcctcccctggtctgattaagttgttctgctttatttgtaaatattctccatttttactggttctcagttcattattttttgtcaaccataccactttttctattggtggatagtcttcatcgcactgtgttacaaaaaaattgtggctctactcattctcctcatcccaaactgccttgtcatataaccaaaaccgtgtgattgattcatctttatgcagactgattgggaaggtggatatttcccggtcactctccatttcactgaaaattacccaagtaaccccccaacctgcaagttcccacgaaggtttttccatgtcaatgtctatgattctggggatgtatgcctgtcaatacttggtgatgcatgggcgccttctatcacagtgcggcaaattctaataggcatccaggagctgctggagaacccaaacccagcctctcccgcacaggattttgcttacgatgtttttgcagagaatatgccagaatacaagagacgcgtccgtgagcaagccaagaggtatccgtcgctcgtgtagccgtggacctctgcaacacaattgctgctaaccaagtagtcactcactttggtgtagtggaacttgttcatgacgtgcttaactatggtgtctagttagccgtacgcttgttggaactgctaaagtgcagcttattggaactgctaaaatgcccttgactacgtcttattattatggtttatcagtatagtgttgtcaacatccaaaatttgttttggccctgtagaatactcaaattggtaacccc

SEQ ID NO: 19623 - DNA, 2543 bp, Zea Mays
atggttgcggcctcgccagagaagctccactgcggcgcggcggggtcaagtgacaaagaaaaggaggtggcggggagggatgatgccgaggttatgttgccgcagctctcggatgagccgctgcgggagaaggcgcagcgcatccaggtcatgctcaccggaggcatgtccgaacgcctccctgaccgcggcaagaagctgctcgccacactcgatgccatccaccgggagcaagaccgccgccaggcccaaggcgacggggcacgagcgccgctgggatctctgaccagtggaaactggaatgctgtaattgtacaatatagtgacggcttgggctttgtggccaagccggcgatgctgccggatggttctgtcaatctcatgctctggaactgcgtcgtccccggcaaggaaggcgtaagcccacatctcactgtgtagtcctccccccatcttttcttcagttctgtgattctgtcgaatgtgtctggcttttgttccacctgaaaaacataaagtggtgagtctaaaaaagggtaactggagaagaatatatccaaacttttggttttgtcgtgctgagaagaatatatccaaacttttggttttgtcgtgctgagatgttagagcatctccaacagcgtgacctgtgatagtgtcctataattttaaaatgagtatattttataggatttagagcaccaacaaaatattctgtcccaacaggaaagcctcaaatctagattatagtacagaccactacggtgtacttaagagagtgccctataattttttgaccaaattttataaaatgagacattgttgaagtagtttttttctacgtagagctctatcttttaatttgaggcatcactttgagatgctcttagattgatcatcgttgtggaagcttaaaggccaaatagggggattaggctgtgacactagttgctaggggtctgcagttcttgatcctgagcacttgcttctggacttcgaaaacccttgcaacgatgcttcttcatctggtactttttgtactactaaaggttggcaaatgaatgcattgagcttattctttctagtgtacctatatttgggtttacagtgtttgttctgttgttcatgaagggtccagcaaaatttgcaggcgtgttgctttgtttggaaaccaaatgccttttcaattggttgccagtggcgcgttattctgatgacatgttaaatattcaaacgacttagtaatcattcacacttaacttcctaactggtttttttattattggtagaaaaagaacaattttagtctgttgtcccaaaacagaaacaagcagagcattataagattttcagaattcatgagtgggattctaagcagtgtccagcagcttgcgaatcagctcgcggatgcacattttgcgcgaccgcatcccactattcacacttccagcagatcgcaaatgccccaaaatgtgcagtcggccatgcggttgcgcgttctctcttttctgtgggagaggatgcacattcgcatccgcgagccgctggacacgggcgctttttccgttgcgcaaacgagggccgcgacgcgggagatgcgcttccgcatccgtccgccgttggacacaaacacaactatacttctgaaccttttgcttgaaacaaaaacaagggacatgttatattatggtaatcatacaattaagttgttctgctttcttgcgctggccgcaaagcgcgggctggtgggttcctcccctggtctgattaagttgttctgctttatttgtaaatattctccatttttactggttctcagttcattattttttgtcaaccataccactttttctattggtggatagtcttcatcgcactgtgttacaaaaaaattgtggctctactcattctcctcatcccaaactgccttgtcatataaccaaaaccgtgtgattgattcatctttatgcagactgattgggaaggtggatatttcccggtcactctccatttcactgaaaattacccaagtaaccccccaacctgcaagttcccacgaaggtttttccatgtcaatgtctatgattctggggatgtatgcctgtcaatacttggtgatgcatgggcgccttctatcacagtgcggcaaattctaataggcatccaggagctgctggagaacccaaacccagcctctcccgcacaggattttgcttacgatgtttttgcagagaatatgccagaatacaagagacgcgtccgtgagcaagccaagaggtatccgtcgctcgtgtagccgtggacctctgcaacacaattgctgctaaccaagtagtcactcactttggtgtagtggaacttgttcatgacgtgcttaactatggtgtctagttagccgtacgcttgttggaactgctaaagtgcagcttattggaactgctaaaatgcccttgactacgtcttattattatggtttatcagtatagtgttgtcaacatccaaaatttgttttggccctgtagaatactcaaattggtaacccc

SEQ ID NO: 19624 - DNA, 2637 bp, Zea Mays
cacggtcccacacacccgacgtcccgccctccgagcccacctcccaatgtcacctccctcgcatgtcgacccgacgcgtgaagtttggttgataacaccactaaacaatgatctatacatacacaagtgtcaccctgccagttgattaccttattaaataatgacctatgcctgcataagtattacccgttgcaacgcacggtcatatgcctaataaaaggcataaacctggcctcaccccaccgcgagccgaaccggagcgtcaagcaaacatccgtcgatcccgattccgaccactgcgctcgcgccatcgcgccatccacccggcattgtgcgcccgagccgggctcgttggatggcgtccggaggcgccgcccgcggtcgccttgctgaggagcgcaaggcgtggcgcaagagccatcccctcggctttgtggccaagccggcgatgctgccggatggttctgtcaatctcatgctctggaactgcgtcgtccccggcaaggaaggcgtaagcccacatctcactgtgtagtcctccccccatcttttcttcagttctgtgattctgtcgaatgtgtctggcttttgttccacctgaaaaacataaagtggtgagtctaaaaaagggtaactggagaagaatatatccaaacttttggttttgtcgtgctgagaagaatatatccaaacttttggttttgtcgtgctgagatgttagagcatctccaacagcgtgacctgtgatagtgtcctataattttaaaatgagtatattttataggatttagagcaccaacaaaatattctgtcccaacaggaaagcctcaaatctagattatagtacagaccactacggtgtacttaagagagtgccctataattttttgaccaaattttataaaatgagacattgttgaagtagtttttttctacgtagagctctatcttttaatttgaggcatcactttgagatgctcttagattgatcatcgttgtggaagcttaaaggccaaatagggggattaggctgtgacactagttgctaggggtctgcagttcttgatcctgagcacttgcttctggacttcgaaaacccttgcaacgatgcttcttcatctggtactttttgtactactaaaggttggcaaatgaatgcattgagcttattctttctagtgtacctatatttgggtttacagtgtttgttctgttgttcatgaagggtccagcaaaatttgcaggcgtgttgctttgtttggaaaccaaatgccttttcaattggttgccagtggcgcgttattctgatgacatgttaaatattcaaacgacttagtaatcattcacacttaacttcctaactggtttttttattattggtagaaaaagaacaattttagtctgttgtcccaaaacagaaacaagcagagcattataagattttcagaattcatgagtgggattctaagcagtgtccagcagcttgcgaatcagctcgcggatgcacattttgcgcgaccgcatcccactattcacacttccagcagatcgcaaatgccccaaaatgtgcagtcggccatgcggttgcgcgttctctcttttctgtgggagaggatgcacattcgcatccgcgagccgctggacacgggcgctttttccgttgcgcaaacgagggccgcgacgcgggagatgcgcttccgcatccgtccgccgttggacacaaacacaactatacttctgaaccttttgcttgaaacaaaaacaagggacatgttatattatggtaatcatacaattaagttgttctgctttcttgcgctggccgcaaagcgcgggctggtgggttcctcccctggtctgattaagttgttctgctttatttgtaaatattctccatttttactggttctcagttcattattttttgtcaaccataccactttttctattggtggatagtcttcatcgcactgtgttacaaaaaaattgtggctctactcattctcctcatcccaaactgccttgtcatataaccaaaaccgtgtgattgattcatctttatgcagactgattgggaaggtggatatttcccggtcactctccatttcactgaaaattacccaagtaaccccccaacctgcaagttcccacgaaggtttttccatgtcaatgtctatgattctggggatgtatgcctgtcaatacttggtgatgcatgggcgccttctatcacagtgcggcaaattctaataggcatccaggagctgctggagaacccaaacccagcctctcccgcacaggattttgcttacgatgtttttgcagagaatatgccagaatacaagagacgcgtccgtgagcaagccaagaggtatccgtcgctcgtgtagccgtggacctctgcaacacaattgctgctaaccaagtagtcactcactttggtgtagtggaacttgttcatgacgtgcttaactatggtgtctagttagccgtacgcttgttggaactgctaaagtgcagcttattggaactgctaaaatgcccttgactacgtcttattattatggtttatcagtatagtgttgtcaacatccaaaatttgttttggccctgtagaatactcaaattggtaacccc

SEQ ID NO: 19625 - DNA, 1283 bp, Zea Mays
cacggtcccacacacccgacgtcccgccctccgagcccacctcccaatgtcacctccctcgcatgtcgacccgacgcgtgaagtttggttgataacaccactaaacaatgatctatacatacacaagtgtcaccctgccagttgattaccttattaaataatgacctatgcctgcataagtattacccgttgcaacgcacggtcatatgcctaataaaaggcataaacctggcctcaccccaccgcgagccgaaccggagcgtcaagcaaacatccgtcgatcccgattccgaccactgcgctcgcgccatcgcgccatccacccggcattgtgcgcccgagccgggctcgttggatggcgtccggaggcgccgcccgcggtcgccttgctgaggagcgcaaggcgtggcgcaagagccatcccctcggctttgtggccaagccggcgatgctgccggatggttctgtcaatctcatgctctggaactgcgtcgtccccggcaaggaaggcgtcatgctgtcaggcaagcagcacctggttgcagatgtaccaggacagtagttaatccctgtgctatagctagtagtattttattgaaccttacttgtggccagatgtaacatttgaaacgagctgatcgatttgtaactaaatgaatcagaagcatgattgaatcaactgaaaatctgaaagactgttgctgcggagcaggacgagccattattaaagactgactgattgggaaggtggatatttcccggtcactctccatttcactgaaaattacccaagtaaccccccaacctgcaagttcccacgaaggtttttccatgtcaatgtctatgattctggggatgtatgcctgtcaatacttggtgattgcggcaaattctaataggcatccaggagctgctggagaacccaaacccagcctctcccgcacaggattttgcttacgatgtttttgcagagaatatgccagaatacaagagacgcgtccgtgagcaagccaagaggtatccgtcgctcgtgtagccgtggacctctgcaacacaattgctgctaaccaagtagtcactcactttggtgtagtggaacttgttcatgacgtgcttaactatggtgtctagttagccgtacgcttgttggaactgctaaagtgcagcttattggaactgctaaaatgcccttgactacgtcttattattatggtttatcagtatagtgttgtcaacatccaaaatttgttttggccctgtagaatactcaaattggtaacccc

SEQ ID NO: 19626 - DNA, 689 bp, Zea Mays
caccgtcatcctatccgcgtcttctttacttctaggctttgtggccaagccggcgatgctgccggatggttctgtcaatctcatgctctggaactgcgtcgtccccggcaaggaaggcactgattgggaaggtggatatttcccggtcactctccatttcactgaaaattacccaagtaaccccccaacctgcaagttcccacgaaggtttttccatgtcaatgtctatgattctggggatgtatgcctgtcaatacttggtgatgcatgggcgccttctatcacagtgcggcaaattctaataggcatccaggagctgctggagaacccaaacccagcctctcccgcacaggattttgcttacgatgtttttgcagagaatatgccagaatacaagagacgcgtccgtgagcaagccaagaggtatccgtcgctcgtgtagccgtggacctctgcaacacaattgctgctaaccaagtagtcactcactttggtgtagtggaacttgttcatgacgtgcttaactatggtgtctagttagccgtacgcttgttggaactgctaaagtgcagcttattggaactgctaaaatgcccttgactacgtcttattattatggtttatcagtatagtgttgtcaacatccaaaatttgttttggccctgtagaatactcaaattggtaacccc

SEQ ID NO: 19627 - DNA, 618 bp, Zea Mays
ctgaaagactgttgctgcggagcaggacgagccattattaaagactgactgattgggaaggtggatatttcccggtcactctccatttcactgaaaattacccaagtaaccccccaacctgcaagttcccacgaaggtttttccatgtcaatgtctatgattctggggatgtatgcctgtcaatacttggtgatgcatgggcgccttctatcacagtgcggcaaattctaataggcatccaggagctgctggagaacccaaacccagcctctcccgcacaggattttgcttacgatgtttttgcagagaatatgccagaatacaagagacgcgtccgtgagcaagccaagaggtatccgtcgctcgtgtagccgtggacctctgcaacacaattgctgctaaccaagtagtcactcactttggtgtagtggaacttgttcatgacgtgcttaactatggtgtctagttagccgtacgcttgttggaactgctaaagtgcagcttattggaactgctaaaatgcccttgactacgtcttattattatggtttatcagtatagtgttgtcaacatccaaaatttgttttggccctgtagaatactcaaattggtaacccc

SEQ ID NO: 19628 - DNA, 1596 bp, Zea Mays
ggaaaaaaaatatttgtttggtgagccacgctcccgtccggatccgcgggggaggacggcgatttcgtccccagcctcacgaggtcgggaaggggttcccgcacccacatttgtgaacctcgccgccgcccgtcccctgccttcacgaacccgtcgccgcccgtcccctactcttcctcgtgcacccaccgtcgctcgtcccctcgtcttccttgcgctctcgccgtcgccgcctcctcaccctcacgcacttgaggccagctgcggaacgaggtcggacggcggagacgaggtcgaggtctgtgacctcctcaacttgcgcaagactgccgagactgcagggacaagctctttgctgcctcgtcagctgcttctcgcttgtagtatgtgaatatcttatttgacaaagtaattctctgaacttttttactgcataaggcctgaattttgactaggacgtattttttttatttttagttggaccactttttatatttaggcctgaacaaagtatttatctggatcttatatggttagttcattcatttatttagtgttgctgtactgtccctacatgtttccttaatatgggattctacatactcagccatgtacacacttgtcatatttctcaaacatgttcttttgttttagggatactaacaaatgggttctataattgagttgataaggaaacatttgaagcaggtagttatatataagcactcaatttctacaacattttttacttgcttcaatctgctatttcagttttttttgctagtaaaatctgctatttagttacctctattatttaattgcttaaatctgctatttcaattttgtttctagtaaaatctgccgctatttgagttcagctatttatgtttacataagcaagtgcttcataaacatctaaatccacacctttgttccagttcagtaatgtcttctctttattacagatgtgctgatccaattcagttttcagggtatgttgacaatctgaatttagttcaagcaataccttctctttattacatatgtttaagcaggtgcttcataaacatatgaattcagttcatcaatgtcttctttttattactgaatattgaattgaatataaaggctttcatgtccccaaatacagagggtctccaaattggatattgaactgaatatagaggaattgaatatatatacatttgtctaagttttctcatcaacaggtgatacacaagggattttcatcaacaagtggccgccagaagaactgaaacatcaagatggcgtttgcttttaggtcatgccattcaggagtacactgagactgttttattatgagactatgttttattatgatgcactgagactatgtttgtgtacactgagactatgttttattatgatgcactgagactgttttattaagcagtgtggagttctcagctgctgttctcatttttaatgcaagtgtgttcaatgagcagtgttcaatgacaaacagtgttctcagctgctgctcatttttatgcaaacatttgtgtcatagttctcaggttgacaaacatttttatgcaagtgtgttcaatgagc

SEQ ID NO: 19629 - DNA, 1197 bp, Zea Mays
ggaaaaaaaatatttgtttggtgagccacgctcccgtccggatccgcgggggaggacggcgatttcgtccccagcctcacgaggtcgggaaggggttcccgcacccacatttgtgaacctcgccgccgcccgtcccctgccttcacgaacccgtcgccgcccgtcccctactcttcctcgtgcacccaccgtcgctcgtcccctcgtcttccttgcgctctcgccgtcgccgcctcctcaccctcacgcacttgaggccagctgcggaacgaggtcggacggcggagacgaggtcgaggtctgtgacctcctcaacttgcgcaagactgccgagactgcagggacaagctctttgctgcctcgtcagctgcttctcgtgagtactccttttttctttcattcttgccttcgcatccaccacccgcgccttgctgtagcttagtcgtacggcatagtttgctgtatgaacaccagaagaagaaggtcgtgaacagcaacacgtacaccttcacggccaccatcttccatatatgctggtttgagtggaaaggatgattaatttggacggttgctatgctagcttgggactgagagatgaatgtcgaatgcttgctactgatggaattaactagtttgatatttgtagcaaggccgaggagctagcaatgtaagtagggtagaacgttgagctacctgtgaagttctagtctgaatctcaagaacttcttttgcctttgtttgcaggcttgtagtatgtgaatatcttatttgacaaaggatactaacaaatgggttctataattgagttgataaggaaacatttgaagcaggtgatacacaagggattttcatcaacaagtggccgccagaagaactgaaacatcaagatggcgtttgcttttaggtcatgccattcaggagtacactgagactgttttattatgagactatgttttattatgatgcactgagactatgtttgtgtacactgagactatgttttattatgatgcactgagactgttttattaagcagtgtggagttctcagctgctgttctcatttttaatgcaagtgtgttcaatgagcagtgttcaatgacaaacagtgttctcagctgctgctcatttttatgcaaacatttgtgtcatagttctcaggttgacaaacatttttatgcaagtgtgttcaatgagc

SEQ ID NO: 19630 - DNA, 1470 bp, Zea Mays
ggaaaaaaaatatttgtttggtgagccacgctcccgtccggatccgcgggggaggacggcgatttcgtccccagcctcacgaggtcgggaaggggttcccgcacccacatttgtgaacctcgccgccgcccgtcccctgccttcacgaacccgtcgccgcccgtcccctactcttcctcgtgcacccaccgtcgctcgtcccctcgtcttccttgcgctctcgccgtcgccgcctcctcaccctcacgcacttgaggccagctgcggaacgaggtcggacggcggagacgaggtcgaggtctgtgacctcctcaacttgcgcaagactgccgagactgcagggacaagctctttgctgcctcgtcagctgcttctcgtgagtactccttttttctttcattcttgccttcgcatccaccacccgcgccttgctgtagcttagtcgtacggcatagtttgctgtatgaacaccagaagaagaaggtcgtgaacagcaacacgtacaccttcacggccaccatcttccatatatgctggtttgagtggaaaggatgattaatttggacggttgctatgctagcttgggactgagagatgaatgtcgaatgcttgctactgatggaattaactagtttgatatttgtagcaaggccgaggagctagcaatgtaagtagggtagaacgttgagctacctgtgaagttctagtctgaatctcaagaacttcttttgcctttgtttgcaggcttgtagtatgtgaatatcttatttgacaaagtaattctctgaacttttttactgcataaggcctgaattttgactaggacgtattttttttatttttagttggaccactttttatatttaggcctgaacaaagtatttatctggatcttatatggttagttcattcatttatttagtgttgctgtactgtccctacatgtttccttaatatgggattctacatactcagccatgtacacacttgtcatatttctcaaacatgttcttttgttttagggatactaacaaatgggttctataattgagttgataaggaaacatttgaagcagatgtgctgatccaattcagttttcagggtgatacacaagggattttcatcaacaagtggccgccagaagaactgaaacatcaagatggcgtttgcttttaggtcatgccattcaggagtacactgagactgttttattatgagactatgttttattatgatgcactgagactatgtttgtgtacactgagactatgttttattatgatgcactgagactgttttattaagcagtgtggagttctcagctgctgttctcatttttaatgcaagtgtgttcaatgagcagtgttcaatgacaaacagtgttctcagctgctgctcatttttatgcaaacatttgtgtcatagttctcaggttgacaaacatttttatgcaagtgtgttcaatgagc

SEQ ID NO: 19631 - DNA, 1061 bp, Zea Mays
ggaaaaaaaatatttgtttggtgagccacgctcccgtccggatccgcgggggaggacggcgatttcgtccccagcctcacgaggtcgggaaggggttcccgcacccacatttgtgaacctcgccgccgcccgtcccctgccttcacgaacccgtcgccgcccgtcccctactcttcctcgtgcacccaccgtcgctcgtcccctcgtcttccttgcgctctcgccgtcgccgcctcctcaccctcacgcacttgaggccagctgcggaacgaggtcggacggcggagacgaggtcgaggtctgtgacctcctcaacttgcgcaagactgccgagactgcagggacaagctctttgctgcctcgtcagctgcttctcggatactaacaaatgggttctataattgagttgataaggaaacatttgaagcagatgtgctgatccaattcagttttcagggtatgttgacaatctgaatttagttcaagcaataccttctctttattacatatgtttaagcaggtgcttcataaacatatgaattcagttcatcaatgtcttctttttattactgaatattgaattgaatataaaggctttcatgtccccaaatacagagggtctccaaattggatattgaactgaatatagaggaattgaatatatatacatttgtctaagttttctcatcaacaggtgatacacaagggattttcatcaacaagtggccgccagaagaactgaaacatcaagatggcgtttgcttttaggtcatgccattcaggagtacactgagactgttttattatgagactatgttttattatgatgcactgagactatgtttgtgtacactgagactatgttttattatgatgcactgagactgttttattaagcagtgtggagttctcagctgctgttctcatttttaatgcaagtgtgttcaatgagcagtgttcaatgacaaacagtgttctcagctgctgctcatttttatgcaaacatttgtgtcatagttctcaggttgacaaacatttttatgcaagtgtgttcaatgagc

SEQ ID NO: 19632 - DNA, 1727 bp, Zea Mays
ggaaaaaaaatatttgtttggtgagccacgctcccgtccggatccgcgggggaggacggcgatttcgtccccagcctcacgaggtcgggaaggggttcccgcacccacatttgtgaacctcgccgccgcccgtcccctgccttcacgaacccgtcgccgcccgtcccctactcttcctcgtgcacccaccgtcgctcgtcccctcgtcttccttgcgctctcgccgtcgccgcctcctcaccctcacgcacttgaggccagctgcggaacgaggtcggacggcggagacgaggtcgaggtctgtgacctcctcaacttgcgcaagactgccgagactgcagggacaagctctttgctgcctcgtcagctgcttctcgtgagtactccttttttctttcattcttgccttcgcatccaccacccgcgccttgctgtagcttagtcgtacggcatagtttgctgtatgaacaccagaagaagaaggtcgtgaacagcaacacgtacaccttcacggccaccatcttccatatatgctggtttgagtggaaaggatgattaatttggacggttgctatgctagcttgggactgagagatgaatgtcgaatgcttgctactgatggaattaactagtttgatatttgtagcaaggccgaggagctagcaatgtaagtagggtagaacgttgagctacctgtgaagttctagtctgaatctcaagaacttcttttgcctttgtttgcaggcttgtagtatgtgaatatcttatttgacaaagtaattctctgaacttttttactgcataaggcctgaattttgactaggacgtattttttttatttttagttggaccactttttatatttaggcctgaacaaagtatttatctggatcttatatggttagttcattcatttatttagtgttgctgtactgtccctacatgtttccttaatatgggattctacatactcagccatgtacacacttgtcatatttctcaaacatgttcttttgttttagggatactaacaaatgggttctataattgagttgataaggaaacatttgaagcaggtagttatatataagcactcaatttctacaacattttttacttgcttcaatctgctatttcagttttttttgctagtaaaatctgctatttagttacctctattatttaattgcttaaatctgctatttcaattttgtttctagtaaaatctgccgctatttgagttcagctatttatgtttacataagcaagtgcttcataaacatctaaatccacacctttgttccagttcagtaatgtcttctctttattacagatgtgctgatccaattcagttttcagggtgatacacaagggattttcatcaacaagtggccgccagaagaactgaaacatcaagatggcgtttgcttttaggtcatgccattcaggagtacactgagactgttttattatgagactatgttttattatgatgcactgagactatgtttgtgtacactgagactatgttttattatgatgcactgagactgttttattaagcagtgtggagttctcagctgctgttctcatttttaatgcaagtgtgttcaatgagcagtgttcaatgacaaacagtgttctcagctgctgctcatttttatgcaaacatttgtgtcatagttctcaggttgacaaacatttttatgcaagtgtgttcaatgagc

SEQ ID NO: 19633 - DNA, 1007 bp, Zea Mays
ggaaaaaaaatatttgtttggtgagccacgctcccgtccggatccgcgggggaggacggcgatttcgtccccagcctcacgaggtcgggaaggggttcccgcacccacatttgtgaacctcgccgccgcccgtcccctgccttcacgaacccgtcgccgcccgtcccctactcttcctcgtgcacccaccgtcgctcgtcccctcgtcttccttgcgctctcgccgtcgccgcctcctcaccctcacgcacttgaggccagctgcggaacgaggtcggacggcggagacgaggtcgaggtctgtgacctcctcaacttgcgcaagactgccgagactgcagggacaagctctttgctgcctcgtcagctgcttctcatgtgctgatccaattcagttttcagggtatgttgacaatctgaatttagttcaagcaataccttctctttattacatatgtttaagcaggtgcttcataaacatatgaattcagttcatcaatgtcttctttttattactgaatattgaattgaatataaaggctttcatgtccccaaatacagagggtctccaaattggatattgaactgaatatagaggaattgaatatatatacatttgtctaagttttctcatcaacaggtgatacacaagggattttcatcaacaagtggccgccagaagaactgaaacatcaagatggcgtttgcttttaggtcatgccattcaggagtacactgagactgttttattatgagactatgttttattatgatgcactgagactatgtttgtgtacactgagactatgttttattatgatgcactgagactgttttattaagcagtgtggagttctcagctgctgttctcatttttaatgcaagtgtgttcaatgagcagtgttcaatgacaaacagtgttctcagctgctgctcatttttatgcaaacatttgtgtcatagttctcaggttgacaaacatttttatgcaagtgtgttcaatgagc

SEQ ID NO: 19634 - DNA, 856 bp, Zea Mays
ggaaaaaaaatatttgtttggtgagccacgctcccgtccggatccgcgggggaggacggcgatttcgtccccagcctcacgaggtcgggaaggggttcccgcacccacatttgtgaacctcgccgccgcccgtcccctgccttcacgaacccgtcgccgcccgtcccctactcttcctcgtgcacccaccgtcgctcgtcccctcgtcttccttgcgctctcgccgtcgccgcctcctcaccctcacgcacttgaggccagctgcggaacgaggtcggacggcggagacgaggtcgaggtctgtgacctcctcaacttgcgcaagactgccgagactgcagggacaagctctttgctgcctcgtcagctgcttctcgcttgtagtatgtgaatatcttatttgacaaaggatactaacaaatgggttctataattgagttgataaggaaacatttgaagcagatgtgctgatccaattcagttttcagggtgatacacaagggattttcatcaacaagtggccgccagaagaactgaaacatcaagatggcgtttgcttttaggtcatgccattcaggagtacactgagactgttttattatgagactatgttttattatgatgcactgagactatgtttgtgtacactgagactatgttttattatgatgcactgagactgttttattaagcagtgtggagttctcagctgctgttctcatttttaatgcaagtgtgttcaatgagcagtgttcaatgacaaacagtgttctcagctgctgctcatttttatgcaaacatttgtgtcatagttctcaggttgacaaacatttttatgcaagtgtgttcaatgagc

SEQ ID NO: 19635 - DNA, 883 bp, Zea Mays
ggaaaaaaaatatttgtttggtgagccacgctcccgtccggatccgcgggggaggacggcgatttcgtccccagcctcacgaggtcgggaaggggttcccgcacccacatttgtgaacctcgccgccgcccgtcccctgccttcacgaacccgtcgccgcccgtcccctactcttcctcgtgcacccaccgtcgctcgtcccctcgtcttccttgcgctctcgccgtcgccgcctcctcaccctcacgcacttgaggccagctgcggaacgaggtcggacggcggagacgaggtcgaggtctgtgacctcctcaacttgcgcaagactgccgagactgcagggacaagctctttgctgcctcgtcagctgcttctcgcttgtagtatgtgaatatcttatttgacaaaggatactaacaaatgggttctataattgagttgataaggaaacatttgaagcagttcagtaatgtcttctctttattacagatgtgctgatccaattcagttttcagggtgatacacaagggattttcatcaacaagtggccgccagaagaactgaaacatcaagatggcgtttgcttttaggtcatgccattcaggagtacactgagactgttttattatgagactatgttttattatgatgcactgagactatgtttgtgtacactgagactatgttttattatgatgcactgagactgttttattaagcagtgtggagttctcagctgctgttctcatttttaatgcaagtgtgttcaatgagcagtgttcaatgacaaacagtgttctcagctgctgctcatttttatgcaaacatttgtgtcatagttctcaggttgacaaacatttttatgcaagtgtgttcaatgagc

SEQ ID NO: 19636 - DNA, 1330 bp, Zea Mays
cgctcggcgcccatcgaaaaaccctctcctctcccggacaggcggacagcggcaagctggccaccgcgtcaccgcctctacagccccaggctccactgctaaacgccggtaatggcccaggctccggcgcgcgccgcttccgccgtacgtctcttcgacgcgcactgccacctgcaagacccccgcatcgcggccgtcgcccctgcccttatacgagccgccggcgcatccggcgtcgcacgcttcgctgtcaacggcacctccgagaaggactggcacctggtgaagcagatggccgaggatcacccagccgtcgtcccctgcttcggcctgcacccttggtgggtacccgagaggtcgccggattggatgaatttgctccggcggttcttcgccgaaaccccggaggcggctgttggggagattggtctggacaaaggttcacatggaaaaaccatcaacttcggagaacaggttgaagtgttccagcgacagctcgaactagctaaggaattggagagacctgtttctgttcattgtgtgcgggcatttggtgatcttctggaagtattgaagtaagacatgctatttagagcatctccaacaatgcctcaatttggtacctcaaattgaaatatggagctctacgcagcaaactggacctttcccagcaggcgtgttgttacattcttatatgggatctgcagaaatggtgtctgcccttgcaaatttaggctgttacttttcactatctggcttcttgacaggcatgaaatccactaaagctaagcacatgctgaagtcgattcccctggataggattcttttagagacagatgcacctgatgcattaccaagattggacaatgtttctgtatcaccagtccatgttcacagttcagatgcagatactgaaaagcgtcacatggattcagagtcacaggctgctaatgcatcaaatgagtccttgaaccatccagaaaatatccatattgttttggagtatgtcgcatcactccttgaaatgacagagtcagaattggcggagttgagttacaagaatgctaccaagctgttttcttatcctggctccaaagttcaacatgaacctgaagacatctaaatcgggttcaacactaccttactcactgggtcctcccagacacaatgtttgagaaactgaaatggctgtacatcactgttaatattggtgaaataaaacagataccgaatcaaagtagtgcaactggtttccttaaaaaaaaagtctctgattttttgtttgacgagaagtacagcactagttagcaacaagacatccaaatcagtg

SEQ ID NO: 19637 - DNA, 1240 bp, Zea Mays
cgctcggcgcccatcgaaaaaccctctcctctcccggacaggcggacagcggcaagctggccaccgcgtcaccgcctctacagccccaggctccactgctaaacgccggtaatggcccaggctccggcgcgcgccgcttccgccgtacgtctcttcgacgcgcactgccacctgcaagacccccgcatcgcggccgtcgcccctgcccttatacgagccgccggcgcatccggcgtcgcacgcttcgctgtcaacggcacctccgagaaggactggcacctggtgaagcagatggccgaggatcacccagccgtcgtcccctgcttcggcctgcacccttggtgggtacccgagaggtcgccggattggatgaatttgctccggcggttcttcgccgaaaccccggaggcggctgttggggagattggtctggacaaaggttcacatggaaaaaccatcaacttcggagaacaggttgaagtgttccagcgacagctcgaactagctaaggaattggagagacctgtttctgttcattgtgtgcgggcatttggtgatcttctggaagtattgaagcaaactggacctttcccagcaggcgtgttgttacattcttatatgggatctgcagaaatggtgtctgcccttgcaaatttaggctgttacttttcactatctggcttcttgacaggcatgaaatccactaaagctaagcacatgctgaagtcggattcttttagagacagatgcacctgatgcattaccaagattggacaatgtttctgtatcaccagtccatgttcacagttcagatgcagatactgaaaagcgtcacatggattcagagtcacaggctgctaatgcatcaaatgagtccttgaaccatccagaaaatatccatattgttttggagtatgtcgcatcactccttgaaatgacagagtcagaattggcggagttgagttacaagaatgctaccaagctgttttcttatcctggctccaaagttcaacatgaacctgaagacatctaaatcgggttcaacactaccttactcactgggtcctcccagacacaatgtttgagaaactgaaatggctgtacatcactgttaatattggtgaaataaaacagataccgaatcaaagtagtgcaactggtttccttaaaaaaaaagtctctgattttttgtttgacgagaagtacagcactagttagcaacaagacatccaaatcagtg

SEQ ID NO: 19638 - DNA, 1327 bp, Zea Mays
cgctcggcgcccatcgaaaaaccctctcctctcccggacaggcggacagcggcaagctggccaccgcgtcaccgcctctacagccccaggctccactgctaaacgccggtaatggcccaggctccggcgcgcgccgcttccgccgtacgtctcttcgacgcgcactgccacctgcaagacccccgcatcgcggccgtcgcccctgcccttatacgagccgccggcgcatccggcgtcgcacgcttcgctgtcaacggcacctccgagaaggactggcacctggtgaagcagatggccgaggatcacccagccgtcgtcccctgcttcggcctgcacccttggtgggtacccgagaggtcgccggattggatgaatttgctccggcggttcttcgccgaaaccccggaggcggctgttggggagattggtctggacaaaggttcacatggaaaaaccatcaacttcggagaacaggttgaagtgttccagcgacagctcgaactagctaaggaattggagagacctgtttctgttcattgtgtgcgggcatttggtgatcttctggaagtattgaagcaaactggacctttcccagcaggcgtgttgttacattcttatatgggatctgcagaaatggtgtctgcccttgcaaatttaggctgttacttttcactatctggcttcttgacaggcatgaaatccactaaagctaagcacatgctgaagtcggattcttttagagacagatgcacctgatgcattaccaagattggacaatgtttctgtatcaccagtccatgttcacagttcagatgcagatactgaaaagcgtcacatggattcagagtcacaggctgctaatgcatcaaatgagtccttgaaccatccagaaaatatccatattgttttggagtatgtcgcatcactccttgaaatgacagagtcagaattggcggagttgagttacaagaatgctaccaagctgttttcttatcctggctccaaagttcaacatgaacctgaagacatctaaatcgggttcaacactaccttactcactgagttgacttgcatccctacaggctacggtctacagggatgggctggttctggttgtaacgaaacagagcgagaggagggacatagggcctgtttgttcagcttttttgtgaccagcttttccaagaatctagctgtagggagaatctggctgtgtagagaatctgagtatcattaggattacgtgcggaggaagataaagttgtccatgaggctcagatgtataaagcgacggattactactattgcgatgattcaactgattata

SEQ ID NO: 19639 - DNA, 1509 bp, Zea Mays
cgctcggcgcccatcgaaaaaccctctcctctcccggacaggcggacagcggcaagctggccaccgcgtcaccgcctctacagccccaggctccactgctaaacgccggtaatggcccaggctccggcgcgcgccgcttccgccgtacgtctcttcgacgcgcactgccacctgcaagacccccgcatcgcggccgtcgcccctgcccttatacgagccgccggcgcatccggcgtcgcacgcttcgctgtcaacggcacctccgagaaggactggcacctggtgaagcagatggccgaggatcacccagccgtcgtcccctgcttcggcctgcacccttggtgggtacccgagaggtcgccggattggatgaatttgctccggcggttcttcgccgaaaccccggaggcggctgttggggagattggtctggacaaaggttcacatggaaaaaccatcaacttcggagaacaggttgaagtgttccagcgacagctcgaactagctaaggaattggagagacctgtttctgttcattgtgtgcgggcatttggtgatcttctggaagtattgaagcaaactggacctttcccagcaggcgtgttgttacattcttatatgggatctgcagaaatggtgtctgcccttgcaaatttaggctgttacttttcactatctggcttcttgacaggcatgaaatccactaaagctaagcacatgctgaagtcgttcagatgcagatactgaaaagcgtcacatggattcagagtcacaggctgctaatgcatcaaatgagtccttgaaccatccagaaaatatccatattgttttggagtatgtcgcatcactccttgaaatgacagagtcagaattggcggagttgagttacaagaatgctaccaagctgttttcttatcctggctccaaagttcaacatgaacctgaagacatctaaatcgggttcaacactaccttactcactggtagtcattgttgcctgcatgagcaagggagtcttcgttctccaaagatgaagagagcaggcggcggcactgctgcagatgaagggaaaaatgaacggcagcgccgtaacgttaacgaggagagatgagtagtggagtgcacgggacactgggacagagtcttctgccttttgcagtgcaaacttggaactcgagtgacacctccggagttgcatatattcacatgcgcatgcttttttgtgaatgtgtgcatacgttgcctgcagaggctgatgtactcgtgtactacactttcacatggtcactggcctgactgcttcagcaaaggagacaaaagcatcacaacggttcggacttcagatgcagctgggtaccgaggaccacgcctagcagtctcaggcatctatacaagttgggaacaccagcgtacatagttgttgtacaagccgatactgttacaaaatatcagcaaggtgcaaggttataatatcaaggggtcactaacgctcgaggtacgcagcgcgca

SEQ ID NO: 19640 - DNA, 1601 bp, Zea Mays
cgctcggcgcccatcgaaaaaccctctcctctcccggacaggcggacagcggcaagctggccaccgcgtcaccgcctctacagccccaggctccactgctaaacgccggtaatggcccaggctccggcgcgcgccgcttccgccgtacgtctcttcgacgcgcactgccacctgcaagacccccgcatcgcggccgtcgcccctgcccttatacgagccgccggcgcatccggcgtcgcacgcttcgctgtcaacggcacctccgagaaggactggcacctggtgaagcagatggccgaggatcacccagccgtcgtcccctgcttcggcctgcacccttggtgggtacccgagaggtcgccggattggatgaatttgctccggcggttcttcgccgaaaccccggaggcggctgttggggagattggtctggacaaaggttcacatggaaaaaccatcaacttcggagaacaggttgaagtgttccagcgacagctcgaactagctaaggaattggagagacctgtttctgttcattgtgtgcgggcatttggtgatcttctggaagtattgaagcaaactggacctttcccagcaggcgtgttgttacattcttatatgggatctgcagaaatggtgtctgcccttgcaaatttaggctgttacttttcactatctggcttcttgacaggcatgaaatccactaaagctaagcacatgctgaagtcgattcccctggataggattcttttagagacagatgcacctgatgcattaccaagattggacaatgtttctgtatcaccagtccatgttcacagttcagatgcagatactgaaaagcgtcacatggattcagagtcacaggctgctaatgcatcaaatgagtccttgaaccatccagaaaatatccatattgttttggagtatgtcgcatcactccttgaaatgacagagtcagaattggcggagttgagttacaagaatgctaccaagctgttttcttatcctggctccaaagttcaacatgaacctgaagacatctaaatcgggttcaacactaccttactcactggtagtcattgttgcctgcatgagcaagggagtcttcgttctccaaagatgaagagagcaggcggcggcactgctgcagatgaagggaaaaatgaacggcagcgccgtaacgttaacgaggagagatgagtagtggagtgcacgggacactgggacagagtcttctgccttttgcagtgcaaacttggaactcgagtgacacctccggagttgcatatattcacatgcgcatgcttttttgtgaatgtgtgcatacgttgcctgcagaggctgatgtactcgtgtactacactttcacatggtcactggcctgactgcttcagcaaaggagacaaaagcatcacaacggttcggacttcagatgcagctgggtaccgaggaccacgcctagcagtctcaggcatctatacaagttgggaacaccagcgtacatagttgttgtacaagccgatactgttacaaaatatcagcaaggtgcaaggttataatatcaaggggtcactaacgctcgaggtacgcagcgcgca

SEQ ID NO: 19641 - DNA, 555 bp, Zea Mays
ggcagggaaaaaataacaatatgtcatcccaaaaggctaatacaatgaaagaaagagccagtgaaatgatacttgtccaaataaatacttatataaatatgtgatggtttgtgtaaccctctaggtaatatcaccattacaacaaaaggtcaataacttcaagtattgcttaaaagaatgccagccataaatcttgacccttaggagctgaaattagcagcaatagattacattattttctgtgccagataatcatgacaggtcaagactaattcatctgcgaaagcattttcttgctgatcaatccaatgtattttcatgatatgtggatatacacaagctatcccaatgcagaaaagaacttccatataggatcttttagcacaggtatgtgaattatgacaaagcatgaagggaagaaaacgagggaatatatatacaagttgacatgccttacattacttgatataactcaagaaaatggaggaagtcaaatgaaaaggcactgtggaacttacaaaatacccgttagatatcctatgatgtgcattcgag

SEQ ID NO: 19642 - DNA, 5284 bp, Zea Mays
ataaaaatggaagaagaatttttgtggaacggtgaacctctgcacattcagagaagaattaagtgagtttctgagagaaaattctgatgcttaaaataaactgctcaacagaaaattgatacataaccagttaactgccgctgttgatagtagatagtatcagtctttgttttcatgggacccatttggcatgcggtttgagtattgtcaaattatagtaactaaacctcgaaactgatatagctagttaacaggctaataaccatgttttaggaaacctaggtctcaagaaactttcaaaactaaattacattaggtcaaaattttacttacatttttgtatccttagatcaatcatgtggcccattagggataggctgagtgatgtagccctaggctgttagcctatatattgtaccatatttcctaattaatgaattatccaactattctcatcaagcatggtatcagatagccacctaagagcaactacaagaaaccacgtaaatcaacccgaaaaaatgttctagggagaaaatcaaactgttttcgctgcaacagatcctgtatcttcccccaaaaaaatttcgcatatttgcgggaggcagatctccctgaatcatccctagcgtatgatgtccatgtttgccgcgcaggaggtggagacggaggcggcatacacgaactcggtggcgtcggaggcagcgagttcggcgatgagcaacagggggcagggccacagcagggtgcagacgagagcggtgacaaggacaggcgtgcgagagtgggattctcttgcttctctgccttctagtttcccgaggtcaagttgcatgtgtactcacgggtcacggtaaaggagctatgtgccaattaatttaagttgcatgtgtactctactaccggtacaagatgaatcaattgttgatttgtgataagtttaaactattggggaattgatgattaggaactgctgcgtggagacaaggatttggagaaaattttgtttagggctagtttgggaaccccattttcccaattgatttctatttttccaagggaaattagtttattttcccttgggaaatgaaaatcccttgggaaaatggagttcccaaactagttcttagtgaaggccccaatacatagtttttgggaacaaaattttagtagccttttggagttgctctaacccctcactcccttggccaccggcgctagccctcccatggccggcattccccgccccctcatcttctctccctaactatcgccgccaaccctcccatggaggggtgatgtctcctcccctggggagacctcaccccccccccccaatctcatctcatcatggacgttcgtgggctgacgtcgttgacatcatctgtgttcgctggcgtcgcaaatccgccatcgcccgatacctcacagtcgtcatcccaccgccagtcggggcaggaacatcgcacctgggcacaggcgtgtcgagtgcctggtcccctggatttggcctagacatgaacccgtcatcactgttgtcggcaccatctcgatccctccccacctctccaatgccatccctactcccctcccctccgggtttggcactataggcctcccccatgaggtggttgcagcccactccatacttgtcgcggccctcacagtcactgttgcccgggagcgggagcgggagcggacaactgctctcgtctaggagcaagagcgtgccgccgtcgacgcactcgctcaccacctcgaaggtcgtactaccacagatcctccctcgggataccagtagatggagaccccttcgatgtatgagactgctgccatcgtcaacctctatgctcaggcgaccagtgtttagaacatccggtccctgggtctcgtcctccacgacctagtctctatgcttacgcccgctggtgcgtccttctcaccctatagtgttatgctcttgatgaccatgccctcaccgacaacgtgtgcccaattgtcccatcctgacgccagatggacaatgtcgtcctctcttggatcctcaacacagtcatcgtcaaactataggatgtcgtctgcgagagtggtgacactgctccaggcctgcgttgctattgaggagcagttccacggtaatcatgaggctcgcgccctccgccttgacgtcgtcttttgaaccttcgtctagggtgacatctctgtcagtgaatattgtcgctagatgaaggcatgaaaaactatctttgtgacctcggtgaacctgtttccgaccacaagctcgtcctcaaccttttacggggcctcaatgagtgttatgatcacatgtggacctagatcacgcgatctgtctcgttcccctccttccacaagatctgcaatgatctcatcctcaaggaggtcaccaaggggggcttaggttagctccgacaccaccacgaccatctatacctccaactctaggaggcacctacatgcacgactacttccactctagcttttggggggattcgtcctcacgctcgcctactccactgatgttgggagaaccacgccttcctaccagctctggctccaaaggcggcagtggtcgtcgccgacggagggctagtcgcggtggtgatggcaggaagggtgacactccttggctatcactctccaactgtgagtgcaatcaagccctaatgagggttttggtgtggatgaccacgaattagagaactaatgagatttatcaagaatacaagcagggaatcgcaaagggcggatgttacaagttggaggtccccccaatcactaatgatggttttactgattcaacaagtctaaaattattttgtgttatgttttgtagtttagtaaaagtcgtactataaagggggactcaaggacagttagtcaactgttgaaccagatgctcaaaattcactattgacattcttacacccagccaaatcatccaccaaaatttcatctactatctcctggtttggctagggcgacagtgccacccttaatatacccgttggaattcggagtataaatatccatttgttcgaccacaacaaccactgcttattttttctagcatttgactgttgcagaatagaaaactgctcagctctctctcctccattgtttcatctcaagctcctaagcaaatctttgattcccaacttgagagaaaaagcagcaaccttcgattggagagtggatctacatatttcccatcttaaagagcatttggttcacgtttggccggcggttttagggtttgttactcttggagcttgctcctagccggctaagtgttgcccatgcgctagtattgtggcaaccttgggaggtttgtaacactcgaatcgtagctaagaaatcacccatctcttcaagagtttggtcgcttgatttgagaacgaggaaaagggcaagccttggtggtaagcctaagccttttgtggcttcctcaacaacatggacttagccacttaagcaagcctttgtgccaagccaaaccacaggataaatcggtggcttgcatgcttcatttacattcttgcatattcatattgttaatttagggtttgtggtcgatctacttgctcactagtgatatacggatatacctgatttcgctctcgatatgttatctatatacctgcagaaaggctagaaatttacctggttcaatttttttgttaccttttgaattcagtttgattttccccatgcaggtcggtagtgcatccctctgttctgatagaattttgagttgaacttttacaggcctattaacctcccctctaggcctccatcctagtccaggagatcctacaccaacctatggatcgaccgcatctgcatgtgggccgggcctaccacgggtggtccatcgttgcgcctgccacaactggctctcttcttgatgcccacctttggtggctctgcccacaattggctctcttcatgatgtatgtcgtcaaccaacatattcatcaaaggcctgccctccacggtgtttttgaaatttcgatccgatatcaatatttgtcgttgctagagttttggctgcagggtgtgttagactgtattgtgtctataggccttagagcccaacccatgtggcctattagagggataggctggtgcatgtagccctaggctattagcctatatattgtaccccatttcataattaatggattacccaattattctctcctctagcaatttccaaaccaacatttcagcaaagtaacatatcagctcaacattctatcagattttctctagaatcctgcaagaaagaagttaccagtgaccaggaacatatgtacaggtttatggcaccacctctaaccaacagtgtgtgagattaagtgattactgactactccaaaacttcctcccctcttcaagcaacatggcaaccattcgacagctatgtaaagttcataaaaaccttatttgtagatacagcaaaatatcctttggtctctccgttatatgtcacttttgctttgccctaatttcaatgtccccaagtttgatcaagtttatagaaaaatacatgaacatatataacatcagattaaattcattaaatttattatgaaatatatcttggtaaagcattcattttaatatcctagatgtaggataaagctagagtaaactataatttggaaccgagggagtaggatttcaatctaatccgcaatttagcttggacaagagaatagcacagttgacataagcaccgtttaggccttctaatttactagagcaattcataaccaacagaaaatcagtatgaacatacggcgccaagcaaagactctacacgccttatgttgccaaattaattcataaccaacagaaaatcagtatgaacatatgggggcaagcaacaacttgttgcaagccagcaccaatcttactgccttggacgaggacgaggacgaaggcctgactgtcttcccgcgggatgaaaaggcgcagagcaggccatggatgaaacggccgccggcggccctggggatcggcagcgcggcagcggcgatggggagggtggccgcgacccaggcgaggcacagaaggtactggaggccgggcccgcttcccgtatccatttgaatgttgccacgcagagcaatggcaaggattagtgcgcgcgaggtggcgacgcggcgcggcggaggcagggaaccggcacggccgtcgggcgttctggttggtggttggagtgaaaggaggcaagccgatgtggaggaagagatgtcaa

SEQ ID NO: 19643 - DNA, 1233 bp, Zea Mays
caatcgtcaaccctgcttctcgagaacaggagtctcccgcgatgggattgaggtcggcgccgcggttggcactgcgtcgtcccggcgcggtctccgggcacaggagtaggactggcagagggaagtttccagtagcatccacaagtctagatgactatcttccaatgcgaagcactgaagtgaaaaatcggacattaactggtgatatcacaagtctcagactaatcactgcagtgaaaacaccttatttgccagatggaagattcgatcttgaagcatatgattctttgataaacatgcagatagagggtggttctgaaggcgtaattgttggtggaacaacaggagagggtcacctaatgagctgggatgaacacattatgcttattgggcataccgttaactgctttggcactagaattaaagtgataggcaacacaggaagtaattctaccagagaggctgttcacgcaacagagcagggatttgctgttggcatgcatgcagctctccacatcaacccctactatgggaaggagtggccaggatattcctcctcaagttatcgagacactctcaggttatccaaacatggcaggagtgaaagaatgtgtcggacatgagagggtcaagtgctacaccgacaaaggtataacagtatggagcggtaatgatgatgagtgccatgattctaggtggaaatatggcgccactggagttatttctgtagcaagcaaccttgttcctggcctcatgcgtagtctcatgtatgaaggggagaatgcgttgctaaatgagaagctgttgcctctgacgaaatggttgttctgtctgccgaatcccatcgcactcaacactgctctggctcagcttggggtggcaaggcctgttttcaggttgccgtatgttcctcttcctcttgagaagaggattgagtttgtccggatagttgaagctattggacggggaaactttgtaggacagcaagaggcacgtgttctcgacgatgatgattttgttttgatcagtaggtattagtaagcgagcttgtttactttggtgaataaaatataatagcatcatgttatgaggatttttcagtcttttgtaaagaaataaaacagctaatcctgattttgcttacagtttcctgtagatctaggtggccatttcatatgcggaactgccctatatcattagggaataaagtaagagatgtatagcatcacttat

SEQ ID NO: 19644 - DNA, 1096 bp, Zea Mays
cgtcaaccctgcttctcgagaacaggagtctcccgcgatgggattgaggtcggcgccgcggttggcactgcgtcgtcccggcgcggtctccgggcacaggacattaactggtgatatcacaagtctcagactaatcactgcagtgaaaacaccttatttgccagatggaagattcgatcttgaagcatatgattctttgataaacatgcagatagagggtggttctgaaggcgtaattgttggtggaacaacaggagagggtcacctaatgagctgggatgaacacattatgcttattgggcataccgttaactgctttggcactagaattaaagtgataggcaacacaggaagtaattctaccagagaggctgttcacgcaacagagcagggatttgctgttggcatgcatgcagctctccacatcaacccctactatgggaaggtatcaactgaaggattgatctctcattttgaggctgttctgccgatgggtccaaccatcatttacaatgtgccatccaggagtggccaggatattcctcctcaagttatcgagacactctcaggttatccaaacatggcaggagtgaaagaatgtgtcggacatgagagggtcaagtgctacaccgacaaaggggagaatgcgttgctaaatgagaagctgttgcctctgacgaaatggttgttctgtctgccgaatcccatcgcactcaacactgctctggctcagcttggggtggcaaggcctgttttcaggttgccgtatgttcctcttcctcttgagaagaggattgagtttgtccggatagttgaagctattggacggggaaactttgtaggacagcaagaggcacgtgttctcgacgatgatgattttgttttgatcagtaggtattagtaagcgagcttgtttactttggtgaataaaatataatagcatcatgttatgaggatttttcagtcttttgtaaagaaataaaacagctaatcctgattttgcttacagtttcctgtagatctaggtggccatttcatatgcggaactgccctatatcattagggaataaagtaagagatgtatagcatcacttat

SEQ ID NO: 19645 - DNA, 960 bp, Zea Mays
cgctcattgtcagattcaggaccaaggtcagtgttgcttccctgctaacccggcggcgcacgtgtggtcaaggtcccacgagcactcggaggctgggacagctcatttgaaactacctagttgaagtgatatactacgatttgtgattcagaagaagacataccacgattcagaagaagacaacacatttccttccggcccattttgcaacctgcatgtattgagggagcttcattagctcatgttcgggatggtcaaactccaaccttgctgacatctatagcttcctcaagacctgcatgtgcccttaattggagagcctttgtgcagaatagcgagcatctttgacagatacatgaaagcccctagcacccattttgaggagatggacatccacaggcgctgccatttattagttgatgagatttattaacccgggacaacaaccattcactccactccaattcctacaaaggaaggtccagaactagcatcccagaatgatcgaaggattcccgtaggccctaaccatgccactaagagtgacagtcccggtattaccattcaagggtgcatgccactgagatgattctccaacaattcctccagcaaccaacaccatgtcagcatactgctatcacctaaaatcggacagctccgatagacaaaagcatgcagctagagcgtgagaaagaccataccactcgggagccaagctcttcctccagcaacgccagaaacattttctcgtaacaatataacactcattttaatataacacacatttgtacataaattatcgtaaattatcatgatattttgaacacacataatttatcgtggtattatatgttcttatgttattgtggtattatatgtttccattgtaatgtacaaaacattttctcataacagtataacatacatttcagcataatacacatttgtacataatttaac

SEQ ID NO: 19646 - DNA, 828 bp, Zea Mays
ctatgttgttgctggagtgcaaaccagcagaagaagacataccacgattcagaagaagacaacacatttccttccggcccattttgcaacctgcatgtattgagggagcttcattagctcatgttcgggatggtcaaactccaaccttgctgacatctatagcttcctcaagacctgcatgtgcccttaattggagagcctttgtgcagaatagcgagcatctttgacagatacatgaaagcccctagcacccattttgaggagatggacatccacaggcgctgccatttattagttgatgagatttattaacccgggacaacaaccattcactccactccaattcctacaaaggaaggtccagaactagcatcccagaatgatcgaaggattcccccatgccactaagagtgacagtcccggtattaccattcaagggtgcatgccactgagatgattctccaacaattcctccagcaaccaacaccatgtcagcatactgctatcacctaaaatcggacagctccgatagacaaaagcatgcagctagagcgtgagaaagaccataccactcgggagccaagctcttcctccagcaacgccagaaacattttctcgtaacaatataacactcattttaatataacacacatttgtacataaattatcgtaaattatcatgatattttgaacacacataatttatcgtggtattatatgttcttatgttattgtggtattatatgtttccattgtaatgtacaaaacattttctcataacagtataacatacatttcagcataatacacatttgtacataatttaac

SEQ ID NO: 19647 - DNA, 4183 bp, Zea Mays
agcccattcgtgacgctaaaaaggcctagcccacccggctatcagccgcgtattcgcatctccccgtatcgctcgttcctctccggcaggactcgtgtttcagccaccggcggcggcggcaccctccacacctccggttatcatcaatctctgcgccgactaaggcactggcagcctgcggcttgcgtggcggcacctccagcatcccagggttgatgcaaatccagcatcatccttcaagatcgccccccactttgtccggtctttagatccgccattgagtcaagctgcggcgatcgcgtgcgagactgggacggcgatgctcctctgcatctccacctgccctgtcgaccgctagccgccgcctgtttcctccaattgctaagggcttaaaaagtcgaacacccaattgccaagggcttctgccccccagcggtgaaggggagtgagaagcaccgggaagatgacgagcgtgtacatcccggtgcaggggacagaggaggaggtgcaggtggcgctggaccagcttccgcacgacgcatccgatatcctcgacatcctcaaagccgaacaggcccctcttcacctctggctcatcatcgccagagaatacttcaagcaaggaaagatagagcagttccgtcagattctggaggaaggatctggccctgaaattgacgagtattatgctgatgtgaagtatgaacggatagcaatccttactgctttgggtgctttccatactttcttgggaaaggttgatagagcaccacagaaggaatcacattttaaagatgcaactcaatactataatagggcatcaaggatagatgaaactgaaccttctacatggattggaagaggtcaactctgtattgccaagggtgagttgcaaatggcgtctgactcgttcaagattgtgttggatgaagatgagaacaattttccagctctacttggtcaggcctctgtttactttttgatgggcgaagcagagcagcaacacaaaaaatcattggagcattacaggaactcattagatctctacaagaaagctcttcgggtctattgcaattgtcctgctgctgtaaggcttggtatagccttttgccgatacaaacttggacaagtggaaaaagctcgtcaagcttttcagcgagttttagagttggaccctcagaatgttgatgctctagtagcactggcaatcatggacttgcaaacaaatgaagctggtgggattcggcggggaatggagaaaatgaaaaaagcatttgaaatctatccttattatacattggcactcaaccaccttgcgaatcattatttctttaccggccaacattttgttgttgaacaattgactgagacggctctttcttcaagcaaccatggactactgaaatcacatgcttactacaacttagccagatcataccacagtaagggggacattgagactgctggacgatattacatggcatctgttaatgaaatcagtaaaccacaagactttgtgttaccatatattggacttggtcaaattcagttaaaatttggagacttcaaaagttcattaggtagctttgagaaagttttggaggtgcaccctgaaaattgtgaaagtttgaaggctattggtcacatacatgcaaaatctggggaaactgaaaaagctatagaaaccttcaagaaagttacccgtattgacccaaaagatcatcaggcatttgtggagcttggtgaattgttggtagaatctgactgggctgctgctatggaatacttgaagacagctcgaaatctcctcaagaaggctggggaggctgtccctgttgagttgctcaatggaattggacttcttcattttgagaagggagagtttgagatggcagaacagagttttaaggaagcactaggtgatggtctttgggtttcaattatggacgggaaagtaggcagttctatgatcaactggagtgtccagaacaaggatcagagcttctttcaccaacttgaaggtgtacctcttgaattacattcaaataaagtaaccacactgtttaattatgcaagattactggaagaactccatgattctgtcagagcaagcatcttttaccgttttataattttcaagcaatgaaaagtacctcctgtgacttttccgttgtgctctaaatcagttttgtcaataacagtaccctgactacatagatgcctatctgaggttagcggctattgcaaaacaaagaaacaatgttcaactgagcattgaactgataggtgatgctttaaagatagacgagaagaacccaaatgcactgtctatgcttgggagtcttgaactccagagcgatgaagcctggcttaccgcaaaggagcatttccgtaatgcaaaagaggccaccaagggagatacctactctttgcttcaattggggaactggaattactttgctgccaatcgtcctgagaaaaaagccccgaagattgaggctactcatagggagaaagccatggaactctatcagactcaagtactaaagcagcaccgcagtaatatgtttgctgcaaatggtattggaatcttatacgctgagaaggccaaatgggatgtcgctaaggagttgttcacacaggtgcatgaagctgcatcaggaagtatatttgtacacatgcctgatgtatggataaatctggctcatacatattttgctcaaggtcattttcaacaagcagttaaattgtatcaaaattgtttgcggaagttcttccacaatacagatgcaaccatcctattataccttgctcggacacactatgaggctgagcgatggcaagactgcaggaaaactttgcttagagctatacatttggctccatcaaattacttgttacggtttaatgtaggagtgtcaatgcagaaattctcagcttcaaccctgcaaaagacaaaacaaacagttgatgaggttcgcgccacagtcactgaacttcagaatgccattagagttttcagtctgttatctgttgcatcaacgtaccactcccatggttttgatgagaggaaaatagaaactcatgttgagtactgtaaacatttacttgatgctgctaaggttcatcgtgatgcagctgagcaagctgaacagcagaataagcaaaaaatggaagttgctcgtcagattgctttggcagaggaagctcgccgaagggcagaagagcagagaaaatttcagttagaaaggaggagggaagaggatgaactcaagcaagtaaaacaacaggaggaacacttccagcgtgtgaaggaacaatggaaaacatccagcaacacccctggcaagagaaaagatagatctaagactgaagatgaagaggtgggaaataaaaagcggaggaggaagggaattaggaggaaggatcaaaaaacaaagatgcagtatggggaagaggaagatgagtacaaagatgaaccagaagcagatgatgactatgcagacctggcgaggtataatggcgctgacaattcagagagagccccagatcaccttcttgcggctgctggccttgacgattctgatgccgaagatgacatgggtcatcctcaatctgcaatagaacggaagagacgagcttggtcagaatctgaagacgatgagccagtgaagaagccagcagcacaacctagcccgggcgctgatggtttgagtgaatgaaagaaaccgagatgatgttcttgcagtgaagattaacatgcatgggtctttgctttaggttagcatggtgttgaattggggagattcagaacttcactatacatagctgatagtcaaggactatgtatataccttgttgccaatcttgtttatcgcattagattatggagttgtttaatctgctggtttctgcaatataacatggaatccagtcctattagatggtgacttgtaggtgttttagttgggatgcaaagttttgcacgtcaagtttcagcagttagatttcccaatggacgtatcatgaattaatgatatcacattggccgatatatgtagagaaatgttgaacatgctagtcatctcagcaagaggacataaaactaagccaaaacaacaaacttaagagaaatgttgaacgggctagttatctcagcaagaggacataaaactaagcaaaa

SEQ ID NO: 19648 - DNA, 4110 bp, Zea Mays
agcccattcgtgacgctaaaaaggcctagcccacccggctatcagccgcgtattcgcatctccccgtatcgctcgttcctctccggcaggactcgtgtttcagccaccggcggcggcggcaccctccacacctccggttatcatcaatctctgcgccgactaaggcactggcagcctgcggcttgcgtggcggcacctccagcatcccagggttgatgcaaatccagcatcatccttcaagatcgccccccactttgtccggtctttagatccgccattgagtcaagctgcggcgatcgcgtgcgagactgggacggcgatgctcctctgcatctccacctgccctgtcgaccgctagccgccgcctgtttcctccaattgctaagggcttaaaaagtcgaacacccaattgccaagggcttctgccccccagcggtgaaggggagtgagaagcaccgggaagatgacgagcgtgtacatcccggtgcaggggacagaggaggaggtgcaggtggcgctggaccagcttccgcacgacgcatccgatatcctcgacatcctcaaagccgaacaggcccctcttcacctctggctcatcatcgccagagaatacttcaagcaaggaaagatagagcagttccgtcagattctggaggaaggatctggccctgaaattgacgagtattatgctgatgtgaagtatgaacggatagcaatccttactgctttgggtgctttccatactttcttgggaaaggttgatagagcaccacagaaggaatcacattttaaagatgcaactcaatactataatagggcatcaaggatagatgaaactgaaccttctacatggattggaagaggtcaactctgtattgccaagggtgagttgcaaatggcgtctgactcgttcaagattgtgttggatgaagatgagaacaattttccagctctacttggtcaggcctctgtttactttttgatgggcgaagcagagcagcaacacaaaaaatcattggagcattacaggaactcattagatctctacaagaaagctcttcgggtctattgcaattgtcctgctgctgtaaggcttggtatagccttttgccgatacaaacttggacaagtggaaaaagctcgtcaagcttttcagcgagttttagagttggaccctcagaatgttgatgctctagtagcactggcaatcatggacttgcaaacaaatgaagctggtgggattcggcggggaatggagaaaatgaaaaaagcatttgaaatctatccttattatacattggcactcaaccaccttgcgaatcattatttctttaccggccaacattttgttgttgaacaattgactgagacggctctttcttcaagcaaccatggactactgaaatcacatgcttactacaacttagccagatcataccacagtaagggggacattgagactgctggacgatattacatggcatctgttaatgaaatcagtaaaccacaagactttgtgttaccatatattggacttggtcaaattcagttaaaatttggagacttcaaaagttcattaggtagctttgagaaagttttggaggtgcaccctgaaaattgtgaaagtttgaaggctattggtcacatacatgcaaaatctggggaaactgaaaaagctatagaaaccttcaagaaagttacccgtattgacccaaaagatcatcaggcatttgtggagcttggtgaattgttggtagaatctgactgggctgctgctatggaatacttgaagacagctcgaaatctcctcaagaaggctggggaggctgtccctgttgagttgctcaatggaattggacttcttcattttgagaagggagagtttgagagttttaaggaagcactaggtgatggtctttgggtttcaattatggacgggaaagtaggcagttctatgatcaactggagtgtccagaacaaggatcagagcttctttcaccaacttgaaggtgtacctcttgaattacattcaaataaagtaaccacactgtttaattatgcaagattactggaagaactccatgattctgtcagagcaagcatcttttaccgttttataattttcaagtaccctgactacatagatgcctatctgaggttagcggctattgcaaaacaaagaaacaatgttcaactgagcattgaactgataggtgatgctttaaagatagacgagaagaacccaaatgcactgtctatgcttgggagtcttgaactccagagcgatgaagcctggcttaccgcaaaggagcatttccgtaatgcaaaagaggccaccaagggagatacctactctttgcttcaattggggaactggaattactttgctgccaatcgtcctgagaaaaaagccccgaagattgaggctactcatagggagaaagccatggaactctatcagactcaagtactaaagcagcaccgcagtaatatgtttgctgcaaatggtattggaatcttatacgctgagaaggccaaatgggatgtcgctaaggagttgttcacacaggtgcatgaagctgcatcaggaagtatatttgtacacatgcctgatgtatggataaatctggctcatacatattttgctcaaggtcattttcaacaagcagttaaattgtatcaaaattgtttgcggaagttcttccacaatacagatgcaaccatcctattataccttgctcggacacactatgaggctgagcgatggcaagactgcaggaaaactttgcttagagctatacatttggctccatcaaattacttgttacggtttaatgtaggagtgtcaatgcagaaattctcagcttcaaccctgcaaaagacaaaacaaacagttgatgaggttcgcgccacagtcactgaacttcagaatgccattagagttttcagtctgttatctgttgcatcaacgtaccactcccatggttttgatgagaggaaaatagaaactcatgttgagtactgtaaacatttacttgatgctgctaaggttcatcgtgatgcagctgagcaagctgaacagcagaataagcaaaaaatggaagttgctcgtcagattgctttggcagaggaagctcgccgaagggcagaagagcagagaaaatttcagttagaaaggaggagggaagaggatgaactcaagcaagtaaaacaacaggaggaacacttccagcgtgtgaaggaacaatggaaaacatccagcaacacccctggcaagagaaaagatagatctaagactgaagatgaagaggtgggaaataaaaagcggaggaggaagggaattaggaggaaggatcaaaaaacaaagatgcagtatggggaagaggaagatgagtacaaagatgaaccagaagcagatgatgactatgcagacctggcgaggtataatggcgctgacaattcagagagagccccagatcaccttcttgcggctgctggccttgacgattctgatgccgaagatgacatgggtcatcctcaatctgcaatagaacggaagagacgagcttggtcagaatctgaagacgatgagccagtgaagaagccagcagcacaacctagcccgggcgctgatggtttgagtgaatgaaagaaaccgagatgatgttcttgcagtgaagattaacatgcatgggtctttgctttaggttagcatggtgttgaattggggagattcagaacttcactatacatagctgatagtcaaggactatgtatataccttgttgccaatcttgtttatcgcattagattatggagttgtttaatctgctggtttctgcaatataacatggaatccagtcctattagatggtgacttgtaggtgttttagttgggatgcaaagttttgcacgtcaagtttcagcagttagatttcccaatggacgtatcatgaattaatgatatcacattggccgatatatgtagagaaatgttgaacatgctagtcatctcagcaagaggacataaaactaagccaaaacaacaaacttaagagaaatgttgaacgggctagttatctcagcaagaggacataaaactaagcaaaa

SEQ ID NO: 19649 - DNA, 3305 bp, Zea Mays
attttgtctactatcttccttcgagcatgtatgccctgctgcttaggtcaactctgtattgccaagggtgagttgcaaatggcgtctgactcgttcaagattgtgttggatgaagatgagaacaattttccagctctacttggtcaggcctctgtttactttttgatgggcgaagcagagcagcaacacaaaaaatcattggagcattacaggaactcattagatctctacaagaaagctcttcgggtctattgcaattgtcctgctgctgtaaggcttggtatagccttttgccgatacaaacttggacaagtggaaaaagctcgtcaagcttttcagcgagttttagagttggaccctcagaatgttgatgctctagtagcactggcaatcatggacttgcaaacaaatgaagctggtgggattcggcggggaatggagaaaatgaaaaaagcatttgaaatctatccttattatacattggcactcaaccaccttgcgaatcattatttctttaccggccaacattttgttgttgaacaattgactgagacggctctttcttcaagcaaccatggactactgaaatcacatgcttactacaacttagccagatcataccacagtaagggggacattgagactgctggacgatattacatggcatctgttaatgaaatcagtaaaccacaagactttgtgttaccatatattggacttggtcaaattcagttaaaatttggagacttcaaaagttcattaggtagctttgagaaagttttggaggtgcaccctgaaaattgtgaaagtttgaaggctattggtcacatacatgcaaaatctggggaaactgaaaaagctatagaaaccttcaagaaagttacccgtattgacccaaaagatcatcaggcatttgtggagcttggtgaattgttggtagaatctgactgggctgctgctatggaatacttgaagacagctcgaaatctcctcaagaaggctggggaggctgtccctgttgagttgctcaatggaattggacttcttcattttgagaagggagagtttgagatggcagaacagagttttaaggaagcactaggtgatggtctttgggtttcaattatggacgggaaagtaggcagttctatgatcaactggagtgtccagaacaaggatcagagcttctttcaccaacttgaaggtgtacctcttgaattacattcaaataaagtaaccacactgtttaattatgcaagattactggaagaactccatgattctgtcagagcaagcatcttttaccgttttataattttcaagtaccctgactacatagatgcctatctgaggttagcggctattgcaaaacaaagaaacaatgttcaactgagcattgaactgataggtgatgctttaaagatagacgagaagaacccaaatgcactgtctatgcttgggagtcttgaactccagagcgatgaagcctggcttaccgcaaaggagcatttccgtaatgcaaaagaggccaccaagggagatacctactctttgcttcaattggggaactggaattactttgctgccaatcgtcctgagaaaaaagccccgaagattgaggctactcatagggagaaagccatggaactctatcagactcaagtactaaagcagcaccgcagtaatatgtttgctgcaaatggtattggaatcttatacgctgagaaggccaaatgggatgtcgctaaggagttgttcacacaggtgcatgaagctgcatcaggaagtatatttgtacacatgcctgatgtatggataaatctggctcatacatattttgctcaaggtcattttcaacaagcagttaaattgtatcaaaattgtttgcggaagttcttccacaatacagatgcaaccatcctattataccttgctcggacacactatgaggctgagcgatggcaagactgcaggaaaactttgcttagagctatacatttggctccatcaaattacttgttacggtttaatgtaggagtgtcaatgcagaaattctcagcttcaaccctgcaaaagacaaaacaaacagttgatgaggttcgcgccacagtcactgaacttcagaatgccattagagttttcagtctgttatctgttgcatcaacgtaccactcccatggttttgatgagaggaaaatagaaactcatgttgagtactgtaaacatttacttgatgctgctaaggttcatcgtgatgcagctgagcaagctgaacagcagaataagcaaaaaatggaagttgctcgtcagattgctttggcagaggaagctcgccgaagggcagaagagcagagaaaatttcagttagaaaggaggagggaagaggatgaactcaagcaagtaaaacaacaggaggaacacttccagcgtgtgaaggaacaatggaaaacatccagcaacacccctggcaagagaaaagatagatctaagactgaagatgaagaggtgggaaataaaaagcggaggaggaagggaattaggaggaaggatcaaaaaacaaagatgcagtatggggaagaggaagatgagtacaaagatgaaccagaagcagatgatgactatgcagacctggcgaggtataatggcgctgacaattcagagagagccccagatcaccttcttgcggctgctggccttgacgattctgatgccgaagatgacatgggtcatcctcaatctgcaatagaacggaagagacgagcttggtcagaatctgaagacgatgagccagtgaagaagccagcagcacaacctagcccgggcgctgatggtttgagtgaatgaaagaaaccgagatgatgttcttgcagtgaagattaacatgcatgggtctttgctttaggttagcatggtgttgaattggggagattcagaacttcactatacatagctgatagtcaaggactatgtatataccttgttgccaatcttgtttatcgcattagattatggagttgtttaatctgctggtttctgcaatataacatggaatccagtcctattagatggtgacttgtaggtgttttagttgggatgcaaagttttgcacgtcaagtttcagcagttagatttcccaatggacgtatcatgaattaatgatatcacattggccgatatatgtagagaaatgttgaacatgctagtcatctcagcaagaggacataaaactaagccaaaacaacaaacttaagagaaatgttgaacgggctagttatctcagcaagaggacataaaactaagcaaaa

SEQ ID NO: 19650 - DNA, 788 bp, Zea Mays
ggggtaatgaggaagggaattaggaggaaggatcaaaaaacaaagatgcagtatggggaagaggaagatgagtacaaagatgaaccagaagcagatgatgactatgcagacctggcgaggtataatggcgctgacaattcagagagagccccagatcaccttcttgcggctgctggccttgacgattctgatgccgaagatgacatgggtcatcctcaatctgcaatagaacggaagagacgagcttggtcagaatctgaagacgatgagccagtgaagaagccagcagcacaacctagcccgggcgctgatggtttgagtgaatgaaagaaaccgagatgatgttcttgcagtgaagattaacatgcatgggtctttgctttaggttagcatggtgttgaattggggagattcagaacttcactatacatagctgatagtcaaggactatgtatataccttgttgccaatcttgtttatcgcattagattatggagttgtttaatctgctggtttctgcaatataacatggaatccagtcctattagatggtgacttgtaggtgttttagttgggatgcaaagttttgcacgtcaagtttcagcagttagatttcccaatggacgtatcatgaattaatgatatcacattggccgatatatgtagagaaatgttgaacatgctagtcatctcagcaagaggacataaaactaagccaaaacaacaaacttaagagaaatgttgaacgggctagttatctcagcaagaggacataaaactaagcaaaa

SEQ ID NO: 19651 - DNA, 2465 bp, Zea Mays
cgcacttctctacctcctccgtctccccccgtgtgtcaaatcgaacgcacatgcggcgcgactccctttcacggcctccccgcgtctcagcctacacgtccgagccgccagccgtgcgctttaagtgagcgcacccacgaaaagcagccaggcagcggagccggagagaagaagcagcagtagcagcagggccgtcaacaccatggcggtgggcgcgaccgccacgaagctcctcccgtcggcggccgcggccgcgcgccgcccatcgatgctccacctcgcggccgtcgccgtcctctgctcgctgtcctacctcctcggcatctggcaccacggcggcttctccgcggggcccgccgccggcgactcctcctcctcggtctctatcgccaccgccgtctcctgcgccacccccgccccgacgaccgcctcctcgtctccccccgcgggaccgctcgacttcgccgcgcaccacacggcggagggggtggaggcggagggcgcgctccgccatcgcaactacgaagcatgccccgccaagtactccgagtacacgccctgcgaggacgtggagcgttccttgcggttcccccgcgaccgcctcgtctaccgggagcgccactgccccgcggccggcgagcgcctccggtgcctcgtcccggcgcccaagggctaccgcaacccgttcccgtggccggccagccgcgacgtcgcctggttcgccaacgtgccgcacaaggagctcagcgtcgagaaggcggtgcagaattggatccgcgtcgacggcgacaagttccgcttccccgggggcggcaccatgttccctcgcggcgccggcgcctacatcgacgacatcggcaagcttatccccctccacgacggatccatccggaccgctcttgacaccggctgcggggtggcgagctggggagcctacttgctgtcacgcaacatccttgccatgtccttcgccccgcgagactcccacgaggcgcaggttcagtttgcactagagcgtggtgtgccggcgatgattggggtccttgcctccaatcaactcacttatccggcacgttcctttgacatggcgcattgctctcgttgcctcatcccatggcagctttacgacgggctgtacttgatagaggttgatcgtatcctgcgtcctggaggttattggattttgtctggaccaccaataaactggaagaaacactggaaggggtgggacaggactaaagaagacctggacgcagagcagaaagccatcgaggcagttgccaggagcctatgttggaagaagatcaaggaggagggcgacattgctatctggcagaaaccaactaaccacattcattgcaaggccatccacaaagttatcaagtcaccgcccttctgttctaacaaaaacccagatgctgcctggtacgacaagatggaggcttgcataactccactaccagaggtcagtgacttaaaggaggttgctggcggctcgttgaagaaatggccggagcggctcactgcagtgccgcccaggattgccagtggcagcatcgagggggtcacggaagagatgtttgtggaagatactgagttatggaagaagagagttgggcactacaagtccgtgattgctcaactcggccagaaaggccggtaccgcaacttactggatatgaatgcaaagtttggcggattcgctgcggcattggtgaatgaccccttgtgggtcatgaacatggtccctactgtggggaactcaacaacccttggggtaatatacgagcgtggcctcattgggagctaccaggactggtgtgagggcatgtccacttatccccggacctacgacctcattcatgcagatacagtgttcacactgtacaatggcagatgtgaggcggagaacattctgctcgaaatggacagaattctgaggccagagggcacggtcatcatcagagatgacgtggacctcttagtgaagataaagagcatggcggacgggatgagatggaatagccagatcgtggatcacgaagatggtccgctcgtccgtgagaagctcctccttgttgtgaagacatactggactctcgatggcagcgaacaatagcaataacgtcaaataaaagagttggaatgattatatggcatgatcggcagatgtgactgcctacccatttgccctgtgaatctggtggagtttgttttctgtttttttggggggtattcattttaggagatagttaacataatggagagataatctccttgttaagatatcaaagagcagcccagcacagattttgacataaaaacaacaaattgtgcgaagtgggtaaatagaaagtacagtactgggatcagttctgtctccgggtgcacattgttttgttgtacttatgatgttctgtgatcccttttatatgaatgtcataaaaatctaaactaggacttgt

SEQ ID NO: 19652 - DNA, 4546 bp, Zea Mays
cttcacaccattcttacacggagccgagggagggagtgcgctccggtgaaatgttggaggccgcctaatcaggccctcgtaggccaaattgacgcgtgcctcggaacgatctgggccgcactcagctcagccgaagcagatctccagaacaacaaacccgcgaaattccattttccaattatcgcaggcccgcttctcaccaattcaccaaccgtccactccctcgccctcgccggtgcatctcgtcggcgtcgtgctctaccaccaccagtgcacggcacccctatgttcgtctccttctgctcccccatccttcgttctgcgcttggaacgttggatgtgggttccaccaaatcacgcgggagggcaaataaaccctagttaggccctcccgggatggaggcggccgcctccagcctctcgacgctgctttccaccttgcgcgtgaacgggccctggacgccgccgggaacctgggagtcagtcatacctgagagcggtgctgctcgcgtctctcaccttggaggacgccctcgcctgcagccgatctacgagctcgcatcggttactgatgatgctttgattcatctggccttgcatgcgctgtatggtgtcaaaacatcgttagatgagattgaggagctttcagcactgtcttcctcaaatccggctgacaggacctctaaccgtgtcccaaatgtgtggttacgttcctcgagcaccacatccatggggagtattctcaaatctttccgctcgacaggtcttgcggtcttcttcctttgcaagtttgtgcacttttatcttttccaaagtcgagaaatgaactgtgcaagtagagaagttcacgaacatgaagattctggagataaagacactaagcagcatcagccttacactctagtaaaccaagcatttgcagcagcagttaataaggtcctcgaaggctatttctgttcattgaatactttactagcatcaattaggcttaggcgttcagtgggccaatctggtatagcttccaagatttcaaatggaatgagttgtgatcccacttcagaggtcactcttctggaagtttatctacacaccgaggagttaagaaggcatgttaaatcccttggaaatatttgtttccctaagtttgcaggtcttacattgtgccaggagggtttgaatactgatgcaaatgtggagtttgagaatttcccacggggcaccgatttgctttcctatttgtatgtccatattcgtgatgctgatccagttcactatggtcttttgaagtatcttttcattcgttcctgtgagccatactttaacttcattaagtcatggatttaccgagcttctgttgatgacccttatgaggaatttctcattacacaaactgaaaataagggtgctcaaggaatctcttcagacataacagatgatttcatcctcttccccttaaagggaagaaaccatgtatctgctccatgttttctaaaggagatatgtcatcctcttttgcgtactgggcagcagcttcaagtgctcatgaaccttctaaagtattgcaatctggctgctactgaaggagatgtttatccctctcgtaatatcattcatatggagggggttctcccgtggtttgatacaccaattgagtcttcaatgaattcatttacattttcaaaaagtgctatagaggcattaacatgcaaaagggatgctatgtacaagttgatgatggagaagctccaacattttttctctaatgttgaggtgattgcttttgatactgcatcaaatttcctacataaaaggaccgaccttgtagatgcatctgtttcagatgctgagttattctatggggacagcgacgctgtactaccttgcaatatggctgcagatgaaaaagatgattcttcttcgaattcccaagaatcttcagataaagaagatcccttggaatcttcagaatgttcttcttatacttctatggatgacacagaagttgagagttctacagcatgtgaaaacttgtctagttccatgttctcattatactgtacaagcacaggtgaagcaaaaggctccttggtaaccagtaagctgctttcttcccaatccagttcagttgaccatggaataaattgtgcaatccctattgagtgtgagaaagatgacaggttgagttgcaaacatgtccttgtgcacccacagaatactaagcatactgcggtgcctgatggttcagaactggattatcagtatagccagttttcaccatttgacaggtttatgaagagagccagttgctcatttgaaagcatgaattcagttggggagtttttgtattctgatcataaaaggtcagtaggtaatgcagtttatccattacattctgaatcagggagtactaaactatcaaacagtaaaaactatgaaaagtttgttactataaatcagccatggaataccagtattccttacaatctcagtttgaaccccatactgaaaaatgcagcttgttaccatacagagagtgacatgcaacagaaaagcaagaaccaatcacttgccagttttgattttgagtcagtcatggatccatgtgaagtatattgtgcaaggagcccatcccttcttgttgagtctgtaaatggagcagcaacagctggacagcccagtactcagccttatgaacagcctgattgttctaccaagcttcttcaagctcagacaagaagtcagtcatcccttacttcctcaggagaaatgtcaacaggagatagtcttcagaaaaatgcttctggtggggcattctgggagatatcattactatataatgataaatcaaaagaaaaaccagctatggactttagttcacaatttgatatgccccttgatatagttatcgataagtgcattattcaagaaattttgcttcagtataaatatgttagcagcttcacgatgaagttgcttgaggagggttttgatctttgtgcacatctactggctctgcggcggtaccatttcatggaaatagctgactgggcagactcctttattgcttcaatttatcagaagaaatggtcatttgttaaatctgagcagaaaagatcggagatccaaggacttatggacttggcattgcagagatcttcatgcgattctgatccttataaggaaagattatttatatacatgagggagtcacctgtggattctgttgatgcctctccatgtggtcttgatttgctggatgatatcttgttgggttataaagctgaatggccaatgaatattgtcattacagtagatgcactgaaaatatatgctgaaatattctgttatcttcttcaagtcaggtttgcagtgttttccctgactgaagtttggagatttttaaaggagttgacacagttcatcggtcgttccagccatagcagatctgatgtgttgaagaaattgaattttgtaatgaaattgaggcataaactttatcactttctatcaacactacagcagtatctccactgccatttatctgatatatcgtggcgccgttttcaacattcccttaaaaatcaggtgagggatatactggatctggagtatgtgcatatatgttatattactgatgcacttgacatatgtttcttatctgatgagtcaaaacaagttgctacgataatcaagagcatgctgcagctggctttggagttacgatcatgctttcagagtggtgacacttgtgatttatcagtaaatcaactcagtaatttgcaataccttataaacttctctcaggtggatgtaattagaacaaagttcgaggataacatcaaagatctctatattttgcattcgaaatcttcaaaatatacggagcttggcctttcccgtttctgggggtatctgaactacaatgagtatcattctacgaaagtcagcaaagatatggacaacttctatttttgataggacattgcaagactgaagtaaggtttgcctttatatttgggcaatagctcactggccaccgggactagcttaccttttgaggtacacactgctgagtggtgagagttcttgtagatatacgctggtttgatcaaattggcccttgtattggtttttggcgaacttaagagaactattgttcagacatgccatatacttggagatgcatgtatgtcctaatggtgtatcccagttttacgatcaaaatgggaaatcatgtgtagttctggaaaggtgggaactttgtatagccaatgttgatattgattgttgacacgttacaattggtaaatggaaggtgaatgattgctctctggcctcatttattcttatatgcttgtactccactatcctcaaatataatgagctttcagttgctctaagtcacaaaccatcctaaaaaaactgtagaaaagaacggtaatatccacgatatcaattgagtatcattagatgcattacgaaatttacagtcataatttatctatttgatgtggtaggtggtaatatttttcaaacttggttagac

SEQ ID NO: 19653 - DNA, 4310 bp, Zea Mays
ccaattatcgcaggcccgcttctcaccaattcaccaaccgtccactccctcgccctcgccggtgcatctcgtcggcgtcgtgctctaccaccaccagtgcacggcacccctatgttcgtctccttctgctcccccatccttcgttctgcgcttggaacgttggatgtgggttccaccaaatcacgcgggagggcaaataaaccctagttaggccctcccgggatggaggcggccgcctccagcctctcgacgctgctttccaccttgcgcgtgaacgggccctggacgccgccgggaacctgggagtcagtcatacctgagagcggtgctgctcgcgtctctcaccttggaggacgccctcgcctgcagccgatctacgagctcgcatcggttactgatgatgctttgattcatctggccttgcatgcgctgtatggtgtcaaaacatcgttagatgagattgaggagctttcagcactgtcttcctcaaatccggctgacaggacctctaaccgtgtcccaaatgtgtggttacgttcctcgagcaccacatccatggggagtattctcaaatctttccgctcgacaggtcttgcggtcttcttcctttgcaagtttgtgcacttttatcttttccaaagtcgagaaatgaactgtgcaagtagagaagttcacgaacatgaagattctggagataaagacactaagcagcatcagccttacactctagtaaaccaagcatttgcagcagcagttaataaggtcctcgaaggctatttctgttcattgaatactttactagcatcaattaggcttaggcgttcagtgggccaatctggtatagcttccaagatttcaaatggaatgagttgtgatcccacttcagaggtcactcttctggaagtttatctacacaccgaggagttaagaaggcatgttaaatcccttggaaatatttgtttccctaagtttgcaggtcttacattgtgccaggagggtttgaatactgatgcaaatgtggagtttgagaatttcccacggggcaccgatttgctttcctatttgtatgtccatattcgtgatgctgatccagttcactatggtcttttgaagtatcttttcattcgttcctgtgagccatactttaacttcattaagtcatggatttaccgagcttctgttgatgacccttatgaggaatttctcattacacaaactgaaaataagggtgctcaaggaatctcttcagacataacagatgatttcatcctcttccccttaaagggaagaaaccatgtatctgctccatgttttctaaaggagatatgtcatcctcttttgcgtactgggcagcagcttcaagtgctcatgaaccttctaaagtattgcaatctggctgctactgaaggagatgtttatccctctcgtaatatcattcatatggagggggttctcccgtggtttgatacaccaattgagtcttcaatgaattcatttacattttcaaaaagtgctatagaggcattaacatgcaaaagggatgctatgtacaagttgatgatggagaagctccaacattttttctctaatgttgaggtgattgcttttgatactgcatcaaatttcctacataaaaggaccgaccttgtagatgcatctgtttcagatgctgagttattctatggggacagcgacgctgtactaccttgcaatatggctgcagatgaaaaagatgattcttcttcgaattcccaagaatcttcagataaagaagatcccttggaatcttcagaatgttcttcttatacttctatggatgacacagaagttgagagttctacagcatgtgaaaacttgtctagttccatgttctcattatactgtacaagcacaggtgaagcaaaaggctccttggtaaccagtaagctgctttcttcccaatccagttcagttgaccatggaataaattgtgcaatccctattgagtgtgagaaagatgacaggttgagttgcaaacatgtccttgtgcacccacagaatactaagcatactgcggtgcctgatggttcagaactggattatcagtatagccagttttcaccatttgacaggtttatgaagagagccagttgctcatttgaaagcatgaattcagttggggagtttttgtattctgatcataaaaggtcagtaggtaatgcagtttatccattacattctgaatcagggagtactaaactatcaaacagtaaaaactatgaaaagtttgttactataaatcagccatggaataccagtattccttacaatctcagtttgaaccccatactgaaaaatgcagcttgttaccatacagagagtgacatgcaacagaaaagcaagaaccaatcacttgccagttttgattttgagtcagtcatggatccatgtgaagtatattgtgcaaggagcccatcccttcttgttgagtctgtaaatggagcagcaacagctggacagcccagtactcagccttatgaacagcctgattgttctaccaagcttcttcaagctcagacaagaagtcagtcatcccttacttcctcaggagaaatgtcaacaggagatagtcttcagaaaaatgcttctggtggggcattctgggagatatcattactatataatgataaatcaaaagaaaaaccagctatggactttagttcacaatttgatatgccccttgatatagttatcgataagtgcattattcaagaaattttgcttcagtataaatatgttagcagcttcacgatgaagttgcttgaggagggttttgatctttgtgcacatctactggctctgcggcggtaccatttcatggaaatagctgactgggcagactcctttattgcttcaatttatcagaagaaatggtcatttgttaaatctgagcagaaaagatcggagatccaaggacttatggacttggcattgcagagatcttcatgcgattctgatccttataaggaaagattatttatatacatgagggagtcacctgtggattctgttgatgcctctccatgtggtcttgatttgctggatgatatcttgttgggttataaagctgaatggccaatgaatattgtcattacagtagatgcactgaaaatatatgctgaaatattctgttatcttcttcaagtcaggtttgcagtgttttccctgactgaagtttggagatttttaaaggagttgacacagttcatcggtcgttccagccatagcagatctgatgtgttgaagaaattgaattttgtaatgaaattgaggcataaactttatcactttctatcaacactacagcagtatctccactgccatttatctgatatatcgtggcgccgttttcaacattcccttaaaaatcagatgtttcttatctgatgagtcaaaacaagttgctacgataatcaagagcatgctgcagctggctttggagttacgatcatgctttcagagtggtgacacttgtgatttatcagtaaatcaactcagtaatttgcaataccttataaacttctctcaggtggatgtaattagaacaaagttcgaggataacatcaaagatctctatattttgcattcgaaatcttcaaaatatacggagcttggcctttcccgtttctgggggtatctgaactacaatgagtatcattctacgaaagtcagcaaagatatggacaacttctatttttgataggacattgcaagactgaagtaaggtttgcctttatatttgggcaatagctcactggccaccgggactagcttaccttttgaggtacacactgctgagtggtgagagttcttgtagatatacgctggtttgatcaaattggcccttgtattggtttttggcgaacttaagagaactattgttcagacatgccatatacttggagatgcatgtatgtcctaatggtgtatcccagttttacgatcaaaatgggaaatcatgtgtagttctggaaaggtgggaactttgtatagccaatgttgatattgattgttgacacgttacaattggtaaatggaaggtgaatgattgctctctggcctcatttattcttatatgcttgtactccactatcctcaaatataatgagctttcagttgctctaagtcacaaaccatcctaaaaaaactgtagaaaagaacggtaatatccacgatatcaattgagtatcattagatgcattacgaaatttacagtcataatttatctatttgatgtggtaggtggtaatatttttcaaacttggttagac

SEQ ID NO: 19654 - DNA, 4354 bp, Zea Mays
ccaattatcgcaggcccgcttctcaccaattcaccaaccgtccactccctcgccctcgccggtgcatctcgtcggcgtcgtgctctaccaccaccagtgcacggcacccctatgttcgtctccttctgctcccccatccttcgttctgcgcttggaacgttggatgtgggttccaccaaatcacgcgggagggcaaataaaccctagttaggccctcccgggatggaggcggccgcctccagcctctcgacgctgctttccaccttgcgcgtgaacgggccctggacgccgccgggaacctgggagtcagtcatacctgagagcggtgctgctcgcgtctctcaccttggaggacgccctcgcctgcagccgatctacgagctcgcatcggttactgatgatgctttgattcatctggccttgcatgcgctgtatggtgtcaaaacatcgttagatgagattgaggagctttcagcactgtcttcctcaaatccggctgacaggacctctaaccgtgtcccaaatgtgtggttacgttcctcgagcaccacatccatggggagtattctcaaatctttccgctcgacaggtcttgcggtcttcttcctttgcaagtttgtgcacttttatcttttccaaagtcgagaaatgaactgtgcaagtagagaagttcacgaacatgaagattctggagataaagacactaagcagcatcagccttacactctagtaaaccaagcatttgcagcagcagttaataaggtcctcgaaggctatttctgttcattgaatactttactagcatcaattaggcttaggcgttcagtgggccaatctggtatagcttccaagatttcaaatggaatgagttgtgatcccacttcagaggtcactcttctggaagtttatctacacaccgaggagttaagaaggcatgttaaatcccttggaaatatttgtttccctaagtttgcaggtcttacattgtgccaggagggtttgaatactgatgcaaatgtggagtttgagaatttcccacggggcaccgatttgctttcctatttgtatgtccatattcgtgatgctgatccagttcactatggtcttttgaagtatcttttcattcgttcctgtgagccatactttaacttcattaagtcatggatttaccgagcttctgttgatgacccttatgaggaatttctcattacacaaactgaaaataagggtgctcaaggaatctcttcagacataacagatgatttcatcctcttccccttaaagggaagaaaccatgtatctgctccatgttttctaaaggagatatgtcatcctcttttgcgtactgggcagcagcttcaagtgctcatgaaccttctaaagtattgcaatctggctgctactgaaggagatgtttatccctctcgtaatatcattcatatggagggggttctcccgtggtttgatacaccaattgagtcttcaatgaattcatttacattttcaaaaagtgctatagaggcattaacatgcaaaagggatgctatgtacaagttgatgatggagaagctccaacattttttctctaatgttgaggtgattgcttttgatactgcatcaaatttcctacataaaaggaccgaccttgtagatgcatctgtttcagatgctgagttattctatggggacagcgacgctgtactaccttgcaatatggctgcagatgaaaaagatgattcttcttcgaattcccaagaatcttcagataaagaagatcccttggaatcttcagaatgttcttcttatacttctatggatgacacagaagttgagagttctacagcatgtgaaaacttgtctagttccatgttctcattatactgtacaagcacaggtgaagcaaaaggctccttggtaaccagtaagctgctttcttcccaatccagttcagttgaccatggaataaattgtgcaatccctattgagtgtgagaaagatgacaggttgagttgcaaacatgtccttgtgcacccacagaatactaagcatactgcggtgcctgatggttcagaactggattatcagtatagccagttttcaccatttgacaggtttatgaagagagccagttgctcatttgaaagcatgaattcagttggggagtttttgtattctgatcataaaaggtcagtaggtaatgcagtttatccattacattctgaatcagggagtactaaactatcaaacagtaaaaactatgaaaagtttgttactataaatcagccatggaataccagtattccttacaatctcagtttgaaccccatactgaaaaatgcagcttgttaccatacagagagtgacatgcaacagaaaagcaagaaccaatcacttgccagttttgattttgagtcagtcatggatccatgtgaagtatattgtgcaaggagcccatcccttcttgttgagtctgtaaatggagcagcaacagctggacagcccagtactcagccttatgaacagcctgattgttctaccaagcttcttcaagctcagacaagaagtcagtcatcccttacttcctcaggagaaatgtcaacaggagatagtcttcagaaaaatgcttctggtggggcattctgggagatatcattactatataatgataaatcaaaagaaaaaccagctatggactttagttcacaatttgatatgccccttgatatagttatcgataagtgcattattcaagaaattttgcttcacttcacgatgaagttgcttgaggagggttttgatctttgtgcacatctactggctctgcggcggtaccatttcatggaaatagctgactgggcagactcctttattgcttcaatttatcagaagaaatggtcatttgttaaatctgagcagaaaagatcggagatccaaggacttatggacttggcattgcagagatcttcatgcgattctgatccttataaggaaagattatttatatacatgagggagtcacctgtggattctgttgatgcctctccatgtggtcttgatttgctggatgatatcttgttgggttataaagctgaatggccaatgaatattgtcattacagtagatgcactgaaaatatatgctgaaatattctgttatcttcttcaagtcaggtttgcagtgttttccctgactgaagtttggagatttttaaaggagttgacacagttcatcggtcgttccagccatagcagatctgatgtgttgaagaaattgaattttgtaatgaaattgaggcataaactttatcactttctatcaacactacagcagtatctccactgccatttatctgatatatcgtggcgccgttttcaacattcccttaaaaatcaggtgagggatatactggatctggagtatgtgcatatatgttatattactgatgcacttgacatatgtttcttatctgatgagtcaaaacaagttgctacgataatcaagagcatgctgcagctggctttggagttacgatcatgctttcagagtggtgacacttgtgatttatcagtaaatcaactcagtaatttgcaataccttataaacttctctcaggtggatgtaattagaacaaagttcgaggataacatcaaagatctctatattttgcattcgaaatcttcaaaatatacggagcttggcctttcccgtttctgggggtatctgaactacaatgagtatcattctacgaaagtcagcaaagatatggacaacttctatttttgataggacattgcaagactgaagtaaggtttgcctttatatttgggcaatagctcactggccaccgggactagcttaccttttgaggtacacactgctgagtggtgagagttcttgtagatatacgctggtttgatcaaattggcccttgtattggtttttggcgaacttaagagaactattgttcagacatgccatatacttggagatgcatgtatgtcctaatggtgtatcccagttttacgatcaaaatgggaaatcatgtgtagttctggaaaggtgggaactttgtatagccaatgttgatattgattgttgacacgttacaattggtaaatggaaggtgaatgattgctctctggcctcatttattcttatatgcttgtactccactatcctcaaatataatgagctttcagttgctctaagtcacaaaccatcctaaaaaaactgtagaaaagaacggtaatatccacgatatcaattgagtatcattagatgcattacgaaatttacagtcataatttatctatttgatgtggtaggtggtaatatttttcaaacttggttagac

SEQ ID NO: 19655 - DNA, 4216 bp, Zea Mays
cgcaggcccgcttctcaccaattcaccaaccgtccactccctcgccctcgccggtgcatctcgtcggcgtcgtgctctaccaccaccagtgcacggcacccctatgttcgtctccttctgctcccccatccttcgttctgcgcttggaacgttggatgtgggttccaccaaatcacgcgggagggcaaataaaccctagttaggccctcccgggatggaggcggccgcctccagcctctcgacgctgctttccaccttgcgcgtgaacgggccctggacgccgccgggaacctgggagtcagtcatacctgagagcggtgctgctcgcgtctctcaccttggaggacgccctcgcctgcagccgatctacgagctcgcatcggttactgatgatgctttgattcatctggccttgcatgcgctgtatggtgtcaaaacatcgttagatgagattgaggagctttcagcactgtcttcctcaaatccggctgacaggacctctaaccgtgtcccaaatgtgtggttacgttcctcgagcaccacatccatggggagtattctcaaatctttccgctcgacaggtcttgcggtcttcttcctttgcaagtttgtgcacttttatcttttccaaagtcgagaaatgaactgtgcaagtagagaagttcacgaacatgaagattctggagataaagacactaagcagcatcagccttacactctagtaaaccaagcatttgcagcagcagttaataaggtcctcgaaggctatttctgttcattgaatactttactagcatcaattaggcttaggcgttcagtgggccaatctggtatagcttccaagatttcaaatggaatgagttgtgatcccacttcagaggtcactcttctggaagtttatctacacaccgaggagttaagaaggatgctgatccagttcactatggtcttttgaagtatcttttcattcgttcctgtgagccatactttaacttcattaagtcatggatttaccgagcttctgttgatgacccttatgaggaatttctcattacacaaactgaaaataagggtgctcaaggaatctcttcagacataacagatgatttcatcctcttccccttaaagggaagaaaccatgtatctgctccatgttttctaaaggagatatgtcatcctcttttgcgtactgggcagcagcttcaagtgctcatgaaccttctaaagtattgcaatctggctgctactgaaggagatgtttatccctctcgtaatatcattcatatggagggggttctcccgtggtttgatacaccaattgagtcttcaatgaattcatttacattttcaaaaagtgctatagaggcattaacatgcaaaagggatgctatgtacaagttgatgatggagaagctccaacattttttctctaatgttgaggtgattgcttttgatactgcatcaaatttcctacataaaaggaccgaccttgtagatgcatctgtttcagatgctgagttattctatggggacagcgacgctgtactaccttgcaatatggctgcagatgaaaaagatgattcttcttcgaattcccaagaatcttcagataaagaagatcccttggaatcttcagaatgttcttcttatacttctatggatgacacagaagttgagagttctacagcatgtgaaaacttgtctagttccatgttctcattatactgtacaagcacaggtgaagcaaaaggctccttggtaaccagtaagctgctttcttcccaatccagttcagttgaccatggaataaattgtgcaatccctattgagtgtgagaaagatgacaggttgagttgcaaacatgtccttgtgcacccacagaatactaagcatactgcggtgcctgatggttcagaactggattatcagtatagccagttttcaccatttgacaggtttatgaagagagccagttgctcatttgaaagcatgaattcagttggggagtttttgtattctgatcataaaaggtcagtaggtaatgcagtttatccattacattctgaatcagggagtactaaactatcaaacagtaaaaactatgaaaagtttgttactataaatcagccatggaataccagtattccttacaatctcagtttgaaccccatactgaaaaatgcagcttgttaccatacagagagtgacatgcaacagaaaagcaagaaccaatcacttgccagttttgattttgagtcagtcatggatccatgtgaagtatattgtgcaaggagcccatcccttcttgttgagtctgtaaatggagcagcaacagctggacagcccagtactcagccttatgaacagcctgattgttctaccaagcttcttcaagctcagacaagaagtcagtcatcccttacttcctcaggagaaatgtcaacaggagatagtcttcagaaaaatgcttctggtggggcattctgggagatatcattactatataatgataaatcaaaagaaaaaccagctatggactttagttcacaatttgatatgccccttgatatagttatcgataagtgcattattcaagaaattttgcttcagtataaatatgttagcagcttcacgatgaagttgcttgaggagggttttgatctttgtgcacatctactggctctgcggcggtaccatttcatggaaatagctgactgggcagactcctttattgcttcaatttatcagaagaaatggtcatttgttaaatctgagcagaaaagatcggagatccaaggacttatggacttggcattgcagagatcttcatgcgattctgatccttataaggaaagattatttatatacatgagggagtcacctgtggattctgttgatgcctctccatgtggtcttgatttgctggatgatatcttgttgggttataaagctgaatggccaatgaatattgtcattacagtagatgcactgaaaatatatgctgaaatattctgttatcttcttcaagtcaggtttgcagtgttttccctgactgaagtttggagatttttaaaggagttgacacagttcatcggtcgttccagccatagcagatctgatgtgttgaagaaattgaattttgtaatgaaattgaggcataaactttatcactttctatcaacactacagcagtatctccactgccatttatctgatatatcgtggcgccgttttcaacattcccttaaaaatcaggtgagggatatactggatctggagtatgtgcatatatgttatattactgatgcacttgacatatgtttcttatctgatgagtcaaaacaagttgctacgataatcaagagcatgctgcagctggctttggagttacgatcatgctttcagagtggtgacacttgtgatttatcagtaaatcaactcagtaatttgcaataccttataaacttctctcaggtggatgtaattagaacaaagttcgaggataacatcaaagatctctatattttgcattcgaaatcttcaaaatatacggagcttggcctttcccgtttctgggggtatctgaactacaatgagtatcattctacgaaagtcagcaaagatatggacaacttctatttttgataggacattgcaagactgaagtaaggtttgcctttatatttgggcaatagctcactggccaccgggactagcttaccttttgaggtacacactgctgagtggtgagagttcttgtagatatacgctggtttgatcaaattggcccttgtattggtttttggcgaacttaagagaactattgttcagacatgccatatacttggagatgcatgtatgtcctaatggtgtatcccagttttacgatcaaaatgggaaatcatgtgtagttctggaaaggtgggaactttgtatagccaatgttgatattgattgttgacacgttacaattggtaaatggaaggtgaatgattgctctctggcctcatttattcttatatgcttgtactccactatcctcaaatataatgagctttcagttgctctaagtcacaaaccatcctaaaaaaactgtagaaaagaacggtaatatccacgatatcaattgagtatcattagatgcattacgaaatttacagtcataatttatctatttgatgtggtaggtggtaatatttttcaaacttggttagac

SEQ ID NO: 19656 - DNA, 3555 bp, Zea Mays
cccgcttctcaccaattcaccaaccgtccactccctcgccctcgccggtgcatctcgtcggcgtcgtgctctaccaccaccagtgcacggcacccctatgttcgtctccttctgctcccccatccttcgttctgcgcttggaacgttggatgtgggttccaccaaatcacgcgggagggcaaataaaccctagttaggccctcccgggatggaggcggccgcctccagcctctcgacgctgctttccaccttgcgcgtgaacgggccctggacgccgccgggaacctgggagtcagtcatacctgagagcggtgctgctcgcgtctctcaccttggaggacgccctcgcctgcagccgatctacgagctcgcatcggttactgatgatgctttgattcatctggccttgcatgcgctgtatggtgtcaaaacatcgttagatgagattgaggagctttcagcactgtcttcctcaaatccggctgacaggacctctaaccgtgtcccaaatgtgtggttacgttcctcgagcaccacatccatggggagtattctcaaatctttccgctcgacaggatgctgatccagttcactatggtcttttgaagtatcttttcattcgttcctgtgagccatactttaacttcattaagtcatggatttaccgagcttctgttgatgacccttatgaggaatttctcattacacaaactgaaaataagggtgctcaaggaatctcttcagacataacagatgatttcatcctcttccccttaaaggtgattgcttttgatactgcatcaaatttcctacataaaaggaccgaccttgtagatgcatctgtttcagatgctgagttattctatggggacagcgacgctgtactaccttgcaatatggctgcagatgaaaaagatgattcttcttcgaattcccaagaatcttcagataaagaagatcccttggaatcttcagaatgttcttcttatacttctatggatgacacagaagttgagagttctacagcatgtgaaaacttgtctagttccatgttctcattatactgtacaagcacaggtgaagcaaaaggctccttggtaaccagtaagctgctttcttcccaatccagttcagttgaccatggaataaattgtgcaatccctattgagtgtgagaaagatgacaggttgagttgcaaacatgtccttgtgcacccacagaatactaagcatactgcggtgcctgatggttcagaactggattatcagtatagccagttttcaccatttgacaggtttatgaagagagccagttgctcatttgaaagcatgaattcagttggggagtttttgtattctgatcataaaaggtcagtaggtaatgcagtttatccattacattctgaatcagggagtactaaactatcaaacagtaaaaactatgaaaagtttgttactataaatcagccatggaataccagtattccttacaatctcagtttgaaccccatactgaaaaatgcagcttgttaccatacagagagtgacatgcaacagaaaagcaagaaccaatcacttgccagttttgattttgagtcagtcatggatccatgtgaagtatattgtgcaaggagcccatcccttcttgttgagtctgtaaatggagcagcaacagctggacagcccagtactcagccttatgaacagcctgattgttctaccaagcttcttcaagctcagacaagaagtcagtcatcccttacttcctcaggagaaatgtcaacaggagatagtcttcagaaaaatgcttctggtggggcattctgggagatatcattactatataatgataaatcaaaagaaaaaccagctatggactttagttcacaatttgatatgccccttgatatagttatcgataagtgcattattcaagaaattttgcttcagtataaatatgttagcagcttcacgatgaagttgcttgaggagggttttgatctttgtgcacatctactggctctgcggcggtaccatttcatggaaatagctgactgggcagactcctttattgcttcaatttatcagaagaaatggtcatttgttaaatctgagcagaaaagatcggagatccaaggacttatggacttggcattgcagagatcttcatgcgattctgatccttataaggaaagattatttatatacatgagggagtcacctgtggattctgttgatgcctctccatgtggtcttgatttgctggatgatatcttgttgggttataaagctgaatggccaatgaatattgtcattacagtagatgcactgaaaatatatgctgaaatattctgttatcttcttcaagtcaggtttgcagtgttttccctgactgaagtttggagatttttaaaggagttgacacagttcatcggtcgttccagccatagcagatctgatgtgttgaagaaattgaattttgtaatgaaattgaggcataaactttatcactttctatcaacactacagcagtatctccactgccatttatctgatatatcgtggcgccgttttcaacattcccttaaaaatcaggtgagggatatactggatctggagtatgtgcatatatgttatattactgatgcacttgacatatgtttcttatctgatgagtcaaaacaagttgctacgataatcaagagcatgctgcagctggctttggagttacgatcatgctttcagagtggtgacacttgtgatttatcagtaaatcaactcagtaatttgcaataccttataaacttctctcaggtggatgtaattagaacaaagttcgaggataacatcaaagatctctatattttgcattcgaaatcttcaaaatatacggagcttggcctttcccgtttctgggggtatctgaactacaatgagtatcattctacgaaagtcagcaaagatatggacaacttctatttttgataggacattgcaagactgaagtaaggtttgcctttatatttgggcaatagctcactggccaccgggactagcttaccttttgaggtacacactgctgagtggtgagagttcttgtagatatacgctggtttgatcaaattggcccttgtattggtttttggcgaacttaagagaactattgttcagacatgccatatacttggagatgcatgtatgtcctaatggtgtatcccagttttacgatcaaaatgggaaatcatgtgtagttctggaaaggtgggaactttgtatagccaatgttgatattgattgttgacacgttacaattggtaaatggaaggtgaatgattgctctctggcctcatttattcttatatgcttgtactccactatcctcaaatataatgagctttcagttgctctaagtcacaaaccatcctaaaaaaactgtagaaaagaacggtaatatccacgatatcaattgagtatcattagatgcattacgaaatttacagtcataatttatctatttgatgtggtaggtggtaatatttttcaaacttggttagac

SEQ ID NO: 19657 - DNA, 4354 bp, Zea Mays
ctcaccaattcaccaaccgtccactccctcgccctcgccggtgcatctcgtcggcgtcgtgctctaccaccaccagtgcacggcacccctatgttcgtctccttctgctcccccatccttcgttctgcgcttggaacgttggatgtgggttccaccaaatcacgcgggagggcaaataaaccctagttaggccctcccgggatggaggcggccgcctccagcctctcgacgctgctttccaccttgcgcgtgaacgggccctggacgccgccgggaacctgggagtcagtcatacctgagagcggtgctgctcgcgtctctcaccttggaggacgccctcgcctgcagccgatctacgagctcgcatcggttactgatgatgctttgattcatctggccttgcatgcgctgtatggtgtcaaaacatcgttagatgagattgaggagctttcagcactgtcttcctcaaatccggctgacaggacctctaaccgtgtcccaaatgtgtggttacgttcctcgagcaccacatccatggggagtattctcaaatctttccgctcgacaggtcttgcggtcttcttcctttgcaagtttgtgcacttttatcttttccaaagtcgagaaatgaactgtgcaagtagagaagttcacgaacatgaagattctggagataaagacactaagcagcatcagccttacactctagtaaaccaagcatttgcagcagcagttaataaggtcctcgaaggctatttctgttcattgaatactttactagcatcaattaggcttaggcgttcagtgggccaatctggtatagcttccaagatttcaaatggaatgagttgtgatcccacttcagaggtcactcttctggaagtttatctacacaccgaggagttaagaaggcatgttaaatcccttggaaatatttgtttccctaagtttgcaggtcttacattgtgccaggagggtttgaatactgatgcaaatgtggagtttgagaatttcccacggggcaccgatttgctttcctatttgtatgtccatattcgtgatgctgatccagttcactatggtcttttgaagtatcttttcattcgttcctgtgagccatactttaacttcattaagtcatggatttaccgagcttctgttgatgacccttatgaggaatttctcattacacaaactgaaaataagggtgctcaaggaatctcttcagacataacagatgatttcatcctcttccccttaaagcagggaagaaaccatgtatctgctccatgttttctaaaggagatatgtcatcctcttttgcgtactgggcagcagcttcaagtgctcatgaaccttctaaagtattgcaatctggctgctactgaaggagatgtttatccctctcgtaatatcattcatatggagggggttctcccgtggtttgatacaccaattgagtcttcaatgaattcatttacattttcaaaaagtgctatagaggcattaacatgcaaaagggatgctatgtacaagttgatgatggagaagctccaacattttttctctaatgttgaggtgattgcttttgatactgcatcaaatttcctacataaaaggaccgaccttgtagatgcatctgtttcagatgctgagttattctatggggacagcgacgctgtactaccttgcaatatggctgcagatgaaaaagatgattcttcttcgaattcccaagaatcttcagataaagaagatcccttggaatcttcagaatgttcttcttatacttctatggatgacacagaagttgagagttctacagcatgtgaaaacttgtctagttccatgttctcattatactgtacaagcacaggtgaagcaaaaggctccttggtaaccagtaagctgctttcttcccaatccagttcagttgaccatggaataaattgtgcaatccctattgagtgtgagaaagatgacaggttgagttgcaaacatgtccttgtgcacccacagaatactaagcatactgcggtgcctgatggttcagaactggattatcagtatagccagttttcaccatttgacaggtttatgaagagagccagttgctcatttgaaagcatgaattcagttggggagtttttgtattctgatcataaaaggtcagtaggtaatgcagtttatccattacattctgaatcagggagtactaaactatcaaacagtaaaaactatgaaaagtttgttactataaatcagccatggaataccagtattccttacaatctcagtttgaaccccatactgaaaaatgcagcttgttaccatacagagagtgacatgcaacagaaaagcaagaaccaatcacttgccagttttgattttgagtcagtcatggatccatgtgaagtatattgtgcaaggagcccatcccttcttgttgagtctgtaaatggagcagcaacagctggacagcccagtactcagccttatgaacagcctgattgttctaccaagcttcttcaagctcagacaagaagtcagtcatcccttacttcctcaggagaaatgtcaacaggagatagtcttcagaaaaatgcttctggtggggcattctgggagatatcattactatataatgataaatcaaaagaaaaaccagctatggactttagttcacaatttgatatgccccttgatatagttatcgataagtgcattattcaagaaattttgcttcagtataaatatgttagcagcttcacgatgaagttgcttgaggagggttttgatctttgtgcacatctactggctctgcggcggtaccatttcatggaaatagctgactgggcagactcctttattgcttcaatttatcagaagaaatggtcatttgttaaatctgagcagaaaagatcggagatccaaggacttatggacttggcattgcagagatcttcatgcgattctgatccttataaggaaagattatttatatacatgagggagtcacctgtggattctgttgatgcctctccatgtggtcttgatttgctggatgatatcttgttgggttataaagctgaatggccaatgaatattgtcattacagtagatgcactgaaaatatatgctgaaatattctgttatcttcttcaagtcaggtttgcagtgttttccctgactgaagtttggagatttttaaaggagttgacacagttcatcggtcgttccagccatagcagatctgatgtgttgaagaaattgaattttgtaatgaaattgaggcataaactttatcactttctatcaacactacagcagtatctccactgccatttatctgatatatcgtggcgccgttttcaacattcccttaaaaatcaggtgagggatatactggatctggagtatgtgcatatatgttatattactgatgcacttgacatatgtttcttatctgatgagtcaaaacaagttgctacgataatcaagagcatgctgcagctggctttggagttacgatcatgctttcagagtggtgacacttgtgatttatcagtaaatcaactcagtaatttgcaataccttataaacttctctcaggtggatgtaattagaacaaagttcgaggataacatcaaagatctctatattttgcattcgaaatcttcaaaatatacggagcttggcctttcccgtttctgggggtatctgaactacaatgagtatcattctacgaaagtcagcaaagatatggacaacttctatttttgataggacattgcaagactgaagtaaggtttgcctttatatttgggcaatagctcactggccaccgggactagcttaccttttgaggtacacactgctgagtggtgagagttcttgtagatatacgctggtttgatcaaattggcccttgtattggtttttggcgaacttaagagaactattgttcagacatgccatatacttggagatgcatgtatgtcctaatggtgtatcccagttttacgatcaaaatgggaaatcatgtgtagttctggaaaggtgggaactttgtatagccaatgttgatattgattgttgacacgttacaattggtaaatggaaggtgaatgattgctctctggcctcatttattcttatatgcttgtactccactatcctcaaatataatgagctttcagttgctctaagtcacaaaccatcctaaaaaaactgtagaaaagaacggtaatatccacgatatcaattgagtatcattagatgcattacgaaatttacagtcataatttatctatttgatgtggtaggtggtaatatttttcaaacttggttagac

SEQ ID NO: 19658 - DNA, 4141 bp, Zea Mays
ctcaccaattcaccaaccgtccactccctcgccctcgccggtgcatctcgtcggcgtcgtgctctaccaccaccagtgcacggcacccctatgttcgtctccttctgctcccccatccttcgttctgcgcttggaacgttggatgtgggttccaccaaatcacgcgggagggcaaataaaccctagttaggccctcccgggatggaggcggccgcctccagcctctcgacgctgctttccaccttgcgcgtgaacgggccctggacgccgccgggaacctgggagtcagtcatacctgagagcggtgctgctcgcgtctctcaccttggaggacgccctcgcctgcagccgatctacgagctcgcatcggttactgatgatgctttgattcatctggccttgcatgcgctgtatggtgtcaaaacatcgttagatgagattgaggagctttcagcactgtcttcctcaaatccggctgacaggacctctaaccgtgtcccaaatgtgtggttacgttcctcgagcaccacatccatggggagtattctcaaatctttccgctcgacaggtcttgcggtcttcttcctttgcaagtttgtgcacttttatcttttccaaagtcgagaaatgaactgtgcaagtagagaagttcacgaacatgaagattctggagataaagacactaagcagcatcagccttacactctagtaaaccaagcatttgcagcagcagttaataaggtcctcgaaggctatttctgttcattgaatactttactagcatcaattaggcttaggcgttcagtgggccaatctggtatagcttccaagatttcaaatggaatgagttgtgatcccacttcagaggtcactcttctggaagtttatctacacaccgaggagttaagaaggatgctgatccagttcactatggtcttttgaagtatcttttcattcgttcctgtgagccatactttaacttcattaagtcatggatttaccgagcttctgttgatgacccttatgaggaatttctcattacacaaactgaaaataagggtgctcaaggaatctcttcagacataacagatgatttcatcctcttccccttaaagggaagaaaccatgtatctgctccatgttttctaaaggagatatgtcatcctcttttgcgtactgggcagcagcttcaagtgctcatgaaccttctaaagtattgcaatctggctgctactgaaggagatgtttatccctctcgtaatatcattcatatggagggggttctcccgtggtttgatacaccaattgagtcttcaatgaattcatttacattttcaaaaagtgctatagaggcattaacatgcaaaagggatgctatgtacaagttgatgatggagaagctccaacattttttctctaatgttgaggtgattgcttttgatactgcatcaaatttcctacataaaaggaccgaccttgtagatgcatctgtttcagatgctgagttattctatggggacagcgacgctgtactaccttgcaatatggctgcagatgaaaaagatgattcttcttcgaattcccaagaatcttcagataaagaagatcccttggaatcttcagaatgttcttcttatacttctatggatgacacagaagttgagagttctacagcatgtgaaaacttgtctagttccatgttctcattatactgtacaagcacaggtgaagcaaaaggctccttggtaaccagtaagctgctttcttcccaatccagttcagttgaccatggaataaattgtgcaatccctattgagtgtgagaaagatgacaggttgagttgcaaacatgtccttgtgcacccacagaatactaagcatactgcggtgcctgatggttcagaactggattatcagtatagccagttttcaccatttgacaggtttatgaagagagccagttgctcatttgaaagcatgaattcagttggggagtttttgtattctgatcataaaaggtcagtaggtaatgcagtttatccattacattctgaatcagggagtactaaactatcaaacagtaaaaactatgaaaagtttgttactataaatcagccatggaataccagtattccttacaatctcagtttgaaccccatactgaaaaatgcagcttgttaccatacagagagtgacatgcaacagaaaagcaagaaccaatcacttgccagttttgattttgagtcagtcatggatccatgtgaagtatattgtgcaaggagcccatcccttcttgttgagtctgtaaatggagcagcaacagctggacagcccagtactcagccttatgaacagcctgattgttctaccaagcttcttcaagctcagacaagaagtcagtcatcccttacttcctcaggagaaatgtcaacaggagatagtcttcagaaaaatgcttctggtggggcattctgggagatatcattactatataatgataaatcaaaagaaaaaccagctatggactttagttcacaatttgatatgccccttgatatagttatcgataagtgcattattcaagaaattttgcttcagtataaatatgttagcagcttcacgatgaagttgcttgaggagggttttgatctttgtgcacatctactggctctgcggcggtaccatttcatggaaatagctgactgggcagactcctttattgcttcaatttatcagaagaaatggtcatttgttaaatctgagcagaaaagatcggagatccaaggacttatggacttggcattgcagagatcttcatgcgattctgatccttataaggaaagattatttatatacatgagggagtcacctgtggattctgttgatgcctctccatgtggtcttgatttgctggatgatatcttgttgggttataaagctgaatggccaatgaatattgtcattacagtagatgcactgaaaatatatgctgaaatattctgttatcttcttcaagtcaggtttgcagtgttttccctgactgaagtttggagatttttaaaggagttgacacagttcatcggtcgttccagccatagcagatctgatgtgttgaagaaattgaattttgtaatgaaattgaggcataaactttatcactttctatcaacactacagcagtatctccactgccatttatctgatatatcgtggcgccgttttcaacattcccttaaaaatcagatgtttcttatctgatgagtcaaaacaagttgctacgataatcaagagcatgctgcagctggctttggagttacgatcatgctttcagagtggtgacacttgtgatttatcagtaaatcaactcagtaatttgcaataccttataaacttctctcaggtggatgtaattagaacaaagttcgaggataacatcaaagatctctatattttgcattcgaaatcttcaaaatatacggagcttggcctttcccgtttctgggggtatctgaactacaatgagtatcattctacgaaagtcagcaaagatatggacaacttctatttttgataggacattgcaagactgaagtaaggtttgcctttatatttgggcaatagctcactggccaccgggactagcttaccttttgaggtacacactgctgagtggtgagagttcttgtagatatacgctggtttgatcaaattggcccttgtattggtttttggcgaacttaagagaactattgttcagacatgccatatacttggagatgcatgtatgtcctaatggtgtatcccagttttacgatcaaaatgggaaatcatgtgtagttctggaaaggtgggaactttgtatagccaatgttgatattgattgttgacacgttacaattggtaaatggaaggtgaatgattgctctctggcctcatttattcttatatgcttgtactccactatcctcaaatataatgagctttcagttgctctaagtcacaaaccatcctaaaaaaactgtagaaaagaacggtaatatccacgatatcaattgagtatcattagatgcattacgaaatttacagtcataatttatctatttgatgtggtaggtggtaatatttttcaaacttggttagac

SEQ ID NO: 19659 - DNA, 4317 bp, Zea Mays
gtccactccctcgccctcgccggtgcatctcgtcggcgtcgtgctctaccaccaccagtgcacggcacccctatgttcgtctccttctgctcccccatccttcgttctgcgcttggaacgttggatgtgggttccaccaaatcacgcgggagggcaaataaaccctagttaggccctcccgggatggaggcggccgcctccagcctctcgacgctgctttccaccttgcgcgtgaacgggccctggacgccgccgggaacctgggagtcagtcatacctgagagcggtgctgctcgcgtctctcaccttggaggacgccctcgcctgcagccgatctacgagctcgcatcggttactgatgatgctttgattcatctggccttgcatgcgctgtatggtgtcaaaacatcgttagatgagattgaggagctttcagcactgtcttcctcaaatccggctgacaggacctctaaccgtgtcccaaatgtgtggttacgttcctcgagcaccacatccatggggagtattctcaaatctttccgctcgacaggtcttgcggtcttcttcctttgcaagtttgtgcacttttatcttttccaaagtcgagaaatgaactgtgcaagtagagaagttcacgaacatgaagattctggagataaagacactaagcagcatcagccttacactctagtaaaccaagcatttgcagcagcagttaataaggtcctcgaaggctatttctgttcattgaatactttactagcatcaattaggcttaggcgttcagtgggccaatctggtatagcttccaagatttcaaatggaatgagttgtgatcccacttcagaggtcactcttctggaagtttatctacacaccgaggagttaagaaggcatgttaaatcccttggaaatatttgtttccctaagtttgcaggtcttacattgtgccaggagggtttgaatactgatgcaaatgtggagtttgagaatttcccacggggcaccgatttgctttcctatttgatgctgatccagttcactatggtcttttgaagtatcttttcattcgttcctgtgagccatactttaacttcattaagtcatggatttaccgagcttctgttgatgacccttatgaggaatttctcattacacaaactgaaaataagggtgctcaaggaatctcttcagacataacagatgatttcatcctcttccccttaaagggaagaaaccatgtatctgctccatgttttctaaaggagatatgtcatcctcttttgcgtactgggcagcagcttcaagtgctcatgaaccttctaaagtattgcaatctggctgctactgaaggagatgtttatccctctcgtaatatcattcatatggagggggttctcccgtggtttgatacaccaattgagtcttcaatgaattcatttacattttcaaaaagtgctatagaggcattaacatgcaaaagggatgctatgtacaagttgatgatggagaagctccaacattttttctctaatgttgaggtgattgcttttgatactgcatcaaatttcctacataaaaggaccgaccttgtagatgcatctgtttcagatgctgagttattctatggggacagcgacgctgtactaccttgcaatatggctgcagatgaaaaagatgattcttcttcgaattcccaagaatcttcagataaagaagatcccttggaatcttcagaatgttcttcttatacttctatggatgacacagaagttgagagttctacagcatgtgaaaacttgtctagttccatgttctcattatactgtacaagcacaggtgaagcaaaaggctccttggtaaccagtaagctgctttcttcccaatccagttcagttgaccatggaataaattgtgcaatccctattgagtgtgagaaagatgacaggttgagttgcaaacatgtccttgtgcacccacagaatactaagcatactgcggtgcctgatggttcagaactggattatcagtatagccagttttcaccatttgacaggtttatgaagagagccagttgctcatttgaaagcatgaattcagttggggagtttttgtattctgatcataaaaggtcagtaggtaatgcagtttatccattacattctgaatcagggagtactaaactatcaaacagtaaaaactatgaaaagtttgttactataaatcagccatggaataccagtattccttacaatctcagtttgaaccccatactgaaaaatgcagcttgttaccatacagagagtgacatgcaacagaaaagcaagaaccaatcacttgccagttttgattttgagtcagtcatggatccatgtgaagtatattgtgcaaggagcccatcccttcttgttgagtctgtaaatggagcagcaacagctggacagcccagtactcagccttatgaacagcctgattgttctaccaagcttcttcaagctcagacaagaagtcagtcatcccttacttcctcaggagaaatgtcaacaggagatagtcttcagaaaaatgcttctggtggggcattctgggagatatcattactatataatgataaatcaaaagaaaaaccagctatggactttagttcacaatttgatatgccccttgatatagttatcgataagtgcattattcaagaaattttgcttcagtataaatatgttagcagcttcacgatgaagttgcttgaggagggttttgatctttgtgcacatctactggctctgcggcggtaccatttcatggaaatagctgactgggcagactcctttattgcttcaatttatcagaagaaatggtcatttgttaaatctgagcagaaaagatcggagatccaaggacttatggacttggcattgcagagatcttcatgcgattctgatccttataaggaaagattatttatatacatgagggagtcacctgtggattctgttgatgcctctccatgtggtcttgatttgctggatgatatcttgttgggttataaagctgaatggccaatgaatattgtcattacagtagatgcactgaaaatatatgctgaaatattctgttatcttcttcaagtcaggtttgcagtgttttccctgactgaagtttggagatttttaaaggagttgacacagttcatcggtcgttccagccatagcagatctgatgtgttgaagaaattgaattttgtaatgaaattgaggcataaactttatcactttctatcaacactacagcagtatctccactgccatttatctgatatatcgtggcgccgttttcaacattcccttaaaaatcaggtgagggatatactggatctggagtatgtgcatatatgttatattactgatgcacttgacatatgtttcttatctgatgagtcaaaacaagttgctacgataatcaagagcatgctgcagctggctttggagttacgatcatgctttcagagtggtgacacttgtgatttatcagtaaatcaactcagtaatttgcaataccttataaacttctctcaggtggatgtaattagaacaaagttcgaggataacatcaaagatctctatattttgcattcgaaatcttcaaaatatacggagcttggcctttcccgtttctgggggtatctgaactacaatgagtatcattctacgaaagtcagcaaagatatggacaacttctatttttgataggacattgcaagactgaagtaaggtttgcctttatatttgggcaatagctcactggccaccgggactagcttaccttttgaggtacacactgctgagtggtgagagttcttgtagatatacgctggtttgatcaaattggcccttgtattggtttttggcgaacttaagagaactattgttcagacatgccatatacttggagatgcatgtatgtcctaatggtgtatcccagttttacgatcaaaatgggaaatcatgtgtagttctggaaaggtgggaactttgtatagccaatgttgatattgattgttgacacgttacaattggtaaatggaaggtgaatgattgctctctggcctcatttattcttatatgcttgtactccactatcctcaaatataatgagctttcagttgctctaagtcacaaaccatcctaaaaaaactgtagaaaagaacggtaatatccacgatatcaattgagtatcattagatgcattacgaaatttacagtcataatttatctatttgatgtggtaggtggtaatatttttcaaacttggttagac

SEQ ID NO: 19660 - DNA, 4084 bp, Zea Mays
aggagcgagcacgagcagctagcagtagcaaaaatggaagccgcatagcacctgcaccggcgcaatatttttttctccgggccatcggcaataattgggcatatcttgaagcttacatcaccgatatcttttgcttacgacgaggccgaggccgaggccaggtccagggatgcagcagtgcagatgagcccgaacccgagccccacccagctcttcctcccctagcagccagctatcgctagcttcgcacagccaccaataagccccccctcccccgcggcggcatctctctccagctcgctcgctcgctcgtgattcacccgcaggagccacccaggcacgagggcctatctcttcccctcgatcggcagacagacgacggaagtggccgcgacccgggtgccggccttgtctttcggctttcgcgcgcggcgtggacgatgtgtgaccttgacatggcgatgcgggtggagaacaacgggcgcccccgtcaagtgcccatcatggtgaggaagaagagaactggccctggcggctctggagaaacttctggagagtcttcaggagcttctggacaaggttcctcacagcggcctgaacggactcaacaacctggggcaggacgtggctgggtgcctcagcagggtggccgtggtggcgggcaacaccagggtcgtggtggacattatcaaggccgtggagggccaggtccacatcaccctggtggactgcctgagtatcaccagcgtgaataccagggacgaggtggtgagtaccagggacagtaccaggggcgtggtggtgcccgctccagaggtggaatttcacagccatactatggtgggcataggggaggtagtgttggacgaaatgttcctccaggtccatccagaacagttcccgagctgcaccaagccccatacgtccagtatcaagccccggtgatttcaccatccccatcgggacctggctcatcctcacagcctatggcagaggtgagctctggacaagtccagcaacagtttgagcaacttgccattcatggtcagagttccatgagtcaagaagttcaagtggcaccagcatcaagcaaatcggttcgattcccattacgccccggcaagggcacttatggggacaggtgcattgtgaaggcgaatcatttttttgctgagcttcctgacaaagaccttcaccaatatgatgtaactataacacctgaagttacttcacgtggcgttaatcgtgctgtcatgggagagcttgtaacactatatagacaatcccatttgggcgggcgtctacctgcgtacgatggaagaaagagcctttataccgctggaccattgccttttacttctatgacatttgaaattaccttgcaagatgaggaagatagtgttggcggtggccagggcggacaaaggcgcgagagagtatttagggtggtgatcaaatttgcggcccgtgctgatctccatcatctggctatgtttctagctggaaggcaagcagacgctcctcaagaagctcttcaagtgcttgacattgtactacgtgaattgcctactgcgaggtattctcctgttggtaggtcattttattctcccaacttagggagacgtcagcaacttggtgagggtttggaaagttggcgcggtttttaccaaagcataaggccgacacagatgggcctttcactgaatattgatatgtcctctactgcatttatcgagcctctccctgtgattgattttgttgctcagcttcttaatagagatatttcagttaggccattgtctgattctgatcgcgtgaagatcaaaaaagccttaagaggtgtgaaggttgaggtcactcacaggggaaacatgcgcagaaagtatcgcatttctggcctcacctcacaagcaacaagagagctatcattccctgttgatgatcgtggtactgtgaagactgtggtccaatacttcatggagacttatggttttagcatccagcacaccactttaccgtgcttgcaagtgggcaatcaacaaagaccaaattatctgcctatggaggtttgcaagatagttgaaggacagcgttactcaaagcgactcaatgagaaacaaatcactgctttactgaaagtgacctgccagcgccctcaagagcgtgagctggacattttacagactgtgcatcacaatgcgtactatgaagacccgtatgcacaggaatttggtataagaattgatgaacgccttgctgcagttgaagctcgtgttctgccaccaccaaggcttaaataccatgatagtggccgagagaaggatgttttgcccagagttggccaatggaacatgatgaataagaaaatggtaaatggtggcagagtcagcaactgggcatgtattaacttctctcggaatgtgcaagatagtgccgctaggggtttctgtcatgaactggcaatcatgtgccaaatatcaggaatggatttttcccttgagcctgtgctgcctccagtgactgcaaggccagaacatgttgaaagagcgttgaaggcacgttatcaagatgcaatgaacatactgaggccacaggggagggaacttgatctgctgattgtaatactgcctgacattaatggttccttatatggggatctcaaaaggatctgtgagactgatctcggattggtctcccagtgttgtctgactaaacatgtttttaagatgagcaagcagtatcttgcaaatgttgcactcaaaataaatgttaaggttggtggaaggaatactgtacttgtagatgctttgacaaggagaatcccccttgtcagtgacagaccgaccataatatttggtgctgatgttacccatccacatcctggagaagattccagtccttccattgcagctgtggttgcttcgcaagactggcctgaggtcaccaaatatgctggactagtgagtgcccaagcccatcgccaggagctgatacaggatcttttcaaagtatggcaagatccacagagaaggacagtaactggtggcatgataaaggaacttctcatttctttcaagagagcaactggacagaagccccagaggatcatattctacagggatggtgtcagtgagggacagttctatcaagtattgttgtatgaacttgatgccatcagaaaggcatgtgcatccttggagcccaactaccagcctccagttacttttgtcgtggtgcagaaacgacatcacactaggctgtttgctaataaccacaacgatcagcgtacagttgatagaagcggaaacatactgcctggcaccgtggttgattcgaagatttgccatcctactgaatttgatttctacctgtgtagccatgctggcattcagggaacaagccgccctgctcattaccatgtcctgtgggacgagaacaagttcacagctgatgagctgcagactctgacaaacaacctatgctacacgtacgctaggtgcacccgctccgtgtcaattgtgcccccggcatactatgctcatctggcagccttccgagctcgcttctacatggagccagatacctctgacagtggctcaatggccagtggtgcccgtggccctccaccaggtgcggcacgcagcatgagaggagcggggagtgttgcggtcaggcccctacctgctctcaaggaaaacgtgaagcgtgtcatgttttactgctgagatgctgagctaccttcaccaagaaaatatcctgacttgttccatgtacccgcactgtttcggtgatactatctgacaccgaatttatgcattaagtcttccagtggtctggagattttaagtaacgcctgtttttattcgtgagttgtaacgctgcagttcgaggagcttcagtgctgtatgatgtgtaaactatttgttgtaagttgtaaccaattgttgtaagttgtaaccagccactatgttataatcctgtttgtttcagctttttacagtttctcgctaccaaaagctgttgtgaactgtcaaacgtttagctttttagttagctctataaaaatcgatttgttaaaaaccat

SEQ ID NO: 19661 - DNA, 453 bp, Zea Mays
tgaagcttacatcaccgatatcttttgcttacgacgaggccgaggccgaggccaggtccagggatgcagcagtgcagatgagcccgaacccgagccccacccagctcttcctcccctagcagccagctatcgctagcttcgcacagccaccaataagccccccctcccccgcggcggcatctctctccagctcgctcgctcgctcgtgattcacccgcaggagccacccaggcacgagggcctatctcttcccctcgatcggcagacagacgacggaagtggccgcgacccgggtgccggccttgtctttcggctttcgcgcgcggcgtggacgatgtgtgaccttgacatggcgatgcgggtggagaacaacgggcgcccccgtcaagggacagctagtggcgttcggtgttacgtagacatatcgtcaagtcaacactgaatttattgctt

SEQ ID NO: 19662 - DNA, 3901 bp, Zea Mays
cccgcgacctgccccctgccccctgcccctgacacgggcacccagcccaccctgccctgccgctgccttgcctgccctcgcttcggcgctttctccagtgagccgcgcccgcactgccgctgccgctaattaaccacaagcggccgtcgccttccccccctcccctcctcaaaaaaggcggagaggtggtggtgctcgtgggcacgcagtggagcacccagtacagcagcagcgctgcggcagtggagttaggagcttagcactccgcctccgttcccatcccgcgcgcagccgtcggccgagcctgctcagtgcccatcatggtgaggaagaagagaactggccctggcggctctggagaaacttctggagagtcttcaggagcttctggacaaggttcctcacagcggcctgaacggactcaacaacctggggcaggacgtggctgggtgcctcagcagggtggccgtggtggcgggcaacaccagggtcgtggtggacattatcaaggccgtggagggccaggtccacatcaccctggtggactgcctgagtatcaccagcgtgaataccagggacgaggtggtgagtaccagggacagtaccaggggcgtggtggtgcccgctccagaggtggaatttcacagccatactatggtgggcataggggaggtagtgttggacgaaatgttcctccaggtccatccagaacagttcccgagctgcaccaagccccatacgtccagtatcaagccccggtgatttcaccatccccatcgggacctggctcatcctcacagcctatggcagaggtgagctctggacaagtccagcaacagtttgagcaacttgccattcatggtcagagttccatgagtcaagaagttcaagtggcaccagcatcaagcaaatcggttcgattcccattacgccccggcaagggcacttatggggacaggtgcattgtgaaggcgaatcatttttttgctgagcttcctgacaaagaccttcaccaatatgatgtaactataacacctgaagttacttcacgtggcgttaatcgtgctgtcatgggagagcttgtaacactatatagacaatcccatttgggcgggcgtctacctgcgtacgatggaagaaagagcctttataccgctggaccattgccttttacttctatgacatttgaaattaccttgcaagatgaggaagatagtgttggcggtggccagggcggacaaaggcgcgagagagtatttagggtggtgatcaaatttgcggcccgtgctgatctccatcatctggctatgtttctagctggaaggcaagcagacgctcctcaagaagctcttcaagtgcttgacattgtactacgtgaattgcctactgcgaggtattctcctgttggtaggtcattttattctcccaacttagggagacgtcagcaacttggtgagggtttggaaagttggcgcggtttttaccaaagcataaggccgacacagatgggcctttcactgaatattgatatgtcctctactgcatttatcgagcctctccctgtgattgattttgttgctcagcttcttaatagagatatttcagttaggccattgtctgattctgatcgcgtgaagatcaaaaaagccttaagaggtgtgaaggttgaggtcactcacaggggaaacatgcgcagaaagtatcgcatttctggcctcacctcacaagcaacaagagagctatcattccctgttgatgatcgtggtactgtgaagactgtggtccaatacttcatggagacttatggttttagcatccagcacaccactttaccgtgcttgcaagtgggcaatcaacaaagaccaaattatctgcctatggaggtttgcaagatagttgaaggacagcgttactcaaagcgactcaatgagaaacaaatcactgctttactgaaagtgacctgccagcgccctcaagagcgtgagctggacattttacagactgtgcatcacaatgcgtactatgaagacccgtatgcacaggaatttggtataagaattgatgaacgccttgctgcagttgaagctcgtgttctgccaccaccaaggcttaaataccatgatagtggccgagagaaggatgttttgcccagagttggccaatggaacatgatgaataagaaaatggtaaatggtggcagagtcagcaactgggcatgtattaacttctctcggaatgtgcaagatagtgccgctaggggtttctgtcatgaactggcaatcatgtgccaaatatcaggaatggatttttcccttgagcctgtgctgcctccagtgactgcaaggccagaacatgttgaaagagcgttgaaggcacgttatcaagatgcaatgaacatactgaggccacaggggagggaacttgatctgctgattgtaatactgcctgacattaatggttccttatatggggatctcaaaaggatctgtgagactgatctcggattggtctcccagtgttgtctgactaaacatgtttttaagatgagcaagcagtatcttgcaaatgttgcactcaaaataaatgttaaggttggtggaaggaatactgtacttgtagatgctttgacaaggagaatcccccttgtcagtgacagaccgaccataatatttggtgctgatgttacccatccacatcctggagaagattccagtccttccattgcagctgtggttgcttcgcaagactggcctgaggtcaccaaatatgctggactagtgagtgcccaagcccatcgccaggagctgatacaggatcttttcaaagtatggcaagatccacagagaaggacagtaactggtggcatgataaaggaacttctcatttctttcaagagagcaactggacagaagccccagaggatcatattctacagggatggtgtcagtgagggacagttctatcaagtattgttgtatgaacttgatgccatcagaaaggcatgtgcatccttggagcccaactaccagcctccagttacttttgtcgtggtgcagaaacgacatcacactaggctgtttgctaataaccacaacgatcagcgtacagttgatagaagcggaaacatactgcctggcaccgtggttgattcgaagatttgccatcctactgaatttgatttctacctgtgtagccatgctggcattcagggaacaagccgccctgctcattaccatgtcctgtgggacgagaacaagttcacagctgatgagctgcagactctgacaaacaacctatgctacacgtacgctaggtgcacccgctccgtgtcaattgtgcccccggcatactatgctcatctggcagccttccgagctcgcttctacatggagccagatacctctgacagtggctcaatggccagtggtgcccgtggccctccaccaggtgcggcacgcagcatgagaggagcggggagtgttgcggtcaggcccctacctgctctcaaggaaaacgtgaagcgtgtcatgttttactgctgagatgctgagctaccttcaccaagaaaatatcctgacttgttccatgtacccgcactgtttcggtgatactatctgacaccgaatttatgcattaagtcttccagtggtctggagattttaagtaacgcctgtttttattcgtgagttgtaacgctgcagttcgaggagcttcagtgctgtatgatgtgtaaactatttgttgtaagttgtaaccaattgttgtaagttgtaaccagccactatgttataatcctgtttgtttcagctttttacagtttctcgctaccaaaagctgttgtgaactgtcaaacgtttagctttttagttagctctataaaaatcgatttgttaaaaaccat

SEQ ID NO: 19663 - DNA, 3057 bp, Zea Mays
cacaagcggccgtcgccttccccccctcccctcctcaaaaaaggcggagaggtggtggtgctcgtgggcacgcagtggagcacccagtacagcagcagcgctgcggcagtggagttaggagcttagcactccgcctccgttcccatcccgcgcgcagccgtcggccgagcctgctcaggtaactataacacctgaagttacttcacgtggcgttaatcgtgctgtcatgggagagcttgtaacactatatagacaatcccatttgggcgggcgtctacctgcgtacgatggaagaaagagcctttataccgctggaccattgccttttacttctatgacatttgaaattaccttgcaagatgaggaagatagtgttggcggtggccagggcggacaaaggcgcgagagagtatttagggtggtgatcaaatttgcggcccgtgctgatctccatcatctggctatgtttctagctggaaggcaagcagacgctcctcaagaagctcttcaagtgcttgacattgtactacgtgaattgcctactgcgaggtattctcctgttggtaggtcattttattctcccaacttagggagacgtcagcaacttggtgagggtttggaaagttggcgcggtttttaccaaagcataaggccgacacagatgggcctttcactgaatattgatatgtcctctactgcatttatcgagcctctccctgtgattgattttgttgctcagcttcttaatagagatatttcagttaggccattgtctgattctgatcgcgtgaagatcaaaaaagccttaagaggtgtgaaggttgaggtcactcacaggggaaacatgcgcagaaagtatcgcatttctggcctcacctcacaagcaacaagagagctatcattccctgttgatgatcgtggtactgtgaagactgtggtccaatacttcatggagacttatggttttagcatccagcacaccactttaccgtgcttgcaagtgggcaatcaacaaagaccaaattatctgcctatggaggtttgcaagatagttgaaggacagcgttactcaaagcgactcaatgagaaacaaatcactgctttactgaaagtgacctgccagcgccctcaagagcgtgagctggacattttacagactgtgcatcacaatgcgtactatgaagacccgtatgcacaggaatttggtataagaattgatgaacgccttgctgcagttgaagctcgtgttctgccaccaccaaggcttaaataccatgatagtggccgagagaaggatgttttgcccagagttggccaatggaacatgatgaataagaaaatggtaaatggtggcagagtcagcaactgggcatgtattaacttctctcggaatgtgcaagatagtgccgctaggggtttctgtcatgaactggcaatcatgtgccaaatatcaggaatggatttttcccttgagcctgtgctgcctccagtgactgcaaggccagaacatgttgaaagagcgttgaaggcacgttatcaagatgcaatgaacatactgaggccacaggggagggaacttgatctgctgattgtaatactgcctgacattaatggttccttatatggggatctcaaaaggatctgtgagactgatctcggattggtctcccagtgttgtctgactaaacatgtttttaagatgagcaagcagtatcttgcaaatgttgcactcaaaataaatgttaaggttggtggaaggaatactgtacttgtagatgctttgacaaggagaatcccccttgtcagtgacagaccgaccataatatttggtgctgatgttacccatccacatcctggagaagattccagtccttccattgcagctgtggttgcttcgcaagactggcctgaggtcaccaaatatgctggactagtgagtgcccaagcccatcgccaggagctgatacaggatcttttcaaagtatggcaagatccacagagaaggacagtaactggtggcatgataaaggaacttctcatttctttcaagagagcaactggacagaagccccagaggatcatattctacagggatggtgtcagtgagggacagttctatcaagtattgttgtatgaacttgatgccatcagaaaggcatgtgcatccttggagcccaactaccagcctccagttacttttgtcgtggtgcagaaacgacatcacactaggctgtttgctaataaccacaacgatcagcgtacagttgatagaagcggaaacatactgcctggcaccgtggttgattcgaagatttgccatcctactgaatttgatttctacctgtgtagccatgctggcattcagggaacaagccgccctgctcattaccatgtcctgtgggacgagaacaagttcacagctgatgagctgcagactctgacaaacaacctatgctacacgtacgctaggtgcacccgctccgtgtcaattgtgcccccggcatactatgctcatctggcagccttccgagctcgcttctacatggagccagatacctctgacagtggctcaatggccagtggtgcccgtggccctccaccaggtgcggcacgcagcatgagaggagcggggagtgttgcggtcaggcccctacctgctctcaaggaaaacgtgaagcgtgtcatgttttactgctgagatgctgagctaccttcaccaagaaaatatcctgacttgttccatgtacccgcactgtttcggtgatactatctgacaccgaatttatgcattaagtcttccagtggtctggagattttaagtaacgcctgtttttattcgtgagttgtaacgctgcagttcgaggagcttcagtgctgtatgatgtgtaaactatttgttgtaagttgtaaccaattgttgtaagttgtaaccagccactatgttataatcctgtttgtttcagctttttacagtttctcgctaccaaaagctgttgtgaactgtcaaacgtttagctttttagttagctctataaaaatcgatttgttaaaaaccat

SEQ ID NO: 19664 - DNA, 3806 bp, Zea Mays
ggagcttagcactccgcctccgttcccatcccgcgcgcagccgtcggccgagcctgctcaggtattgctccctcgcgtaatctactagatctgctgcttttcgcatgctgcctcagtgcggtgtgcgtagcttcagctttcgatcgtttccgttccggggtgggttgctgcgttgcagcggtgtccggtgttggtgtttcaagtgaacgagctcgagtgcccatcatggtgaggaagaagagaactggccctggcggctctggagaaacttctggagagtcttcaggagcttctggacaaggttcctcacagcggcctgaacggactcaacaacctggggcaggacgtggctgggtgcctcagcagggtggccgtggtggcgggcaacaccagggtcgtggtggacattatcaaggccgtggagggccaggtccacatcaccctggtggactgcctgagtatcaccagcgtgaataccagggacgaggtggtgagtaccagggacagtaccaggggcgtggtggtgcccgctccagaggtggaatttcacagccatactatggtgggcataggggaggtagtgttggacgaaatgttcctccaggtccatccagaacagttcccgagctgcaccaagccccatacgtccagtatcaagccccggtgatttcaccatccccatcgggacctggctcatcctcacagcctatggcagaggtgagctctggacaagtccagcaacagtttgagcaacttgccattcatggtcagagttccatgagtcaagaagttcaagtggcaccagcatcaagcaaatcggttcgattcccattacgccccggcaagggcacttatggggacaggtgcattgtgaaggcgaatcatttttttgctgagcttcctgacaaagaccttcaccaatatgatgtaactataacacctgaagttacttcacgtggcgttaatcgtgctgtcatgggagagcttgtaacactatatagacaatcccatttgggcgggcgtctacctgcgtacgatggaagaaagagcctttataccgctggaccattgccttttacttctatgacatttgaaattaccttgcaagatgaggaagatagtgttggcggtggccagggcggacaaaggcgcgagagagtatttagggtggtgatcaaatttgcggcccgtgctgatctccatcatctggctatgtttctagctggaaggcaagcagacgctcctcaagaagctcttcaagtgcttgacattgtactacgtgaattgcctactgcgaggtattctcctgttggtaggtcattttattctcccaacttagggagacgtcagcaacttggtgagggtttggaaagttggcgcggtttttaccaaagcataaggccgacacagatgggcctttcactgaatattgatatgtcctctactgcatttatcgagcctctccctgtgattgattttgttgctcagcttcttaatagagatatttcagttaggccattgtctgattctgatcgcgtgaagatcaaaaaagccttaagaggtgtgaaggttgaggtcactcacaggggaaacatgcgcagaaagtatcgcatttctggcctcacctcacaagcaacaagagagctatcattccctgttgatgatcgtggtactgtgaagactgtggtccaatacttcatggagacttatggttttagcatccagcacaccactttaccgtgcttgcaagtgggcaatcaacaaagaccaaattatctgcctatggaggtttgcaagatagttgaaggacagcgttactcaaagcgactcaatgagaaacaaatcactgctttactgaaagtgacctgccagcgccctcaagagcgtgagctggacattttacagactgtgcatcacaatgcgtactatgaagacccgtatgcacaggaatttggtataagaattgatgaacgccttgctgcagttgaagctcgtgttctgccaccaccaaggcttaaataccatgatagtggccgagagaaggatgttttgcccagagttggccaatggaacatgatgaataagaaaatggtaaatggtggcagagtcagcaactgggcatgtattaacttctctcggaatgtgcaagatagtgccgctaggggtttctgtcatgaactggcaatcatgtgccaaatatcaggaatggatttttcccttgagcctgtgctgcctccagtgactgcaaggccagaacatgttgaaagagcgttgaaggcacgttatcaagatgcaatgaacatactgaggccacaggggagggaacttgatctgctgattgtaatactgcctgacattaatggttccttatatggggatctcaaaaggatctgtgagactgatctcggattggtctcccagtgttgtctgactaaacatgtttttaagatgagcaagcagtatcttgcaaatgttgcactcaaaataaatgttaaggttggtggaaggaatactgtacttgtagatgctttgacaaggagaatcccccttgtcagtgacagaccgaccataatatttggtgctgatgttacccatccacatcctggagaagattccagtccttccattgcagctgtggttgcttcgcaagactggcctgaggtcaccaaatatgctggactagtgagtgcccaagcccatcgccaggagctgatacaggatcttttcaaagtatggcaagatccacagagaaggacagtaactggtggcatgataaaggaacttctcatttctttcaagagagcaactggacagaagccccagaggatcatattctacagggatggtgtcagtgagggacagttctatcaagtattgttgtatgaacttgatgccatcagaaaggcatgtgcatccttggagcccaactaccagcctccagttacttttgtcgtggtgcagaaacgacatcacactaggctgtttgctaataaccacaacgatcagcgtacagttgatagaagcggaaacatactgcctggcaccgtggttgattcgaagatttgccatcctactgaatttgatttctacctgtgtagccatgctggcattcagggaacaagccgccctgctcattaccatgtcctgtgggacgagaacaagttcacagctgatgagctgcagactctgacaaacaacctatgctacacgtacgctaggtgcacccgctccgtgtcaattgtgcccccggcatactatgctcatctggcagccttccgagctcgcttctacatggagccagatacctctgacagtggctcaatggccagtggtgcccgtggccctccaccaggtgcggcacgcagcatgagaggagcggggagtgttgcggtcaggcccctacctgctctcaaggaaaacgtgaagcgtgtcatgttttactgctgagatgctgagctaccttcaccaagaaaatatcctgacttgttccatgtacccgcactgtttcggtgatactatctgacaccgaatttatgcattaagtcttccagtggtctggagattttaagtaacgcctgtttttattcgtgagttgtaacgctgcagttcgaggagcttcagtgctgtatgatgtgtaaactatttgttgtaagttgtaaccaattgttgtaagttgtaaccagccactatgttataatcctgtttgtttcagctttttacagtttctcgctaccaaaagctgttgtgaactgtcaaacgtttagctttttagttagctctataaaaatcgatttgttaaaaaccat

SEQ ID NO: 19665 - DNA, 1759 bp, Zea Mays
ctacgaagaacctctgaactatctggggtgccccccagaaaatggtaaatggtggcagagtcagcaactgggcatgtattaacttctctcggaatgtgcaagatagtgccgctaggggtttctgtcatgaactggcaatcatgtgccaaatatcaggaatggatttttcccttgagcctgtgctgcctccagtgactgcaaggccagaacatgttgaaagagcgttgaaggcacgttatcaagatgcaatgaacatactgaggccacaggggagggaacttgatctgctgattgtaatactgcctgacattaatggttccttatatggggatctcaaaaggatctgtgagactgatctcggattggtctcccagtgttgtctgactaaacatgtttttaagatgagcaagcagtatcttgcaaatgttgcactcaaaataaatgttaaggttggtggaaggaatactgtacttgtagatgctttgacaaggagaatcccccttgtcagtgacagaccgaccataatatttggtgctgatgttacccatccacatcctggagaagattccagtccttccattgcagctgtggttgcttcgcaagactggcctgaggtcaccaaatatgctggactagtgagtgcccaagcccatcgccaggagctgatacaggatcttttcaaagtatggcaagatccacagagaaggacagtaactggtggcatgataaaggaacttctcatttctttcaagagagcaactggacagaagccccagaggatcatattctacagggatggtgtcagtgagggacagttctatcaagtattgttgtatgaacttgatgccatcagaaaggcatgtgcatccttggagcccaactaccagcctccagttacttttgtcgtggtgcagaaacgacatcacactaggctgtttgctaataaccacaacgatcagcgtacagttgatagaagcggaaacatactgcctggcaccgtggttgattcgaagatttgccatcctactgaatttgatttctacctgtgtagccatgctggcattcagggaacaagccgccctgctcattaccatgtcctgtgggacgagaacaagttcacagctgatgagctgcagactctgacaaacaacctatgctacacgtacgctaggtgcacccgctccgtgtcaattgtgcccccggcatactatgctcatctggcagccttccgagctcgcttctacatggagccagatacctctgacagtggctcaatggccagtggtgcccgtggccctccaccaggtgcggcacgcagcatgagaggagcggggagtgttgcggtcaggcccctacctgctctcaaggaaaacgtgaagcgtgtcatgttttactgctgagatgctgagctaccttcaccaagaaaatatcctgacttgttccatgtacccgcactgtttcggtgatactatctgacaccgaatttatgcattaagtcttccagtggtctggagattttaagtaacgcctgtttttattcgtgagttgtaacgctgcagttcgaggagcttcagtgctgtatgatgtgtaaactatttgttgtaagttgtaaccaattgttgtaagttgtaaccagccactatgttataatcctgtttgtttcagctttttacagtttctcgctaccaaaagctgttgtgaactgtcaaacgtttagctttttagttagctctataaaaatcgatttgttaaaaaccat

SEQ ID NO: 19666 - DNA, 3879 bp, Zea Mays
gccgtttccgcatgtcgcttatgcacagcatcgctgaagtagtaccaaacagaaaaggctcggaccattcccaagacatccagacgacggtatcagaaattcagagagcaagagcaacaaagtggcccagcactgagcccataaacccagctttacccaccagcaattaactaccaaatcacgtccctccacgagggcagctccatggtcgggggacagcgctcattccatcaatgatgcatgccaatagcaacttacccagggcgtgctaagaccttttccttcatggaaagggcaccaggacgccgcgcctccagataacagtgtttcttgtcagttcttggcttgtcaccttctcgggacagaaccatgcttggacgtacgctataaaacgatcatgtgcacggctaattttaatcagttgaaacttatcagatactaatgtatctacagaagtgcgtaaaacgtttttacacaaatggccagtaaaagcaatttcactagtgttgtacacagactaccggctcacgtgattacatttcttttcctcccactgaatacatttatttcctaccactgacaggtgttttcaacttgatcaaataccgatatagcatacctccagtcaatcaatcacgttccaacggatacagaaattcaaaattttcaatgacaaaaacttaggcccaatcagcataacatatggcctgtgatcccagccgaatcaagactgccagaagaaacttcatccctcccatctcaaaataaatcaacttttagagttgtcctaaatcaaattatttcagggtttgaccaaatttatataaaaatcacgggcatagtatcactaggtacatcatgaaatgtactgccataatctacttaattggtgtaataaatgtttcttctttcctacaaagttggtccaagttgattatagaagttgatttattttgagacgaaggtagtgtctgaaaactaaaagttgtgtaaaatacttctagtaagcaaagcagatcctcaggcaatattcagtggaaaaaagttcgaagtctttaccagcataaaatgcatttcttgtatttggcatagtatatgatcagggtttagattaaaagctaaaagattttttgtaaagcacaaggcaacaatccttatttttaaggtcaagaacaaaaatagaactgaccggtgaaaattatcgggatcaggatgtcatctgtgttttcaagtcgtccaactaattgcgattagtcaatctagtcgatttagggtggtcgattagagaagccgacccgatcagaacacctggtcgccgtggttgtccgactagtcgacgactagggacgattagtcgctcgatcaagcacttctgagcgaccagggtccgaagttgtctgcggaggtagtaagtgtttctttgttgttttgaacacctacattactttagggtcattggggagcgttactgtttttagttggatgaacaaatatcttctcttaatgagtattgcagaattcatgtcatgtttaccctttatatatatagttatatactctatactattgttatatactccctctgtcccaaaatctaattcattttagactaaatgtacattcattcattaatttattaatgtagtttgtatttatgtctatattcattatcattcgaatgaatgcagacgaaagagaagagggctaaaaccccaaaccctaaaccctaaaaccctgaccggtgagaattatcaggatcagggtgtcatctatgttttcaagtcgttcgactaattgcaattagtaggtctagtcggtttaggatggtcgattagggaagctgaccctatcagaacacctggtcgccctggttgtccgactagtcgacgactagggacaattagtcgctcgatcaagcggttctgagcgaccagggtccgaagttgcctgtagaggtagtaagtgtttctttgttgttttgaacacctgcattactttagggtcattggggagcgttactgtttcaattggatgaacaaatatcttctcttaatgagtattgcagaattcatgtcatgcttaccctttatatatagttatatactctatactattgttatatactccccctgccccaaaatataattcattttagactaaatgtacattcattcattaatttattaatgtagtttgtatttatgtctatattcattatcattcgaatgaatttagacgaaagaaaagagggctaaaaagaagttaaagaactatattttgagacggaggaagtattatgttatatactctatacatatatggtcttatataccataggtaaagccaggatttggatttagggagggggggccaaatcagattaggagggactgctaggaggtattttgcattatctacatggtgattagctaaaaaaatgaataccttctatgaaattaggtccctgtcttcgccactgttatataccatatatactctatacatatgtcttggatgaacacgacgactagaagacgacgagggtcgaccaaaggtcgattagtcgacctagtcatcgactagtcgagattagtcacctggtcggacccctaggtcgaccagctggtcgctcgaccagaaaacatagagtgtcatagaaacaaattataagatcacatttcagcatgggcattggaaaatcagaagaaagcattgtacagtagcagtataaaagtaaaatgcaagcacgatgctcctagtataaccgagaaaacatcgcactatcgcagcaaccaggttatttcttcatttaaggtcaagaaaagttcttgtgcattcatagatcactgcaggtgggctgtaagtgtgtaccaaagcctcaacaatgagctgcaagtatagatgaaggtgataggtcaatctagattatttcattttttcttgcttttgcgcattcatagatcactgcaggtggactgcaggtttgttccctttttcttgctttgacatctggattatttcattttgatgagttttgtgttgacccaaagacaacaaaagaaactactccctctagtttaaagcgttaactgagaagattaaaaaaaaagccaggataagatacaccaagcatctccacagccctcacgcttgctggagaggagtgccagatatggagtgtagcagaaaccaatgggcttccattatcacagcccctagctcagctagctaggatctctagtttgggtcatttttcaccttctaaactttaatggatgcaaatgtaatctgttttaagcgggtgtttgtgatatggcaagtacgccgaggagtgtacagtagtgaatacaggagatcctgatattgtgggagagagcgaaaaggatatagggctcggctaaaggtcagactgctgtcgcttacaggtgcagtgggtgccaggggaactgaagcaactcaccccaactaaggaaagcttctttttcgataatttcctagtatagactatggccatctttataaaagtagagtccgtattattcatctaactgatagctagtaaccgaggataagcctcacgtctaaaccgggataaggataggcctctccctcttattctctgccaagcaactaacagaacctaagcaaaactctcagctagccatggtggcgcctggcatactgtcgccccacaaatggggtccacaacatttctccccttgccgacaaaaagattgtctgcaagctctacgtttgggtagtgcaacttgaactccacctattcccatgatcattgcctcccaaatgcctctgttcaatctggcgcgcagcaccttttctggagttggtatcacacgaccacggagcaactctgaaagg

SEQ ID NO: 19667 - DNA, 3806 bp, Zea Mays
accaaacttgccatgccagcgcagtagccagtccagtgaacacaacgcagcgcagagcagaaaagggccaggaagccaccaaaacctgatccttaactgccctccgaacgccaactcatcccctcccccatcctcccctgccatcctcgacgccacgccatctctctctctgccctgccttgcgttgtcttggtcggtttcgtttcgatcccgctcctgaacagtacgtcggcaacttggagggggcgctgcctgcttcttcttcctcccgtgaagggaaggcggggtagccgatctcggcccgagttgatccggttgcgggggcttttctctcgcgtggtcctccagcgcgccgcgccgcgccgtgaatcgacaaccggccaccatgttcgtcaagaagctcgtggagagggcctccaagaagcaacatatcggcagcatcagctcccttcgccccgagaacgtcagcccgcggctagccttccactacggcgtccctgcggacgccgccctccttgcctacgaccccgttctccacgtgctcgccgtcgccaccaggaatggacagatcaagctgttcggccgcgacaacacgcaggcgttgctccagtccccctcccctctcccttccaggttcttgcagtttgccgagggccaaggggttctgctcaatgtcaatacccagaaccagatcgaggtttgggacattgatgcgaaaaaactctgttatctgcacccggctgaaaaggcgatcactgcattctctgtgctgcagaagagcttctacatatatgttggagatagttctggaagtgtgtccccattgaagcttgatttggctcagagatgtctagctgacctgccgtactggattccttttactgaatcttatggttccactaccagtgccggtaatgatgtggaagtagtatttgtttcaccccagcctttgtctgaatcgaacagggtgctcattatcttcagagatggggttatgagtttgtgggatattaaagctagcaaagcagtatccatatctggtaaaactacgcagcagcaatcacagaaggaggctaaaaatgtaacatcagcatgctgggtttgtgccaagggaagcaaaattgctatcggatacgataatggcgatttatacatttgggccattcctgaggttacaagtacacaaaattcctcatctatgggtggccagaatctacctattcagaggcttaacctaggatacaagctagacaagttgccaatagtctctttgcaatggatccctagcgatggaaaggcaggccgtttgtatatcaatggtttcaatgatcatggacacctatttcaggttctgattctgaatgaagagagtgagtcgcgaattgtaaagatggttttgcctatcgctgaatcttgccaaggaatggaacttgttacagggcttagtgacccaaataagcacagacaaagtgcccttgcactcttgttgaaatctggtcacatctgtttatatgatgattcagaaattgagcgctatctccttcactctcagtctagatcccctccaacacttccaaactgttcatatgtgaagcttccttatggtgattcaggcatcagtgttgcaaagttctatacaagtaaccctgcagcgttagcttctttggacgaggattatttttcatcagctaccaaatatccatgtctgttttcaatgaagggtaaaggtcagactttaacaagttttaccaacattcataagacccggaacctctatataactggacatctagatggaaccataagcttttgggatgcatcttgtcctcatttgctgcagatttttatgataaagcagcagaataaagacgatacatcaactggtaaccctatcacatcattacagtttgatatgtcctctagcattctattgtctggagaaaggagtggaatggtccatattatcacattcaaaaaggactccagcgacaacatattctcctttttaaatgcaaagcaaggagacaactatgatgtcagaagtataaagctcaaaggtgctgtaaccacaatgtcttctatctcaaaatcaaagcattttgctgttgggacagaaaaaggaattgtatcagttatcaacgtagaagatgctacaatattatatcaagaacagtttgagtgtcgactgcctggtggaatcgcctctttgcaatttgaaatctatagccataatggatatgacaaggacattttgataatagcgatggaagattcatctatttttgttatcgaggaagaaacggggaaacttttgaaccccaacccagttcagacagacaaaccctctaaagccatccttctgcagatgttggagttatcgcccattgacacaccagcagtttcagataaccaagatacagtatcgaaggaatcattgctgctactttgcactgaaaatgcgatccgtttgttttccttgggccacgcaattcagggcacaaagaagataatcaataagaagaaattgagcagctgttgttgtttcgcctctcttattcatagttcttctaatgacattggacttatactcgtcttctccaatgggaaacttgaaataagatccctgccagacttgtccttgttgaaggatgcctttttacgaggttttgtgtactcaagaaacttgaattcaagtagttccataacatgttcatctgatggagaagccatcttgattaatggagaagagacctattttttctctacgctctgccaggatgagatatacaggcacgtagacagcattagtacagtgtacagaaaagagaactcaaccagggaagactcttcttttgtagtgaaatctcctaaagaaaagaaaaagggtctgtttggaatgattatgaaagataacaaaggaagcaaatcaaaagaaagtgatgcaattggcagcgaacaatgtattgcaacgacttctgaagagctggcttcaatattttcatcaactaactttgctccgccatctgagggaaggaacagttcactacgagatgatgaaaatgccgagctggacatagatgatatcgacattgatgacaacccacagaagccaaaaggtccacatttccctggtctaagcaaagataaaatcagcaagggactccaaacccttaaaggaaagttgaagcccaagactgaagaaaagataagctcgggaaacaaaaaaactgaagatgaaacatcagtgagtcaagtcgatcagataaagatgaagtatggatatgcaaatacaacaaatgatgactcaaccagtgtcacaaaaatgattgggaacaagctgcaggaaaacatgaaaaagttggagggcattaaccttcgagctgccgatatggcgagcggcgcccagtcattctccacaatggcaaaagagctactccggacaacaaagaacgagaaggggacctcataatcacctacaccaatttcccctcctttgtatagttcgtcttttcctttttttttcatccctggatcgtggatctgacgatctggacctccccgttgtcagactctaaatagtgaatggagtgtaagtgactgaagtaccctttacatcttggtatagggtaacagcagggacttcacatagttattttttgccgcggcaatgtcgactctaccgtctacactcgaatgaggattgataccaaatatttgttataaagaaaggtgttttcaaaggtaacacgaagaagcttatgcctttttgaagggctctggctccgatttcacctgctaaggctgag

SEQ ID NO: 19668 - DNA, 3775 bp, Zea Mays
aactcatcccctcccccatcctcccctgccatcctcgacgccacgccatctctctctctgccctgccttgcgttgtcttggtcggtttcgtttcgatcccgctcctgaacagtacgtcggcaacttggagggggcgctgcctgcttcttcttcctcccgtgaagggaaggcggggtagccgatctcggcccgagttgatccggttgcgggggcttttctctcgcgtggtcctccagcgcgccgcgccgcgccgtgaatcgacaaccggccaccatgttcgtcaagaagctcgtggagagggcctccaagaagcaacatatcggcagcatcagctcccttcgccccgagaacgtcagcccgcggctagccttccactacggcgtccctgcggacgccgccctccttgcctacgaccccgttctccacgtgctcgccgtcgccaccaggaatggacagatcaagctgttcggccgcgacaacacgcaggcgttgctccagtccccctcccctctcccttccaggttcttgcagtttgccgagggccaaggggttctgctcaatgtcaatacccagaaccagatcgaggtttgggacattgatgcgaaaaaactctgttatctgcacccggctgaaaaggcgatcactgcattctctgtgctgcagaagagcttctacatatatgttggagatagttctggaagtgtgtccccattgaagcttgatttggctcagagatgtctagctgacctgccgtactggattccttttactgaatcttatggttccactaccagtgccggtaatgatgtggaagtagtatttgtttcaccccagcctttgtctgaatcgaacagggtgctcattatcttcagagatggggttatgagtttgtgggatattaaagctagcaaagcagtatccatatctggtaaaactacgcagcagcaatcacagaaggaggctaaaaatgtaacatcagcatgctgggtttgtgccaagggaagcaaaattgctatcggatacgataatggcgatttatacatttgggccattcctgaggttacaagtacacaaaattcctcatctatgggtggccagaatctacctattcagaggcttaacctaggatacaagctagacaagttgccaatagtctctttgcaatggatccctagcgatggaaaggcaggccgtttgtatatcaatggtttcaatgatcatggacacctatttcaggttctgattctgaatgaagagagtgagtcgcgaattgtaaagatggttttgcctatcgctgaatcttgccaaggaatggaacttgttacagggcttagtgacccaaataagcacagacaaagtgcccttgcactcttgttgaaatctggtcacatctgtttatatgatgattcagaaattgagcgctatctccttcactctcagtctagatcccctccaacacttccaaactgttcatatgtgaagcttccttatggtgattcaggcatcagtgttgcaaagttctatacaagtaaccctgcagcgttagcttctttggacgaggattatttttcatcagctaccaaatatccatgtctgttttcaatgaagggtaaaggtcagactttaacaagttttaccaacattcataagacccggaacctctatataactggacatctagatggaaccataagcttttgggatgcatcttgtcctcatttgctgcagatttttatgataaagcagcagaataaagacgatacatcaactggtaaccctatcacatcattacagtttgatatgtcctctagcattctattgtctggagaaaggagtggaatggtccatattatcacattcaaaaaggactccagcgacaacatattctcctttttaaatgcaaagcaaggagacaactatgatgtcagaagtataaagctcaaaggtgctgtaaccacaatgtcttctatctcaaaatcaaagcattttgctgttgggacagaaaaaggaattgtatcagttatcaacgtagaagatgctacaatattatatcaagaacagtttgagtgtcgactgcctggtggaatcgcctctttgcaatttgaaatctatagccataatggatatgacaaggacattttgataatagcgatggaagattcatctatttttgttatcgaggaagaaacggggaaacttttgaaccccaacccagttcagacagacaaaccctctaaagccatccttctgcagatgttggagttatcgcccattgacacaccagcagtttcagataaccaagatacagtatcgaaggaatcattgctgctactttgcactgaaaatgcgatccgtttgttttccttgggccacgcaattcagggcacaaagaagataatcaataagaagaaattgagcagctgttgttgtttcgcctctcttattcatagttcttctaatgacattggacttatactcgtcttctccaatgggaaacttgaaataagatccctgccagacttgtccttgttgaaggatgcctttttacgaggttttgtgtactcaagaaacttgaattcaagtagttccataacatgttcatctgatggagaagccatcttgattaatggagaagagacctattttttctctacgctctgccaggatgagatatacaggcacgtagacagcattagtacagtgtacagaaaagagaactcaaccagggaagactcttcttttgtagtgaaatctcctaaagaaaagaaaaagggtctgtttggaatgattatgaaagataacaaaggaagcaaatcaaaagaaagtgatgcaattggcagcgaacaatgtattgcaacgacttctgaagagctggcttcaatattttcatcaactaactttgctccgccatctgagggaaggaacagttcactacgagatgatgaaaatgccgagctggacatagatgatatcgacattgatgacaacccacagaagccaaaaggtccacatttccctggtctaagcaaagataaaatcagcaagggactccaaacccttaaaggaaagttgaagcccaagactgaagaaaagataagctcgggaaacaaaaaaactgaagatgaaacatcagtgagtcaagtcgatcagataaagatgaagtatggatatgcaaatacaacaaatgatgactcaaccagtgtcacaaaaatgattgggaacaagctgcaggaaaacatgaaaaagttggagaaatatagaatgcttgctactgtcacctgataaaagaagcaacagacggacagttaacgtggaccagtgtgctttcttcagggcattaaccttcgagctgccgatatggcgagcggcgcccagtcattctccacaatggcaaaagagctactccggacaacaaagaacgagaaggggacctcataatcacctacaccaatttcccctcctttgtatagttcgtcttttcctttttttttcatccctggatcgtggatctgacgatctggacctccccgttgtcagactctaaatagtgaatggagtgtaagtgactgaagtaccctttacatcttggtatagggtaacagcagggacttcacatagttattttttgccgcggcaatgtcgactctaccgtctacactcgaatgaggattgataccaaatatttgttataaagaaaggtgttttcaaaggtaacacgaagaagcttatgcctttttgaagggctctggctccgatttcacctgctaaggctgag

SEQ ID NO: 19669 - DNA, 3639 bp, Zea Mays
tctctctctctgccctgccttgcgttgtcttggtcggtttcgtttcgatcccgctcctgaacagtacgtcggcaacttggagggggcgctgcctgcttcttcttcctcccgtgaagggaaggcggggtagccgatctcggcccgagttgatccggttgcgggggcttttctctcgcgtggtcctccagcgcgccgcgccgcgccgtgaatcgacaaccggccaccatgttcgtcaagaagctcgtggagagggcctccaagaagcaacatatcggcagcatcagctcccttcgccccgagaacgtcagcccgcggctagccttccactacggcgtccctgcggacgccgccctccttgcctacgaccccgttctccacgtgctcgccgtcgccaccaggaatggacagatcaagctgttcggccgcgacaacacgcaggcgttgctccagtccccctcccctctcccttccaggttcttgcagtttgccgagggccaaggggttctgctcaatgtcaatacccagaaccagatcgaggtttgggacattgatgcgaaaaaactctgttatctgcacccggctgaaaaggcgatcactgcattctctgtgctgcagaagagcttctacatatatgttggagatagttctggaagtgtgtccccattgaagcttgatttggctcagagatgtctagctgacctgccgtactggattccttttactgaatcttatggttccactaccagtgccggtaatgatgtggaagtagtatttgtttcaccccagcctttgtctgaatcgaacagggtgctcattatcttcagagatggggttatgagtttgtgggatattaaagctagcaaagcagtatccatatctggtaaaactacgcagcagcaatcacagaaggaggctaaaaatgtaacatcagcatgctgggtttgtgccaagggaagcaaaattgctatcggatacgataatggcgatttatacatttgggccattcctgaggttacaagtacacaaaattcctcatctatgggtggccagaatctacctattcagaggcttaacctaggatacaagctagacaagttgccaatagtctctttgcaatggatccctagcgatggaaaggcaggccgtttgtatatcaatggtttcaatgatcatggacacctatttcaggttctgattctgaatgaagagagtgagtcgcgaattgtaaagatggttttgcctatcgctgaatcttgccaaggaatggaacttgttacagggcttagtgacccaaataagcacagacaaagtgcccttgcactcttgttgaaatctggtcacatctgtttatatgatgattcagaaattgagcgctatctccttcactctcagtctagatcccctccaacacttccaaactgttcatatgtgaagcttccttatggtgattcaggcatcagtgttgcaaagttctatacaagtaaccctgcagcgttagcttctttggacgaggattatttttcatcagctaccaaatatccatgtctgttttcaatgaagggtaaaggtcagactttaacaagttttaccaacattcataagacccggaacctctatataactggacatctagatggaaccataagcttttgggatgcatcttgtcctcatttgctgcagatttttatgataaagcagcagaataaagacgatacatcaactggtaaccctatcacatcattacagtttgatatgtcctctagcattctattgtctggagaaaggagtggaatggtccatattatcacattcaaaaaggactccagcgacaacatattctcctttttaaatgcaaagcaaggagacaactatgatgtcagaagtataaagctcaaaggtgctgtaaccacaatgtcttctatctcaaaatcaaagcattttgctgttgggacagaaaaaggaattttatcaacgtagaagatgctacaatattatatcaagaacagtttgagtgtcgactgcctggtggaatcgcctctttgcaatttgaaatctatagccataatggatatgacaaggacattttgataatagcgatggaagattcatctatttttgttatcgaggaagaaacggggaaacttttgaaccccaacccagttcagacagacaaaccctctaaagccatccttctgcagatgttggagttatcgcccattgacacaccagcagtttcagataaccaagatacagtatcgaaggaatcattgctgctactttgcactgaaaatgcgatccgtttgttttccttgggccacgcaattcagggcacaaagaagataatcaataagaagaaattgagcagctgttgttgtttcgcctctcttattcatagttcttctaatgacattggacttatactcgtcttctccaatgggaaacttgaaataagatccctgccagacttgtccttgttgaaggatgcctttttacgaggttttgtgtactcaagaaacttgaattcaagtagttccataacatgttcatctgatggagaagccatcttgattaatggagaagagacctattttttctctacgctctgccaggatgagatatacaggcacgtagacagcattagtacagtgtacagaaaagagaactcaaccagggaagactcttcttttgtagtgaaatctcctaaagaaaagaaaaagggtctgtttggaatgattatgaaagataacaaaggaagcaaatcaaaagaaagtgatgcaattggcagcgaacaatgtattgcaacgacttctgaagagctggcttcaatattttcatcaactaactttgctccgccatctgagggaaggaacagttcactacgagatgatgaaaatgccgagctggacatagatgatatcgacattgatgacaacccacagaagccaaaaggtccacatttccctggtctaagcaaagataaaatcagcaagggactccaaacccttaaaggaaagttgaagcccaagactgaagaaaagataagctcgggaaacaaaaaaactgaagatgaaacatcagtgagtcaagtcgatcagataaagatgaagtatggatatgcaaatacaacaaatgatgactcaaccagtgtcacaaaaatgattgggaacaagctgcaggaaaacatgaaaaagttggagggcattaaccttcgagctgccgatatggcgagcggcgcccagtcattctccacaatggcaaaagagctactccggacaacaaagaacgagaaggggacctcataatcacctacaccaatttcccctcctttgtatagttcgtcttttcctttttttttcatccctggatcgtggatctgacgatctggacctccccgttgtcagactctaaatagtgaatggagtgtaagtgactgaagtaccctttacatcttggtatagggtaacagcagggacttcacatagttattttttgccgcggcaatgtcgactctaccgtctacactcgaatgaggattgataccaaatatttgttataaagaaaggtgttttcaaaggtaacacgaagaagcttatgcctttttgaagggctctggctccgatttcacctgctaaggctgag

SEQ ID NO: 19670 - DNA, 3405 bp, Zea Mays
gccatgtaggattgcttttagagcaacatatcggcagcatcagctcccttcgccccgagaacgtcagcccgcggctagccttccactacggcgtccctgcggacgccgccctccttgcctacgaccccgttctccacgtgctcgccgtcgccaccaggaatggacagatcaagctgttcggccgcgacaacacgcaggcgttgctccagtccccctcccctctcccttccaggttcttgcagtttgccgagggccaaggggttctgctcaatgtcaatacccagaaccagatcgaggtttgggacattgatgcgaaaaaactctgttatctgcacccggctgaaaaggcgatcactgcattctctgtgctgcagaagagcttctacatatatgttggagatagttctggaagtgtgtccccattgaagcttgatttggctcagagatgtctagctgacctgccgtactggattccttttactgaatcttatggttccactaccagtgccggtaatgatgtggaagtagtatttgtttcaccccagcctttgtctgaatcgaacagggtgctcattatcttcagagatggggttatgagtttgtgggatattaaagctagcaaagcagtatccatatctggtaaaactacgcagcagcaatcacagaaggaggctaaaaatgtaacatcagcatgctgggtttgtgccaagggaagcaaaattgctatcggatacgataatggcgatttatacatttgggccattcctgaggttacaagtacacaaaattcctcatctatgggtggccagaatctacctattcagaggcttaacctaggatacaagctagacaagttgccaatagtctctttgcaatggatccctagcgatggaaaggcaggccgtttgtatatcaatggtttcaatgatcatggacacctatttcaggttctgattctgaatgaagagagtgagtcgcgaattgtaaagatggttttgcctatcgctgaatcttgccaaggaatggaacttgttacagggcttagtgacccaaataagcacagacaaagtgcccttgcactcttgttgaaatctggtcacatctgtttatatgatgattcagaaattgagcgctatctccttcactctcagtctagatcccctccaacacttccaaactgttcatatgtgaagcttccttatggtgattcaggcatcagtgttgcaaagttctatacaagtaaccctgcagcgttagcttctttggacgaggattatttttcatcagctaccaaatatccatgtctgttttcaatgaagggtaaaggtcagactttaacaagttttaccaacattcataagacccggaacctctatataactggacatctagatggaaccataagcttttgggatgcatcttgtcctcatttgctgcagatttttatgataaagcagcagaataaagacgatacatcaactggtaaccctatcacatcattacagtttgatatgtcctctagcattctattgtctggagaaaggagtggaatggtccatattatcacattcaaaaaggactccagcgacaacatattctcctttttaaatgcaaagcaaggagacaactatgatgtcagaagtataaagctcaaaggtgctgtaaccacaatgtcttctatctcaaaatcaaagcattttgctgttgggacagaaaaaggaattgtatcagttatcaacgtagaagatgctacaatattatatcaagaacagtttgagtgtcgactgcctggtggaatcgcctctttgcaatttgaaatctatagccataatggatatgacaaggacattttgataatagcgatggaagattcatctatttttgttatcgaggaagaaacggggaaacttttgaaccccaacccagttcagacagacaaaccctctaaagccatccttctgcagatgttggagttatcgcccattgacacaccagcagtttcagataaccaagatacagtatcgaaggaatcattgctgctactttgcactgaaaatgcgatccgtttgttttccttgggccacgcaattcagggcacaaagaagataatcaataagaagaaattgagcagctgttgttgtttcgcctctcttattcatagttcttctaatgacattggacttatactcgtcttctccaatgggaaacttgaaataagatccctgccagacttgtccttgttgaaggatgcctttttacgaggttttgtgtactcaagaaacttgaattcaagtagttccataacatgttcatctgatggagaagccatcttgattaatggagaagagacctattttttctctacgctctgccaggatgagatatacaggcacgtagacagcattagtacagtgtacagaaaagagaactcaaccagggaagactcttcttttgtagtgaaatctcctaaagaaaagaaaaagggtctgtttggaatgattatgaaagataacaaaggaagcaaatcaaaagaaagtgatgcaattggcagcgaacaatgtattgcaacgacttctgaagagctggcttcaatattttcatcaactaactttgctccgccatctgagggaaggaacagttcactacgagatgatgaaaatgccgagctggacatagatgatatcgacattgatgacaacccacagaagccaaaaggtccacatttccctggtctaagcaaagataaaatcagcaagggactccaaacccttaaaggaaagttgaagcccaagactgaagaaaagataagctcgggaaacaaaaaaactgaagatgaaacatcagtgagtcaagtcgatcagataaagatgaagtatggatatgcaaatacaacaaatgatgactcaaccagtgtcacaaaaatgattgggaacaagctgcaggaaaacatgaaaaagttggagggcattaaccttcgagctgccgatatggcgagcggcgcccagtcattctccacaatggcaaaagagctactccggacaacaaagaacgagaaggggacctcataatcacctacaccaatttcccctcctttgtatagttcgtcttttcctttttttttcatccctggatcgtggatctgacgatctggacctccccgttgtcagactctaaatagtgaatggagtgtaagtgactgaagtaccctttacatcttggtatagggtaacagcagggacttcacatagttattttttgccgcggcaatgtcgactctaccgtctacactcgaatgaggattgataccaaatatttgttataaagaaaggtgttttcaaaggtaacacgaagaagcttatgcctttttgaagggctctggctccgatttcacctgctaaggctgag

SEQ ID NO: 19671 - DNA, 1744 bp, Zea Mays
caaatattggtatgtggttgctatgctacatgagtgaagtgaaactaaatggttacaaacaaggtatcagttatcaacgtagaagatgctacaatattatatcaagaacagtttgagtgtcgactgcctggtggaatcgcctctttgcaatttgaaatctatagccataatggatatgacaaggacattttgataatagcgatggaagattcatctatttttgttatcgaggaagaaacggggaaacttttgaaccccaacccagttcagacagacaaaccctctaaagccatccttctgcagatgttggagttatcgcccattgacacaccagcagtttcagataaccaagatacagtatcgaaggaatcattgctgctactttgcactgaaaatgcgatccgtttgttttccttgggccacgcaattcagggcacaaagaagataatcaataagaagaaattgagcagctgttgttgtttcgcctctcttattcatagttcttctaatgacattggacttatactcgtcttctccaatgggaaacttgaaataagatccctgccagacttgtccttgttgaaggatgcctttttacgaggttttgtgtactcaagaaacttgaattcaagtagttccataacatgttcatctgatggagaagccatcttgattaatggagaagagacctattttttctctacgctctgccaggatgagatatacaggcacgtagacagcattagtacagtgtacagaaaagagaactcaaccagggaagactcttcttttgtagtgaaatctcctaaagaaaagaaaaagggtctgtttggaatgattatgaaagataacaaaggaagcaaatcaaaagaaagtgatgcaattggcagcgaacaatgtattgcaacgacttctgaagagctggcttcaatattttcatcaactaactttgctccgccatctgagggaaggaacagttcactacgagatgatgaaaatgccgagctggacatagatgatatcgacattgatgacaacccacagaagccaaaaggtccacatttccctggtctaagcaaagataaaatcagcaagggactccaaacccttaaaggaaagttgaagcccaagactgaagaaaagataagctcgggaaacaaaaaaactgaagatgaaacatcagtgagtcaagtcgatcagataaagatgaagtatggatatgcaaatacaacaaatgatgactcaaccagtgtcacaaaaatgattgggaacaagctgcaggaaaacatgaaaaagttggagggcattaaccttcgagctgccgatatggcgagcggcgcccagtcattctccacaatggcaaaagagctactccggacaacaaagaacgagaaggggacctcataatcacctacaccaatttcccctcctttgtatagttcgtcttttcctttttttttcatccctggatcgtggatctgacgatctggacctccccgttgtcagactctaaatagtgaatggagtgtaagtgactgaagtaccctttacatcttggtatagggtaacagcagggacttcacatagttattttttgccgcggcaatgtcgactctaccgtctacactcgaatgaggattgataccaaatatttgttataaagaaaggtgttttcaaaggtaacacgaagaagcttatgcctttttgaagggctctggctccgatttcacctgctaaggctgag

SEQ ID NO: 19672 - DNA, 732 bp, Zea Mays
cgctgatcaggtagtcacacagccatccgtcgggctacttcagctaggctccttgtctcctttccctttccctcaaacgtcttcttggagatgcgatgcttcccgcacggcgcaagaggccaccgaggccaaggccgagccgcttcgcacacaactttctgacgccgatggtcgtgtaactgctttgggggcaagctacggaaactacaccatcacctaggccagcttctggacaacaatggggcccactgcacttccctggtggaacgtttagataatgccctgtgccgcattcgggatattgttgactttgatgttcatcggggagtcgtggtggcgttgatgatgggggagatttgctctggccgccatcttcagtatatcatcgaccctcctccatctctttcgaatgaggggcaggaagacctactagaaggttatgacgaggtggctagtcatgtttttcttagggtgtcggctcatgacgttgtgcatgatgcgcgctgatcacaatgtatcgtgccttactgccacatctctaaagtaataaagtgaactttgttccctagattgtcgtgttgtaggtgaaagggaaatagggttaaccttttcctataattaattttggtggttgatagtcaacaaaaacacatggactaactagtttgttctagaattcatatattacaggtgcataaggttcaacacaaaccaagaaagaaatcaagttag

SEQ ID NO: 19673 - DNA, 521 bp, Zea Mays
cttgaggaaatggttcgaccgacctacccttatcctgggttttcctcttatctctctcctggttagttcttggttcattttctagggcagcagttgcctctctccatgagcaaaggtgccatggcctcatgcctagccttcttcttcgctaagccttctagggcggacaacgaacatccttctaatggatttgtacggctttagagatggctaacactgagatatgatgtgttcgaccgcggctagcggtccttagagaccttaaggcccgaagcgttgggctttttcccatgcatagatcgagccacaagatttgttcgtgcttggggaagaatcatggatatcgtctccttgacattctggattgtgtttgcgaggccatggagctcggggttcaccggggcgtggcgatggctcttgctatcacacaacatcacttcagttgtaacctcagtgacgatatcagtcttcctgctaggtcaacgatggcagacttggacctcctagcaggtgaattttat

SEQ ID NO: 19674 - DNA, 536 bp, Zea Mays
  misc_feature (536)..(536): n is a, c, g, or t
caaaatcttatttggcatatgccaattctgaaacttgtctaattccaagccacatttgagaacttgcaccaccagttcagaagcatacaagagccaaccggaagcatatagatagcattactttagttgatatagctcagtacttccatcttccaatccgagatgcatcaaagacactcaagattggggtcagcatattgaagaggaaatgccgacagtatgggatacctcgttggcctcaccggaagatcaagtcacttgactctctcattcatgaccttgagttcgtgctagcaagagaggatgaggatgaggaggaggagaagcagctgcagaaggacaggctggctgctgcgataaacgccctcacaaaacggaagagcatgctggagagcgagaaggaaaccatacagcagaaaccggccatggacctgatggctgaaaccaagctattcagggaagatgttttcaagaggagatatagggccaaaagttcagtcatggatatggattagcatttctctttagctgataan

SEQ ID NO: 19675 - DNA, 2196 bp, Zea Mays
ccgtatccacatgtatactcctacgctacacgggccagcgcaaaagccaattggcgtcacgtcgtcgcctctgcggaaaccggcggtccacgggaaaggaaagaggaaacagggaggcgacgccgtcacaattcgttctcgcgatttgcccttctccacctccccgtccatgtcgcgggaaatcacgcgcggcgacgctggattcacttagatccaacagggtaatcggcacggggcagcctctccacccattcccgcagccggttgggcgagtcgtcggttcagataatagactgggcgtgtggatccaagaggtttgatccctttaatttggattgaagtgccagctttcggtcaggaaggtgatgctggatgatgctgacggactttgaaagcataccggttcaaagaagtgttgcctgtcaccatgaggctcaacgttgggctcctagtgcccttgatggcacaatactccgcacccacatgggctactttagttgctgggttcttcatgctgcttgcgctttcgctctccacgtacctgatatttgagcatctctcagcatacaacaatccagaggaacaaaaatttgtactgggtgttattctcatggtcccttgctatgcaattgagtcatgtatttctttgataaatccaagtacaagcgtttactgtggcatcctacgtgatggttatgaagcatttgcaatgtactgctttggaagatatattactgcatgtttaggtggggaagataaaacaatagcctttttaaagagggaaggtggctctggttctgggcagtctctactgcatcacacgtccgagaagggaatcatacaccatcattttcctgtaaattatgtattgaagccctggagactggggacgcggttctacctgattatcaaatttggaatcttccaatatgtgatcataaagaccctcacagccaccttatctcttcttctagaatcttttggtgtttattgtgatggagaattcaatttacgatgtacccttactttgctgctgttctcaactttagtcaatattgggccctgtactgtctagtagcatggtatacagccaccaaggacgaattggctcctataaagcctctggctaagtttctttctttcaaatcgatagtgttcttgacttggtggcaaggtgtggtgattgcaataatgtatgctttgggccttcttagaagccctttagcccagagcttggagttaaaatcaagcattcaagatttcattatttgcatagagatgggcattgcttcagttgttcacctctatgtgttcccagccaagccctatgcactcttaactaatcagtcacacggaaacatttctgtacttggggactatgtatcctctgagcccgtggacccttttgaaataaaggaaagcaaccggcctaccaaaatgaagcttccacagttggaaccagatgagagaagcgtgacaaacataaaagaaagtgttcgggactttgttgtcggcagtggtgaatatgtgatcaaagattttaagttcactgttaaccaagcagtgcgaccagtggagaagcgcattgataaattgatgaaaaagaatgataagagtaagaaaagccaggacgacaactgggtgagtgcagcaacaccagagaggcctgttcgtgggattgatgatccattattaagcggaagcgcaagtgacagtggtgtcacaaagggcagaaaatatcgcagagttgtgagctcagttactgctgtggacagctggggaggtggtgatcaagcttctgacggatatgagatcaggggtcgccgctgggctgtaaaaagctaacgatttacatagcgagatggtaaattcgaaccatatcgcgtggggggaaaaggacttttaggtttgcaactgtttctgcgatactggccatttaggagccttcgcaagttcagattgtctttgtataggtacttaggtagctgataatgatatgtaacctttttgcgtagattgtttaattttcttttctttttcttggtcgagtcgtactgacatttggtattgcaaaatttgaaagtacaatagtttttttcattctttggaaatggaaacagagttcagcgagtgtgtccatttggacggatttgtatagtttcgttacacgcttacatgcatctttgatctgaaaaa

SEQ ID NO: 19676 - DNA, 2192 bp, Zea Mays
tatactcctacgctacacgggccagcgcaaaagccaattggcgtcacgtcgtcgcctctgcggaaaccggcggtccacgggaaaggaaagaggaaacagggaggcgacgccgtcacaattcgttctcgcgatttgcccttctccacctccccgtccatgtcgcgggaaatcacgcgcggcgacgctggattcacttagatccaacagggtaatcggcacggggcagcctctccacccattcccgcagccggttgggcgagtcgtcggttcagataatagactgggcgtgtggatccaagaggtttgatccctttaatttggattgaagtgccagctttcggtcaggaaggtgatgctggatgatgctgacggactttgaaagcataccggttcaaagaagtgttgcctgtcaccatgaggctcaacgttgggctcctagtgcccttgatggcacaatactccgcacccacatgggctactttagttgctgggttcttcatgctgcttgcgctttcgctctccacgtacctgatatttgagcatctctcagcatacaacaatccagaggaacaaaaatttgtactgggtgttattctcatggtcccttgctatgcaattgagtcatgtatttctttgataaatccaagtacaagcgtttactgtggcatcctacgtgatggttatgaagcatttgcaatgtactgctttggaagatatattactgcatgtttaggtggggaagataaaacaatagcctttttaaagagggaaggtggctctggttctgggcagtctctactgcatcacacgtccgagaagggaatcatacaccatcattttcctgtaaattatgtattgaagccctggagactggggacgcggttctacctgattatcaaatttggaatcttccaatatgtgatcataaagaccctcacagccaccttatctcttcttctagaatcttttggtgtttattgtgatggagaattcaatttacgatgtgggtacccttactttgctgctgttctcaactttagtcaatattgggccctgtactgtctagtagcatggtatacagccaccaaggacgaattggctcctataaagcctctggctaagtttctttctttcaaatcgatagtgttcttgacttggtggcaaggtgtggtgattgcaataatgtatgctttgggccttcttagaagccctttagcccagagcttggagttaaaatcaagcattcaagatttcattatttgcatagaggacagatgggcattgcttcagttgttcacctctatgtgttcccagccaagccctatgcactcttaactaatcagtcacacggaaacatttctgtacttggggactatgtatcctctgagcccgtggacccttttgaaataaaggaaagcaaccggcctaccaaaatgaagcttccacagttggaaccagatgagagaagcgtgacaaacataaaagaaagtgttcgggactttgttgtcggcagtggtgaatatgtgatcaaagattttaagttcactgttaaccaagcagtgcgaccagtggagaagcgcattgataaattgatgaaaaagaatgataagagtaagaaaagccaggacgacaactgggtgagtgcagcaacaccagagaggcctgttcgtgggattgatgatccattattaagcggaagcgcaagtgacagtggtgtcacaaagggcagaaaatatcgcagagttgtgagctcagttactgctgtggacagctggggaggtggtgatcaagcttctgacggatatgagatcaggggtcgccgctgggctgtaaaaagctaacgatttacatagcgagatggtaaattcgaaccatatcgcgtggggggaaaaggacttttaggtttgcaactgtttctgcgatactggccatttaggagccttcgcaagttcagattgtctttgtataggtacttaggtagctgataatgatatgtaacctttttgcgtagattgtttaattttcttttctttttcttggtcgagtcgtactgacatttggtattgcaaaatttgaaagtacaatagtttttttcattctttggaaatggaaacagagttcagcgagtgtgtccatttggacggatttgtatagtttcgttacacgcttacatgcatctttgatctgaaaaa

SEQ ID NO: 19677 - DNA, 2178 bp, Zea Mays
aagccaattggcgtcacgtcgtcgcctctgcggaaaccggcggtccacgggaaaggaaagaggaaacagggaggcgacgccgtcacaattcgttctcgcgatttgcccttctccacctccccgtccatgtcgcgggaaatcacgcgcggcgacgctggattcacttagatccaacagggtaatcggcacggggcagcctctccacccattcccgcagccggttgggcgagtcgtcggttcagataatagactgggcgtgtggatccaagaggtttgatccctttaatttggattgaagtgccagctttcggtcaggaaggtgatgctggatgatgctgacggactttgaaagcataccggttcaaagaagtgttgcctgtcaccatgaggctcaacgttgggctcctagtgcccttgatggcacaatactccgcacccacatgggctactttagttgctgggttcttcatgctgcttgcgctttcgctctccacgtacctgatatttgagcatctctcagcatacaacaatccagaggttctgttctacttgtacaggaacaaaaatttgtactgggtgttattctcatggtcccttgctatgcaattgagtcatgtatttctttgataaatccaagtacaagcgtttactgtggcatcctacgtgatggttatgaagcatttgcaatgtactgctttggaagatatattactgcatgtttaggtggggaagataaaacaatagcctttttaaagagggaaggtggctctggttctgggcagtctctactgcatcacacgtccgagaagggaatcatacaccatcattttcctgtaaattatgtattgaagccctggagactggggacgcggttctacctgattatcaaatttggaatcttccaatatgtgatcataaagaccctcacagccaccttatctcttcttctagaatcttttggtgtttattgtgatggagaattcaatttacgatgtacccttactttgctgctgttctcaactttagtcaatattgggccctgtactgtctagtagcatggtatacagccaccaaggacgaattggctcctataaagcctctggctaagtttctttctttcaaatcgatagtgttcttgacttggtggcaaggtgtggtgattgcaataatgtatgctttgggccttcttagaagccctttagcccagagcttggagttaaaatcaagcattcaagatttcattatttgcatagaggacagatgggcattgcttcagttgttcacctctatgtgttcccagccaagccctatgcactcttaactaatcagtcacacggaaacatttctgtacttggggactatgtatcctctgagcccgtggacccttttgaaataaaggaaagcaaccggcctaccaaaatgaagcttccacagttggaaccagatgagagaagcgtgacaaacataaaagaaagtgttcgggactttgttgtcggcagtggtgaatatgtgatcaaagattttaagttcactgttaaccaagcagtgcgaccagtggagaagcgcattgataaattgatgaaaaagaatgataagagtaagaaaagccaggacgacaactgggtgagtgcagcaacaccagagaggcctgttcgtgggattgatgatccattattaagcggaagcgcaagtgacagtggtgtcacaaagggcagaaaatatcgcagagttgtgagctcagttactgctgtggacagctggggaggtggtgatcaagcttctgacggatatgagatcaggggtcgccgctgggctgtaaaaagctaacgatttacatagcgagatggtaaattcgaaccatatcgcgtggggggaaaaggacttttaggtttgcaactgtttctgcgatactggccatttaggagccttcgcaagttcagattgtctttgtataggtacttaggtagctgataatgatatgtaacctttttgcgtagattgtttaattttcttttctttttcttggtcgagtcgtactgacatttggtattgcaaaatttgaaagtacaatagtttttttcattctttggaaatggaaacagagttcagcgagtgtgtccatttggacggatttgtatagtttcgttacacgcttacatgcatctttgatctgaaaaa

SEQ ID NO: 19678 - DNA, 1900 bp, Zea Mays
aagccaattggcgtcacgtcgtcgcctctgcggaaaccggcggtccacgggaaaggaaagaggaaacagggaggcgacgccgtcacaattcgttctcgcgatttgcccttctccacctccccgtccatgtcgcgggaaatcacgcgcggcgacgctggattcacttagatccaacagggtaatcggcacggggcagcctctccacccattcccgcagccggttgggcgagtcgtcggttcagataatagactgggcgtgtggatccaagaggtttgatccctttaatttggattgaagtgccagctttcggtcaggaaggtgatgctggatgatgctgacggactttgaaagcataccggttcaaagaagtgttgcctgtcaccatgaggctcaacgttgggctcctagtgcccttgatggcacaatactccgcacccacatgggctactttagttgctgggttcttcatgctgcttgcgctttcgctctccacgtacctgatatttgagcatctctcagcatacaacaatccagaggaacaaaaatttgtactgggtgttattctcatggtcccttgctatgcaattgagtcatgtatttctttgataaatccaagtacaagcgtttactgtggcatcctacgtgatggttatgaagcatttgcaatgtactgctttggaagatatattactgcatgtttaggtggggaagataaaacaatagcctttttaaagagggaaggtggctctggttctgggcagtctctactgcatcacacgtccgagaagggaatcatacaccatcattttcctgtaaattatgtattgaagccctggagactggggacgcggttctacctgattatcaaatttggaatcttccaatatgtgatcataaagaccctcacagccaccttatctcttcttctagaatcttttggtgtttattgtgatggagaattcaatttacgatgtgggacagatgggcattgcttcagttgttcacctctatgtgttcccagccaagccctatgcactcttaactaatcagtcacacggaaacatttctgtacttggggactatgtatcctctgagcccgtggacccttttgaaataaaggaaagcaaccggcctaccaaaatgaagcttccacagttggaaccagatgagagaagcgtgacaaacataaaagaaagtgttcgggactttgttgtcggcagtggtgaatatgtgatcaaagattttaagttcactgttaaccaagcagtgcgaccagtggagaagcgcattgataaattgatgaaaaagaatgataagagtaagaaaagccaggacgacaactgggtgagtgcagcaacaccagagaggcctgttcgtgggattgatgatccattattaagcggaagcgcaagtgacagtggtgtcacaaagggcagaaaatatcgcagagttgtgagctcagttactgctgtggacagctggggaggtggtgatcaagcttctgacggatatgagatcaggggtcgccgctgggctgtaaaaagctaacgatttacatagcgagatggtaaattcgaaccatatcgcgtggggggaaaaggacttttaggtttgcaactgtttctgcgatactggccatttaggagccttcgcaagttcagattgtctttgtataggtacttaggtagctgataatgatatgtaacctttttgcgtagattgtttaattttcttttctttttcttggtcgagtcgtactgacatttggtattgcaaaatttgaaagtacaatagtttttttcattctttggaaatggaaacagagttcagcgagtgtgtccatttggacggatttgtatagtttcgttacacgcttacatgcatctttgatctgaaaaa

SEQ ID NO: 19679 - DNA, 1864 bp, Zea Mays
aagccaattggcgtcacgtcgtcgcctctgcggaaaccggcggtccacgggaaaggaaagaggaaacagggaggcgacgccgtcacaattcgttctcgcgatttgcccttctccacctccccgtccatgtcgcgggaaatcacgcgcggcgacgctggattcacttagatccaacagggtaatcggcacggggcagcctctccacccattcccgcagccggttgggcgagtcgtcggttcagataatagactgggcgtgtggatccaagaggtttgatccctttaatttggattgaagtgccagctttcggtcaggaaggtgatgctggatgatgctgacggactttgaaagcataccggttcaaagaagtgttgcctgtcaccatgaggctcaacgttgggctcctagtgcccttgatggcacaatactccgcacccacatgggctactttagttgctgggttcttcatgctgcttgcgctttcgctctccacgtacctgatatttgagcatctctcagcatacaacaatccagaggaacaaaaatttgtactgggtgttattctcatggtcccttgctatgcaattgagtcatgtatttctttgataaatccaagtacaagcgtttactgtggcatcctacgtgatggttatgaagcatttgcaatgtactgctttggaagatatattactgcatgtttaggtggggaagataaaacaatagcctttttaaagagggaaggtggctctggttctgggcagtctctactgcatcacacgtccgagaagggaatcatacaccatcattttcctgtaaattatgtattgaagccctggagactggggacgcggttctacctgattatcaaatttggaatcttccaatatgtgatcataaagaccctcacagccaccttatctcttcttctagaatcttttggtgtttattgtgatggagaattcaatttacgatgtacccttactttgctgctgttctcaactttagtcaatattgggccctgtactgtctagtagcatggtatacagccaccaaggacgaattggctcctataaagcctctggctaagtttctttctttcaaatcgatagtgttcttgacttggtggcaaggtgtggtgattgcaataatgtatgctttgggccttcttagaagccctttagcccagagcttggagttaaaatcaagcattcaagatttcattatttgcatagaggacagatgggcattgcttcagttgttcacctctatgtgttcccagccaagccctatgcactcttaactaatcagtcacacggaaacatttctgtacttggggactatgtatcctctgagcccgtggacccttttgaaataaaggaaagcaaccggcctaccaaaatgaagcttccacagttggaaccagatgagagaagcgtgacaaacataaaagaaagtgttcgggactttgttgtcggcagtggtgaatatgtgatcaaagattttaagttcactgttaaccaagcagtgcgaccagtggagaagcgcattgataaattgatgaaaaagaatgataagagtaagaaaagccaggacgacaactgggtgagtgcagcaacaccagagaggcctgttcgtgggattgatgatccattattaagcggaagcgcaagtgacagtggtgtcacaaagggcagaaaatatcgcagagttgtgagctcagttactgctgtggacagctggggaggtggtgatcaagcttctgacggatatgagatcaggggtcgccgctgggctgtaaaaagctaacgatttacatagcgagatggaggttgatgaaaggaggaacagacagaaaaaggtgaa

SEQ ID NO: 19680 - DNA, 1490 bp, Zea Mays
ctaagtctgaatataactaatatttttctacacaggtttggtgtctaactgaaagacgtatatggatccattcagaaataatgatgtccgtcctccattaagagaactatctaacaatacccttgaaggtatacctactaataaaatgccttatgtgacctctcaacaaggttttaaaatgggaaaaaataatggtttaggaggacgtgctaatgcaatgcaacatgaatgtccagatatgtctataagcgacggaagcatcattgattgtactataccgtgtgataccactccaggaggacgtgatgatgcaagacaacgtaagagggaaagagaaagagtacgatatgctacgatgagtgctgaaaagaaaaatgaattgaagaagcgtcgtgagtcacgaaaaaagggaaatgttatgcaccatgagtattcaaaagtttgcaacatccctgcaaacaaggacaacaataatcatcaaaacaatgaaattgaggatgttgatgatgattcttatcagttgcataagaataactcatttgaggtgcatagaagacttggcagtgaaaaactttccacacatttgtcagatgaatgtccacaggtgtttgtaagcgacagaagcatcaaaaatccgactgtacattgtgataacactttagtcgcattgggtcagacgagtcatcaacatgattccaatcaaagttcagaagttttagatccaagggaatgtaagagaatacgagaaagaactcgatttgcaactcaaacaaaagaacaaagggcattgcgtaatagggaatcatgtaataagatggcaaggaaaaactataaaagaagacaacgagaaattaaactccaggacttaatcggcattgaggacccgaagtttaccccggagcttgtgtggagttcaacagatgctgaagcgcctcatgggtctctatgtagctccgaaggcatgtctatccctgagttaagtccaacacctttcgttcctaatccatcacagactgaggatgtcgagaaagacagtatgacagagtctcctagacgacaaagacataaacgtcatgtgtcgtccggccaaagacagaccctggtgtctcgtcaaaatcagaaatttcatttagccattggaacaaacttcgctactgcaactagggatcgtgtaatggagaatgatgtggataatgaaattgatcatcagactgtttcagagatcgacaacaatgaaagtaccggtctatgtccattccctcacacggagagtaacaatatgactgaaggagcagacattgggatgcaacaccaggcagccccgactgtcactaccaatgatgatgttgaagatgtgctctttacagaggatgatgatgaagctgtactttttgaagatgacgaagacgaaggatacctattcgctgggcaaggttcacccttcaaccaatgctcctggaaatggtctaaacttccattttggacatttg

SEQ ID NO: 19681 - DNA, 2678 bp, Zea Mays
tttttttcgttttgttgctggcccatttcttgttgcactcgaccccctaaaacctcggcgatttctcagtgatacccccccgcctcgcccgccgccccgtgctcttctcgttcacttgcctggctgcctttgctttgtgcttcccattccgagtgccgcccgccacccgccacccgccaccgcctcgagtctctcccgcgggcgcgaggtgcacgctcgagtcaccaccagaagggcgcggaggaggccggctgacaagaggcggctctgtgcgccaagagccccggcgcggggaccagaccagaggcggcggcggcgtacgtgcgcgcgtgtgtacgtggtgcgtatggggtcgaggcggcggagacaccaccaccacggccggtgggttgtgccctccgtggcgccggcggcggcggctttcgcagcggcggggttgctcctcctcgtcgtcgcgttccattgcttcctgtcgctgccgctaagcgacgccagtggcggctcccgtgtcttccggcgccccaacccgccgttcctgttgaacaagccagcggatgtgcgcagaaatgtaatcggtgccgtggatttcgctgttccaagcggtgggagcaagctcggggaggagctctgggagtcgaaggcggcgggcaacttcttcggctgcagcaacgccaccaaacagttcgccgatgccgaggctgtgaccaagtcggaccgttacttgatgatcgcgacgagcggcggactgaatcagcagcgaacagggatgctgttgttgcagcccgcatactgaatgcaacacttgtcattccaaagctggacgaagaatccttctggaaagatgcgagtgactttgcggagatatttgatgtcgattcattcatatcctcgctttcgaatgatgtaaagatcatacgccaagtacctgacaggaatggcaaaccgccttcgccgtataagatgcgtattcctagaaagtgtacttctaaatgctacgagagccgagtgttgcctgctcttctaaagaagcatgttgttcagttaaccaaatttgactaccgattgtcaaataagctagagactgatcttcaaaagcttaggtgtagagtcaattatcatgcactaaggtttacagacccaatcctccaaatgggtgaaacgcttgtccaaagaatgagggggaaaagtggacgtttcattgctcttcacctaagatttgagcctgacatgcttgctttctctggttgctactacggcggtggagacattgagagaagagaacttggtgagattcgtaagaggtggaagaccctgcatgcaagcaaccctgacagagaacgacggcacggaaagtgccctctaacaccagaggaagtagggctcatgctcagggcattgggatttgggaaggacgtgcacctttatgttgcatcaggagatgtatatggaggcgaggagacactggcacctctgaaggcactcttcccaaactttcactcgaaggaaactctagccaacaaggagttagctccttttttaccatattcatctcgcatggctgctctcgattttatcgtatgtgataggagcgatgtcttcgtgacaaacaacaatggcaacatggccagaatgttggctggtcgaaggagatattttgggcacaggaggaccataaggcccaacactaagaaactttactcattatttctgaatcggaccagcatgagttgggacacatttgcatctaaagtccagacctttcaaaagggattcatgggggagcccaatgagattaaactaggaagaggcgaattccatgagcatcctgtagattgcatttgtgcaaaatcgaagggaaaaagcgtacagagcaggcatcacctagttaaaggcgctggagaagctgtggagaaccattctattgatggggaacttgactggaaggatttggactacggagagcatacacccttgggcaggggggattcatcgaatgaaaccgaatcagacgatgtccgtattggtggatcagacattcctgaattggaggatatgatgtcagactagacacaaatagatagttcattatagttttttcttttatttacaaatggtttggtgataagttattttgaggacagaagatgctacatggtttatttttctcctgtttattcttggagattgcagacacatagaaacaagtttttgccagctcgacaaacaagaaaggcctggaagagctagagcttcctacagaaaagacaggaagcctatagttcggtatgaggtaacaactgtacagtgtatgatggaccctggggaaatggtttctttttcatatagcttgtaccgtagatagaaacaaaagaaacccttcttatgttttactgtgtagcgttataatgagattttgatgggtctatcatcgttcttgattttgtttttttctttctttcataaatgcctgttcccaattttgctggcctcgatttaaatctgtatttataaagaatgtaaaggggtccaagcatacaccccctttcccaaatataggattgtcttacggtttctccttaaaaaaaacactgcaccgtttcccagattagttccatcggcatgatccatttggttgatctgtcaacaattcagtgcaagtattccttcatatcgttctt

SEQ ID NO: 19682 - DNA, 2548 bp, Zea Mays
tttttttcgttttgttgctggcccatttcttgttgcactcgaccccctaaaacctcggcgatttctcagtgatacccccccgcctcgcccgccgccccgtgctcttctcgttcacttgcctggctgcctttgctttgtgcttcccattccgagtgccgcccgccacccgccacccgccaccgcctcgagtctctcccgcgggcgcgaggtgcacgctcgagtcaccaccagaagggcgcggaggaggccggctgacaagaggcggctctgtgcgccaagagccccggcgcggggaccagaccagaggcggcggcggcgtacgtgcgcgcgtgtgtacgtggtgcgtatggggtcgaggcggcggagacaccaccaccacggccggtgggttgtgccctccgtggcgccggcggcggcggctttcgcagcggcggggttgctcctcctcgtcgtcgcgttccattgcttcctgtcgctgccgctaagcgacgccagtggcggctcccgtgtcttccggcgccccaacccgccgttcctgttgaacaagccagcggatgtgcgcagaaatgtaatcggtgccgtggatttcgctgttccaagcggtgggagcaagctcggggaggagctctgggagtcgaaggcggcgggcaacttcttcggctgcagcaacgccaccaaacagttcgccgatgccgaggctgtgaccaagtcggaccgttacttgatgatcgcgacgagcggcggactgaatcagcagcgaacagggatcatagatgctgttgttgcagcccgcatactgaatgcaacacttgtcattccaaagctggacgaagaatccttctggaaagatgcgagtgactttgcggagatatttgatgtcgattcattcatatcctcgctttcgaatgatgtaaagatcatacgccaagtacctgacaggaatggcaaaccgccttcgccgtataagatgcgtattcctagaaagtgtacttctaaatgctacgagagccgagtgttgcctgctcttctaaagaagcatgttgttcagttaaccaaatttgactaccgattgtcaaataagctagagactgatcttcaaaagcttaggtgtagagtcaattatcatgcactaaggtttacagacccaatcctccaaatgggtgaaacgcttgtccaaagaatgagggggaaaagtggacgtttcattgctcttcacctaagatttgagcctgacatgcttgctttctctggttgctactacggcggtggagacattgagagaagagaacttggtgagattcgtaagaggtggaagaccctgcatgcaagcaaccctgacagagaacgacggcacggaaagtgccctctaacaccagaggaagtagggctcatgctcagggcattgggatttgggaaggacgtgcacctttatgttgcatcaggagatgtatatggaggcgaggagacactggcacctctgaaggcactcttcccaaactttcactcgaaggaaactctagccaacaaggagttagctccttttttaccatattcatctcgcatggctgctctcgattttatcgtatgtgataggagcgatgtcttcgtgacaaacaacaatggcaacatggccagaatgttggctggtcgaaggagatattttgggcacaggaggaccataaggcccaacactaagaaactttactcattatttctgaatcggaccagcatgagttgggacacatttgcatctaaagtccagacctttcaaaagggattcatgggggagcccaatgagattaaactaggaagaggcgaattccatgagcatcctgtagattgcatttgtgcaaaatcgaagggaaaaagcgtacagagcaggcatcacctagttaaaggcgctggagaagctgtggagaaccattctattgatggggaacttgactggaaggatttggactacggagagcatacacccttgggcaggggggattcatcgaatgaaaccgaatcagacgatgtccgtattggtggatcagacattcctgaattggaggatatgatacacatagaaacaagtttttgccagctcgacaaacaagaaaggcctggaagagctagagcttcctacagaaaagacagcctatagttcggtatgaggtaacaactgtacagtgtatgatggaccctggggaaatggtttctttttcatatagcttgtaccgtagatagaaacaaaagaaacccttcttatgttttactgtgtagcgttataatgagattttgatgggtctatcatcgttcttgattttgtttttttctttctttcataaatgcctgttcccaattttgctggcctcgatttaaatctgtatttataaagaatgtaaaggggtccaagcatacaccccctttcccaaatataggattgtcttacggtttctccttaaaaaaaacactgcaccgtttcccagattagttccatcggcatgatccatttggttgatctgtcaacaattcagtgcaagtattccttcatatcgttctt

SEQ ID NO: 19683 - DNA, 2481 bp, Zea Mays
gctcggcgcctctgcctcggccgctccccgttcccgtcaccgcgccgccggccgccaggatcgcccgccccaccatcctggctcatcagtcctcgccgcgagcccgtgcctggaacgccgcttgcgctaccacgccgcggtcccacgcccgctcccgttccagcgacagggggttactgggacgagatcaaccgtaacctgactgactcactgacggccttgcactctcagcaaaaccgtggcacaagtgggcaccggggaatcagctaggatttaagcttgagccttcgctccaaacctccatggaggcggaggccaggaacatccttgaacgcgccgcggagtcttccttcccaccgctgcacgccgtccaccacctcctttccgtcggggtctgtgtgcgttgcatccttcgcctgcttggagcctatagcagtgcctgctcatatgcatgtcttacggcatcagttttgcattcgttccttgaagaacacgatgagtccataaaaggagggtcatgtccatgtctatcgatgaatgatgcatattgctctgtctgcttgggagtattgctcccaaccttccatcgagatgaaggtctggagacacctaatggcatttctcatattgacaacatgtcttcagtaatatctcaagcagtgcacggggagagttaccaagttgatgagttttctctagaaatttcactaccgccggttatagccgccaatgagcgtgcagttagattatatatgaaacaaaaatatggcaatgagaattggttcaaggacaaaatgtttgcacaacaaacaatgtcagtgaaggaagccttgcgacttttgatagcaccatcactcgagaaactaatgaatgctaaacatggtaacaattcatttagaatccgcttaacatatactcatggtgatgcttcacaaaagcttcatagtttattgccaaatgagcacagccgtaaaaggaaaccagattcaagaaaaggaggtgatgcttcgaatgaggcccataaaaggaattcagcagatggcaaccctatacaaacaagtgaatcagattcattcatctacaagagtcttgagggcatccaagatcaagaattctgtaatgcatttcagttgcctcctgaaaaggtgtttaaaccctgccatcttttaatatcgtgcttgagatcacctacatatcttggtggaagatatttgaagctttcaaggaacgtcagtcagtcatgttggataatagatgatgagagaatgggtgaagcttcagttgaggagataattggggagaatgttcgtgccatctgcagaggtgatagctgcaagttccatgctgctgggagagaagacattgatgtcatagttcgaaatctcaagttggtagataatgaaatatggaccatgatgcgtgaaggagaagcagagaaacagaagcagtacactgcccttatatggacttctcgtgatctgacagatgatgatcttcataatatttctattatgaaggaaatggaaattgtacagaagaccccaataagagtacttcatcgtagaagccccttagagcggaagcgcatcatacactggatggagattgagaaaatcacaggcagctcaaactactacttgctccatctatgcacacaggctggaacatacatcaaggaatttgtgcatggtgatcttggacgcacgcatcccagcatcggagccataatagggtgcagagctgagatattgcaactcgatgtcactgatgttaagatggactttctcccgtagccggaccttcagctgtttatagcatggatagcatgcagtcccaactcctgcagatgatgaggtggtgcgggataacgagctcagaagaacctcatggcagattctgcacggtgcacgcctacatttttgctaaccgagccaagctcaactggtttggtggaaggtgtaatcatatatccagtccccgaagtcttctccaactcaaaacttggggggcgtctattttcctctaatactaacattttcgctagatcctggtcacattttcgctacctttttcttcaaagaaagaaacatttttcccaggtagattgaagtgcaactcccatagtaacatttttgtctacattgtggagaagatcatcccaactcatttggatccattgttatgccttaggttgttgtgcaatgaaattttatgtactttctccgttccaaaaaaccagtctttttagttcttagtttttatctttatttaaatggatgaaaataaatctagacacacatataaaacacatatatcaagtattgtattaacttattaattaattaaaacgaattttaaattttagtctataaattgctaaatatagaaattaaagattttagtttctatatttggtaattttagaactaaaatgaaataaaatgtagagactaaaaattaatccttagaaaccaaacacac

SEQ ID NO: 19684 - DNA, 2557 bp, Zea Mays
gctcggcgcctctgcctcggccgctccccgttcccgtcaccgcgccgccggccgccaggatcgcccgccccaccatcctggctcatcagtcctcgccgcgagcccgtgcctggaacgccgcttgcgctaccacgccgcggtcccacgcccgctcccgttccagcgacagggggttactgggacgagatcaaccgtaacctgactgactcactgacggccttgcactctcagcaaaaccgtggcacaagtgggcaccggggaatcagctaggatttaagcttgagccttcgctccaaacctccatggaggcggaggccaggaacatccttgaacgcgccgcggagtcttccttcccaccgctgcacgccgtccaccacctcctttccgtcggggtctgtgtgcgttgcatccttcgcctgcttggagcctatagcagtgcctgctcatatgcatgtcttacggcatcagttttgcattcgttccttgaagaacacgatgagtccataaaaggagggtcatgtccatgtctatcgatgaatgatgcatattgctctgtctgcttgggagtattgctcccaaccttccatcgagatgaaggtctggagacacctaatggcatttctcatattgacaacatgtcttcagtaatatctcaagcagtgcacggggagagttaccaagttgatgagttttctctagaaatttcactaccgccggttatagccgccaatgagcgtgcagttagattatatatgaaacaaaaatatggcaatgagaattggttcaaggacaaaatgtttgcacaacaaacaatgtcagtgaaggaagccttgcgacttttgatagcaccatcactcgagaaactaatgaatgctaaacatggtaacaattcatttagaatccgcttaacatatactcatggtgatgcttcacaaaagcttcatagtttattgccaaatgagcacagccgtaaaaggaaaccagattcaagaaaaggaggtgatgcttcgaatgaggcccataaaaggaattcagcagatggcaaccctatacaaacaagtgaatcagattcattcatctacaagagtcttgagggcatccaagatcaagaattctgtaatgcatttcagttgcctcctgaaaaggtgtttaaaccctgccatcttttaatatcgtgcttgagatcacctacatatcttggtggaagatatttgaagctttcaaggaacgtcagtcagtcatgttggataatagatgatgagagaatgggtgaagcttcagttgaggagataattggggagaatgttcgtgccatctgcagaggtacggatgcttggatctggtcgtccatttctagttgaagtactgaatgttcgatccattccatctgaaactgaagttcaacaaattgaagagagaattaacaactctgaaaagaaatatgtcatagttcgaaatctcaagttggtagataatgaaatatggaccatgatgcgtgaaggagaagcagagaaacagaagcagtacactgcccttatatggacttctcgtgatctgacagatgatgatcttcataatatttctattatgaaggaaatggaaattgtacagaagaccccaataagagtacttcatcgtagaagccccttagagcggaagcgcatcatacactggatggagattgagaaaatcacaggcagctcaaactactacttgctccatctatgcacacaggctggaacatacatcaaggaatttgtgcatggtgatcttggacgcacgcatcccagcatcggagccataatagggtgcagagctgagatattgcaactcgatgtcactgatgttaagatggactttctcccgtagccggaccttcagctgtttatagcatggatagcatgcagtcccaactcctgcagatgatgaggtggtgcgggataacgagctcagaagaacctcatggcagattctgcacggtgcacgcctacatttttgctaaccgagccaagctcaactggtttggtggaaggtgtaatcatatatccagtccccgaagtcttctccaactcaaaacttggggggcgtctattttcctctaatactaacattttcgctagatcctggtcacattttcgctacctttttcttcaaagaaagaaacatttttcccaggtagattgaagtgcaactcccatagtaacatttttgtctacattgtggagaagatcatcccaactcatttggatccattgttatgccttaggttgttgtgcaatgaaattttatgtactttctccgttccaaaaaaccagtctttttagttcttagtttttatctttatttaaatggatgaaaataaatctagacacacatataaaacacatatatcaagtattgtattaacttattaattaattaaaacgaattttaaattttagtctataaattgctaaatatagaaattaaagattttagtttctatatttggtaattttagaactaaaatgaaataaaatgtagagactaaaaattaatccttagaaaccaaacacac

SEQ ID NO: 19685 - DNA, 2768 bp, Zea Mays
gctcggcgcctctgcctcggccgctccccgttcccgtcaccgcgccgccggccgccaggatcgcccgccccaccatcctggctcatcagtcctcgccgcgagcccgtgcctggaacgccgcttgcgctaccacgccgcggtcccacgcccgctcccgttccagcgacagggggttactgggacgagatcaaccgtaacctgactgactcactgacggccttgcactctcagcaaaaccgtggcacaagtgggcaccggggaatcagctaggatttaagcttgagccttcgctccaaacctccatggaggcggaggccaggaacatccttgaacgcgccgcggagtcttccttcccaccgctgcacgccgtccaccacctcctttccgtcggggtctgtgtgcgttgcatccttcgcctgcttggagcctatagcagtgcctgctcatatgcatgtcttacggcatcagttttgcattcgttccttgaagaacacgatgagtccataaaaggagggtcatgtccatgtctatcgatgaatgatgcatattgctctgtctgcttgggagtattgctcccaaccttccatcgagatgaaggtctggagacacctaatggcatttctcatattgacaacatgtcttcagtaatatctcaagcagtgcacggggagagttaccaagttgatgagttttctctagaaatttcactaccgccggttatagccgccaatgagcgtgcagttagattatatatgaaacaaaaatatggcaatgagaattggttcaaggacaaaatgtttgcacaacaaacaatgtcagtgaaggaagccttgcgacttttgatagcaccatcactcgagaaactaatgaatgctaaacatggtaacaattcatttagaatccgcttaacatatactcatggtgatgcttcacaaaagcttcatagtttattgccaaatgagcacagccgtaaaaggaaaccagattcaagaaaaggaggtgatgcttcgaatgaggcccataaaaggaattcagcagatggcaaccctatacaaacaagtgaatcagattcattcatctacaagagtcttgagggcatccaagatcaagaattctgtaatgcatttcagttgcctcctgaaaaggtgtttaaaccctgccatcttttaatatcgtgcttgagatcacctacatatcttggtggaagatatttgaagctttcaaggaacgtcagtcagtcatgttggataatagatgatgagagaatgggtgaagcttcagttgaggagataattggggagaatgttcgtgccatctgcagaggtgatagctgcaagttccatgctgctgggagagaagacattgatgtaatgttatagtctggattcttgaactgtgcctgttggtattcaacgtgctgaacgtattatatatgtaggtcatagttcgaaatctcaagttggtagataatgaaatatggaccatgatgcgtgaaggagaagcagagaaacagaagcagtacactgcccttatatggacttctcgtgatctgacagatgatgatcttcataatatttctattatgaaggaaatggaaattgtacagaagaccccaataagagtacttcatcgtagaagccccttagagcggaagcgcatcatacactggatggagattgagaaaatcacaggcagctcaaactactacttgctccatctatgcacacaggttagaattgtgactagcttgtcattttctaaagatcatctctgtacatccatggttggcatatgttgttttctgcataccgagacggattgaaaaatgttccagatattagatatgtttcgtagatatcaaggtgatgcataaaaagtaaggcctaattatgcccttagttttctggttgctctttctagtaatccactggtatatgtttaataggctggaacatacatcaaggaatttgtgcatggtgatcttggacgcacgcatcccagcatcggagccataatagggtgcagagctgagatattgcaactcgatgtcactgatgttaagatggactttctcccgtagccggaccttcagctgtttatagcatggatagcatgcagtcccaactcctgcagatgatgaggtggtgcgggataacgagctcagaagaacctcatggcagattctgcacggtgcacgcctacatttttgctaaccgagccaagctcaactggtttggtggaaggtgtaatcatatatccagtccccgaagtcttctccaactcaaaacttggggggcgtctattttcctctaatactaacattttcgctagatcctggtcacattttcgctacctttttcttcaaagaaagaaacatttttcccaggtagattgaagtgcaactcccatagtaacatttttgtctacattgtggagaagatcatcccaactcatttggatccattgttatgccttaggttgttgtgcaatgaaattttatgtactttctccgttccaaaaaaccagtctttttagttcttagtttttatctttatttaaatggatgaaaataaatctagacacacatataaaacacatatatcaagtattgtattaacttattaattaattaaaacgaattttaaattttagtctataaattgctaaatatagaaattaaagattttagtttctatatttggtaattttagaactaaaatgaaataaaatgtagagactaaaaattaatccttagaaaccaaacacac

SEQ ID NO: 19686 - DNA, 2545 bp, Zea Mays
gctcggcgcctctgcctcggccgctccccgttcccgtcaccgcgccgccggccgccaggatcgcccgccccaccatcctggctcatcagtcctcgccgcgagcccgtgcctggaacgccgcttgcgctaccacgccgcggtcccacgcccgctcccgttccagcgacagggggttactgggacgagatcaaccgtaacctgactgactcactgacggccttgcactctcagcaaaaccgtggcacaagtgggcaccggggaatcagctaggatttaagcttgagccttcgctccaaacctccatggaggcggaggccaggaacatccttgaacgcgccgcggagtcttccttcccaccgctgcacgccgtccaccacctcctttccgtcggggtctgtgtgcgttgcatccttcgcctgcttggagcctatagcagtgcctgctcatatgcatgtcttacggcatcagttttgcattcgttccttgaagaacacgatgagtccataaaaggagggtcatgtccatgtctatcgatgaatgatgcatattgctctgtctgcttgggagtattgctcccaaccttccatcgagatgaaggtctggagacacctaatggcatttctcatattgacaacatgtcttcagtaatatctcaagcagtgcacggggagagttaccaagttgatgagttttctctagaaatttcactaccgccggttatagccgccaatgagcgtgcagttagattatatatgaaacaaaaatatggcaatgagaattggttcaaggacaaaatgtttgcacaacaaacaatgtcagtgaaggaagccttgcgacttttgatagcaccatcactcgagaaactaatgaatgctaaacatggtaacaattcatttagaatccgcttaacatatactcatggtgatgcttcacaaaagcttcatagtttattgccaaatgagcacagccgtaaaaggaaaccagattcaagaaaaggaggtgatgcttcgaatgaggcccataaaaggaattcagcagatggcaaccctatacaaacaagtgaatcagattcattcatctacaagagtcttgagggcatccaagatcaagaattctgtaatgcatttcagttgcctcctgaaaaggtgtttaaaccctgccatcttttaatatcgtgcttgagatcacctacatatcttggtggaagatatttgaagctttcaaggaacgtcagtcagtcatgttggataatagatgatgagagaatgggtgaagcttcagttgaggagataattggggagaatgttcgtgccatctgcagaggtgatagctgcaagttccatgctgctgggagagaagacattgatgtacggatgcttggatctggtcgtccatttctagttgaagtactgaatgttcgatccattccatctgaaactgaagttcaacaaattgaagagagaattaacaactctgaaaagaaatatgtcatagttcgaaatctcaagttggtagataatgaaatatggaccatgatgcgtgaaggagaagcagagaaacagaagcagtacactgcccttatatggacttctcgtgatctgacagatgatgatcttcataatatttctattatgaaggaaatggaaattgtacagaagaccccaataagagtacttcatcgtagaagccccttagagcggaagcgcatcatacactggatggagattgagaaaatcacaggcagctcaaactactacttgctccatctatgcacacagcatcggagccataatagggtgcagagctgagatattgcaactcgatgtcactgatgttaagatggactttctcccgtagccggaccttcagctgtttatagcatggatagcatgcagtcccaactcctgcagatgatgaggtggtgcgggataacgagctcagaagaacctcatggcagattctgcacggtgcacgcctacatttttgctaaccgagccaagctcaactggtttggtggaaggtgtaatcatatatccagtccccgaagtcttctccaactcaaaacttggggggcgtctattttcctctaatactaacattttcgctagatcctggtcacattttcgctacctttttcttcaaagaaagaaacatttttcccaggtagattgaagtgcaactcccatagtaacatttttgtctacattgtggagaagatcatcccaactcatttggatccattgttatgccttaggttgttgtgcaatgaaattttatgtactttctccgttccaaaaaaccagtctttttagttcttagtttttatctttatttaaatggatgaaaataaatctagacacacatataaaacacatatatcaagtattgtattaacttattaattaattaaaacgaattttaaattttagtctataaattgctaaatatagaaattaaagattttagtttctatatttggtaattttagaactaaaatgaaataaaatgtagagactaaaaattaatccttagaaaccaaacacac

SEQ ID NO: 19687 - DNA, 2712 bp, Zea Mays
gctcggcgcctctgcctcggccgctccccgttcccgtcaccgcgccgccggccgccaggatcgcccgccccaccatcctggctcatcagtcctcgccgcgagcccgtgcctggaacgccgcttgcgctaccacgccgcggtcccacgcccgctcccgttccagcgacagggggttactgggacgagatcaaccgtaacctgactgactcactgacggccttgcactctcagcaaaaccgtggcacaagtgggcaccggggaatcagctaggatttaagcttgagccttcgctccaaacctccatggaggcggaggccaggaacatccttgaacgcgccgcggagtcttccttcccaccgctgcacgccgtccaccacctcctttccgtcggggtctgtgtgcgttgcatccttcgcctgcttggagcctatagcagtgcctgctcatatgcatgtcttacggcatcagttttgcattcgttccttgaagaacacgatgagtccataaaaggagggtcatgtccatgtctatcgatgaatgatgcatattgctctgtctgcttgggagtattgctcccaaccttccatcgagatgaaggtctggagacacctaatggcatttctcatattgacaacatgtcttcagtaatatctcaagcagtgcacggggagagttaccaagttgatgagttttctctagaaatttcactaccgccggttatagccgccaatgagcgtgcagttagattatatatgaaacaaaaatatggcaatgagaattggttcaaggacaaaatgtttgcacaacaaacaatgtcagtgaaggaagccttgcgacttttgatagcaccatcactcgagaaactaatgaatgctaaacatggtaacaattcatttagaatccgcttaacatatactcatggtgatgcttcacaaaagcttcatagtttattgccaaatgagcacagccgtaaaaggaaaccagattcaagaaaaggaggtgatgcttcgaatgaggcccataaaaggaattcagcagatggcaaccctatacaaacaagtgaatcagattcattcatctacaagagtcttgagggcatccaagatcaagaattctgtaatgcatttcagttgcctcctgaaaaggtgtttaaaccctgccatcttttaatatcgtgcttgagatcacctacatatcttggtggaagatatttgaagctttcaaggaacgtcagtcagtcatgttggataatagatgatgagagaatgggtgaagcttcagttgaggagataattggggagaatgttcgtgccatctgcagaggtgatagctgcaagttccatgctgctgggagagaagacattgatgtacggatgcttggatctggtcgtccatttctagttgaagtactgaatgttcgatccattccatctgaaactgaagttcaacaaattgaagagagaattaacaactctgaaaagaaatatgtcatagttcgaaatctcaagttggtagataatgaaatatggaccatgatgcgtgaaggagaagcagagaaacagaagcagtacactgcccttatatggacttctcgtgatctgacagatgatgatcttcataatatttctattatgaaggaaatggaaattgtacagaagaccccaataagagtacttcatcgtagaagccccttagagcggaagcgcatcatacactggatggagattgagaaaatcacaggcagctcaaactactacttgctccatctatgcacacagatattagatatgtttcgtagatatcaaggtgatgcataaaaagtaaggcctaattatgcccttagttttctggttgctctttctagtaatccactggtatatgtttaataggctggaacatacatcaaggaatttgtgcatggtgatcttggacgcacgcatcccagcatcggagccataatagggtgcagagctgagatattgcaactcgatgtcactgatgttaagatggactttctcccgtagccggaccttcagctgtttatagcatggatagcatgcagtcccaactcctgcagatgatgaggtggtgcgggataacgagctcagaagaacctcatggcagattctgcacggtgcacgcctacatttttgctaaccgagccaagctcaactggtttggtggaaggtgtaatcatatatccagtccccgaagtcttctccaactcaaaacttggggggcgtctattttcctctaatactaacattttcgctagatcctggtcacattttcgctacctttttcttcaaagaaagaaacatttttcccaggtagattgaagtgcaactcccatagtaacatttttgtctacattgtggagaagatcatcccaactcatttggatccattgttatgccttaggttgttgtgcaatgaaattttatgtactttctccgttccaaaaaaccagtctttttagttcttagtttttatctttatttaaatggatgaaaataaatctagacacacatataaaacacatatatcaagtattgtattaacttattaattaattaaaacgaattttaaattttagtctataaattgctaaatatagaaattaaagattttagtttctatatttggtaattttagaactaaaatgaaataaaatgtagagactaaaaattaatccttagaaaccaaacacac

SEQ ID NO: 19688 - DNA, 2552 bp, Zea Mays
gctcggcgcctctgcctcggccgctccccgttcccgtcaccgcgccgccggccgccaggatcgcccgccccaccatcctggctcatcagtcctcgccgcgagcccgtgcctggaacgccgcttgcgctaccacgccgcggtcccacgcccgctcccgttccagcgacagggggttactgggacgagatcaaccgtaacctgactgactcactgacggccttgcactctcagcaaaaccgtggcacaagtgggcaccggggaatcagctaggatttaagcttgagccttcgctccaaacctccatggaggcggaggccaggaacatccttgaacgcgccgcggagtcttccttcccaccgctgcacgccgtccaccacctcctttccgtcggggtctgtgtgcgttgcatccttcgcctgcttggagcctatagcagtgcctgctcatatgcatgtcttacggcatcagttttgcattcgttccttgaagaacacgatgagtccataaaaggagggtcatgtccatgtctatcgatgaatgatgcatattgctctgtctgcttgggagtattgctcccaaccttccatcgagatgaaggtctggagacacctaatggcatttctcatattgacaacatgtcttcagtaatatctcaagcagtgcacggggagagttaccaagttgatgagttttctctagaaatttcactaccgccggttatagccgccaatgagcgtgcagttagattatatatgaaacaaaaatatggcaatgagaattggttcaaggacaaaatgtttgcacaacaaacaatgtcagtgaaggaagccttgcgacttttgatagcaccatcactcgagaaactaatgaatgctaaacatggtaacaattcatttagaatccgcttaacatatactcatggtgatgcttcacaaaagcttcatagtttattgccaaatgagcacagccgtaaaaggaaaccagattcaagaaaaggaggtgatgcttcgaatgaggcccataaaaggaattcagcagatggcaaccctatacaaacaagtgaatcagattcattcatctacaagagtcttgagggcatccaagatcaagaattctgtaatgcatttcagttgcctcctgaaaaggtgtttaaaccctgccatcttttaatatcgtgcttgagatcacctacatatcttggtggaagatatttgaagctttcaaggaacgtcagtcagtcatgttggataatagatgatgagagaatgggtgaagcttcagttgaggagataattggggagaatgttcgtgccatctgcagaggtgatagctgcaagttccatgctgctgggagagaagacattgatgtaatgttatagtctggattcttgaactgtgcctgttggtattcaacgtgctgaacgtattatatatgtaggtcatagttcgaaatctcaagttggtagataatgaaatatggaccatgatgcgtgaaggagaagcagagaaacagaagcagtacactgcccttatatggacttctcgtgatctgacagatgatgatcttcataatatttctattatgaaggaaatggaaattgtacagaagaccccaataagagtacttcatcgtagaagccccttagagcggaagcgcatcatacactggatggagattgagaaaatcacaggcagctcaaactactacttgctccatctatgcacacaggctggaacatacatcaaggaatttgtgcatggtgatcttggacgcacgcatcccagcatcggagccataatagggtgcagagctgagatattgcaactcgatgtcactgatgttaagatggactttctcccgtagccggaccttcagctgtttatagcatggatagcatgcagtcccaactcctgcagatgatgaggtggtgcgggataacgagctcagaagaacctcatggcagattctgcacggtgcacgcctacatttttgctaaccgagccaagctcaactggtttggtggaaggtgtaatcatatatccagtccccgaagtcttctccaactcaaaacttggggggcgtctattttcctctaatactaacattttcgctagatcctggtcacattttcgctacctttttcttcaaagaaagaaacatttttcccaggtagattgaagtgcaactcccatagtaacatttttgtctacattgtggagaagatcatcccaactcatttggatccattgttatgccttaggttgttgtgcaatgaaattttatgtactttctccgttccaaaaaaccagtctttttagttcttagtttttatctttatttaaatggatgaaaataaatctagacacacatataaaacacatatatcaagtattgtattaacttattaattaattaaaacgaattttaaattttagtctataaattgctaaatatagaaattaaagattttagtttctatatttggtaattttagaactaaaatgaaataaaatgtagagactaaaaattaatccttagaaaccaaacacac

SEQ ID NO: 19689 - DNA, 2406 bp, Zea Mays
gctcggcgcctctgcctcggccgctccccgttcccgtcaccgcgccgccggccgccaggatcgcccgccccaccatcctggctcatcagtcctcgccgcgagcccgtgcctggaacgccgcttgcgctaccacgccgcggtcccacgcccgctcccgttccagcgacagggggttactgggacgagatcaaccgtaacctgactgactcactgacggccttgcactctcagcaaaaccgtggcacaagtgggcaccggggaatcagctaggatttaagcttgagccttcgctccaaacctccatggaggcggaggccaggaacatccttgaacgcgccgcggagtcttccttcccaccgctgcacgccgtccaccacctcctttccgtcggggtctgtgtgcgttgcatccttcgcctgcttggagcctatagcagtgcctgctcatatgcatgtcttacggcatcagttttgcattcgttccttgaagaacacgatgagtccataaaaggagggtcatgtccatgtctatcgatgaatgatgcatattgctctgtctgcttgggagtattgctcccaaccttccatcgagatgaaggtctggagacacctaatggcatttctcatattgacaacatgtcttcagtaatatctcaagcagtgcacggggagagttaccaagttgatgagttttctctagaaatttcactaccgccggttatagccgccaatgagcgtgcagttagattatatatgaaacaaaaatatggcaatgagaattggttcaaggacaaaatgtttgcacaacaaacaatgtcagtgaaggaagccttgcgacttttgatagcaccatcactcgagaaactaatgaatgctaaacatggtaacaattcatttagaatccgcttaacatatactcatggtgatgcttcacaaaagcttcatagtttattgccaaatgagcacagccgtaaaaggaaaccagattcaagaaaaggaggtgatgcttcgaatgaggcccataaaaggaattcagcagatggcaaccctatacaaacaagtgaatcagattcattcatctacaagagtcttgagggcatccaagatcaagaattctgtaatgcatttcagttgcctcctgaaaaggtgtttaaaccctgccatcttttaatatcgtgcttgagatcacctacatatcttggtggaagatatttgaagctttcaaggaacgtcagtcagtcatgttggataatagatgatgagagaatgggtgaagcttcagttgaggagataattggggagaatgttcgtgccatctgcagaggtgatagctgcaagttccatgctgctgggagagaagacattgataagcagtacactgcccttatatggacttctcgtgatctgacagatgatgatcttcataatatttctattatgaaggaaatggaaattgtacagaagaccccaataagagtacttcatcgtagaagccccttagagcggaagcgcatcatacactggatggagattgagaaaatcacaggcagctcaaactactacttgctccatctatgcacacaggctggaacatacatcaaggaatttgtgcatggtgatcttggacgcacgcatcccagcatcggagccataatagggtgcagagctgagatattgcaactcgatgtcactgatgttaagatggactttctcccgtagccggaccttcagctgtttatagcatggatagcatgcagtcccaactcctgcagatgatgaggtggtgcgggataacgagctcagaagaacctcatggcagattctgcacggtgcacgcctacatttttgctaaccgagccaagctcaactggtttggtggaaggtgtaatcatatatccagtccccgaagtcttctccaactcaaaacttggggggcgtctattttcctctaatactaacattttcgctagatcctggtcacattttcgctacctttttcttcaaagaaagaaacatttttcccaggtagattgaagtgcaactcccatagtaacatttttgtctacattgtggagaagatcatcccaactcatttggatccattgttatgccttaggttgttgtgcaatgaaattttatgtactttctccgttccaaaaaaccagtctttttagttcttagtttttatctttatttaaatggatgaaaataaatctagacacacatataaaacacatatatcaagtattgtattaacttattaattaattaaaacgaattttaaattttagtctataaattgctaaatatagaaattaaagattttagtttctatatttggtaattttagaactaaaatgaaataaaatgtagagactaaaaattaatccttagaaaccaaacacac

SEQ ID NO: 19690 - DNA, 2851 bp, Zea Mays
gctcggcgcctctgcctcggccgctccccgttcccgtcaccgcgccgccggccgccaggatcgcccgccccaccatcctggctcatcagtcctcgccgcgagcccgtgcctggaacgccgcttgcgctaccacgccgcggtcccacgcccgctcccgttccagcgacagggggttactgggacgagatcaaccgtaacctgactgactcactgacggccttgcactctcagcaaaaccgtggcacaagtgggcaccggggaatcagctaggatttaagcttgagccttcgctccaaacctccatggaggcggaggccaggaacatccttgaacgcgccgcggagtcttccttcccaccgctgcacgccgtccaccacctcctttccgtcggggtctgtgtgcgttgcatccttcgcctgcttggagcctatagcagtgcctgctcatatgcatgtcttacggcatcagttttgcattcgttccttgaagaacacgatgagtccataaaaggagggtcatgtccatgtctatcgatgaatgatgcatattgctctgtctgcttgggagtattgctcccaaccttccatcgagatgaaggtctggagacacctaatggcatttctcatattgacaacatgtcttcagtaatatctcaagcagtgcacggggagagttaccaagttgatgagttttctctagaaatttcactaccgccggttatagccgccaatgagcgtgcagttagattatatatgaaacaaaaatatggcaatgagaattggttcaaggacaaaatgtttgcacaacaaacaatgtcagtgaaggaagccttgcgacttttgatagcaccatcactcgagaaactaatgaatgctaaacatggtaacaattcatttagaatccgcttaacatatactcatggtgatgcttcacaaaagcttcatagtttattgccaaatgagcacagccgtaaaaggaaaccagattcaagaaaaggaggtgatgcttcgaatgaggcccataaaaggaattcagcagatggcaaccctatacaaacaagtgaatcagattcattcatctacaagagtcttgagggcatccaagatcaagaattctgtaatgcatttcagttgcctcctgaaaaggtgtttaaaccctgccatcttttaatatcgtgcttgagatcacctacatatcttggtggaagatatttgaaggttctggttccctgatactacatttcactgtcagctttcaaggaacgtcagtcagtcatgttggataatagatgatgagagaatgggtgaagcttcagttgaggagataattggggagaatgttcgtgccatctgcagaggtgatagctgcaagttccatgctgctgggagagaagacattgatgtacggatgcttggatctggtcgtccatttctagttgaagtactgaatgttcgatccattccatctgaaactgaagttcaacaaattgaagagagaattaacaactctgaaaagaaatatgtcatagttcgaaatctcaagttggtagataatgaaatatggaccatgatgcgtgaaggagaagcagagaaacagaagcagtacactgcccttatatggacttctcgtgatctgacagatgatgatcttcataatatttctattatgaaggaaatggaaattgtacagaagaccccaataagagtacttcatcgtagaagccccttagagcggaagcgcatcatacactggatggagattgagaaaatcacaggcagctcaaactactacttgctccatctatgcacacaggttagaattgtgactagcttgtcattttctaaagatcatctctgtacatccatggttggcatatgttgttttctgcataccgagacggattgaaaaatgttccagatattagatatgtttcgtagatatcaaggtgatgcataaaaagtaaggcctaattatgcccttagttttctggttgctctttctagtaatccactggtatatgtttaataggctggaacatacatcaaggaatttgtgcatggtgatcttggacgcacgcatcccagcatcggagccataatagggtgcagagctgagatattgcaactcgatgtcactgatgttaagatggactttctcccgtagccggaccttcagctgtttatagcatggatagcatgcagtcccaactcctgcagatgatgaggtggtgcgggataacgagctcagaagaacctcatggcagattctgcacggtgcacgcctacatttttgctaaccgagccaagctcaactggtttggtggaaggtgtaatcatatatccagtccccgaagtcttctccaactcaaaacttggggggcgtctattttcctctaatactaacattttcgctagatcctggtcacattttcgctacctttttcttcaaagaaagaaacatttttcccaggtagattgaagtgcaactcccatagtaacatttttgtctacattgtggagaagatcatcccaactcatttggatccattgttatgccttaggttgttgtgcaatgaaattttatgtactttctccgttccaaaaaaccagtctttttagttcttagtttttatctttatttaaatggatgaaaataaatctagacacacatataaaacacatatatcaagtattgtattaacttattaattaattaaaacgaattttaaattttagtctataaattgctaaatatagaaattaaagattttagtttctatatttggtaattttagaactaaaatgaaataaaatgtagagactaaaaattaatccttagaaaccaaacacac

SEQ ID NO: 19691 - DNA, 2351 bp, Zea Mays
ctcaccagtgcagttgtttctctatatttcaaatttacctacaaggaagagagcccttgttctgtgatgtggcctctttcggtttcaaattctgactgctgtttgttcagtggagaggaacactctttcttctgtgccctgagtctgtgtgcgttgcatccttcgcctgcttggagcctatagcagtgcctgctcatatgcatgtcttacggcatcagttttgcattcgttccttgaagaacacgatgagtccataaaaggagggtcatgtccatgtctatcgatgaatgatgcatattgctctgtctgcttgggagtattgctcccaaccttccatcgagatgaaggtctggagacacctaatggcatttctcatattgacaacatgtcttcagtaatatctcaagcagtgcacggggagagttaccaagttgatgagttttctctagaaatttcactaccgccggttatagccgccaatgagcgtgcagttagattatatatgaaacaaaaatatggcaatgagaattggttcaaggacaaaatgtttgcacaacaaacaatgtcagtgaaggaagccttgcgacttttgatagcaccatcactcgagaaactaatgaatgctaaacatggtaacaattcatttagaatccgcttaacatatactcatggtgatgcttcacaaaagcttcatagtttattgccaaatgagcacagccgtaaaaggaaaccagattcaagaaaaggaggtgatgcttcgaatgaggcccataaaaggaattcagcagatggcaaccctatacaaacaagtgaatcagattcattcatctacaagagtcttgagggcatccaagatcaagaattctgtaatgcatttcagttgcctcctgaaaaggtgtttaaaccctgccatcttttaatatcgtgcttgagatcacctacatatcttggtggaagatatttgaagctttcaaggaacgtcagtcagtcatgttggataatagatgatgagagaatgggtgaagcttcagttgaggagataattggggagaatgttcgtgccatctgcagaggtgatagctgcaagttccatgctgctgggagagaagacattgatgtacggatgcttggatctggtcgtccatttctagttgaagtactgaatgttcgatccattccatctgaaactgaagttcaacaaattgaagagagaattaacaactctgaaaagaaatatgtcatagttcgaaatctcaagttggtagataatgaaatatggaccatgatgcgtgaaggagaagcagagaaacagaagcagtacactgcccttatatggacttctcgtgatctgacagatgatgatcttcataatatttctattatgaaggaaatggaaattgtacagaagaccccaataagagtacttcatcgtagaagccccttagagcggaagcgcatcatacactggatggagattgagaaaatcacaggcagctcaaactactacttgctccatctatgcacacaggctggaacatacatcaaggaatttgtgcatggtgatcttggacgcacgcatcccagcatcggagccataatagggtgcagagctgagatattgcaactcgatgtcactgatgttaagatggactttctcccgtagccggaccttcagctgtttatagcatggatagcatgcagtcccaactcctgcagatgatgaggtggtgcgggataacgagctcagaagaacctcatggcagattctgcacggtgcacgcctacatttttgctaaccgagccaagctcaactggtttggtggaaggtgtaatcatatatccagtccccgaagtcttctccaactcaaaacttggggggcgtctattttcctctaatactaacattttcgctagatcctggtcacattttcgctacctttttcttcaaagaaagaaacatttttcccaggtagattgaagtgcaactcccatagtaacatttttgtctacattgtggagaagatcatcccaactcatttggatccattgttatgccttaggttgttgtgcaatgaaattttatgtactttctccgttccaaaaaaccagtctttttagttcttagtttttatctttatttaaatggatgaaaataaatctagacacacatataaaacacatatatcaagtattgtattaacttattaattaattaaaacgaattttaaattttagtctataaattgctaaatatagaaattaaagattttagtttctatatttggtaattttagaactaaaatgaaataaaatgtagagactaaaaattaatccttagaaaccaaacacac

SEQ ID NO: 19692 - DNA, 2069 bp, Zea Mays
tataaaaacaagggttgtctgtacctgaaggaagcaagatccgagattagctttccacatgttctttccaaaccgatagcacgaacagctgcaaaaagttgcaagcaaacaagaacaaaacatcagtgtataacaacagcttcgttataccttatctatgcattcatagacgtcaagcatactatactctgtcatttcgatcattgtgtaagtccactgcttgtttgccataggcaagtatgcttgctgcgaagaagtgcatgccaaaacatgtgttagctcacattggttcatcatcgaaaatggaagtggcagaacaaagttgtttctcttgtgcatacagttaaattaattccgctgacaactgaaagagcaacttcttttgctccttcctcatagacttgctgtgtagagcaactggagacaaaaaaaactatctgatgggtacaagaaacaagcacatcaatcctcttgacgtcaatcctcttgagatacgtttcaaggaaagataaaatctataattctaaaaaaacataaacattttctatccattcagcgtacttattactggagtacgtagcgattcctgtacgattcccacgaaataaaatctagttgtgtgttactcgctttcctttttaaaaaaactaatccttatagatcacggtttgtcaatcctccatacgagaaaactgagaactgatccgtgcacacctataaaggcaactgaaaactaatcatggtacaccacgacttacctatctgtgtcaggcaactgaaaagtgaaaactaatatgagccttcacatcttatctgtagaagcaagttaataatccaaacacggttaaaaatgaaggaacgtctatagcacggttccctaagtataatatatggttccacccatataatccatataaataagccgtgtattaaaggattctagtgaataagataaaatgtttagatatattggattgtatgaacgagtttcttagatatcagcgtgtctgcgtgtgcctccagccaataagctaccagcgtggagcctttttccccaaaattatctaggactggcactttcagtcaataagctaccagcgtgtctgcgtgtgcctccagccagcacctacactaatcgaactgaaaaaatcactatcaacttggcaagcaaaactctaaacaagaatggcagggccagggtcgtcctgatcaacccagtgcttgacagtcagctcgtctatgtgatgtcgtcgatgcagctgccaccaacggtcgacacagcaaactggcaggttgcgcagggcatttctttgagcaggtgaaacctccaaatcttcaactggccagctggctggcttgtgtcctggcaatcggttatcggtctgcagtgcgcaccaccaaggagctagccagctgggtgatttaggaatcaaagacactgtgggactcaaatcgtctgcctcatactgaagctaattcatcggcttcatgcatgcaatcagcacaaaccttgctaattattgcctttgtgaaccggttatcctcacagggcaacgatagaactcagtcaagtccaaactgaccattttgaccagagtaccagacagtgctcaataatgatgatgagggtgatagacgagtctccctctcatcggtggaccgggcagactgcactcagaaaccgctcatcggtggaccggcatggaggggatactcgaaaaccgctgcttgactgccttatcgtcgaacttcgatcgctccgcaccgctgatggcggcccacccgggggtgagcggatcgccggggccaccgagaagaacgactcctctctcgatgccgccgtccgcgttgcgcgcgataagcacggagacggctcccttgtccgcagcgcgcgccacaaccctgccgcggtacccaccacaaatcgcgcccgcaagaggaagaggagaggacgacaaagcaagcaaaagggtgagggcaaggccgtgtagtaccttggatccgctcggttagggggctcaatagccggatctggctgccatctccggggaggcctgctcggagtcgag

SEQ ID NO: 19693 - DNA, 2189 bp, Zea Mays
ccccgcgcaagtaggtgaggaaagccgaggctccagctgcccgtcgggtttggagcggtccgctcgaccaaccaacgacccctgacggcaatttatgggtgggttagttccggtccggtccggcttcagtcgactccacgcagcagcagccactctgcagcagcagcagcagcctactactactactactgcttttaccggccggtggatcggatcaccaaaccggaacgacagcgatggaggccgggacgtgggcggcggcggccgtggcggccgtggcgctgtacgtggcctggttctggcggatgtcgcgcgggctcagcgggccgcgggtgtggccgctgctcggcagcctgccggggctcgtgcagcacgccgaggacatgcacgagtggatcgccgccaacctgcgccgcgcggggggcacgtaccagacctgcatcttcgccgtgcccggggtggcgcgccgtggcggcctggtcaccgtcacgtgcgacccccggaacctggagcacgtcctcaaggcgcgcttcgacaactaccccaagggccccttctggcacgccgtcttcagggacctgctcggggacggcatcttcaactccgacggcgacacctgggtggcgcagcgcaagacggccgcgctcgagttcaccacgcgcacgctccgcaccgccatgtcgcgctgggtctcccgctccatccacgcccgcctgctgcccatcctcgccgacgcgcacgtcgtcgacctgcaggacctcctgctccgcctcaccttcgacaacatctgcggcctcgccttcgggaaggaccccgagacgctcgcccggggcctccccgacaacgccttcgcctccgcgttcgaccgcgccacggaggccaccctcaaccgcttcatcttccccgagtgcgtctggcgctgcaagaagtggctgggcctcggcatggagaccacgctggcgcgcagcgtccgccacgtcgaccgctacctctcggccgtcatcaaggcgcgcaagctcgagctctccgccgccacgaggaaggacctcctctcggccacgccgcacgacgacctcctctcgcgcttcatgcgcaaggggacctactccgacgagtcgctgcagcacgtggcgctcaacttcatcctcgccggccgcgacacctcctcggtggcgctctcctggttcttctggctggtctccacgcaccccgccgtggagcgcaacatcgtgcgcgagctgtgcgccgtcctggccgggtcccgcggcgtcgaggacccggcactgtggctcgccgcgcccttggacttcgaggagctcgaccgcctcgtctacctcaaggcggcgctctccgagacgctccgcctgtacccctccgtgcctgaggactccaagcacgtcgtcgccgacgacgtcctcccggacggcacgttcgtgccagcgggctcctcggtcacctactccatctactcggcggggcgcatgaagacggtgtggggggaggactgcctccagttccgccccgaacgctggctgtcggacgacggcaccaggttccagccccacgactcgtacaggttcgtggcgttcaacgccggcccgcggatatgcctgggcaaggacctcgcctacctgcagatgaagaacatcgccgggagcgtgctcctccgccaccgcctaaccgtcgcgccgggccaccgcgtcgagcagaagatgtcgctcacgctcttcatgaagcacgggctccgcatggaggtgcgcccgcgcgacctcagcgtcgtcatcgacgagctccgcggcgccggggagtacgacgcggcggcaagagccaccgcggcctccgcatagaggttcgtgcagtgcaggtcgggaaggaaaccaacggacagattggaaacgtcaaatgaaaagttatgtagatattgacagtaagtaattaaagagtttggtgaggtatattactcaattgggaacaaaaatgcatgtgtaaaaagtccatatcattttgatttgcatttgaatgggaggacgaagaaaagcgggccggagagcaataataactctctcatgtaacctgacggggaggcgccaaattggtttcggcagcttgtgttaatgggccgccaaaactgttgttgtttgtaaaaacaaaactcaagcgatcattcattcgatcacttttagccttta

SEQ ID NO: 19694 - DNA, 4190 bp, Zea Mays
ctgtactataaatcctctaaagttttccgaaaaggtacaaacccccgaaacatcggatcttctgcaccaagtctataggccgcaccgctacagcagctccgagcgacggagcgagagagcacagcagcgcaacggtggccaccgcaggagccgcagaagataacgccaccgccgtcgtctgctttcttccgcatacggcacagctagacagcttgtttggagccgcttcgtgccggctttacggtggaaaaaagcggacgaactctcccaaacggcggccaattgtcccgggcatgccttttgtcccgcctgcgattcttctccccgcggtgttcaacgtgcaaggctgcaaacggaatcggcaaggcgaggcgcagtggggaaaatcccatcgattcgctcggccctcgcccctccgctcgctccagaggcaccggcgccgccgactccggactactactccccgcgacgcaggcgctgtctccctcctcgcgcggcggccgccaccgcctcccagacgcctttgaggcagagaaggtgtcaactttgtttccatttgattggatattgtctttacgatcattgctagtgtattatgattttatgaaagatgatggtactatgtgaggtcaaatgaaagttatgatatgccttccttctgatggccagaatatgttaattgatcagtttggataccattgcgataagtagctgtctagatacaccagtacccacaaattctctcacacccaatatgccgacatggtggggtaaatcatcgtcaaaagatgttaagaaaaccaccaaggaaaacctgatcgatacatttcatcgcttgataagtccaaatgagcaaaagggaagcacaaaatcaaaacggaattgcaggcgtggcaataatacagctgctgagaaagtttgcaaatcaacaacagtgtcacgtccaacttctccatcgaaagaagtttctcgctgccaaagtttttcggctgataggctgcatgcccagccacttcctattcctggagtacgccctcgagtaactcgtgcagttgctgatgtcaatgtttcaaagcccatattggaaaaacgtggcaaacctccactgcttttgccacttcctaaacccaatccacttcaccggggacctggaagcagtgatattccttcagaaatagtggttgcttctgtctctagcaattgttctgctgatagtgaggatcgtgcagattctcagcttcagagccctgttgggaatgatactaacaatgtaaaaaaggtttcttcaaagaacaagtcaagtaatgtttgcaaggatcactctggtgctattactaccaagaccacgaaagaaatattgaagccagctgctaatgcattcctcagtaaccatacacagtccgcgccaccaagaggtatctcagctgacaataatcaactaaatttacaaaatccccagccagtagtttttgagagtgctcccaatagtttgatgtcaagtccttcgagaagtccaagaccaatatgtcctgatcatattctgacttcagcattttgggcagtgaagcctcatgctgatgtaactttccttggatctggtcagtgctccagtccaggttcaggacaaacatctggacataattcagtgggtggtgatatgctatcccagctttttttgcagcccaccagaggtagtccagagtgttcaccagttcctagcccaagaatgacaagtcctggtcctagttctcgtgtgcacagtggaagtgtttccccattgcatccaaggtctggaggactggcacctgaatctcctacaagtcggcatgatggtggaaagaagaagcaaacccataaattgccccttccaccattgagcatcgctcacagtccattttttccgaataactcgacaccaagtagtcctatttcagtaccccgtagccctggcagaacagagaatccatcaagtcctgcatcgcgatggaagaagggcaagctgattggtcgtgggacatctggtcatgtatatgttggcttcaacagtgatagtggtgaaatgtgcgcaatgaaagaggttaccctattcttggatgatcctaaatcaaaggagagtgcaaagcaattggggcaggaaatatcactcttgagtcgcttacgacatccaaatattgtacaatactatggatcagaaatggttgaagataaactttacatatatttggaatatgtttctggtggatccatacataaacttctacaagaatatggacagcttggtgaaccagcaatacgcagctacacccttcagatactttcaggcttagcttatttgcatgccaagaatacggtccacagggacatcaaaggtgccaacatactagtaaatccaagtggccgtgttaagcttgcagactttggaatggcaaaacatatcaatgggcagcactgtcctttttcatttaagggtagtccatactggatggctccagaggttataaaaaattctaatggatgcaaccttgtggttgacatatggagtttaggttgcactgtcctggaaatggctacctcaaagccaccatggagccagtatgaagggattgctgcagtgtttaagattgggaatagcaaggaacttccaccaataccggattatctttcggagcactgcagggacttcattaggaagtgtctgcaacgtgacccgtctcaacgtccaacggcagttgagcttttgcaacacccgttcatacaaaatggaatttcacttgagaaatctgttactcctaatcatttggagcatttggctgccatatcatgcagaacaaaacccaaggtggccgtgcagacaagaaatgcctccttaggttttgagggtcagacgatttaccaaagaaggggtgtaaaactatcttcaaaacacagtgatattcacatacgaagcaatacatcctgtccagtttctccatgtcggagccccctgctaaaggcgaggtccccccaacacacaagtggcaaaatgtcaccctctcctatttcgagccccagaactacatcaggcacttccacacccctatctggtggtaatggtgcaattccttttaaccacctaaggtatgcaacttacagcagcgagggatttgggaccacatcaagaggcctagatgatcacttctccaactgtcataaagatctgaaccttgggcattttgctgaggcgcatcaagtctcacagggacctagggaaagggtagtatctgaagctgatattctgagccctcaatttagaaagaaacttggaaatgtatttgacttgcgggaaaggttgtccccttctgaacattttactcgtcgtgccttggtggatcatgtggagctaaatccttcaaaccctggactaaagcgtggtaaataactagagtataaaaggcagggttgcatttttttttgaagtttgttgaagtaactggtggtttttggctactatgaccattcaatggctgcaagtgtatcatagtatcagaaagattgataatttctttagaagctaatggttgccaatggatgggatctctgttgtcatcaacgcaattcaagtcaacaaagattctgcctattcctacatggctgagcaagtttccttagcttactaaactggcgtgctaacaagtgacacgtgtcaattgatgggactgactgaatcacggaatgacccaaagcagtaactctccatctgtatacccctcaccccaatatgtacagaaggaatctcaactaggaacctagaatttgcacaggaaaaaaaaacaggtgtgctagccatttggcaatcagtgccagtttatctgttgctccacagttacatatcccacccatggttgaggtggagctgcaaagtccgttggaattatcttgtagcagtttctcggcaagatgagtcgcttcattcactgtacgtcggtgccggctactctgaaacttacatactataagaatctggtcccttactaactgcatgtcgtccgaaccactgcatgaacttgtttgcactgctgctgggattacgaatgttgtaacaaagcacgggttttgctgcttgatggcggaagcaaaatgtagtacagattaggtgatatgcagtcaagtgtttacctgtctgggtgatggcattcgtcaggaaatttctg

SEQ ID NO: 19695 - DNA, 2435 bp, Zea Mays
gcttgtttggagccgcttcgtgccggctttacggtggaaaaaagcggacgaactctcccaaacggcggccaattgtcccgggcatgccttttgtcccgcctgcgattcttctccccgcggtgttcaacgtgcaaggctgcaaacggaatcggcaaggcgaggcgcagtggggaaaatcccatcgattcgctcggccctcgcccctccgctcgctccagaggcaccggcgccgccgactccggactactactccccgcgacgcaggcgctgtctccctcctcgcgcggcggccgccaccgcctcccagacgcctttgaggcagagaaggtgtcaactttgtttccatttgattggatattgtctttacgatcattgctagtgtattatgattttatgaaagatgatggtactatgtgaggtcaaatgaaagttatgatatgccttccttctgatggccagaatatgttaattgatcagtttggataccattgcgataagtagctgtctagatacaccagtacccacaaattctctcacacccaatatgccgacatggtggggtaaatcatcgtcaaaagatgttaagaaaaccaccaaggaaaacctgatcgatacatttcatcgcttgataagtccaaatgagcaaaagggaagcacaaaatcaaaacggaattgcaggcgtggcaataatacagctgctgagaaagtttgcaaatcaacaacagtgtcacgtccaacttctccatcgaaagaagtttctcgctgccaaagtttttcggctgataggctgcatgcccagccacttcctattcctggagtacgccctcgagtaactcgtgcagttgctgatgtcaatgtttcaaagcccatattggaaaaacgtggcaaacctccactgcttttgccacttcctaaacccaatccacttcaccggggacctggaagcagtgatattccttcagaaatagtggttgcttctgtctctagcaattgttctgctgatagtgaggatcgtgcagattctcagcttcagagccctgttgggaatgatactaacaatgtaaaaaaggtttcttcaaagaacaagtcaagtaatgtttgcaaggatcactctggtgctattactaccaagaccacgaaagaaatattgaagccagctgctaatgcattcctcagtaaccatacacagtccgcgccaccaagaggtatctcagctgacaataatcaactaaatttacaaaatccccagccagtagtttttgagagtgctcccaatagtttgatgtcaagtccttcgagaagtccaagaccaatatgtcctgatcatattctgacttcagcattttgggcagtgaagcctcatgctgatgtaactttccttggatctggtcagtgctccagtccaggttcaggacaaacatctggacataattcagtgggtggtgatatgctatcccagctttttttgcagcccaccagaggtagtccagagtgttcaccagttcctagcccaagaatgacaagtcctggtcctagttctcgtgtgcacagtggaagtgtttccccattgcatccaaggtctggaggactggcacctgaatctcctacaagtcggcatgatggtggaaagaagaagcaaacccataaattgccccttccaccattgagcatcgctcacagtccattttttccgaataactcgacaccaagtagtcctatttcagtaccccgtagccctggcagaacagagaatccatcaagtcctgcatcgcgatggaagaagggcaagctgattggtcgtgggacatctggtcatgtatatgttggcttcaacagtgatagtggtgaaatgtgcgcaatgaaagaggttaccctattcttggatgatcctaaatcaaaggagagtgcaaagcaattggggcaggaaatatcactcttgagtcgcttacgacatccaaatattgtacaatactatggatcagaaatggttgaagataaactttacatatatttggaatatgtttctggtggatccatacataaacttctacaagaatatggacagcttggtgaaccagcaatacgcagctacacccttcagatactttcaggcttagcttatttgcatgccaagaatacggtccacagggacatcaaaggtgccaacatactagtaaatccaagtggccgtgttaagcttgcagactttggaatggcaaaacatatcaatgggcagcactgtcctttttcatttaagggtagtccatactggatggctccagaggttataaaaaattctaatggatgcaaccttgtggttgacatatggagtttaggttgcactgtcctggaaatggctacctcaaagccaccatggagccagtatgaagggttcaagtaattggttgacatcatgtatgctattgatgctggaa

SEQ ID NO: 19696 - DNA, 2478 bp, Zea Mays
gcttgtttggagccgcttcgtgccggctttacggtggaaaaaagcggacgaactctcccaaacggcggccaattgtcccgggcatgccttttgtcccgcctgcgattcttctccccgcggtgttcaacgtgcaaggctgcaaacggaatcggcaaggcgaggcgcagtggggaaaatcccatcgattcgctcggccctcgcccctccgctcgctccagaggcaccggcgccgccgactccggactactactccccgcgacgcaggcgctgtctccctcctcgcgcggcggccgccaccgcctcccagacgcctttgaggcagagaaggtgtcaactttgtttccatttgattggatattgtctttacgatcattgctagtgtattatgattttatgaaagatgatggtactatgtgaggtcaaatgaaagttatgatatgccttccttctgatggccagaatatgttaattgatcagtttggataccattgcgataagtagctgtctagatacaccagtacccacaaattctctcacacccaatatgccgacatggtggggtaaatcatcgtcaaaagatgttaagaaaaccaccaaggaaaacctgatcgatacatttcatcgcttgataagtccaaatgagcaaaagggaagcacaaaatcaaaacggaattgcaggcgtggcaataatacagctgctgagaaagtttgcaaatcaacaacagtgtcacgtccaacttctccatcgaaagaagtttctcgctgccaaagtttttcggctgataggctgcatgcccagccacttcctattcctggagtacgccctcgagtaactcgtgcagttgctgatgtcaatgtttcaaagcccatattggaaaaacgtggcaaacctccactgcttttgccacttcctaaacccaatccacttcaccggggacctggaagcagtgatattccttcagaaatagtggttgcttctgtctctagcaattgttctgctgatagtgaggatcgtgcagattctcagcttcagagccctgttgggaatgatactaacaatgtaaaaaaggtttcttcaaagaacaagtcaagtaatgtttgcaaggatcactctggtgctattactaccaagaccacgaaagaaatattgaagccagctgctaatgcattcctcagtaaccatacacagtccgcgccaccaagaggtatctcagctgacaataatcaactaaatttacaaaatccccagccagtagtttttgagagtgctcccaatagtttgatgtcaagtccttcgagaagtccaagaccaatatgtcctgatcatattctgacttcagcattttgggcagtgaagcctcatgctgatgtaactttccttggatctggtcagtgctccagtccaggttcaggacaaacatctggacataattcagtgggtggtgatatgctatcccagctttttttgcagcccaccagaggtagtccagagtgttcaccagttcctagcccaagaatgacaagtcctggtcctagttctcgtgtgcacagtggaagtgtttccccattgcatccaaggtctggaggactggcacctgaatctcctacaagtcggcatgatggtggaaagaagaagcaaacccataaattgccccttccaccattgagcatcgctcacagtccattttttccgaataactcgacaccaagtagtcctatttcagtaccccgtagccctggcagaacagagaatccatcaagtcctgcatcgcgatggaagaagggcaagctgattggtcgtgggacatctggtcatgtatatgttggcttcaacagtgatagtggtgaaatgtgcgcaatgaaagaggttaccctattcttggatgatcctaaatcaaaggagagtgcaaagcaattggggcaggaaatatcactcttgagtcgcttacgacatccaaatattgtacaatactatggatcagaaatggttgaagataaactttacatatatttggaatatgtttctggtggatccatacataaacttctacaagaatatggacagcttggtgaaccagcaatacgcagctacacccttcagatactttcaggcttagcttatttgcatgccaagaatacggtccacagggacatcaaaggtgccaacatactagtaaatccaagtggccgtgttaagcttgcagactttggaatggcaaaacatatcaatgggcagcactgtcctttttcatttaagggtagtccatactggatggctccagaggttataaaaaattctaatggatgcaaccttgtggttgacatatggagtttaggttgcactgtcctggaaatggctacctcaaagccaccatggagccagtatgaagggggcaaggaagcggcccaggatcaggatgcagcacatacaagtgttttgagttctcaagtacaaggagtcagagtcctaggttcttt

SEQ ID NO: 19697 - DNA, 3831 bp, Zea Mays
gcttgtttggagccgcttcgtgccggctttacggtggaaaaaagcggacgaactctcccaaacggcggccaattgtcccgggcatgccttttgtcccgcctgcgattcttctccccgcggtgttcaacgtgcaaggctgcaaacggaatcggcaaggcgaggcgcagtggggaaaatcccatcgattcgctcggccctcgcccctccgctcgctccagaggcaccggcgccgccgactccggactactactccccgcgacgcaggcgctgtctccctcctcgcgcggcggccgccaccgcctcccagacgaatatgttaattgatcagtttggataccattgcgataagtagctgtctagatacaccagtacccacaaattctctcacacccaatatgccgacatggtggggtaaatcatcgtcaaaagatgttaagaaaaccaccaaggaaaacctgatcgatacatttcatcgcttgataagtccaaatgagcaaaagggaagcacaaaatcaaaacggaattgcaggcgtggcaataatacagctgctgagaaagtttgcaaatcaacaacagtgtcacgtccaacttctccatcgaaagaagtttctcgctgccaaagtttttcggctgataggctgcatgcccagccacttcctattcctggagtacgccctcgagtaactcgtgcagttgctgatgtcaatgtttcaaagcccatattggaaaaacgtggcaaacctccactgcttttgccacttcctaaacccaatccacttcaccggggacctggaagcagtgatattccttcagaaatagtggttgcttctgtctctagcaattgttctgctgatagtgaggatcgtgcagattctcagcttcagagccctgttgggaatgatactaacaatgtaaaaaaggtttcttcaaagaacaagtcaagtaatgtttgcaaggatcactctggtgctattactaccaagaccacgaaagaaatattgaagccagctgctaatgcattcctcagtaaccatacacagtccgcgccaccaagaggtatctcagctgacaataatcaactaaatttacaaaatccccagccagtagtttttgagagtgctcccaatagtttgatgtcaagtccttcgagaagtccaagaccaatatgtcctgatcatattctgacttcagcattttgggcagtgaagcctcatgctgatgtaactttccttggatctggtcagtgctccagtccaggttcaggacaaacatctggacataattcagtgggtggtgatatgctatcccagctttttttgcagcccaccagaggtagtccagagtgttcaccagttcctagcccaagaatgacaagtcctggtcctagttctcgtgtgcacagtggaagtgtttccccattgcatccaaggtctggaggactggcacctgaatctcctacaagtcggcatgatggtggaaagaagaagcaaacccataaattgccccttccaccattgagcatcgctcacagtccattttttccgaataactcgacaccaagtagtcctatttcagtaccccgtagccctggcagaacagagaatccatcaagtcctgcatcgcgatggaagaagggcaagctgattggtcgtgggacatctggtcatgtatatgttggcttcaacagtgatagtggtgaaatgtgcgcaatgaaagaggttaccctattcttggatgatcctaaatcaaaggagagtgcaaagcaattggggcaggaaatatcactcttgagtcgcttacgacatccaaatattgtacaatactatggatcagaaatggttgaagataaactttacatatatttggaatatgtttctggtggatccatacataaacttctacaagaatatggacagcttggtgaaccagcaatacgcagctacacccttcagatactttcaggcttagcttatttgcatgccaagaatacggtccacagggacatcaaaggtgccaacatactagtaaatccaagtggccgtgttaagcttgcagactttggaatggcaaaacatatcaatgggcagcactgtcctttttcatttaagggtagtccatactggatggctccagaggttataaaaaattctaatggatgcaaccttgtggttgacatatggagtttaggttgcactgtcctggaaatggctacctcaaagccaccatggagccagtatgaagggattgctgcagtgtttaagattgggaatagcaaggaacttccaccaataccggattatctttcggagcactgcagggacttcattaggaagtgtctgcaacgtgacccgtctcaacgtccaacggcagttgagcttttgcaacacccgttcatacaaaatggaatttcacttgagaaatctgttactcctaatcatttggagcatttggctgccatatcatgcagaacaaaacccaaggtggccgtgcagacaagaaatgcctccttaggttttgagggtcagacgatttaccaaagaaggggtgtaaaactatcttcaaaacacagtgatattcacatacgaagcaatacatcctgtccagtttctccatgtcggagccccctgctaaaggcgaggtccccccaacacacaagtggcaaaatgtcaccctctcctatttcgagccccagaactacatcaggcacttccacacccctatctggtggtaatggtgcaattccttttaaccacctaaggtatgcaacttacagcagcgagggatttgggaccacatcaagaggcctagatgatcacttctccaactgtcataaagatctgaaccttgggcattttgctgaggcgcatcaagtctcacagggacctagggaaagggtagtatctgaagctgatattctgagccctcaatttagaaagaaacttggaaatgtatttgacttgcgggaaaggttgtccccttctgaacattttactcgtcgtgccttggtggatcatgtggagctaaatccttcaaaccctggactaaagcgtggtaaataactagagtataaaaggcagggttgcatttttttttgaagtttgttgaagtaactggtggtttttggctactatgaccattcaatggctgcaagtgtatcatagtatcagaaagattgataatttctttagaagctaatggttgccaatggatgggatctctgttgtcatcaacgcaattcaagtcaacaaagattctgcctattcctacatggctgagcaagtttccttagcttactaaactggcgtgctaacaagtgacacgtgtcaattgatgggactgactgaatcacggaatgacccaaagcagtaactctccatctgtatacccctcaccccaatatgtacagaaggaatctcaactaggaacctagaatttgcacaggaaaaaaaaacaggtgtgctagccatttggcaatcagtgccagtttatctgttgctccacagttacatatcccacccatggttgaggtggagctgcaaagtccgttggaattatcttgtagcagtttctcggcaagatgagtcgcttcattcactgtacgtcggtgccggctactctgaaacttacatactataagaatctggtcccttactaactgcatgtcgtccgaaccactgcatgaacttgtttgcactgctgctgggattacgaatgttgtaacaaagcacgggttttgctgcttgatggcggaagcaaaatgtagtacagattaggtgatatgcagtcaagtgtttacctgtctgggtgatggcattcgtcaggaaatttctg

SEQ ID NO: 19698 - DNA, 3945 bp, Zea Mays
gcttgtttggagccgcttcgtgccggctttacggtggaaaaaagcggacgaactctcccaaacggcggccaattgtcccgggcatgccttttgtcccgcctgcgattcttctccccgcggtgttcaacgtgcaaggctgcaaacggaatcggcaaggcgaggcgcagtggggaaaatcccatcgattcgctcggccctcgcccctccgctcgctccagaggcaccggcgccgccgactccggactactactccccgcgacgcaggcgctgtctccctcctcgcgcggcggccgccaccgcctcccagacgcctttgaggcagagaaggtgtcaactttgtttccatttgattggatattgtctttacgatcattgctagtgtattatgattttatgaaagatgatggtactatgtgaggtcaaatgaaagttatgatatgccttccttctgatggccagaatatgttaattgatcagtttggataccattgcgataagtagctgtctagatacaccagtacccacaaattctctcacacccaatatgccgacatggtggggtaaatcatcgtcaaaagatgttaagaaaaccaccaaggaaaacctgatcgatacatttcatcgcttgataagtccaaatgagcaaaagggaagcacaaaatcaaaacggaattgcaggcgtggcaataatacagctgctgagaaagtttgcaaatcaacaacagtgtcacgtccaacttctccatcgaaagaagtttctcgctgccaaagtttttcggctgataggctgcatgcccagccacttcctattcctggagtacgccctcgagtaactcgtgcagttgctgatgtcaatgtttcaaagcccatattggaaaaacgtggcaaacctccactgcttttgccacttcctaaacccaatccacttcaccggggacctggaagcagtgatattccttcagaaatagtggttgcttctgtctctagcaattgttctgctgatagtgaggatcgtgcagattctcagcttcagagccctgttgggaatgatactaacaatgtaaaaaaggtttcttcaaagaacaagtcaagtaatgtttgcaaggatcactctggtgctattactaccaagaccacgaaagaaatattgaagccagctgctaatgcattcctcagtaaccatacacagtccgcgccaccaagaggtatctcagctgacaataatcaactaaatttacaaaatccccagccagtagtttttgagagtgctcccaatagtttgatgtcaagtccttcgagaagtccaagaccaatatgtcctgatcatattctgacttcagcattttgggcagtgaagcctcatgctgatgtaactttccttggatctggtcagtgctccagtccaggttcaggacaaacatctggacataattcagtgggtggtgatatgctatcccagctttttttgcagcccaccagaggtagtccagagtgttcaccagttcctagcccaagaatgacaagtcctggtcctagttctcgtgtgcacagtggaagtgtttccccattgcatccaaggtctggaggactggcacctgaatctcctacaagtcggcatgatggtggaaagaagaagcaaacccataaattgccccttccaccattgagcatcgctcacagtccattttttccgaataactcgacaccaagtagtcctatttcagtaccccgtagccctggcagaacagagaatccatcaagtcctgcatcgcgatggaagaagggcaagctgattggtcgtgggacatctggtcatgtatatgttggcttcaacagtgatagtggtgaaatgtgcgcaatgaaagaggttaccctattcttggatgatcctaaatcaaaggagagtgcaaagcaattggggcaggaaatatcactcttgagtcgcttacgacatccaaatattgtacaatactatggatcagaaatggttgaagataaactttacatatatttggaatatgtttctggtggatccatacataaacttctacaagaatatggacagcttggtgaaccagcaatacgcagctacacccttcagatactttcaggcttagcttatttgcatgccaagaatacggtccacagggacatcaaaggtgccaacatactagtaaatccaagtggccgtgttaagcttgcagactttggaatggcaaaacatatcaatgggcagcactgtcctttttcatttaagggtagtccatactggatggctccagaggttataaaaaattctaatggatgcaaccttgtggttgacatatggagtttaggttgcactgtcctggaaatggctacctcaaagccaccatggagccagtatgaagggattgctgcagtgtttaagattgggaatagcaaggaacttccaccaataccggattatctttcggagcactgcagggacttcattaggaagtgtctgcaacgtgacccgtctcaacgtccaacggcagttgagcttttgcaacacccgttcatacaaaatggaatttcacttgagaaatctgttactcctaatcatttggagcatttggctgccatatcatgcagaacaaaacccaaggtggccgtgcagacaagaaatgcctccttaggttttgagggtcagacgatttaccaaagaaggggtgtaaaactatcttcaaaacacagtttctccatgtcggagccccctgctaaaggcgaggtccccccaacacacaagtggcaaaatgtcaccctctcctatttcgagccccagaactacatcaggcacttccacacccctatctggtggtaatggtgcaattccttttaaccacctaaggtatgcaacttacagcagcgagggatttgggaccacatcaagaggcctagatgatcacttctccaactgtcataaagatctgaaccttgggcattttgctgaggcgcatcaagtctcacagggacctagggaaagggtagtatctgaagctgatattctgagccctcaatttagaaagaaacttggaaatgtatttgacttgcgggaaaggttgtccccttctgaacattttactcgtcgtgccttggtggatcatgtggagctaaatccttcaaaccctggactaaagcgtggtaaataactagagtataaaaggcagggttgcatttttttttgaagtttgttgaagtaactggtggtttttggctactatgaccattcaatggctgcaagtgtatcatagtatcagaaagattgataatttctttagaagctaatggttgccaatggatgggatctctgttgtcatcaacgcaattcaagtcaacaaagattctgcctattcctacatggctgagcaagtttccttagcttactaaactggcgtgctaacaagtgacacgtgtcaattgatgggactgactgaatcacggaatgacccaaagcagtaactctccatctgtatacccctcaccccaatatgtacagaaggaatctcaactaggaacctagaatttgcacaggaaaaaaaaacaggtgtgctagccatttggcaatcagtgccagtttatctgttgctccacagttacatatcccacccatggttgaggtggagctgcaaagtccgttggaattatcttgtagcagtttctcggcaagatgagtcgcttcattcactgtacgtcggtgccggctactctgaaacttacatactataagaatctggtcccttactaactgcatgtcgtccgaaccactgcatgaacttgtttgcactgctgctgggattacgaatgttgtaacaaagcacgggttttgctgcttgatggcggaagcaaaatgtagtacagattaggtgatatgcagtcaagtgtttacctgtctgggtgatggcattcgtcaggaaatttctg

SEQ ID NO: 19699 - DNA, 3271 bp, Zea Mays
gcttgtttggagccgcttcgtgccggctttacggtggaaaaaagcggacgaactctcccaaacggcggccaattgtcccgggcatgccttttgtcccgcctgcgattcttctccccgcggtgttcaacgtgcaaggctgcaaacggaatcggcaaggcgaggcgcagtggggaaaatcccatcgattcgctcggccctcgcccctccgctcgctccagaggcaccggcgccgccgactccggactactactccccgcgacgcaggcgctgtctccctcctcgcgcggcggccgccaccgcctcccagacgattctcagcttcagagccctgttgggaatgatactaacaatgtaaaaaaggtttcttcaaagaacaagtcaagtaatgtttgcaaggatcactctggtgctattactaccaagaccacgaaagaaatattgaagccagctgctaatgcattcctcagtaaccatacacagtccgcgccaccaagaggtatctcagctgacaataatcaactaaatttacaaaatccccagccagtagtttttgagagtgctcccaatagtttgatgtcaagtccttcgagaagtccaagaccaatatgtcctgatcatattctgacttcagcattttgggcagtgaagcctcatgctgatgtaactttccttggatctggtcagtgctccagtccaggttcaggacaaacatctggacataattcagtgggtggtgatatgctatcccagctttttttgcagcccaccagaggtagtccagagtgttcaccagttcctagcccaagaatgacaagtcctggtcctagttctcgtgtgcacagtggaagtgtttccccattgcatccaaggtctggaggactggcacctgaatctcctacaagtcggcatgatggtggaaagaagaagcaaacccataaattgccccttccaccattgagcatcgctcacagtccattttttccgaataactcgacaccaagtagtcctatttcagtaccccgtagccctggcagaacagagaatccatcaagtcctgcatcgcgatggaagaagggcaagctgattggtcgtgggacatctggtcatgtatatgttggcttcaacagtgatagtggtgaaatgtgcgcaatgaaagaggttaccctattcttggatgatcctaaatcaaaggagagtgcaaagcaattggggcaggaaatatcactcttgagtcgcttacgacatccaaatattgtacaatactatggatcagaaatggttgaagataaactttacatatatttggaatatgtttctggtggatccatacataaacttctacaagaatatggacagcttggtgaaccagcaatacgcagctacacccttcagatactttcaggcttagcttatttgcatgccaagaatacggtccacagggacatcaaaggtgccaacatactagtaaatccaagtggccgtgttaagcttgcagactttggaatggcaaaacatatcaatgggcagcactgtcctttttcatttaagggtagtccatactggatggctccagaggttataaaaaattctaatggatgcaaccttgtggttgacatatggagtttaggttgcactgtcctggaaatggctacctcaaagccaccatggagccagtatgaagggattgctgcagtgtttaagattgggaatagcaaggaacttccaccaataccggattatctttcggagcactgcagggacttcattaggaagtgtctgcaacgtgacccgtctcaacgtccaacggcagttgagcttttgcaacacccgttcatacaaaatggaatttcacttgagaaatctgttactcctaatcatttggagcatttggctgccatatcatgcagaacaaaacccaaggtggccgtgcagacaagaaatgcctccttaggttttgagggtcagacgatttaccaaagaaggggtgtaaaactatcttcaaaacacagtgatattcacatacgaagcaatacatcctgtccagtttctccatgtcggagccccctgctaaaggcgaggtccccccaacacacaagtggcaaaatgtcaccctctcctatttcgagccccagaactacatcaggcacttccacacccctatctggtggtaatggtgcaattccttttaaccacctaaggtatgcaacttacagcagcgagggatttgggaccacatcaagaggcctagatgatcacttctccaactgtcataaagatctgaaccttgggcattttgctgaggcgcatcaagtctcacagggacctagggaaagggtagtatctgaagctgatattctgagccctcaatttagaaagaaacttggaaatgtatttgacttgcgggaaaggttgtccccttctgaacattttactcgtcgtgccttggtggatcatgtggagctaaatccttcaaaccctggactaaagcgtggtaaataactagagtataaaaggcagggttgcatttttttttgaagtttgttgaagtaactggtggtttttggctactatgaccattcaatggctgcaagtgtatcatagtatcagaaagattgataatttctttagaagctaatggttgccaatggatgggatctctgttgtcatcaacgcaattcaagtcaacaaagattctgcctattcctacatggctgagcaagtttccttagcttactaaactggcgtgctaacaagtgacacgtgtcaattgatgggactgactgaatcacggaatgacccaaagcagtaactctccatctgtatacccctcaccccaatatgtacagaaggaatctcaactaggaacctagaatttgcacaggaaaaaaaaacaggtgtgctagccatttggcaatcagtgccagtttatctgttgctccacagttacatatcccacccatggttgaggtggagctgcaaagtccgttggaattatcttgtagcagtttctcggcaagatgagtcgcttcattcactgtacgtcggtgccggctactctgaaacttacatactataagaatctggtcccttactaactgcatgtcgtccgaaccactgcatgaacttgtttgcactgctgctgggattacgaatgttgtaacaaagcacgggttttgctgcttgatggcggaagcaaaatgtagtacagattaggtgatatgcagtcaagtgtttacctgtctgggtgatggcattcgtcaggaaatttctg

SEQ ID NO: 19700 - DNA, 4226 bp, Zea Mays
gcttgtttggagccgcttcgtgccggctttacggtggaaaaaagcggacgaactctcccaaacggcggccaattgtcccgggcatgccttttgtcccgcctgcgattcttctccccgcggtgttcaacgtgcaaggctgcaaacggaatcggcaaggcgaggcgcagtggggaaaatcccatcgattcgctcggccctcgcccctccgctcgctccagaggcaccggcgccgccgactccggactactactccccgcgacgcaggcgctgtctccctcctcgcgcggcggccgccaccgcctcccagacgcctttgaggcagagaaggtgtcaactttgtttccatttgattggatattgtctttacgatcattgctagtgtattatgattttatgaaagatgatggtactatgtgaggtcaaatgaaagttatgatatgccttccttctgatggccagaatatgttaattgatcagtttggataccattgcgataagtagctgtctagatacaccagtacccacaaattctctcacacccaatatgccgacatggtggggtaaatcatcgtcaaaagatgttaagaaaaccaccaaggaaaacctgatcgatacatttcatcgcttgataagtccaaatgagcaaaagggaagcacaaaatcaaaacggaattgcaggcgtggcaataatacagctgctgagaaagtttgcaaatcaacaacagtgtcacgtccaacttctccatcgaaagaagtttctcgctgccaaagtttttcggctgataggctgcatgcccagccacttcctattcctggagtacgccctcgagtaactcgtgcagttgctgatgtcaatgtttcaaagcccatattggaaaaacgtggcaaacctccactgcttttgccacttcctaaacccaatccacttcaccggggacctggaagcagtgatattccttcagaaatagtggttgcttctgtctctagcaattgttctgctgatagtgaggatcgtgcagattctcagcttcagagccctgttgggaatgatactaacaatgtaaaaaaggtttcttcaaagaacaagtcaagtaatgtttgcaaggatcactctggtgctattactaccaagaccacgaaagaaatattgaagccagctgctaatgcattcctcagtaaccatacacagtccgcgccaccaagaggtatctcagctgacaataatcaactaaatttacaaaatccccagccagtagtttttgagagtgctcccaatagtttgatgtcaagtccttcgagaagtccaagaccaatatgtcctgatcatattctgacttcagcattttgggcagtgaagcctcatgctgatgtaactttccttggatctggtcagtgctccagtccaggttcaggacaaacatctggacataattcagtgggtggtgatatgctatcccagctttttttgcagcccaccagaggtagtccagagtgttcaccagttcctagcccaagaatgacaagtcctggtcctagttctcgtgtgcacagtggaagtgtttccccattgcatccaaggtctggaggactggcacctgaatctcctacaagtcggcatgatggtggaaagaagaagcaaacccataaattgccccttccaccattgagcatcgctcacagtccattttttccgaataactcgacaccaagtagtcctatttcagtaccccgtagccctggcagaacagagaatccatcaagtcctgcatcgcgatggaagaagggcaagctgattggtcgtgggacatctggtcatgtatatgttggcttcaacagtgatagtggtgaaatgtgcgcaatgaaagaggttaccctattcttggatgatcctaaatcaaaggagagtgcaaagcaattggggcaggaaatatcactcttgagtcgcttacgacatccaaatattgtacaatactatggatcagaaatggttgaagataaactttacatatatttggaatatgtttctggtggatccatacataaacttctacaagaatatggacagcttggtgaaccagcaatacgcagctacacccttcagatactttcaggcttagcttatttgcatgccaagaatacggtccacagggacatcaaaggtgccaacatactagtaaatccaagtggccgtgttaagcttgcagactttggaatggcaaaacatatcaatgggcagcactgtcctttttcatttaagggtagtccatactggatggctccagaggttataaaaaattctaatggatgcaaccttgtggttgacatatggagtttaggttgcactgtcctggaaatggctacctcaaagccaccatggagccagtatgaaggggtcacttgtatctggaaaacatcaagaatggattaaatctagctccctgtttcctcctgttatcctaccgctggtgcctaaatccctgcttcgtggtccaggttcccaaatattaccttagcacagagccacagataagatgtgccattacattgacacccagagagcagaatcccacactgggtgaatgagtgaaaagttactttttcctgaattttaccaagactttcgtgctatctgaaagtgattgctgcagtgtttaagattgggaatagcaaggaacttccaccaataccggattatctttcggagcactgcagggacttcattaggaagtgtctgcaacgtgacccgtctcaacgtccaacggcagttgagcttttgcaacacccgttcatacaaaatggaatttcacttgagaaatctgttactcctaatcatttggagcatttggctgccatatcatgcagaacaaaacccaaggtggccgtgcagacaagaaatgcctccttaggttttgagggtcagacgatttaccaaagaaggggtgtaaaactatcttcaaaacacagtgatattcacatacgaagcaatacatcctgtccagtttctccatgtcggagccccctgctaaaggcgaggtccccccaacacacaagtggcaaaatgtcaccctctcctatttcgagccccagaactacatcaggcacttccacacccctatctggtggtaatggtgcaattccttttaaccacctaaggtatgcaacttacagcagcgagggatttgggaccacatcaagaggcctagatgatcacttctccaactgtcataaagatctgaaccttgggcattttgctgaggcgcatcaagtctcacagggacctagggaaagggtagtatctgaagctgatattctgagccctcaatttagaaagaaacttggaaatgtatttgacttgcgggaaaggttgtccccttctgaacattttactcgtcgtgccttggtggatcatgtggagctaaatccttcaaaccctggactaaagcgtggtaaataactagagtataaaaggcagggttgcatttttttttgaagtttgttgaagtaactggtggtttttggctactatgaccattcaatggctgcaagtgtatcatagtatcagaaagattgataatttctttagaagctaatggttgccaatggatgggatctctgttgtcatcaacgcaattcaagtcaacaaagattctgcctattcctacatggctgagcaagtttccttagcttactaaactggcgtgctaacaagtgacacgtgtcaattgatgggactgactgaatcacggaatgacccaaagcagtaactctccatctgtatacccctcaccccaatatgtacagaaggaatctcaactaggaacctagaatttgcacaggaaaaaaaaacaggtgtgctagccatttggcaatcagtgccagtttatctgttgctccacagttacatatcccacccatggttgaggtggagctgcaaagtccgttggaattatcttgtagcagtttctcggcaagatgagtcgcttcattcactgtacgtcggtgccggctactctgaaacttacatactataagaatctggtcccttactaactgcatgtcgtccgaaccactgcatgaacttgtttgcactgctgctgggattacgaatgttgtaacaaagcacgggttttgctgcttgatggcggaagcaaaatgtagtacagattaggtgatatgcagtcaagtgtttacctgtctgggtgatggcattcgtcaggaaatttctg

SEQ ID NO: 19701 - DNA, 3813 bp, Zea Mays
gcttgtttggagccgcttcgtgccggctttacggtggaaaaaagcggacgaactctcccaaacggcggccaattgtcccgggcatgccttttgtcccgcctgcgattcttctccccgcggtgttcaacgtgcaaggctgcaaacggaatcggcaaggcgaggcgcagtggggaaaatcccatcgattcgctcggccctcgcccctccgctcgctccagaggcaccggcgccgccgactccggactactactccccgcgacgcaggcgctgtctccctcctcgcgcggcggccgccaccgcctcccagacgtttggataccattgcgataagtagctgtctagatacaccagtacccacaaattctctcacacccaatatgccgacatggtggggtaaatcatcgtcaaaagatgttaagaaaaccaccaaggaaaacctgatcgatacatttcatcgcttgataagtccaaatgagcaaaagggaagcacaaaatcaaaacggaattgcaggcgtggcaataatacagctgctgagaaagtttgcaaatcaacaacagtgtcacgtccaacttctccatcgaaagaagtttctcgctgccaaagtttttcggctgataggctgcatgcccagccacttcctattcctggagtacgccctcgagtaactcgtgcagttgctgatgtcaatgtttcaaagcccatattggaaaaacgtggcaaacctccactgcttttgccacttcctaaacccaatccacttcaccggggacctggaagcagtgatattccttcagaaatagtggttgcttctgtctctagcaattgttctgctgatagtgaggatcgtgcagattctcagcttcagagccctgttgggaatgatactaacaatgtaaaaaaggtttcttcaaagaacaagtcaagtaatgtttgcaaggatcactctggtgctattactaccaagaccacgaaagaaatattgaagccagctgctaatgcattcctcagtaaccatacacagtccgcgccaccaagaggtatctcagctgacaataatcaactaaatttacaaaatccccagccagtagtttttgagagtgctcccaatagtttgatgtcaagtccttcgagaagtccaagaccaatatgtcctgatcatattctgacttcagcattttgggcagtgaagcctcatgctgatgtaactttccttggatctggtcagtgctccagtccaggttcaggacaaacatctggacataattcagtgggtggtgatatgctatcccagctttttttgcagcccaccagaggtagtccagagtgttcaccagttcctagcccaagaatgacaagtcctggtcctagttctcgtgtgcacagtggaagtgtttccccattgcatccaaggtctggaggactggcacctgaatctcctacaagtcggcatgatggtggaaagaagaagcaaacccataaattgccccttccaccattgagcatcgctcacagtccattttttccgaataactcgacaccaagtagtcctatttcagtaccccgtagccctggcagaacagagaatccatcaagtcctgcatcgcgatggaagaagggcaagctgattggtcgtgggacatctggtcatgtatatgttggcttcaacagtgatagtggtgaaatgtgcgcaatgaaagaggttaccctattcttggatgatcctaaatcaaaggagagtgcaaagcaattggggcaggaaatatcactcttgagtcgcttacgacatccaaatattgtacaatactatggatcagaaatggttgaagataaactttacatatatttggaatatgtttctggtggatccatacataaacttctacaagaatatggacagcttggtgaaccagcaatacgcagctacacccttcagatactttcaggcttagcttatttgcatgccaagaatacggtccacagggacatcaaaggtgccaacatactagtaaatccaagtggccgtgttaagcttgcagactttggaatggcaaaacatatcaatgggcagcactgtcctttttcatttaagggtagtccatactggatggctccagaggttataaaaaattctaatggatgcaaccttgtggttgacatatggagtttaggttgcactgtcctggaaatggctacctcaaagccaccatggagccagtatgaagggattgctgcagtgtttaagattgggaatagcaaggaacttccaccaataccggattatctttcggagcactgcagggacttcattaggaagtgtctgcaacgtgacccgtctcaacgtccaacggcagttgagcttttgcaacacccgttcatacaaaatggaatttcacttgagaaatctgttactcctaatcatttggagcatttggctgccatatcatgcagaacaaaacccaaggtggccgtgcagacaagaaatgcctccttaggttttgagggtcagacgatttaccaaagaaggggtgtaaaactatcttcaaaacacagtgatattcacatacgaagcaatacatcctgtccagtttctccatgtcggagccccctgctaaaggcgaggtccccccaacacacaagtggcaaaatgtcaccctctcctatttcgagccccagaactacatcaggcacttccacacccctatctggtggtaatggtgcaattccttttaaccacctaaggtatgcaacttacagcagcgagggatttgggaccacatcaagaggcctagatgatcacttctccaactgtcataaagatctgaaccttgggcattttgctgaggcgcatcaagtctcacagggacctagggaaagggtagtatctgaagctgatattctgagccctcaatttagaaagaaacttggaaatgtatttgacttgcgggaaaggttgtccccttctgaacattttactcgtcgtgccttggtggatcatgtggagctaaatccttcaaaccctggactaaagcgtggtaaataactagagtataaaaggcagggttgcatttttttttgaagtttgttgaagtaactggtggtttttggctactatgaccattcaatggctgcaagtgtatcatagtatcagaaagattgataatttctttagaagctaatggttgccaatggatgggatctctgttgtcatcaacgcaattcaagtcaacaaagattctgcctattcctacatggctgagcaagtttccttagcttactaaactggcgtgctaacaagtgacacgtgtcaattgatgggactgactgaatcacggaatgacccaaagcagtaactctccatctgtatacccctcaccccaatatgtacagaaggaatctcaactaggaacctagaatttgcacaggaaaaaaaaacaggtgtgctagccatttggcaatcagtgccagtttatctgttgctccacagttacatatcccacccatggttgaggtggagctgcaaagtccgttggaattatcttgtagcagtttctcggcaagatgagtcgcttcattcactgtacgtcggtgccggctactctgaaacttacatactataagaatctggtcccttactaactgcatgtcgtccgaaccactgcatgaacttgtttgcactgctgctgggattacgaatgttgtaacaaagcacgggttttgctgcttgatggcggaagcaaaatgtagtacagattaggtgatatgcagtcaagtgtttacctgtctgggtgatggcattcgtcaggaaatttctg

SEQ ID NO: 19702 - DNA, 1734 bp, Zea Mays
gtaagcttcccttctcttccatctctcactctgcagcaatcgcttccttttttctgttgctaggtagcttgctaccactaccagtagatgctgctgcttgtgctggtttgtgctagactgctagtaatttcgcagggagccagggacaggcgcccggtggatctggaacgcgtgtgttgcgctgagatctgcgtgggctcgtgtgtagagtaaatggtttgcgtgctgccgaaatattgcgtgcagtgttcggcttagcttctgctggcttgaccgatagcaggagctcagttcttgataatagaattttctttcagagcgtactgaagtcagcgatgagctagtgacttccaagtttgaacttgaatgccgagtagtgatgtgccaaggaggttgacccttagctcgctaggctcttgctgcgttgaatttttaggacacagctgactagacatgacctttaaccttgctccacactttctaggaattcagttgcgctaagtagagttttctagggtgcagattagtcaacactagagagtgggcaactctatcacgttttttttttttttttgcataccgtgttatcactctcttgctgcagcactccaaaatagtgagcacgttatgagaactttgcaaagtggaatgccacaaagtaaataaaccactatacaaagcactgcaggttctttaagttagtgttggactgttagggatacgttttgattttgagagagccacgtggccattaattttgctctcgtgggaacataattttgttgtactgtttgttgttgttcaatcaaattgtacttgttatgtttaacacacacacacacactatagcgccatccccgtccatggaaaaacagaaaaaagaatccataattttatagctggaataaacattcagtgtggcaaggttaatccaaaatgcttcagagttcagacttcagactcatgttggatttggtgatgaacatgtaatggctgctccttctgggtaaaaaactggatccaaagaaatatcacaaatacatattattaattaaaagtctggtctaatgctgaatcacagaaaaaaacaaattggaagaaacaaattgtgctgtcatcatctatataaacctgattttttactacgtactgtatgttctaaggaaatgttagtggcacatagctagcagtggcaatggaccacgatccaaatgtttcttcactatttgtttgagcccttaattaattttaattaaaaaatgaaaagaaatagggtccgatcctaatttgaccctattcttaaattttatagtgtaaaatttagatccattaccaccctacacacagttaatgttcagttgataatttctggttttaatgatgtctgcttgtgtatttcagcctttgaggcagagaaggtgtcaactttgtttccatttgattggatattgtctttacgatcattgctagtgtattatgattttatgaaagatgatggtactatgtgaggtcaaatgaaagttatgatatgccttccttctgatggccagaatatgttaattgatcagtttggataccattgcgataagtagctgtctagatacaccagtacccacaaattctctcacacccaatatgccgacatggtggggtaaatcatcgtcaaaagatgttaagaaaaccaccaaggaaaacctgatcgatacatttcatcgcttgataagtccaaatgag

SEQ ID NO: 19703 - DNA, 1668 bp, Zea Mays
tcaagaatggattaaatctagctccctgtttcctcctgttatcctaccgctggtgcctaaatccctgcttcgtggtccagattgctgcagtgtttaagattgggaatagcaaggaacttccaccaataccggattatctttcggagcactgcagggacttcattaggaagtgtctgcaacgtgacccgtctcaacgtccaacggcagttgagcttttgcaacacccgttcatacaaaatggaatttcacttgagaaatctgttactcctaatcatttggagcatttggctgccatatcatgcagaacaaaacccaaggtggccgtgcagacaagaaatgcctccttaggttttgagggtcagacgatttaccaaagaaggggtgtaaaactatcttcaaaacacagtgatattcacatacgaagcaatacatcctgtccagtttctccatgtcggagccccctgctaaaggcgaggtccccccaacacacaagtggcaaaatgtcaccctctcctatttcgagccccagaactacatcaggcacttccacacccctatctggtggtaatggtgcaattccttttaaccacctaaggtatgcaacttacagcagcgagggatttgggaccacatcaagaggcctagatgatcacttctccaactgtcataaagatctgaaccttgggcattttgctgaggcgcatcaagtctcacagggacctagggaaagggtagtatctgaagctgatattctgagccctcaatttagaaagaaacttggaaatgtatttgacttgcgggaaaggttgtccccttctgaacattttactcgtcgtgccttggtggatcatgtggagctaaatccttcaaaccctggactaaagcgtggtaaataactagagtataaaaggcagggttgcatttttttttgaagtttgttgaagtaactggtggtttttggctactatgaccattcaatggctgcaagtgtatcatagtatcagaaagattgataatttctttagaagctaatggttgccaatggatgggatctctgttgtcatcaacgcaattcaagtcaacaaagattctgcctattcctacatggctgagcaagtttccttagcttactaaactggcgtgctaacaagtgacacgtgtcaattgatgggactgactgaatcacggaatgacccaaagcagtaactctccatctgtatacccctcaccccaatatgtacagaaggaatctcaactaggaacctagaatttgcacaggaaaaaaaaacaggtgtgctagccatttggcaatcagtgccagtttatctgttgctccacagttacatatcccacccatggttgaggtggagctgcaaagtccgttggaattatcttgtagcagtttctcggcaagatgagtcgcttcattcactgtacgtcggtgccggctactctgaaacttacatactataagaatctggtcccttactaactgcatgtcgtccgaaccactgcatgaacttgtttgcactgctgctgggattacgaatgttgtaacaaagcacgggttttgctgcttgatggcggaagcaaaatgtagtacagattaggtgatatgcagtcaagtgtttacctgtctgggtgatggcattcgtcaggaaatttctg

SEQ ID NO: 19704 - DNA, 1710 bp, Zea Mays
cacagagccacagataagatgtgccattacattgacacccagagagcagaatcccacactgggtgaatgagtgaaaagttactttttcctgaattttaccaagactttcgtgctatctgaaaattgctgcagtgtttaagattgggaatagcaaggaacttccaccaataccggattatctttcggagcactgcagggacttcattaggaagtgtctgcaacgtgacccgtctcaacgtccaacggcagttgagcttttgcaacacccgttcatacaaaatggaatttcacttgagaaatctgttactcctaatcatttggagcatttggctgccatatcatgcagaacaaaacccaaggtggccgtgcagacaagaaatgcctccttaggttttgagggtcagacgatttaccaaagaaggggtgtaaaactatcttcaaaacacagtgatattcacatacgaagcaatacatcctgtccagtttctccatgtcggagccccctgctaaaggcgaggtccccccaacacacaagtggcaaaatgtcaccctctcctatttcgagccccagaactacatcaggcacttccacacccctatctggtggtaatggtgcaattccttttaaccacctaaggtatgcaacttacagcagcgagggatttgggaccacatcaagaggcctagatgatcacttctccaactgtcataaagatctgaaccttgggcattttgctgaggcgcatcaagtctcacagggacctagggaaagggtagtatctgaagctgatattctgagccctcaatttagaaagaaacttggaaatgtatttgacttgcgggaaaggttgtccccttctgaacattttactcgtcgtgccttggtggatcatgtggagctaaatccttcaaaccctggactaaagcgtggtaaataactagagtataaaaggcagggttgcatttttttttgaagtttgttgaagtaactggtggtttttggctactatgaccattcaatggctgcaagtgtatcatagtatcagaaagattgataatttctttagaagctaatggttgccaatggatgggatctctgttgtcatcaacgcaattcaagtcaacaaagattctgcctattcctacatggctgagcaagtttccttagcttactaaactggcgtgctaacaagtgacacgtgtcaattgatgggactgactgaatcacggaatgacccaaagcagtaactctccatctgtatacccctcaccccaatatgtacagaaggaatctcaactaggaacctagaatttgcacaggaaaaaaaaacaggtgtgctagccatttggcaatcagtgccagtttatctgttgctccacagttacatatcccacccatggttgaggtggagctgcaaagtccgttggaattatcttgtagcagtttctcggcaagatgagtcgcttcattcactgtacgtcggtgccggctactctgaaacttacatactataagaatctggtcccttactaactgcatgtcgtccgaaccactgcatgaacttgtttgcactgctgctgggattacgaatgttgtaacaaagcacgggttttgctgcttgatggcggaagcaaaatgtagtacagattaggtgatatgcagtcaagtgtttacctgtctgggtgatggcattcgtcaggaaatttctg

SEQ ID NO: 19705 - DNA, 3887 bp, Zea Mays
tgctctgcatgagaacaggagacagcgtctctcttgtgcttgccccgtggccggcgctagctccgatccttcgccccggttcggcctctcccggcgcctcgggtcatgcccacgagaccacgagctacgcgccgcagacggcagggttccggagccaatgtatgctgctgaggcggcaggactctagcagctctcctatctcataccctattccaaacaacactctgtaaaaagtgtaatgtgacgcccgacgcgcctggatgccgaatcgcctggatcgagacgagtctgggatgagcacggcggcgcctcctcctggccagcggtgagcgtccgtgctgtgaggaagacgtcggcaacatgatgaaggcatgacgctcaacaggagactcaaagataagtctggtttgtgttggtattatttcatttcctctcctcttctgatagtgttttatacgctcctaatctgggcctaagtaccagatctattacaaagctgttaaccctaatctgggccagcccacaatcaccatgtaaaatcgctaagaattcaaaccaatccaagtacacaaatgaaacaaagctcattactactatttcctactgatgcacaccctgatccatgacatgtaatgacaggccaagggcctgcttgaatgcgctgcacctattagcgcctggcgcggtagcaattagttaattactagccacacattgcttccatttgctcctccgtggctgctgattgcagaagcacacttttgcagttccatgcggactgtccttgttgtcatatcatatcccaattgacgatctaatattacatagaacgccgttatgaaccctagagaacttcagcttttgtgtagcgggactgcaaacaacatatgttttgccaccgctaccaattccttatgctttacattcgatccctaactctgcgcatgcaactttgtaacttacagtcacacgatggcaaaacagcatcatctgcatccatgcatgggtcgttcgtcgtcgtcactgcctctcctgctggttccactcgagtattgccgaacgaagggccctgttcggcacgagaaggctgcgctcgaggtcgagattcgtcatgggtgatgtgctatgcccgctgtcaagccagcccctaatagcttcaccctcataagtgaatccatccgctgcaacagatactggctgccccatcatttggtggacaactggaatcagagttctgcgtctgcgatctgcctgagtcaacagtgaagtcctctaaactccgtagtctccttggcttgcctttgaaagtggactcaacatcttcaaatgattgaagcagtgtatcaccagcattttcatatagagagcaaggaacgtggacatgagcaatggcaatccgggagctggaggcgtccctggccaagttgtgcagcgcccacagcaagttgctcttgccgtgcttgagttcttcggggacagcaacgaaaatcttgtcgtcgacagccaaaggcgggctctccgcggcctccctggtgttgctcaccgccgttcttaaggtgtgctggaaagaacgaaagattgcagtcacgcggcgcgcagcatggattgtaatgctgccctccaggacccggaattaaaatgcgaaagacccgaacgttacaaacgaaggcgaggttgtagcatcatttaaaaaaacccgctgtcggaagaaatcactttggtatcttcgtgaatcgggaccggatattcatggcatttggtagacttttctggctgcgaggtgaaattactggagacctgcatagacgaagtaccgtctgttgctcgttactgctctgccagtcgtcgtctaacacgattgtttcgatgcatcgatgtgaaaatgctcagcaaacagcatattctgaggctgcatttgctcgctgccgcttcctctgcagaaaccttttgacttcttaacaatcacgagattcttcgccgtgtgtgtcttttgttatcacggtctgcctgaaattcatcaaaaaacaagtggcatcaaaattgccctatgccacatttctcttgctagcccggccccgatcagaactgaagcccatgatggatgagggcccagtcccctgcatggaccacttcctcggcgtcgggactcgggactgcgacccggcaacagaagcacggaagcaggagacgaccaataggcaatagcaacgcgccggcggctcggcggcgtcgaacgattcgggcaatcgacaagcagccccaccaaaccaggaaactgcaaacctacccccggtcgccgactcgccgacctcgactctccgcccagactacaaatggagctctgcacctgcgcggcccgcagttctgcgcccccctcttctagctgccgcgcggcgccattcccgcgagttctctcccatcgcatttggagccgatcgggatactgcactgtctgctttaccccgtcaagccctgttgctaggagtcgattctctactctaatgacgactgcacacaagtatgatgcgacaagtctgtataactgaccctctgttttgctttgggaattgggacgatgcaccgccgctaagattaactagcaaaaaggcacagggaccccagatctagttgacttcaattgggatgatcttgggtttcaactgatcccaacggacttcatgtatttaatgagctgttcttcagatggggtgtttatgaatggtaaattagtgccatatgggtcaattgagctgaatccagcagccgccgtgctgaattatggtcagggattgcttgaaggtctacgatcacatagaaaagaggatggatcaatccttctttttcgtccacatgaaaatgcacggcggatggaaattggtgcagaccggttatgcatgcctgcaccaagtgtagagcaattcctagaagctgtgaaactaactgttctggcaaacaagcattgggtgcctccttttggtaaaggttctttgtatatcagaccgcagctaattggaagtggggctatgcttggtgtggcacctgccccacagtacacattcattgtgtttgtttgcccagttgggcattatttcaagggtggtctagctccaatcagcttgttaactgaggaagaataccaccgtgctgcacctggtggaactggtgatataaaaactattgggaactatgcttcggttgtcagtgctcagagaagatccaaggaaaaaggccattctgatgttttatacttagatccactccataataagtttgttgaggaagtttcttcttgtaatatattcatggtgaaggacaatattatttctactccactgttaacggggacaattcttcctggaatcacaaggagaagtgtgattgaaatttctcagaatcttggatttcaggttgaggagcgtcttatcacaatagatgaactgcttggggctgatgaagtcttttgtacaggaacagctgttgtattgtcacctgttgggagcatcacttaccgtggaagaagagtggagtatgggaagaaccaggaggccggagtcgtgtcccaacaactctatgccgcactcacagctatccagaaaggtctcacggaggacagcatgggatggacgttgcagctaacttagcagcttttttcacatgatcgagctctacaactcttatttccgttttctcgataagtctcacttctatcaacttgttcttctgttgaaacagagtactttaaaagggatccccaataatgactttccctgtgtattgctgatatgttggcactagatatttttggaaactctatttaaagcacagtgttttgcaccacaagcattatactacatccgttcataaaaaaataattagttatcatttat

SEQ ID NO: 19706 - DNA, 3864 bp, Zea Mays
gctctgcatgagaacaggagacagcgtctctcttgtgcttgccccgtggccggcgctagctccgatccttcgccccggttcggcctctcccggcgcctcgggtcatgcccacgagaccacgagctacgcgccgcagacggcagggttccggagccaatgtatgctgctgaggcggcaggactctagcagctctcctatctcataccctattccaaacaacactctgtaaaaagtgtaatgtgacgcccgacgcgcctggatgccgaatcgcctggatcgagacgagtctgggatgagcacggcggcgcctcctcctggccagcggtgagcgtccgtgctgtgaggaagacgtcggcaacatgatgaaggcatgacgctcaacaggagactcaaagataagtctggtttgtgttggtattatttcatttcctctcctcttctgatagtgttttatacgctcctaatctgggcctaagtaccagatctattacaaagctgttaaccctaatctgggccagcccacaatcaccatgtaaaatcgctaagaattcaaaccaatccaagtacacaaatgaaacaaagctcattactactatttcctactgatgcacaccctgatccatgacatgtaatgacaggccaagggcctgcttgaatgcgctgcacctattagcgcctggcgcggtagcaattagttaattactagccacacattgcttccatttgctcctccgtggctgctgattgcagaagcacacttttgcagttccatgcggactgtccttgttgtcatatcatatcccaattgacgatctaatattacatagaacgccgttatgaaccctagagaacttcagcttttgtgtagcgggactgcaaacaacatatgttttgccaccgctaccaattccttatgctttacattcgatccctaactctgcgcatgcaactttgtaacttacagtcacacgatggcaaaacagcatcatctgcatccatgcatgggtcgttcgtcgtcgtcactgcctctcctgctggttccactcgagtattgccgaacgaagggccctgttcggcacgagaaggctgcgctcgaggtcgagattcgtcatgggtgatgtgctatgcccgctgtcaagccagcccctaatagcttcaccctcataagtgaatccatccgctgcaacagatactggctgccccatcatttggtggacaactggaatcagagttctgcgtctgcgatctgcctgagtcaacagtgaagtcctctaaactccgtagtctccttggcttgcctttgaaagtggactcaacatcttcaaatgattgaagcagtgtatcaccagcattttcatatagagagcaaggtgtatctgcattgccgcccctgtcaaagtgacagttaacaatcacaattattgttatatcctacaaggaacgtggacatgagcaatggcaatccgggagctggaggcgtccctggccaagttgtgcagcgcccacagcaagttgctcttgccgtgcttgagttcttcggggacagcaacgaaaatcttgtcgtcgacagccaaaggcgggctctccgcggcctccctggtgttgctcaccgccgttcttaaggtgtgctggaaagaacgaaagattgcagtcacgcggcgcgcagcatggattgtaatgctgccctccaggacccggaattaaaatgcgaaagacccgaacgttacaaacgaaggcgaggttgtagcatcatttaaaaaaacccgctgtcggaagaaatcactttggtatcttcgtgaatcgggaccggatattcatggcatttggtagacttttctggctgcgaggtgaaattactggagacctgcatagacgaagtaccgtctgttgctcgttactgctctgccagtcgtcgtctaacacgattgtttcgatgcatcgatgtgaaaatgctcagcaaacagcatattctgaggctgcatttgctcgctgccgcttcctctgcagaaaccttttgacttcttaacaatcacgagattcttcgccgtgtgtgtcttttgttatcacggtctgcctgaaattcatcaaaaaacaagtggcatcaaaattgccctatgccacatttctcttgctagcccggccccgatcagaactgaagcccatgatggatgagggcccagtcccctgcatggaccacttcctcggcgtcgggactcgggactgcgacccggcaacagaagcacggaagcaggagacgaccaataggcaatagcaacgcgccggcggctcggcggcgtcgaacgattcgggcaatcgacaagcagccccaccaaaccaggaaactgcaaacctacccccggtcgccgactcgccgacctcgactctccgcccagactacaaatggagctctgcacctgcgcggcccgcagttctgcgcccccctcttctagctgccgcgcggcgccattcccgcgagttctctcccatcgcatttggagccgatcgggatactgcactgtctgctttaccccgtcaagccctgttgctaggagtcgattctctactctaatgacgactgcacacaacacagggaccccagatctagttgacttcaattgggatgatcttgggtttcaactgatcccaacggacttcatgtatttaatgagctgttcttcagatggggtgtttatgaatggtaaattagtgccatatgggtcaattgagctgaatccagcagccgccgtgctgaattatggtcagggattgcttgaaggtctacgatcacatagaaaagaggatggatcaatccttctttttcgtccacatgaaaatgcacggcggatggaaattggtgcagaccggttatgcatgcctgcaccaagtgtagagcaattcctagaagctgtgaaactaactgttctggcaaacaagcattgggtgcctccttttggtaaaggttctttgtatatcagaccgcagctaattggaagtggggctatgcttggtgtggcacctgccccacagtacacattcattgtgtttgtttgcccagttgggcattatttcaagggtggtctagctccaatcagcttgttaactgaggaagaataccaccgtgctgcacctggtggaactggtgatataaaaactattgggaactatgcttcggttgtcagtgctcagagaagatccaaggaaaaaggccattctgatgttttatacttagatccactccataataagtttgttgaggaagtttcttcttgtaatatattcatggtgaaggacaatattatttctactccactgttaacggggacaattcttcctggaatcacaaggagaagtgtgattgaaatttctcagaatcttggatttcaggttgaggagcgtcttatcacaatagatgaactgcttggggctgatgaagtcttttgtacaggaacagctgttgtattgtcacctgttgggagcatcacttaccgtggaagaagagtggagtatgggaagaaccaggaggccggagtcgtgtcccaacaactctatgccgcactcacagctatccagaaaggtctcacggaggacagcatgggatggacgttgcagctaacttagcagcttttttcacatgatcgagctctacaactcttatttccgttttctcgataagtctcacttctatcaacttgttcttctgttgaaacagagtactttaaaagggatccccaataatgactttccctgtgtattgctgatatgttggcactagatatttttggaaactctatttaaagcacagtgttttgcaccacaagcattatactacatccgttcataaaaaaataattagttatcatttat

SEQ ID NO: 19707 - DNA, 3605 bp, Zea Mays
gctctgcatgagaacaggagacagcgtctctcttgtgcttgccccgtggccggcgctagctccgatccttcgccccggttcggcctctcccggcgcctcgggtcatgcccacgagaccacgagctacgcgccgcagacggcagggttccggagccaatgtatgctgctgaggcggcaggactctagcagctctcctatctcataccctattccaaacaacactctgtaaaaagtgtaatgtgacgcccgacgcgcctggatgccgaatcgcctggatcgagacgagtctgggatgagcacggcggcgcctcctcctggccagcggtgagcgtccgtgctgtgaggaagacgtcggcaacatgatgaaggcatgacgctcaacaggagactcaaagataagtctggtttgtgttggtattatttcatttcctctcctcttctgatagtgttttatacgctcctaatctgggcctaagtaccagatctattacaaagctgttaaccctaatctgggccagcccacaatcaccatgtaaaatcgctaagaattcaaaccaatccaagtacacaaatgaaacaaagctcattactactatttcctactgatgcacaccctgatccatgacatgtaatgacaggccaagggcctgcttgaatgcgctgcacctattagcgcctggcgcggtagcaattagttaattactagccacacattgcttccatttgctcctccgtggctgctgattgcagaagcacacttttgcagttccatgcggactgtccttgttgtcatatcatatcccaattgacgatctaatattacatagaacgccgttatgaaccctagagaacttcagcttttgtgtagcgggactgcaaacaacatatgttttgccaccgctaccaattccttatgctttacattcgatccctaactctgcgcatgcaactttgtaacttacagtcacacgatggcaaaacagcatcatctgcatccatgcatgggtcgttcgtcgtcgtcactgcctctcctgctggttccactcgagtattgccgaacgaagggccctgttcggcacgagaaggctgcgctcgaggtcgagattcgtcatgggtgatgtgctatgcccgctgtcaagccagcccctaatagcttcaccctcataagtgaatccatccgctgcaacgaacgtggacatgagcaatggcaatccgggagctggaggcgtccctggccaagttgtgcagcgcccacagcaagttgctcttgccgtgcttgagttcttcggggacagcaacgaaaatcttgtcgtcgacagccaaaggcgggctctccgcggcctccctggtgttgctcaccgccgttcttaaggaaagaacgaaagattgcagtcacgcggcgcgcagcatggattgtaatgctgccctccaggacccggaattaaaatgcgaaagacccgaacgttacaaacgaaggcgaggttgtagcatcatttaaaaaaacccgctgtcggaagaaatcactttggtatcttcgtgaatcgggaccggatattcatggcatttggtagacttttctggctgcgaggtgaaattactggagacctgcatagacgaagtaccgtctgttgctcgttactgctctgccagtcgtcgtctaacacgattgtttcgatgcatcgatgtgaaaatgctcagcaaacagcatattctgaggctgcatttgctcgctgccgcttcctctgcagaaaccttttgacttcttaacaatcacgagattcttcgccgtgtgtgtcttttgttatcacggtctgcctgaaattcatcaaaaaacaagtggcatcaaaattgccctatgccacatttctcttgctagcccggccccgatcagaactgaagcccatgatggatgagggcccagtcccctgcatggaccacttcctcggcgtcgggactcgggactgcgacccggcaacagaagcacggaagcaggagacgaccaataggcaatagcaacgcgccggcggctcggcggcgtcgaacgattcgggcaatcgacaagcagccccaccaaaccaggaaactgcaaacctacccccggtcgccgactcgccgacctcgactctccgcccagactacaaatggagctctgcacctgcgcggcccgcagttctgcgcccccctcttctagctgccgcgcggcgccattcccgcgagttctctcccatcgcatttggagccgatcgggatactgcactgtctgctttaccccgtcaagccctgttgctaggagtcgattctctactctaatgacgactgcacacaacacagggaccccagatctagttgacttcaattgggatgatcttgggtttcaactgatcccaacggacttcatgtatttaatgagctgttcttcagatggggtgtttatgaatggtaaattagtgccatatgggtcaattgagctgaatccagcagccgccgtgctgaattatggtcagggattgcttgaaggtctacgatcacatagaaaagaggatggatcaatccttctttttcgtccacatgaaaatgcacggcggatggaaattggtgcagaccggttatgcatgcctgcaccaagtgtagagcaattcctagaagctgtgaaactaactgttctggcaaacaagcattgggtgcctccttttggtaaaggttctttgtatatcagaccgcagctaattggaagtggggctatgcttggtgtggcacctgccccacagtacacattcattgtgtttgtttgcccagttgggcattatttcaagggtggtctagctccaatcagcttgttaactgaggaagaataccaccgtgctgcacctggtggaactggtgatataaaaactattgggaactatgcttcggttgtcagtgctcagagaagatccaaggaaaaaggccattctgatgttttatacttagatccactccataataagtttgttgaggaagtttcttcttgtaatatattcatggtgaaggacaatattatttctactccactgttaacggggacaattcttcctggaatcacaaggagaagtgtgattgaaatttctcagaatcttggatttcaggttgaggagcgtcttatcacaatagatgaactgcttggggctgatgaagtcttttgtacaggaacagctgttgtattgtcacctgttgggagcatcacttaccgtggaagaagagtggagtatgggaagaaccaggaggccggagtcgtgtcccaacaactctatgccgcactcacagctatccagaaaggtctcacggaggacagcatgggatggacgttgcagctaacttagcagcttttttcacatgatcgagctctacaactcttatttccgttttctcgataagtctcacttctatcaacttgttcttctgttgaaacagagtactttaaaagggatccccaataatgactttccctgtgtattgctgatatgttggcactagatatttttggaaactctatttaaagcacagtgttttgcaccacaagcattatactacatccgttcataaaaaaataattagttatcatttat

SEQ ID NO: 19708 - DNA, 3788 bp, Zea Mays
gctctgcatgagaacaggagacagcgtctctcttgtgcttgccccgtggccggcgctagctccgatccttcgccccggttcggcctctcccggcgcctcgggtcatgcccacgagaccacgagctacgcgccgcagacggcagggttccggagccaatgtatgctgctgaggcggcaggactctagcagctctcctatctcataccctattccaaacaacactctgtaaaaagtgtaatgtgacgcccgacgcgcctggatgccgaatcgcctggatcgagacgagtctgggatgagcacggcggcgcctcctcctggccagcggtgagcgtccgtgctgtgaggaagacgtcggcaacatgatgaaggcatgacgctcaacaggagactcaaagataagtctggtttgtgttggtattatttcatttcctctcctcttctgatagtgttttatacgctcctaatctgggcctaagtaccagatctattacaaagctgttaaccctaatctgggccagcccacaatcaccatgtaaaatcgctaagaattcaaaccaatccaagtacacaaatgaaacaaagctcattactactatttcctactgatgcacaccctgatccatgacatgtaatgacaggccaagggcctgcttgaatgcgctgcacctattagcgcctggcgcggtagcaattagttaattactagccacacattgcttccatttgctcctccgtggctgctgattgcagaagcacacttttgcagttccatgcggactgtccttgttgtcatatcatatcccaattgacgatctaatattacatagaacgccgttatgaaccctagagaacttcagcttttgtgtagcgggactgcaaacaacatatgttttgccaccgctaccaattccttatgctttacattcgatccctaactctgcgcatgcaactttgtaacttacagtcacacgatggcaaaacagcatcatctgcatccatgcatgggtcgttcgtcgtcgtcactgcctctcctgctggttccactcgagtattgccgaacgaagggccctgttcggcacgagaaggctgcgctcgaggtcgagattcgtcatgggtgatgtgctatgcccgctgtcaagccagcccctaatagcttcaccctcataagtgaatccatccgctgcaacagatactggctgccccatcatttggtggacaactggaatcagagttctgcgtctgcgatctgcctgagtcaacagtgaagtcctctaaactccgtagtctccttggcttgcctttgaaagtggactcaacatcttcaaatgattgaagcagtgtatcaccagcattttcatatagagagcaaggaacgtggacatgagcaatggcaatccgggagctggaggcgtccctggccaagttgtgcagcgcccacagcaagttgctcttgccgtgcttgagttcttcggggacagcaacgaaaatcttgtcgtcgacagccaaaggcgggctctccgcggcctccctggtgttgctcaccgccgttcttaaggaaagaacgaaagattgcagtcacgcggcgcgcagcatggattgtaatgctgccctccaggacccggaattaaaatgcgaaagacccgaacgttacaaacgaaggcgaggttgtagcatcatttaaaaaaacccgctgtcggaagaaatcactttggtatcttcgtgaatcgggaccggatattcatggcatttggtagacttttctggctgcgaggtgaaattactggagacctgcatagacgaagtaccgtctgttgctcgttactgctctgccagtcgtcgtctaacacgattgtttcgatgcatcgatgtgaaaatgctcagcaaacagcatattctgaggctgcatttgctcgctgccgcttcctctgcagaaaccttttgacttcttaacaatcacgagattcttcgccgtgtgtgtcttttgttatcacggtctgcctgaaattcatcaaaaaacaagtggcatcaaaattgccctatgccacatttctcttgctagcccggccccgatcagaactgaagcccatgatggatgagggcccagtcccctgcatggaccacttcctcggcgtcgggactcgggactgcgacccggcaacagaagcacggaagcaggagacgaccaataggcaatagcaacgcgccggcggctcggcggcgtcgaacgattcgggcaatcgacaagcagccccaccaaaccaggaaactgcaaacctacccccggtcgccgactcgccgacctcgactctccgcccagactacaaatggagctctgcacctgcgcggcccgcagttctgcgcccccctcttctagctgccgcgcggcgccattcccgcgagttctctcccatcgcatttggagccgatcgggatactgcactgtctgctttaccccgtcaagccctgttgctaggagtcgattctctactctaatgacgactgcacacaacacagggaccccagatctagttgacttcaattgggatgatcttgggtttcaactgatcccaacggacttcatgtatttaatgagctgttcttcagatggggtgtttatgaatggtaaattagtgccatatgggtcaattgagctgaatccagcagccgccgtgctgaattatggtcagggattgcttgaaggtctacgatcacatagaaaagaggatggatcaatccttctttttcgtccacatgaaaatgcacggcggatggaaattggtgcagaccggttatgcatgcctgcaccaagtgtagagcaattcctagaagctgtgaaactaactgttctggcaaacaagcattgggtgcctccttttggtaaaggttctttgtatatcagaccgcagctaattggaagtggggctatgcttggtgtggcacctgccccacagtacacattcattgtgtttgtttgcccagttgggcattatttcaagggtggtctagctccaatcagcttgttaactgaggaagaataccaccgtgctgcacctggtggaactggtgatataaaaactattgggaactatgcttcggttgtcagtgctcagagaagatccaaggaaaaaggccattctgatgttttatacttagatccactccataataagtttgttgaggaagtttcttcttgtaatatattcatggtgaaggacaatattatttctactccactgttaacggggacaattcttcctggaatcacaaggagaagtgtgattgaaatttctcagaatcttggatttcaggttgaggagcgtcttatcacaatagatgaactgcttggggctgatgaagtcttttgtacaggaacagctgttgtattgtcacctgttgggagcatcacttaccgtggaagaagagtggagtatgggaagaaccaggaggccggagtcgtgtcccaacaactctatgccgcactcacagctatccagaaaggtctcacggaggacagcatgggatggacgttgcagctaacttagcagcttttttcacatgatcgagctctacaactcttatttccgttttctcgataagtctcacttctatcaacttgttcttctgttgaaacagagtactttaaaagggatccccaataatgactttccctgtgtattgctgatatgttggcactagatatttttggaaactctatttaaagcacagtgttttgcaccacaagcattatactacatccgttcataaaaaaataattagttatcatttat

SEQ ID NO: 19709 - DNA, 3873 bp, Zea Mays
gctctgcatgagaacaggagacagcgtctctcttgtgcttgccccgtggccggcgctagctccgatccttcgccccggttcggcctctcccggcgcctcgggtcatgcccacgagaccacgagctacgcgccgcagacggcagggttccggagccaatgtatgctgctgaggcggcaggactctagcagctctcctatctcataccctattccaaacaacactctgtaaaaagtgtaatgtgacgcccgacgcgcctggatgccgaatcgcctggatcgagacgagtctgggatgagcacggcggcgcctcctcctggccagcggtgagcgtccgtgctgtgaggaagacgtcggcaacatgatgaaggcatgacgctcaacaggagactcaaagataagtctggtttgtgttggtattatttcatttcctctcctcttctgatagtgttttatacgctcctaatctgggcctaagtaccagatctattacaaagctgttaaccctaatctgggccagcccacaatcaccatgtaaaatcgctaagaattcaaaccaatccaagtacacaaatgaaacaaagctcattactactatttcctactgatgcacaccctgatccatgacatgtaatgacaggccaagggcctgcttgaatgcgctgcacctattagcgcctggcgcggtagcaattagttaattactagccacacattgcttccatttgctcctccgtggctgctgattgcagaagcacacttttgcagttccatgcggactgtccttgttgtcatatcatatcccaattgacgatctaatattacatagaacgccgttatgaaccctagagaacttcagcttttgtgtagcgggactgcaaacaacatatgttttgccaccgctaccaattccttatgctttacattcgatccctaactctgcgcatgcaactttgtaacttacagtcacacgatggcaaaacagcatcatctgcatccatgcatgggtcgttcgtcgtcgtcactgcctctcctgctggttccactcgagtattgccgaacgaagggccctgttcggcacgagaaggctgcgctcgaggtcgagattcgtcatgggtgatgtgctatgcccgctgtcaagccagcccctaatagcttcaccctcataagtgaatccatccgctgcaacagatactggctgccccatcatttggtggacaactggaatcagagttctgcgtctgcgatctgcctgagtcaacagtgaagtcctctaaactccgtagtctccttggcttgcctttgaaagtggactcaacatcttcaaatgattgaagcagtgtatcaccagcattttcatatagagagcaaggaacgtggacatgagcaatggcaatccgggagctggaggcgtccctggccaagttgtgcagcgcccacagcaagttgctcttgccgtgcttgagttcttcggggacagcaacgaaaatcttgtcgtcgacagccaaaggcgggctctccgcggcctccctggtgttgctcaccgccgttcttaaggaaagaacgaaagattgcagtcacgcggcgcgcagcatggattgtaatgctgccctccaggacccggaattaaaatgcgaaagacccgaacgttacaaacgaaggcgaggttgtagcatcatttaaaaaaacccgctgtcggaagaaatcactttggtatcttcgtgaatcgggaccggatattcatggcatttggtagacttttctggctgcgaggtgaaattactggagacctgcatagacgaagtaccgtctgttgctcgttactgctctgccagtcgtcgtctaacacgattgtttcgatgcatcgatgtgaaaatgctcagcaaacagcatattctgaggctgcatttgctcgctgccgcttcctctgcagaaaccttttgacttcttaacaatcacgagattcttcgccgtgtgtgtcttttgttatcacggtctgcctgaaattcatcaaaaaacaagtggcatcaaaattgccctatgccacatttctcttgctagcccggccccgatcagaactgaagcccatgatggatgagggcccagtcccctgcatggaccacttcctcggcgtcgggactcgggactgcgacccggcaacagaagcacggaagcaggagacgaccaataggcaatagcaacgcgccggcggctcggcggcgtcgaacgattcgggcaatcgacaagcagccccaccaaaccaggaaactgcaaacctacccccggtcgccgactcgccgacctcgactctccgcccagactacaaatggagctctgcacctgcgcggcccgcagttctgcgcccccctcttctagctgccgcgcggcgccattcccgcgagttctctcccatcgcatttggagccgatcgggatactgcactgtctgctttaccccgtcaagccctgttgctaggagtcgattctctactctaatgacgactgcacacaagtatgatgcgacaagtctgtataactgaccctctgttttgctttgggaattgggacgatgcaccgccgctaagattaactagcaaaaaggcacagggaccccagatctagttgacttcaattgggatgatcttgggtttcaactgatcccaacggacttcatgtatttaatgagctgttcttcagatggggtgtttatgaatggtaaattagtgccatatgggtcaattgagctgaatccagcagccgccgtgctgaattatgggattgcttgaaggtctacgatcacatagaaaagaggatggatcaatccttctttttcgtccacatgaaaatgcacggcggatggaaattggtgcagaccggttatgcatgcctgcaccaagtgtagagcaattcctagaagctgtgaaactaactgttctggcaaacaagcattgggtgcctccttttggtaaaggttctttgtatatcagaccgcagctaattggaagtggggctatgcttggtgtggcacctgccccacagtacacattcattgtgtttgtttgcccagttgggcattatttcaagggtggtctagctccaatcagcttgttaactgaggaagaataccaccgtgctgcacctggtggaactggtgatataaaaactattgggaactatgcttcggttgtcagtgctcagagaagatccaaggaaaaaggccattctgatgttttatacttagatccactccataataagtttgttgaggaagtttcttcttgtaatatattcatggtgaaggacaatattatttctactccactgttaacggggacaattcttcctggaatcacaaggagaagtgtgattgaaatttctcagaatcttggatttcaggttgaggagcgtcttatcacaatagatgaactgcttggggctgatgaagtcttttgtacaggaacagctgttgtattgtcacctgttgggagcatcacttaccgtggaagaagagtggagtatgggaagaaccaggaggccggagtcgtgtcccaacaactctatgccgcactcacagctatccagaaaggtctcacggaggacagcatgggatggacgttgcagctaacttagcagcttttttcacatgatcgagctctacaactcttatttccgttttctcgataagtctcacttctatcaacttgttcttctgttgaaacagagtactttaaaagggatccccaataatgactttccctgtgtattgctgatatgttggcactagatatttttggaaactctatttaaagcacagtgttttgcaccacaagcattatactacatccgttcataaaaaaataattagttatcatttat

SEQ ID NO: 19710 - DNA, 3703 bp, Zea Mays
gctctgcatgagaacaggagacagcgtctctcttgtgcttgccccgtggccggcgctagctccgatccttcgccccggttcggcctctcccggcgcctcgggtcatgcccacgagaccacgagctacgcgccgcagacggcagggttccggagccaatgtatgctgctgaggcggcaggactctagcagctctcctatctcataccctattccaaacaacactctgtaaaaagtgtaatgtgacgcccgacgcgcctggatgccgaatcgcctggatcgagacgagtctgggatgagcacggcggcgcctcctcctggccagcggtgagcgtccgtgctgtgaggaagacgtcggcaacatgatgaaggcatgacgctcaacaggagactcaaagataagtctggtttgtgttggtattatttcatttcctctcctcttctgatagtgttttatacgctcctaatctgggcctaagtaccagatctattacaaagctgttaaccctaatctgggccagcccacaatcaccatgtaaaatcgctaagaattcaaaccaatccaagtacacaaatgaaacaaagctcattactactatttcctactgatgcacaccctgatccatgacatgtaatgacaggccaagggcctgcttgaatgcgctgcacctattagcgcctggcgcggtagcaattagttaattactagccacacattgcttccatttgctcctccgtggctgctgattgcagaagcacacttttgcagttccatgcggactgtccttgttgtcatatcatatcccaattgacgatctaatattacatagaacgccgttatgaaccctagagaacttcagcttttgtgtagcgggactgcaaacaacatatgttttgccaccgctaccaattccttatgctttacattcgatccctaactctgcgcatgcaactttgtaacttacagtcacacgatggcaaaacagcatcatctgcatccatgcatgggtcgttcgtcgtcgtcactgcctctcctgctggttccactcgagtattgccgaacgaagggccctgttcggcacgagaaggctgcgctcgaggtcgagattcgtcatgggtgatgtgctatgcccgctgtcaagccagcccctaatagcttcaccctcataagtgaatccatccgctgcaacgaacgtggacatgagcaatggcaatccgggagctggaggcgtccctggccaagttgtgcagcgcccacagcaagttgctcttgccgtgcttgagttcttcggggacagcaacgaaaatcttgtcgtcgacagccaaaggcgggctctccgcggcctccctggtgttgctcaccgccgttcttaaggtgtgctggaaagaacgaaagattgcagtcacgcggcgcgcagcatggattgtaatgctgccctccaggacccggaattaaaatgcgaaagacccgaacgttacaaacgaaggcgaggttgtagcatcatttaaaaaaacccgctgtcggaagaaatcactttggtatcttcgtgaatcgggaccggatattcatggcatttggtagacttttctggctgcgaggtgaaattactggagacctgcatagacgaagtaccgtctgttgctcgttactgctctgccagtcgtcgtctaacacgattgtttcgatgcatcgatgtgaaaatgctcagcaaacagcatattctgaggctgcatttgctcgctgccgcttcctctgcagaaaccttttgacttcttaacaatcacgagattcttcgccgtgtgtgtcttttgttatcacggtctgcctgaaattcatcaaaaaacaagtggcatcaaaattgccctatgccacatttctcttgctagcccggccccgatcagaactgaagcccatgatggatgagggcccagtcccctgcatggaccacttcctcggcgtcgggactcgggactgcgacccggcaacagaagcacggaagcaggagacgaccaataggcaatagcaacgcgccggcggctcggcggcgtcgaacgattcgggcaatcgacaagcagccccaccaaaccaggaaactgcaaacctacccccggtcgccgactcgccgacctcgactctccgcccagactacaaatggagctctgcacctgcgcggcccgcagttctgcgcccccctcttctagctgccgcgcggcgccattcccgcgagttctctcccatcgcatttggagccgatcgggatactgcactgtctgctttaccccgtcaagccctgttgctaggagtcgattctctactctaatgacgactgcacacaagtatgatgcgacaagtctgtataactgaccctctgttttgctttgggaattgggacgatgcaccgccgctaagattaactagcaaaaaggcacagggaccccagatctagttgacttcaattgggatgatcttgggtttcaactgatcccaacggacttcatgtatttaatgagctgttcttcagatggggtgtttatgaatggtaaattagtgccatatgggtcaattgagctgaatccagcagccgccgtgctgaattatggtcagggattgcttgaaggtctacgatcacatagaaaagaggatggatcaatccttctttttcgtccacatgaaaatgcacggcggatggaaattggtgcagaccggttatgcatgcctgcaccaagtgtagagcaattcctagaagctgtgaaactaactgttctggcaaacaagcattgggtgcctccttttggtaaaggttctttgtatatcagaccgcagctaattggaagtggggctatgcttggtgtggcacctgccccacagtacacattcattgtgtttgtttgcccagttgggcattatttcaagggtggtctagctccaatcagcttgttaactgaggaagaataccaccgtgctgcacctggtggaactggtgatataaaaactattgggaactatgcttcggttgtcagtgctcagagaagatccaaggaaaaaggccattctgatgttttatacttagatccactccataataagtttgttgaggaagtttcttcttgtaatatattcatggtgaaggacaatattatttctactccactgttaacggggacaattcttcctggaatcacaaggagaagtgtgattgaaatttctcagaatcttggatttcaggttgaggagcgtcttatcacaatagatgaactgcttggggctgatgaagtcttttgtacaggaacagctgttgtattgtcacctgttgggagcatcacttaccgtggaagaagagtggagtatgggaagaaccaggaggccggagtcgtgtcccaacaactctatgccgcactcacagctatccagaaaggtctcacggaggacagcatgggatggacgttgcagctaacttagcagcttttttcacatgatcgagctctacaactcttatttccgttttctcgataagtctcacttctatcaacttgttcttctgttgaaacagagtactttaaaagggatccccaataatgactttccctgtgtattgctgatatgttggcactagatatttttggaaactctatttaaagcacagtgttttgcaccacaagcattatactacatccgttcataaaaaaataattagttatcatttat

SEQ ID NO: 19711 - DNA, 3698 bp, Zea Mays
gctctgcatgagaacaggagacagcgtctctcttgtgcttgccccgtggccggcgctagctccgatccttcgccccggttcggcctctcccggcgcctcgggtcatgcccacgagaccacgagctacgcgccgcagacggcagggttccggagccaatgtatgctgctgaggcggcaggactctagcagctctcctatctcataccctattccaaacaacactctgtaaaaagtgtaatgtgacgcccgacgcgcctggatgccgaatcgcctggatcgagacgagtctgggatgagcacggcggcgcctcctcctggccagcggtgagcgtccgtgctgtgaggaagacgtcggcaacatgatgaaggcatgacgctcaacaggagactcaaagataagtctggtttgtgttggtattatttcatttcctctcctcttctgatagtgttttatacgctcctaatctgggcctaagtaccagatctattacaaagctgttaaccctaatctgggccagcccacaatcaccatgtaaaatcgctaagaattcaaaccaatccaagtacacaaatgaaacaaagctcattactactatttcctactgatgcacaccctgatccatgacatgtaatgacaggccaagggcctgcttgaatgcgctgcacctattagcgcctggcgcggtagcaattagttaattactagccacacattgcttccatttgctcctccgtggctgctgattgcagaagcacacttttgcagttccatgcggactgtccttgttgtcatatcatatcccaattgacgatctaatattacatagaacgccgttatgaaccctagagaacttcagcttttgtgtagcgggactgcaaacaacatatgttttgccaccgctaccaattccttatgctttacattcgatccctaactctgcgcatgcaactttgtaacttacagtcacacgatggcaaaacagcatcatctgcatccatgcatgggtcgttcgtcgtcgtcactgcctctcctgctggttccactcgagtattgccgaacgaagggccctgttcggcacgagaaggctgcgctcgaggtcgagattcgtcatgggtgatgtgctatgcccgctgtcaagccagcccctaatagcttcaccctcataagtgaatccatccgctgcaacgaacgtggacatgagcaatggcaatccgggagctggaggcgtccctggccaagttgtgcagcgcccacagcaagttgctcttgccgtgcttgagttcttcggggacagcaacgaaaatcttgtcgtcgacagccaaaggcgggctctccgcggcctccctggtgttgctcaccgccgttcttaaggtgtgctggaaagaacgaaagattgcagtcacgcggcgcgcagcatggattgtaatgctgccctccaggacccggaattaaaatgcgaaagacccgaacgttacaaacgaaggcgaggttgtagcatcatttaaaaaaacccgctgtcggaagaaatcactttggtatcttcgtgaatcgggaccggatattcatggcatttggtagacttttctggctgcgaggtgaaattactggagacctgcatagacgaagtaccgtctgttgctcgttactgctctgccagtcgtcgtctaacacgattgtttcgatgcatcgatgtgaaaatgctcagcaaacagcatattctgaggctgcatttgctcgctgccgcttcctctgcagaaaccttttgacttcttaacaatcacgagattcttcgccgtgtgtgtcttttgttatcacggtctgcctgaaattcatcaaaaaacaagtggcatcaaaattgccctatgccacatttctcttgctagcccggccccgatcagaactgaagcccatgatggatgagggcccagtcccctgcatggaccacttcctcggcgtcgggactcgggactgcgacccggcaacagaagcacggaagcaggagacgaccaataggcaatagcaacgcgccggcggctcggcggcgtcgaacgattcgggcaatcgacaagcagccccaccaaaccaggaaactgcaaacctacccccggtcgccgactcgccgacctcgactctccgcccagactacaaatggagctctgcacctgcgcggcccgcagttctgcgcccccctcttctagctgccgcgcggcgccattcccgcgagttctctcccatcgcatttggagccgatcgggatactgcactgtctgctttaccccgtcaagccctgttgctaggagtcgattctctactctaatgacgactgcacacaagtatgatgcgacaagtctgtataactgaccctctgttttgctttgggaattgggacgatgcaccgccgctaagattaactagcaaaaaggcacagggaccccagatctagttgacttcaattgggatgatcttgggtttcaactgatcccaacggacttcatgtatttaatgagctgttcttcagatggggtgtttatgaatggtaaattagtgccatatgggtcaattgagctgaatccagcagccgccgtgctgaattatgggattgcttgaaggtctacgatcacatagaaaagaggatggatcaatccttctttttcgtccacatgaaaatgcacggcggatggaaattggtgcagaccggttatgcatgcctgcaccaagtgtagagcaattcctagaagctgtgaaactaactgttctggcaaacaagcattgggtgcctccttttggtaaaggttctttgtatatcagaccgcagctaattggaagtggggctatgcttggtgtggcacctgccccacagtacacattcattgtgtttgtttgcccagttgggcattatttcaagggtggtctagctccaatcagcttgttaactgaggaagaataccaccgtgctgcacctggtggaactggtgatataaaaactattgggaactatgcttcggttgtcagtgctcagagaagatccaaggaaaaaggccattctgatgttttatacttagatccactccataataagtttgttgaggaagtttcttcttgtaatatattcatggtgaaggacaatattatttctactccactgttaacggggacaattcttcctggaatcacaaggagaagtgtgattgaaatttctcagaatcttggatttcaggttgaggagcgtcttatcacaatagatgaactgcttggggctgatgaagtcttttgtacaggaacagctgttgtattgtcacctgttgggagcatcacttaccgtggaagaagagtggagtatgggaagaaccaggaggccggagtcgtgtcccaacaactctatgccgcactcacagctatccagaaaggtctcacggaggacagcatgggatggacgttgcagctaacttagcagcttttttcacatgatcgagctctacaactcttatttccgttttctcgataagtctcacttctatcaacttgttcttctgttgaaacagagtactttaaaagggatccccaataatgactttccctgtgtattgctgatatgttggcactagatatttttggaaactctatttaaagcacagtgttttgcaccacaagcattatactacatccgttcataaaaaaataattagttatcatttat

SEQ ID NO: 19712 - DNA, 1072 bp, Zea Mays
atgcgcaaatgtgaattttcaaagttgtcagtgctcagagaagatccaaggaaaaaggccattctgatgttttatacttagatccactccataataagtttgttgaggaagtttcttcttgtaatatattcatggtgaaggacaatattatttctactccactgttaacggggacaattcttcctggaatcacaaggagaagtgtgattgaaatttctcagaatcttggatttcaggttgaggagcgtcttatcacaatagatgaactgcttggggctgatgaagtcttttgtacaggaacagctgttgtattgtcacctgttgggagcatcacttaccgtggaagaaggtaagtacttcagccaaactacttgttttccagtagttgtgctatttgagtgcatgaggaaatgctgacgctccacttaagtactagtctgagttataaatgactacaagcagcatttgacgagacataggaacatattggaccttcagtttcactaaatagttggtaaagacatatgtgttccaattatctgaccactgtgattattgttgatttattttcacataataactcggttgctagcccaccttcgacactaaagaaaaagaaatgtgctcctcaactcgatcaataattgttgcgctttcacgaaactagtaaatgttggctgtctatcgacttcttgtccactgcagagtggagtatgggaagaaccaggaggccggagtcgtgtcccaacaactctatgccgcactcacagctatccagaaaggtctcacggaggacagcatgggatggacgttgcagctaacttagcagcttttttcacatgatcgagctctacaactcttatttccgttttctcgataagtctcacttctatcaacttgttcttctgttgaaacagagtactttaaaagggatccccaataatgactttccctgtgtattgctgatatgttggcactagatatttttggaaactctatttaaagcacagtgttttgcaccacaagcattatactacatccgttcataaaaaaataattagttatcatttat

SEQ ID NO: 19713 - DNA, 3436 bp, Zea Mays
atggcgttttggaggccgaaaattcgatcttggcgctggtctcagtgtttcgaggcctcgaggggttgctgtgaagaaccagaggaagataaaaaggtggttttctcgccggttttccttggttttggggtactgaattctgagattgttctgaggcaggggtctgtcttgctggagaatgaagatgtggagagtttcatttgtttccgactcggcatcggcatctcgtataaaccgaggagacacggcaatttcaagggccttcgtttgggaccaacagaataacctgttcctgcctgcaattttttggttctgaagactcaaagattggattgagtgatctttgaaaccaaatcttccttcggtgttttttggcattttgggcactatctgtgaagtgtagcaggaccgcctctgcttttatgctcggtagacttctgtgatcaagtattcaagtactggtaaaagattataagcttgtctaaagcaagcccttagaaggaaagttatctgaccatgttctcagctatcatggcaaagaagaattacaaacagcattccaaatctgagaaaattcaggggggttgtatgtctgggctgattcgcatgcttgatttccgtcgcagtccaaaacttctttcagacgggagagtcaaaagagataaaaaaggtcttgacgatatccatggaaacatatctgctaataatggaaaggaccacagggttgaattgatttatgttggtaggtcaagtattagaactttgatggaagaagagatggccagcagcacacagcccttgaagcaagcacaaagcaatgtcgctgggatatgctctgaagatattgatctaaacttggctggaagtctcatggaaatctacagatctcatactgaaggccaagaaaccaggaggtcgattgagtcaggtcgcagttccatttcgactgacgaagagaagaatactgaccctcctgctcatcactatcagatcccatctagtatccagagagctctagaagatgttgctgaagcagttataagacatcaatctgcaaacaaaaaatacataaacagcggtgatgaaactaggtccagagaattcgttgatgccctacagctactgagctcaaacaaggaattgtttgtgatgcttatgcaagatccaagctctaggttgttagaatgtctccaaaacctttacatgtcactaggaagtaccaggttagactctgaagaatatgacgaaggaactgagttgcaaggtacgacagatagtctagagcagtcagcgacttctccaagtaaggtgaaaagaaggcataattctttcttgaaggaggatgggttggtcacgaggaagccaccaaagttaaatgatggttctcgtggccttagcagaatagtaatcttgaagcccagtcctgcaagaggtcatagcagtcttatctcaggtagcgcaacttcatcaccactatcaaatcatattgattggcaagttcaggaaggcagtgataaacatgattgccatttctcgcttagagagcttaaaaggaggctaagaattgccattagcaataatcagaaggatcaccagttaaactccacgagtagtgatattcatgaagctgaggctgattctggcaaactgcttccagtcacaagtatgtcggagacggagagtctggcaagtacagattcttctgacagggctaaggaaccatctattgttgacgagaaaatagtcccggaagatagtgaaagtgggatgagaaatgatgttgctcatggtgtcggagtcagctctttctcatatgaaaaagctaagatgtatataattgagagactaaatgatcaaggcgaagaaagttgtcaaattgtacagaaatctgaatcttttgagagattgatttcactgcccgagaatggtacattttctccaattgatttccctcaagaggagaaaattagcatagcgcatgaagctacaaaaccattgaacttgcatactgttgagcaagaggatggttcagcaagcccttactcaacaatgcagtacgaggagacagaatcagccgacactagcaacttaggtacagaaacgttgattgagcccacgatagatcatggtagttattcacaaaatgagggcgctatctcacaggagttggtccgtgaaggggttaagatcatgctagatataatggagaactcatcgctctgtgctgagactggaacttcgcaggaaggagtgggagtgaaaaatccagatgaatgttcattggaggaaccacaatccatgaatttgttgccagaaccggcactgtattctccagatgacttcgttaatgaacaagagaaccatagtccgtcagaaattgttgaattagtcaaaccatctgtattgacatttccttactcgccggaaaatactaatgacaaagaggagaaattgagtccacaatccgttcttgatcccattgcagaagttaccagtcctagacacaaaactccaaagcaagatgaattctccatgcctacttccagagtgctattcaaagaggttgacgccccttcagcatccccaactttgtggaatgggccacaggtagccattttggatgacagagccacaagggtgtccttcatcaaggccgtgctagaagcttcaggattgctgtctgaggaaaattcgcaaatttggtacacagaagagccactgcttgatgtatctgtattggctgaagtaggaaactcgtactgcctgacagacgatgcagtgctcttgtttgactacgtggaagaggttcttctcgagataagggacaagttctttggtagcgacccttgggttaattctctgaaacacaatgtacggccagctccagtaggaagacggctggttcgagaggtggctaagggaatcgattctcttgtaggtaaagaatttccacacactttagaacaggtaatgatgaaagacttggacagtgggtcgtggctggatcttggaggcgatactggaagtgttgtagttgagttgtgggatggtttacttgatgacttgctggaggaactggtttttgatttgtggctttgatactgtagtgctttgtagtaatacatgcagaggcatattcgactagtactgacatggggttaatagatacagaaaccttttgcgaaaggatagggaaaagtgagttcggcagactgccagatgttgtagagctaggcatttcatcaatatagttgatttccattttcttttgaatttgatttctttaagctccctttgttctctgtagaggcatggaaacataaaaaataagtgctcctgtatataaagtaccccagtatttatggtaaattttcattgtgaacataatattgtttccgttactttatgagatactctattgcttctgtgtttcaag

SEQ ID NO: 19714 - DNA, 2972 bp, Zea Mays
atggcgttttggaggccgaaaattcgatcttggcgctggtctcagtgtttcgaggcctcgaggggttgctgtgaagaaccagaggaagataaaaaggtggttttctcgccggttttccttggttttggggtactgaattctgagattgttctgaggcaggggtctgtcttgctggagaatgaagatgtggaggtagaacgtactttgagtacaaatgcttctggcatgatcaaaagagataaaaaaggtcttgacgatatccatggaaacatatctgctaatgtcaagtattagaactttgatggaagaagagatggccagcagcacacagcccttgaagcaagcacaaagcaatgtcgctgggatatgctctgaagatattgatctaaacttggctggaagtctcatggaaatctacagatctcatactgaaggccaagaaaccaggaggtcgattgagtcaggtcgcagttccatttcgactgacgaagagaagaatactgaccctcctgctcatcactatcagatcccatctagtatccagagagctctagaagatgttgctgaagcagttataagacatcaatctgcaaacaaaaaatacataaacagcggtgatgaaactaggtccagagaattcgttgatgccctacagctactgagctcaaacaaggaattgtttgtgatgcttatgcaagatccaagctctaggttgttagaatgtctccaaaacctttacatgtcactaggaagtaccaggttagactctgaagaatatgacgaaggaactgagttgcaaggtacgacagatagtctagagcagtcagcgacttctccaagtaaggtgaaaagaaggcataattctttcttgaaggaggatgggttggtcacgaggaagccaccaaagttaaatgatggttctcgtggccttagcagaatagtaatcttgaagcccagtcctgcaagaggtcatagcagtcttatctcaggtagcgcaacttcatcaccactatcaaatcatattgattggcaagttcaggaaggcagtgataaacatgattgccatttctcgcttagagagcttaaaaggaggctaagaattgccattagcaataatcagaaggatcaccagttaaactccacgagtagtgatattcatgaagctgaggctgattctggcaaactgcttccagtcacaagtatgtcggagacggagagtctggcaagtacagattcttctgacagggctaaggaaccatctattgttgacgagaaaatagtcccggaagatagtgaaagtgggatgagaaatgatgttgctcatggtgtcggagtcagctctttctcatatgaaaaagctaagatgtatataattgagagactaaatgatcaaggcgaagaaagttgtcaaattgtacagaaatctgaatcttttgagagattgatttcactgcccgagaatggtacattttctccaattgatttccctcaagaggagaaaattagcatagcgcatgaagctacaaaaccattgaacttgcatactgttgagcaagaggatggttcagcaagcccttactcaacaatgcagtacgaggagacagaatcagccgacactagcaacttaggtacagaaacgttgattgagcccacgatagatcatggtagttattcacaaaatgagggcgctatctcacaggagttggtccgtgaaggggttaagatcatgctagatataatggagaactcatcgctctgtgctgagactggaacttcgcaggaaggagtgggagtgaaaaatccagatgaatgttcattggaggaaccacaatccatgaatttgttgccagaaccggcactgtattctccagatgacttcgttaatgaacaagagaaccatagtccgtcagaaattgttgaattagtcaaaccatctgtattgacatttccttactcgccggaaaatactaatgacaaagaggagaaattgagtccacaatccgttcttgatcccattgcagaagttaccagtcctagacacaaaactccaaagcaagatgaattctccatgcctacttccagagtgctattcaaagaggttgacgccccttcagcatccccaactttgtggaatgggccacaggtagccattttggatgacagagccacaagggtgtccttcatcaaggccgtgctagaagcttcaggattgctgtctgaggaaaattcgcaaatttggtacacagaagagccactgcttgatgtatctgtattggctgaagtaggaaactcgtactgcctgacagacgatgcagtgctcttgtttgactacgtggaagaggttcttctcgagataagggacaagttctttggtagcgacccttgggttaattctctgaaacacaatgtacggccagctccagtaggaagacggctggttcgagaggtggctaagggaatcgattctcttgtaggtaaagaatttccacacactttagaacaggtaatgatgaaagacttggacagtgggtcgtggctggatcttggaggcgatactggaagtgttgtagttgagttgtgggatggtttacttgatgacttgctggaggaactggtttttgatttgtggctttgatactgtagtgctttgtagtaatacatgcagaggcatattcgactagtactgacatggggttaatagatacagaaaccttttgcgaaaggatagggaaaagtgagttcggcagactgccagatgttgtagagctaggcatttcatcaatatagttgatttccattttcttttgaatttgatttctttaagctccctttgttctctgtagaggcatggaaacataaaaaataagtgctcctgtatataaagtaccccagtatttatggtaaattttcattgtgaacataatattgtttccgttactttatgagatactctattgcttctgtgtttcaag

SEQ ID NO: 19715 - DNA, 3555 bp, Zea Mays
atggcgttttggaggccgaaaattcgatcttggcgctggtctcagtgtttcgaggcctcgaggggttgctgtgaagaaccagaggaagataaaaaggtggttttctcgccggttttccttggttttggggtactgaattctgagattgttctgaggcaggggtctgtcttgctggagaatgaagatgtggaggtttgtgtgctctgcgcgtttgttttggtgaagacaactagctggagtaaaaggaagaaaaaaaagttccgcttcctttcttttgcgtgttctgatccttctgagatatcccttcctgccgcttcagagtttcatttgtttccgactcggcatcggcatctcgtataaaccgaggagacacggcaatttcaagggccttcgtttgggaccaacagaataacctgttcctgcctgcaattttttggttctgaagactcaaagattggattgagtgatctttgaaaccaaatcttccttcggtgttttttggcattttgggcactatctgtgaagtgtagcaggaccgcctctgcttttatgctcggtagacttctgtgatcaagtattcaagtactggtaaaagattataagcttgtctaaagcaagcccttagaaggaaagttatctgaccatgttctcagctatcatggcaaagaagaattacaaacagcattccaaatctgagaaaattcaggggggttgtatgtctgggctgattcgcatgcttgatttccgtcgcagtccaaaacttctttcagacgggagagtcaaaagagataaaaaaggtcttgacgatatccatggaaacatatctgctaataatggaaaggaccacagggttgaattgatttatgttggtaggtcaagtattagaactttgatggaagaagagatggccagcagcacacagcccttgaagcaagcacaaagcaatgtcgctgggatatgctctgaagatattgatctaaacttggctggaagtctcatggaaatctacagatctcatactgaaggccaagaaaccaggaggtcgattgagtcaggtcgcagttccatttcgactgacgaagagaagaatactgaccctcctgctcatcactatcagatcccatctagtatccagagagctctagaagatgttgctgaagcagttataagacatcaatctgcaaacaaaaaatacataaacagcggtgatgaaactaggtccagagaattcgttgatgccctacagctactgagctcaaacaaggaattgtttgtgatgcttatgcaagatccaagctctaggttgttagaatgtctccaaaacctttacatgtcactaggaagtaccaggttagactctgaagaatatgacgaaggaactgagttgcaaggtacgacagatagtctagagcagtcagcgacttctccaagtaaggtgaaaagaaggcataattctttcttgaaggaggatgggttggtcacgaggaagccaccaaagttaaatgatggttctcgtggccttagcagaatagtaatcttgaagcccagtcctgcaagaggtcatagcagtcttatctcaggtagcgcaacttcatcaccactatcaaatcatattgattggcaagttcaggaaggcagtgataaacatgattgccatttctcgcttagagagcttaaaaggaggctaagaattgccattagcaataatcagaaggatcaccagttaaactccacgagtagtgatattcatgaagctgaggctgattctggcaaactgcttccagtcacaagtatgtcggagacggagagtctggcaagtacagattcttctgacagggctaaggaaccatctattgttgacgagaaaatagtcccggaagatagtgaaagtgggatgagaaatgatgttgctcatggtgtcggagtcagctctttctcatatgaaaaagctaagatgtatataattgagagactaaatgatcaaggcgaagaaagttgtcaaattgtacagaaatctgaatcttttgagagattgatttcactgcccgagaatggtacattttctccaattgatttccctcaagaggagaaaattagcatagcgcatgaagctacaaaaccattgaacttgcatactgttgagcaagaggatggttcagcaagcccttactcaacaatgcagtacgaggagacagaatcagccgacactagcaacttaggtacagaaacgttgattgagcccacgatagatcatggtagttattcacaaaatgagggcgctatctcacaggagttggtccgtgaagatcatgctagatataatggagaactcatcgctctgtgctgagactggaacttcgcaggaaggagtgggagtgaaaaatccagatgaatgttcattggaggaaccacaatccatgaatttgttgccagaaccggcactgtattctccagatgacttcgttaatgaacaagagaaccatagtccgtcagaaattgttgaattagtcaaaccatctgtattgacatttccttactcgccggaaaatactaatgacaaagaggagaaattgagtccacaatccgttcttgatcccattgcagaagttaccagtcctagacacaaaactccaaagcaagatgaattctccatgcctacttccagagtgctattcaaagaggttgacgccccttcagcatccccaactttgtggaatgggccacaggtagccattttggatgacagagccacaagggtgtccttcatcaaggccgtgctagaagcttcaggattgctgtctgaggaaaattcgcaaatttggtacacagaagagccactgcttgatgtatctgtattggctgaagtaggaaactcgtactgcctgacagacgatgcagtgctcttgtttgactacgtggaagaggttcttctcgagataagggacaagttctttggtagcgacccttgggttaattctctgaaacacaatgtacggccagctccagtaggaagacggctggttcgagaggtggctaagggaatcgattctcttgtaggtaaagaatttccacacactttagaacaggtaatgatgaaagacttggacagtgggtcgtggctggatcttggaggcgatactggaagtgttgtagttgagttgtgggatggtttacttgatgacttgctggaggaactggtttttgatttgtggctttgatactgtagtgctttgtagtaatacatgcagaggcatattcgactagtactgacatggggttaatagatacagaaaccttttgcgaaaggatagggaaaagtgagttcggcagactgccagatgttgtagagctaggcatttcatcaatatagttgatttccattttcttttgaatttgatttctttaagctccctttgttctctgtagaggcatggaaacataaaaaataagtgctcctgtatataaagtaccccagtatttatggtaaattttcattgtgaacataatattgtttccgttactttatgagatactctattgcttctgtgtttcaag

SEQ ID NO: 19716 - DNA, 3522 bp, Zea Mays
atggcgttttggaggccgaaaattcgatcttggcgctggtctcagtgtttcgaggcctcgaggggttgctgtgaagaaccagaggaagataaaaaggtggttttctcgccggttttccttggttttggggtactgaattctgagattgttctgaggcaggggtctgtcttgctggagaatgaagatgtggaggtttgtgtgctctgcgcgtttgttttggtgaagacaactagctggagtaaaaggaagaaaaaaaagttccgcttcctttcttttgcgtgttctgatccttctgagatatcccttcctgccgcttcagagtttcatttgtttccgactcggcatcggcatctcgtataaaccgaggagacacggcaatttcaagggccttcgtttgggaccaacagaataacctgttcctgcctgcaattttttggttctgaagactcaaagattggattgagtgatctttgaaaccaaatcttccttcggtgttttttggcattttgggcactatctgtgaagtgtagcaggaccgcctctgcttttatgctcggtagacttctgtgatcaagtattcaagtactggtaaaagattataagcttgtctaaagcaagcccttagaaggaaagttatctgaccatgttctcagctatcatggcaaagaagaattacaaacagcattccaaatctgagaaaattcaggggggttgtatgtctgggctgattcgcatgcttgatttccgtcgcagtccaaaacttctttcagacgggagagtcaaaagagataaaaaaggtcttgacgatatccatggaaacatatctgctaatgtcaagtattagaactttgatggaagaagagatggccagcagcacacagcccttgaagcaagcacaaagcaatgtcgctgggatatgctctgaagatattgatctaaacttggctggaagtctcatggaaatctacagatctcatactgaaggccaagaaaccaggaggtcgattgagtcaggtcgcagttccatttcgactgacgaagagaagaatactgaccctcctgctcatcactatcagatcccatctagtatccagagagctctagaagatgttgctgaagcagttataagacatcaatctgcaaacaaaaaatacataaacagcggtgatgaaactaggtccagagaattcgttgatgccctacagctactgagctcaaacaaggaattgtttgtgatgcttatgcaagatccaagctctaggttgttagaatgtctccaaaacctttacatgtcactaggaagtaccaggttagactctgaagaatatgacgaaggaactgagttgcaaggtacgacagatagtctagagcagtcagcgacttctccaagtaaggtgaaaagaaggcataattctttcttgaaggaggatgggttggtcacgaggaagccaccaaagttaaatgatggttctcgtggccttagcagaatagtaatcttgaagcccagtcctgcaagaggtcatagcagtcttatctcaggtagcgcaacttcatcaccactatcaaatcatattgattggcaagttcaggaaggcagtgataaacatgattgccatttctcgcttagagagcttaaaaggaggctaagaattgccattagcaataatcagaaggatcaccagttaaactccacgagtagtgatattcatgaagctgaggctgattctggcaaactgcttccagtcacaagtatgtcggagacggagagtctggcaagtacagattcttctgacagggctaaggaaccatctattgttgacgagaaaatagtcccggaagatagtgaaagtgggatgagaaatgatgttgctcatggtgtcggagtcagctctttctcatatgaaaaagctaagatgtatataattgagagactaaatgatcaaggcgaagaaagttgtcaaattgtacagaaatctgaatcttttgagagattgatttcactgcccgagaatggtacattttctccaattgatttccctcaagaggagaaaattagcatagcgcatgaagctacaaaaccattgaacttgcatactgttgagcaagaggatggttcagcaagcccttactcaacaatgcagtacgaggagacagaatcagccgacactagcaacttaggtacagaaacgttgattgagcccacgatagatcatggtagttattcacaaaatgagggcgctatctcacaggagttggtccgtgaaggggttaagatcatgctagatataatggagaactcatcgctctgtgctgagactggaacttcgcaggaaggagtgggagtgaaaaatccagatgaatgttcattggaggaaccacaatccatgaatttgttgccagaaccggcactgtattctccagatgacttcgttaatgaacaagagaaccatagtccgtcagaaattgttgaattagtcaaaccatctgtattgacatttccttactcgccggaaaatactaatgacaaagaggagaaattgagtccacaatccgttcttgatcccattgcagaagttaccagtcctagacacaaaactccaaagcaagatgaattctccatgcctacttccagagtgctattcaaagaggttgacgccccttcagcatccccaactttgtggaatgggccacaggtagccattttggatgacagagccacaagggtgtccttcatcaaggccgtgctagaagcttcaggattgctgtctgaggaaaattcgcaaatttggtacacagaagagccactgcttgatgtatctgtattggctgaagtaggaaactcgtactgcctgacagacgatgcagtgctcttgtttgactacgtggaagaggttcttctcgagataagggacaagttctttggtagcgacccttgggttaattctctgaaacacaatgtacggccagctccagtaggaagacggctggttcgagaggtggctaagggaatcgattctcttgtaggtaaagaatttccacacactttagaacaggtaatgatgaaagacttggacagtgggtcgtggctggatcttggaggcgatactggaagtgttgtagttgagttgtgggatggtttacttgatgacttgctggaggaactggtttttgatttgtggctttgatactgtagtgctttgtagtaatacatgcagaggcatattcgactagtactgacatggggttaatagatacagaaaccttttgcgaaaggatagggaaaagtgagttcggcagactgccagatgttgtagagctaggcatttcatcaatatagttgatttccattttcttttgaatttgatttctttaagctccctttgttctctgtagaggcatggaaacataaaaaataagtgctcctgtatataaagtaccccagtatttatggtaaattttcattgtgaacataatattgtttccgttactttatgagatactctattgcttctgtgtttcaag

SEQ ID NO: 19717 - DNA, 3307 bp, Zea Mays
ctccatccgccattagagagaggatagagaatgccgagaatgagagagacaaggtagcggcagcggttggcgcgcgcggccacagtggcaaagcctccgtcgtcggcgaggaccgctgcatgcgctgttgccgggttggcatgcttctgcttccgcgtcttgaaggatttcaaggaagggaggatcggaaaagacaactgcgattcggttgcattcatacggttctgtaaaaaaggcagtttttttttggctgtgacctgtgagtatccgccggtttgctgtttatttattcattctcagttttggaggccgaaaattcgatcttggcgctggtctcagtgtttcgaggcctcgaggggttgctgtgaagaaccagaggaagataaaaaggtggttttctcgccggttttccttggttttggggtactgaattctgagattgttctgaggcaggggtctgtcttgctggagaatgaagatgtggaggtagaacgtactttgagtacaaatgcttctggcatgatcaaaagagataaaaaaggtcttgacgatatccatggaaacatatctgctaataatggaaaggaccacagggttgaattgatttatgttggtaggtcaagtattagaactttgatggaagaagagatggccagcagcacacagcccttgaagcaagcacaaagcaatgtcgctgggatatgctctgaagatattgatctaaacttggctggaagtctcatggaaatctacagatctcatactgaaggccaagaaaccaggaggtcgattgagtcaggtcgcagttccatttcgactgacgaagagaagaatactgaccctcctgctcatcactatcagatcccatctagtatccagagagctctagaagatgttgctgaagcagttataagacatcaatctgcaaacaaaaaatacataaacagcggtgatgaaactaggtccagagaattcgttgatgccctacagctactgagctcaaacaaggaattgtttgtgatgcttatgcaagatccaagctctaggttgttagaatgtctccaaaacctttacatgtcactaggaagtaccaggttagactctgaagaatatgacgaaggaactgagttgcaaggtacgacagatagtctagagcagtcagcgacttctccaagtaaggtgaaaagaaggcataattctttcttgaaggaggatgggttggtcacgaggaagccaccaaagttaaatgatggttctcgtggccttagcagaatagtaatcttgaagcccagtcctgcaagaggtcatagcagtcttatctcaggtagcgcaacttcatcaccactatcaaatcatattgattggcaagttcaggaaggcagtgataaacatgattgccatttctcgcttagagagcttaaaaggaggctaagaattgccattagcaataatcagaaggatcaccagttaaactccacgagtagtgatattcatgaagctgaggctgattctggcaaactgcttccagtcacaagtatgtcggagacggagagtctggcaagtacagattcttctgacagggctaaggaaccatctattgttgacgagaaaatagtcccggaagatagtgaaagtgggatgagaaatgatgttgctcatggtgtcggagtcagctctttctcatatgaaaaagctaagatgtatataattgagagactaaatgatcaaggcgaagaaagttgtcaaattgtacagaaatctgaatcttttgagagattgatttcactgcccgagaatggtacattttctccaattgatttccctcaagaggagaaaattagcatagcgcatgaagctacaaaaccattgaacttgcatactgttgagcaagaggatggttcagcaagcccttactcaacaatgcagtacgaggagacagaatcagccgacactagcaacttaggtacagaaacgttgattgagcccacgatagatcatggtagttattcacaaaatgagggcgctatctcacaggagttggtccgtgaaggggttaagatcatgctagatataatggagaactcatcgctctgtgctgagactggaacttcgcaggaaggagtgggagtgaaaaatccagatgaatgttcattggaggaaccacaatccatgaatttgttgccagaaccggcactgtattctccagatgacttcgttaatgaacaagagaaccatagtccgtcagaaattgttgaattagtcaaaccatctgtattgacatttccttactcgccggaaaatactaatgacaaagaggagaaattgagtccacaatccgttcttgatcccattgcagaagttaccagtcctagacacaaaactccaaagcaagatgaattctccatgcctacttccagagtgctattcaaagaggttgacgccccttcagcatccccaactttgtggaatgggccacaggtagccattttggatgacagagccacaagggtgtccttcatcaaggccgtgctagaagcttcaggattgctgtctgaggaaaattcgcaaatttggtacacagaagagccactgcttgatgtatctgtattggctgaagtaggaaactcgtactgcctgacagacgatgcagtgctcttgtttgactacgtggaagaggttcttctcgagataagggacaagttctttggtagcgacccttgggttaattctctgaaacacaatgtacggccagctccagtaggaagacggctggttcgagaggtggctaagggaatcgattctcttgtaggtaaagaatttccacacactttagaacaggtaatgatgaaagacttggacagtgggtcgtggctggatcttggaggcgatactggaagtgttgtagttgagttgtgggatggtttacttgatgacttgctggaggaactggtttttgatttgtggctttgatactgtagtgctttgtagtaatacatgcagaggcatattcgactagtactgacatggggttaatagatacagaaaccttttgcgaaaggatagggaaaagtgagttcggcagactgccagatgttgtagagctaggcatttcatcaatatagttgatttccattttcttttgaatttgatttctttaagctccctttgttctctgtagaggcatggaaacataaaaaataagtgctcctgtatataaagtaccccagtatttatggtaaattttcattgtgaacataatattgtttccgttactttatgagatactctattgcttctgtgtttcaag

SEQ ID NO: 19718 - DNA, 3765 bp, Zea Mays
atccgccattagagagaggatagagaatgccgagaatgagagagacaaggtagcggcagcggttggcgcgcgcggccacagtggcaaagcctccgtcgtcggcgaggaccgctgcatgcgctgttgccgggttggcatgcttctgcttccgcgtcttgaaggatttcaaggaagggaggatcggaaaagacaactgcgattcggttgcattcatacggttctgtaaaaaaggcagtttttttttggctgtgacctgtgagtatccgccggtttgctgtttatttattcattctcagttttggaggccgaaaattcgatcttggcgctggtctcagtgtttcgaggcctcgaggggttgctgtgaagaaccagaggaagataaaaagatgtggaggtttgtgtgctctgcgcgtttgttttggtgaagacaactagctggagtaaaaggaagaaaaaaaagttccgcttcctttcttttgcgtgttctgatccttctgagatatcccttcctgccgcttcagagtttcatttgtttccgactcggcatcggcatctcgtataaaccgaggagacacggcaatttcaagggccttcgtttgggaccaacagaataacctgttcctgcctgcaattttttggttctgaagactcaaagattggattgagtgatctttgaaaccaaatcttccttcggtgttttttggcattttgggcactatctgtgaagtgtagcaggaccgcctctgcttttatgctcggtagacttctgtgatcaagtattcaagtactggtaaaagattataagcttgtctaaagcaagcccttagaaggaaagttatctgaccatgttctcagctatcatggcaaagaagaattacaaacagcattccaaatctgagaaaattcaggggggttgtatgtctgggctgattcgcatgcttgatttccgtcgcagtccaaaacttctttcagacgggagagtcaaaagagataaaaaaggtcttgacgatatccatggaaacatatctgctaataatggaaaggaccacagggttgaattgatttatgttggtaggtcaagtattagaactttgatggaagaagagatggccagcagcacacagcccttgaagcaagcacaaagcaatgtcgctgggatatgctctgaagatattgatctaaacttggctggaagtctcatggaaatctacagatctcatactgaaggccaagaaaccaggaggtcgattgagtcaggtcgcagttccatttcgactgacgaagagaagaatactgaccctcctgctcatcactatcagatcccatctagtatccagagagctctagaagatgttgctgaagcagttataagacatcaatctgcaaacaaaaaatacataaacagcggtgatgaaactaggtccagagaattcgttgatgccctacagctactgagctcaaacaaggaattgtttgtgatgcttatgcaagatccaagctctaggttgttagaatgtctccaaaacctttacatgtcactaggaagtaccaggttagactctgaagaatatgacgaaggaactgagttgcaaggtacgacagatagtctagagcagtcagcgacttctccaagtaaggtgaaaagaaggcataattctttcttgaaggaggatgggttggtcacgaggaagccaccaaagttaaatgatggttctcgtggccttagcagaatagtaatcttgaagcccagtcctgcaagaggtcatagcagtcttatctcaggtagcgcaacttcatcaccactatcaaatcatattgattggcaagttcaggaaggcagtgataaacatgattgccatttctcgcttagagagcttaaaaggaggctaagaattgccattagcaataatcagaaggatcaccagttaaactccacgagtagtgatattcatgaagctgaggctgattctggcaaactgcttccagtcacaagtatgtcggagacggagagtctggcaagtacagattcttctgacagggctaaggaaccatctattgttgacgagaaaatagtcccggaagatagtgaaagtgggatgagaaatgatgttgctcatggtgtcggagtcagctctttctcatatgaaaaagctaagatgtatataattgagagactaaatgatcaaggcgaagaaagttgtcaaattgtacagaaatctgaatcttttgagagattgatttcactgcccgagaatggtacattttctccaattgatttccctcaagaggagaaaattagcatagcgcatgaagctacaaaaccattgaacttgcatactgttgagcaagaggatggttcagcaagcccttactcaacaatgcagtacgaggagacagaatcagccgacactagcaacttaggtacagaaacgttgattgagcccacgatagatcatggtagttattcacaaaatgagggcgctatctcacaggagttggtccgtgaaggggttaagatcatgctagatataatggagaactcatcgctctgtgctgagactggaacttcgcaggaaggagtgggagtgaaaaatccagatgaatgttcattggaggaaccacaatccatgaatttgttgccagaaccggcactgtattctccagatgacttcgttaatgaacaagagaaccatagtccgtcagaaattgttgaattagtcaaaccatctgtattgacatttccttactcgccggaaaatactaatgacaaagaggagaaattgagtccacaatccgttcttgatcccattgcagaagttaccagtcctagacacaaaactccaaagcaagatgaattctccatgcctacttccagagtgctattcaaagaggttgacgccccttcagcatccccaactttgtggaatgggccacaggtagccattttggatgacagagccacaagggtgtccttcatcaaggccgtgctagaagcttcaggattgctgtctgaggaaaattcgcaaatttggtacacagaagagccactgcttgatgtatctgtattggctgaagtaggaaactcgtactgcctgacagacgatgcagtgctcttgtttgactacgtggaagaggttcttctcgagataagggacaagttctttggtagcgacccttgggttaattctctgaaacacaatgtacggccagctccagtaggaagacggctggttcgagaggtggctaagggaatcgattctcttgtaggtaaagaatttccacacactttagaacaggtaatgatgaaagacttggacagtgggtcgtggctggatcttggaggcgatactggaagtgttgtagttgagttgtgggatggtttacttgatgacttgctggaggaactggtttttgatttgtggctttgatactgtagtgctttgtagtaatacatgcagaggcatattcgactagtactgacatggggttaatagatacagaaaccttttgcgaaaggatagggaaaagtgagttcggcagactgccagatgttgtagagctaggcatttcatcaatatagttgatttccattttcttttgaatttgatttctttaagctccctttgttctctgtagaggcatggaaacataaaaaataagtgctcctgtatataaagtaccccagtatttatggtaaattttcattgtgaacataatattgtttccgttactttatgagatactctattgcttctgtgtttcaag

SEQ ID NO: 19719 - DNA, 3801 bp, Zea Mays
cgccattagagagaggatagagaatgccgagaatgagagagacaaggtagcggcagcggttggcgcgcgcggccacagtggcaaagcctccgtcgtcggcgaggaccgctgcatgcgctgttgccgggttggcatgcttctgcttccgcgtcttgaaggatttcaaggaagggaggatcggaaaagacaactgcgattcggttgcattcatacggttctgtaaaaaaggcagtttttttttggctgtgacctgtgagtatccgccggtttgctgtttatttattcattctcagttttggaggccgaaaattcgatcttggcgctggtctcagtgtttcgaggcctcgaggggttgctgtgaagaaccagaggaagataaaaaggtggttttctcgccggttttccttggttttggggtactgaattctgagattgttctgaggcaggggtctgtcttgctggagaatgaagatgtggaggtttgtgtgctctgcgcgtttgttttggtgaagacaactagctggagtaaaaggaagaaaaaaaagttccgcttcctttcttttgcgtgttctgatccttctgagatatcccttcctgccgcttcagagtttcatttgtttccgactcggcatcggcatctcgtataaaccgaggagacacggcaatttcaagggccttcgtttgggaccaacagaataacctgttcctgcctgcaattttttggttctgaagactcaaagattggattgagtgatctttgaaaccaaatcttccttcggtgttttttggcattttgggcactatctgtgaagtgtagcaggaccgcctctgcttttatgctcggtagacttctgtgatcaagtattcaagtactggtaaaagattataagcttgtctaaagcaagcccttagaaggaaagttatctgaccatgttctcagctatcatggcaaagaagaattacaaacagcattccaaatctgagaaaattcaggggggttgtatgtctgggctgattcgcatgcttgatttccgtcgcagtccaaaacttctttcagacgggagagtcaaaagagataaaaaaggtcttgacgatatccatggaaacatatctgctaatgtcaagtattagaactttgatggaagaagagatggccagcagcacacagcccttgaagcaagcacaaagcaatgtcgctgggatatgctctgaagatattgatctaaacttggctggaagtctcatggaaatctacagatctcatactgaaggccaagaaaccaggaggtcgattgagtcaggtcgcagttccatttcgactgacgaagagaagaatactgaccctcctgctcatcactatcagatcccatctagtatccagagagctctagaagatgttgctgaagcagttataagacatcaatctgcaaacaaaaaatacataaacagcggtgatgaaactaggtccagagaattcgttgatgccctacagctactgagctcaaacaaggaattgtttgtgatgcttatgcaagatccaagctctaggttgttagaatgtctccaaaacctttacatgtcactaggaagtaccaggttagactctgaagaatatgacgaaggaactgagttgcaaggtacgacagatagtctagagcagtcagcgacttctccaagtaaggtgaaaagaaggcataattctttcttgaaggaggatgggttggtcacgaggaagccaccaaagttaaatgatggttctcgtggccttagcagaatagtaatcttgaagcccagtcctgcaagaggtcatagcagtcttatctcaggtagcgcaacttcatcaccactatcaaatcatattgattggcaagttcaggaaggcagtgataaacatgattgccatttctcgcttagagagcttaaaaggaggctaagaattgccattagcaataatcagaaggatcaccagttaaactccacgagtagtgatattcatgaagctgaggctgattctggcaaactgcttccagtcacaagtatgtcggagacggagagtctggcaagtacagattcttctgacagggctaaggaaccatctattgttgacgagaaaatagtcccggaagatagtgaaagtgggatgagaaatgatgttgctcatggtgtcggagtcagctctttctcatatgaaaaagctaagatgtatataattgagagactaaatgatcaaggcgaagaaagttgtcaaattgtacagaaatctgaatcttttgagagattgatttcactgcccgagaatggtacattttctccaattgatttccctcaagaggagaaaattagcatagcgcatgaagctacaaaaccattgaacttgcatactgttgagcaagaggatggttcagcaagcccttactcaacaatgcagtacgaggagacagaatcagccgacactagcaacttaggtacagaaacgttgattgagcccacgatagatcatggtagttattcacaaaatgagggcgctatctcacaggagttggtccgtgaagatcatgctagatataatggagaactcatcgctctgtgctgagactggaacttcgcaggaaggagtgggagtgaaaaatccagatgaatgttcattggaggaaccacaatccatgaatttgttgccagaaccggcactgtattctccagatgacttcgttaatgaacaagagaaccatagtccgtcagaaattgttgaattagtcaaaccatctgtattgacatttccttactcgccggaaaatactaatgacaaagaggagaaattgagtccacaatccgttcttgatcccattgcagaagttaccagtcctagacacaaaactccaaagcaagatgaattctccatgcctacttccagagtgctattcaaagaggttgacgccccttcagcatccccaactttgtggaatgggccacaggtagccattttggatgacagagccacaagggtgtccttcatcaaggccgtgctagaagcttcaggattgctgtctgaggaaaattcgcaaatttggtacacagaagagccactgcttgatgtatctgtattggctgaagtaggaaactcgtactgcctgacagacgatgcagtgctcttgtttgactacgtggaagaggttcttctcgagataagggacaagttctttggtagcgacccttgggttaattctctgaaacacaatgtacggccagctccagtaggaagacggctggttcgagaggtggctaagggaatcgattctcttgtaggtaaagaatttccacacactttagaacaggtaatgatgaaagacttggacagtgggtcgtggctggatcttggaggcgatactggaagtgttgtagttgagttgtgggatggtttacttgatgacttgctggaggaactggtttttgatttgtggctttgatactgtagtgctttgtagtaatacatgcagaggcatattcgactagtactgacatggggttaatagatacagaaaccttttgcgaaaggatagggaaaagtgagttcggcagactgccagatgttgtagagctaggcatttcatcaatatagttgatttccattttcttttgaatttgatttctttaagctccctttgttctctgtagaggcatggaaacataaaaaataagtgctcctgtatataaagtaccccagtatttatggtaaattttcattgtgaacataatattgtttccgttactttatgagatactctattgcttctgtgtttcaag

SEQ ID NO: 19720 - DNA, 3757 bp, Zea Mays
gacaaggtagcggcagcggttggcgcgcgcggccacagtggcaaagcctccgtcgtcggcgaggaccgctgcatgcgctgttgccgggttggcatgcttctgcttccgcgtcttgaaggatttcaaggaagggaggatcggaaaagacaactgcgattcggttgcattcatacggttctgtaaaaaaggcagtttttttttggctgtgacctgtgagtatccgccggtttgctgtttatttattcattctcagttttggaggccgaaaattcgatcttggcgctggtctcagtgtttcgaggcctcgaggggttgctgtgaagaaccagaggaagataaaaaggtggttttctcgccggttttccttggttttggggtactgaattctgagattgttctgaggcaggggtctgtcttgctggagaatgaagatgtggaggtttgtgtgctctgcgcgtttgttttggtgaagacaactagctggagtaaaaggaagaaaaaaaagttccgcttcctttcttttgcgtgttctgatccttctgagatatcccttcctgccgcttcagagtttcatttgtttccgactcggcatcggcatctcgtataaaccgaggagacacggcaatttcaagggccttcgtttgggaccaacagaataacctgttcctgcctgcaattttttggttctgaagactcaaagattggattgagtgatctttgaaaccaaatcttccttcggtgttttttggcattttgggcactatctgtgaagtgtagcaggaccgcctctgcttttatgctcggtagacttctgtgatcaagtattcaagtactggtaaaagattataagcttgtctaaagcaagcccttagaaggaaagttatctgaccatgttctcagctatcatggcaaagaagaattacaaacagcattccaaatctgagaaaattcaggggggttgtatgtctgggctgattcgcatgcttgatttccgtcgcagtccaaaacttctttcagacgggagagaatggaaaggaccacagggttgaattgatttatgttggtaggtcaagtattagaactttgatggaagaagagatggccagcagcacacagcccttgaagcaagcacaaagcaatgtcgctgggatatgctctgaagatattgatctaaacttggctggaagtctcatggaaatctacagatctcatactgaaggccaagaaaccaggaggtcgattgagtcaggtcgcagttccatttcgactgacgaagagaagaatactgaccctcctgctcatcactatcagatcccatctagtatccagagagctctagaagatgttgctgaagcagttataagacatcaatctgcaaacaaaaaatacataaacagcggtgatgaaactaggtccagagaattcgttgatgccctacagctactgagctcaaacaaggaattgtttgtgatgcttatgcaagatccaagctctaggttgttagaatgtctccaaaacctttacatgtcactaggaagtaccaggttagactctgaagaatatgacgaaggaactgagttgcaaggtacgacagatagtctagagcagtcagcgacttctccaagtaaggtgaaaagaaggcataattctttcttgaaggaggatgggttggtcacgaggaagccaccaaagttaaatgatggttctcgtggccttagcagaatagtaatcttgaagcccagtcctgcaagaggtcatagcagtcttatctcaggtagcgcaacttcatcaccactatcaaatcatattgattggcaagttcaggaaggcagtgataaacatgattgccatttctcgcttagagagcttaaaaggaggctaagaattgccattagcaataatcagaaggatcaccagttaaactccacgagtagtgatattcatgaagctgaggctgattctggcaaactgcttccagtcacaagtatgtcggagacggagagtctggcaagtacagattcttctgacagggctaaggaaccatctattgttgacgagaaaatagtcccggaagatagtgaaagtgggatgagaaatgatgttgctcatggtgtcggagtcagctctttctcatatgaaaaagctaagatgtatataattgagagactaaatgatcaaggcgaagaaagttgtcaaattgtacagaaatctgaatcttttgagagattgatttcactgcccgagaatggtacattttctccaattgatttccctcaagaggagaaaattagcatagcgcatgaagctacaaaaccattgaacttgcatactgttgagcaagaggatggttcagcaagcccttactcaacaatgcagtacgaggagacagaatcagccgacactagcaacttaggtacagaaacgttgattgagcccacgatagatcatggtagttattcacaaaatgagggcgctatctcacaggagttggtccgtgaaggggttaagatcatgctagatataatggagaactcatcgctctgtgctgagactggaacttcgcaggaaggagtgggagtgaaaaatccagatgaatgttcattggaggaaccacaatccatgaatttgttgccagaaccggcactgtattctccagatgacttcgttaatgaacaagagaaccatagtccgtcagaaattgttgaattagtcaaaccatctgtattgacatttccttactcgccggaaaatactaatgacaaagaggagaaattgagtccacaatccgttcttgatcccattgcagaagttaccagtcctagacacaaaactccaaagcaagatgaattctccatgcctacttccagagtgctattcaaagaggttgacgccccttcagcatccccaactttgtggaatgggccacaggtagccattttggatgacagagccacaagggtgtccttcatcaaggccgtgctagaagcttcaggattgctgtctgaggaaaattcgcaaatttggtacacagaagagccactgcttgatgtatctgtattggctgaagtaggaaactcgtactgcctgacagacgatgcagtgctcttgtttgactacgtggaagaggttcttctcgagataagggacaagttctttggtagcgacccttgggttaattctctgaaacacaatgtacggccagctccagtaggaagacggctggttcgagaggtggctaagggaatcgattctcttgtaggtaaagaatttccacacactttagaacaggtaatgatgaaagacttggacagtgggtcgtggctggatcttggaggcgatactggaagtgttgtagttgagttgtgggatggtttacttgatgacttgctggaggaactggtttttgatttgtggctttgatactgtagtgctttgtagtaatacatgcagaggcatattcgactagtactgacatggggttaatagatacagaaaccttttgcgaaaggatagggaaaagtgagttcggcagactgccagatgttgtagagctaggcatttcatcaatatagttgatttccattttcttttgaatttgatttctttaagctccctttgttctctgtagaggcatggaaacataaaaaataagtgctcctgtatataaagtaccccagtatttatggtaaattttcattgtgaacataatattgtttccgttactttatgagatactctattgcttctgtgtttcaag

SEQ ID NO: 19721 - DNA, 2242 bp, Zea Mays
taccgatctagaatcgagttgttgtactctctctgtcccttttgtgcagctataactagctaggttccttcgcatagagcctctctacagagtacagactagctagcagtgtcaggcacgaaatggaaatggctacttccaaattgcacgagctggaattatatactcttctgatcttcttcaccgtctctttatagcgtgatatgcgtttctggcttcttgcttgcgtgaaggattagtaaggcgcgtgatggcgctctcagcttgcccggctcaggaagaactgctgcagcctgctgggaggccgttgaggaagcagcttgctgcagccgcgaggagcatcaactggagctattccctcttctggtccatttcaagcactcaacgaccacgctgctcatgcagaggagcgagcagctccgggagctctacgaggccctccagtccggcgagtgcgaccgccgcgcggcgcggccggtgggctcgctgtcgccggaggacctcggggacaccgagtggtactacgtgatctgcatgacctacgccttcctgcctggccaaggcttgcccggcaggagttccgcgagcaacgagcatgtctggctgtgcaacgcgcacctcgccggcagcaaggacttcccccgcgcgctcctggccaaggtgccggaggacccggacttgatcaaccgagcaaccgcagcctttcgggagccgcaatgtccgatatactcggaacagccgagctccaacccgtcagcagacgaaaccggcgaggccgcagacatagctgtgttcgagggcctcgatcacaatgccatggacatggagaccgcaggcatagctgtgttcgagggcctcgatcacaatgccatggacatggagacggtgactgccgccgccgggagacacggaaccggacaggagctaggagaagccgacagcccgtcaaatgcaagcctggagcacatcaccaaggggatcgacgagttctacaacctctgcgaggaaatggacgtgcagccgctagaggatgcctggataatggacgggtctaatttcgaagtcccctcgtcagcgctcccggtggatggctcaagcgcacccgctgatggctctcgcgcgaccagtttcgtggcttggacgaggtcatcgcagtcctgctccggtgaagcggcggctgtgccggtcatcgaagagccgcagaaattgctgaagaaagcggtggccggcggcggtgcttgggcgaacacgaactgcggtggcgggggcacgacggtaacagcccaggaaaacggcgccaagaaccacgtcatgttagagcgaaagcgccgggagaagctcaacgagatgttcctcgttctcaagtcgttggttccctccattcacaaggtggacaaagcatccatcctcgccgaaactatagcctacctaaaggagcttcaacgaagggtacaagaactggaatccaggaggcaaggtggcagtgggtgtgtcagcaagaaagtctgtgtgggctccaactccaagaggaagagcccagagttcgccggtggcgcgaaggagcacccctgggtcctccccatggacggtaccagcaacgtcaccgtcaccgtctctgacagggacgtgctcctggaggtgcaatgcctgtgggagaagctcctgatgacacgggtgttcgacgccatcaagagcctccatttggacgctctctcggttcaggcttcggcactagatggcttcatgaggctcaagataggagctcaggtatcgcaccagctaataattaagccatggcgattgcaagctctggtggctagcagttttgcaactcagccttgacttcttggttcgtgctcgttttactgacgctgttgtttctgttcatattcttatgcagtttgcaggctccggcgccgtcgtgcccggaatgatcagccaatctcttcgtaaagctatagggaagcgatgaaagggcgctacatgtgaagcttaattaatggaagcaaacttgtatttcttgtgcaaaagcttactatatatttctgcaaaacctggtgtgccttgttttgattttcagtcgccaattgtgcccttgtttttatcaagtgatgatctacactatatatatggaatatttgaaaagagcgatgtcgtagggtttttttattacaaggaacaagtctttcacgtgctgtcctcacaaatccaagagaaaatctgctcattttgattggcttcc

SEQ ID NO: 19722 - DNA, 1325 bp, Zea Mays
gtttgaaaactctataagcgtgtttggatttcaggtctgatgggaagtaaagacggcaccggtgacatatcggaagcccaaggctatgctgccgacattgattccatcagggaggcgcaggcccgcattgcgccgtacgttcacaggacgcccgttatgtcgtcgacgtccatcgatgccatggtggggaagaagctcttcttcaagtgcgagtgcttccagaaagcgtgagggttactgaccgatgtgtttttcggttctgggatgctctataattggtacagtacttattgtttgagtggggaaatgttgagttttgttgtgtaggggcgcattcaagatccgaggtgcttcgaattcgatattcgcacttgacgatgagcaggtatcaaagggcgttgtgacacatagcagtgggaaccatgccgctgctgtggctttggctgcaaagctgcgtggcatacctgcgcacattgtcattccaagaaatgcaccagcgtgtaaggttgaaaatgttaagcgctacggtggtcatattatttggagcgatgccagcattgaatcgagagaatatgtttgtaaaagagtccaggaggagaccggcgctgttcttattcatcccttcaatagtaaatacactatcagtggtcagggtacagtatcccttgaacttttggagcaagtccctgaaattgacacaataattgttcccattagtggtggtggtttaatttctggtgtggcccttgctgcaaaggccataaacccttcgatacgcattctagcagcagaaccaaaaggtgctgatgattctgctcagtctaaggctgctggaaagatcatcacattgccttccacaaacaccattgctgatggactacgagcttttcttggagacctgacatggcctgtggtgcgtgacttggtggacgatgttatcgttgtggatgacactgccattgtggacgccatgaaaatgtgctatgagatcctgaaggtggctgttgagcccagtggcgcaattggcctggccgcagcactgtccgacgagtttaagcaaagctctgcttggcacgagagcagcaagatagggataattgtttctggagggaatgttgaccttggcactctctggcagtctatgtacaaacactgattggagagagtaggaccgatgatattgcccttgaatttcaaacgtgatagttttagacaagtcgtttgtaaacttggaatagttcgttgtaaacatcacttattacctgtttttttatcaatgggttattcagttgcagccacatcgatcactgaaaccgaaggctggg

SEQ ID NO: 19723 - DNA, 1555 bp, Zea Mays
cctcccgttggtactgtacattctcttcctcgactcctcgttctcccctctcctagtctttggcgcgtagtggcgaactggagaggtgtacaatcgtccggcgatccggacttcgattggttctctgctgttggtaaggaactcctacttgccttgggcggattgttccacgacccagtcttgctccacaggatattttctttgctgcgaccaatcaattcgaaatctttcctactcggccggatactccgatccacccagtttgtctgatgggaagtaaagacggcaccggtgacatatcggaagcccaaggctatgctgccgacattgattccatcagggaggcgcaggcccgcattgcgccgtacgttcacaggacgcccgttatgtcgtcgacgtccatcgatgccatggtggggaagaagctcttcttcaagtgcgagtgcttccagaaagcgtgagggttactgaccgatgtgtttttcggttctgggatgctctataattggtacagtacttattgtttgagtggggaaatgttgagttttgttgtgtaggggcgcattcaagatccgaggtgcttcgaattcgatattcgcacttgacgatgagcaggtatcaaagggcgttgtgacacatagcagtgggaaccatgccgctgctgtggctttggctgcaaagctgcgtggcatacctgcgcacattgtcattccaagaaatgcaccagcgtgtaaggttgaaaatgttaagcgctacggtggtcatattatttggagcgatgccagcattgaatcgagagaatatgtttgtaaaagagtccaggaggagaccggcgctgttcttattcatcccttcaatagtaaatacactatcagtggtcagggtacagtatcccttgaacttttggagcaagtccctgaaattgacacaataattgttcccattagtggtggtggtttaatttctggtgtggcccttgctgcaaaggccataaacccttcgatacgcattctagcagcagaaccaaaaggtgctgatgattctgctcagtctaaggctgctggaaagatcatcacattgccttccacaaacaccattgctgatggactacgagcttttcttggagacctgacatggcctgtggtgcgtgacttggtggacgatgttatcgttgtggatgacactgccattgtggacgccatgaaaatgtgctatgagatcctgaaggtggctgttgagcccagtggcgcaattggcctggccgcagcactgtccgacgagtttaagcaaagctctgcttggcacgagagcagcaagatagggataattgtttctggagggaatgttgaccttggcactctctggcagtctatgtacaaacactgattggagagagtaggaccgatgatattgcccttgaatttcaaacgtgatagttttagacaagtcgtttgtaaacttggaatagttcgttgtaaacatcacttattacctgtttttttatcaatgggttattcagttgcagccacatcgatcactgaaaccgaaggctggg

SEQ ID NO: 19724 - DNA, 1483 bp, Zea Mays
cctcccgttggtactgtacattctcttcctcgactcctcgttctcccctctcctagtctttggcgcgtagtggcgaactggagaggtgtacaatcgtccggcgatccggacttcgattggttctctgctgttggtaaggaactcctacttgccttgggcggattgttccacgacccagtcttgctccacaggatattttctttgctgcgaccaatcaattcgaaatctttcctactcggccggatactccgatccacccagtttgttgcgtgctggagctctagtaacagtttattttccaataaatttgggggtctgatgggaagtaaagacggcaccggtgacatatcggaagcccaaggctatgctgccgacattgattccatcagggaggcgcaggcccgcattgcgccgtacgttcacaggacgcccgttatgtcgtcgacgtccatcgatgccatggtggggaagaagctcttcttcaagggcgcattcaagatccgaggtgcttcgaattcgatattcgcacttgacgatgagcaggtatcaaagggcgttgtgacacatagcagtgggaaccatgccgctgctgtggctttggctgcaaagctgcgtggcatacctgcgcacattgtcattccaagaaatgcaccagcgtgtaaggttgaaaatgttaagcgctacggtggtcatattatttggagcgatgccagcattgaatcgagagaatatgtttgtaaaagagtccaggaggagaccggcgctgttcttattcatcccttcaatagtaaatacactatcagtggtcagggtacagtatcccttgaacttttggagcaagtccctgaaattgacacaataattgttcccattagtggtggtggtttaatttctggtgtggcccttgctgcaaaggccataaacccttcgatacgcattctagcagcagaaccaaaaggtgctgatgattctgctcagtctaaggctgctggaaagatcatcacattgccttccacaaacaccattgctgatggactacgagcttttcttggagacctgacatggcctgtggtgcgtgacttggtggacgatgttatcgttgtggatgacactgccattgtggacgccatgaaaatgtgctatgagatcctgaaggtggctgttgagcccagtggcgcaattggcctggccgcagcactgtccgacgagtttaagcaaagctctgcttggcacgagagcagcaagatagggataattgtttctggagggaatgttgaccttggcactctctggcagtctatgtacaaacactgattggagagagtaggaccgatgatattgcccttgaatttcaaacgtgatagttttagacaagtcgtttgtaaacttggaatagttcgttgtaaacatcacttattacctgtttttttatcaatgggttattcagttgcagccacatcgatcactgaaaccgaaggctggg

SEQ ID NO: 19725 - DNA, 1430 bp, Zea Mays
cctcccgttggtactgtacattctcttcctcgactcctcgttctcccctctcctagtctttggcgcgtagtggcgaactggagaggtgtacaatcgtccggcgatccggacttcgattggttctctgctgttggtaaggaactcctacttgccttgggcggattgttccacgacccagtcttgctccacaggatattttctttgctgcgaccaatcaattcgaaatctttcctactcggccggatactccgatccacccagtttgttgcgtgctggagctctagtctgatgggaagtaaagacggcaccggtgacatatcggaagcccaaggctatgctgccgacattgattccatcagggaggcgcaggcccgcattgcgccgtacgttcacaggacgcccgttatgtcgtcgacgtccatcgatgccatggggcgcattcaagatccgaggtgcttcgaattcgatattcgcacttgacgatgagcaggtatcaaagggcgttgtgacacatagcagtgggaaccatgccgctgctgtggctttggctgcaaagctgcgtggcatacctgcgcacattgtcattccaagaaatgcaccagcgtgtaaggttgaaaatgttaagcgctacggtggtcatattatttggagcgatgccagcattgaatcgagagaatatgtttgtaaaagagtccaggaggagaccggcgctgttcttattcatcccttcaatagtaaatacactatcagtggtcagggtacagtatcccttgaacttttggagcaagtccctgaaattgacacaataattgttcccattagtggtggtggtttaatttctggtgtggcccttgctgcaaaggccataaacccttcgatacgcattctagcagcagaaccaaaaggtgctgatgattctgctcagtctaaggctgctggaaagatcatcacattgccttccacaaacaccattgctgatggactacgagcttttcttggagacctgacatggcctgtggtgcgtgacttggtggacgatgttatcgttgtggatgacactgccattgtggacgccatgaaaatgtgctatgagatcctgaaggtggctgttgagcccagtggcgcaattggcctggccgcagcactgtccgacgagtttaagcaaagctctgcttggcacgagagcagcaagatagggataattgtttctggagggaatgttgaccttggcactctctggcagtctatgtacaaacactgattggagagagtaggaccgatgatattgcccttgaatttcaaacgtgatagttttagacaagtcgtttgtaaacttggaatagttcgttgtaaacatcacttattacctgtttttttatcaatgggttattcagttgcagccacatcgatcactgaaaccgaaggctggg

SEQ ID NO: 19726 - DNA, 1356 bp, Zea Mays
cctcccgttggtactgtacattctcttcctcgactcctcgttctcccctctcctagtctttggcgcgtagtggcgaactggagaggtgtacaatcgtccggcgatccggacttcgattggttctctgctgttgaattgattgtctgtgctaggtctgatgggaagtaaagacggcaccggtgacatatcggaagcccaaggctatgctgccgacattgattccatcagggaggcgcaggcccgcattgcgccgtacgttcacaggacgcccgttatgtcgtcgacgtccatcgatgccatggtggggaagaagctcttcttcaagtgcgagtgcttccagaaagcttttgttgtgtaggggcgcattcaagatccgaggtgcttcgaattcgatattcgcacttgacgatgagcaggtatcaaagggcgttgtgacacatagcagtgggaaccatgccgctgctgtggctttggctgcaaagctgcgtggcatacctgcgcacattgtcattccaagaaatgcaccagcgtgtaaggttgaaaatgttaagcgctacggtggtcatattatttggagcgatgccagcattgaatcgagagaatatgtttgtaaaagagtccaggaggagaccggcgctgttcttattcatcccttcaatagtaaatacactatcagtggtcagggtacagtatcccttgaacttttggagcaagtccctgaaattgacacaataattgttcccattagtggtggtggtttaatttctggtgtggcccttgctgcaaaggccataaacccttcgatacgcattctagcagcagaaccaaaaggtgctgatgattctgctcagtctaaggctgctggaaagatcatcacattgccttccacaaacaccattgctgatggactacgagcttttcttggagacctgacatggcctgtggtgcgtgacttggtggacgatgttatcgttgtggatgacactgccattgtggacgccatgaaaatgtgctatgagatcctgaaggtggctgttgagcccagtggcgcaattggcctggccgcagcactgtccgacgagtttaagcaaagctctgcttggcacgagagcagcaagatagggataattgtttctggagggaatgttgaccttggcactctctggcagtctatgtacaaacactgattggagagagtaggaccgatgatattgcccttgaatttcaaacgtgatagttttagacaagtcgtttgtaaacttggaatagttcgttgtaaacatcacttattacctgtttttttatcaatgggttattcagttgcagccacatcgatcactgaaaccgaaggctggg

SEQ ID NO: 19727 - DNA, 822 bp, Zea Mays
ctgctaacacatatttgctagatatttgcttgctttgcagggagcggggtcatagtctgaagaactgtcctgacaaaagcgagggaaatttgatgaaattttgctataactgtggtgaatctggacactctctttccaagtgccccaagcccattgagaatgggggtacgaattttgcaagctgttttatctgcaatcagcaagggcatttgagcaagaactgccctgaaaacaaacatggcatctatccaaagggtggttgttgtaaggtatgtggcgaagttacccacttggccagacattgtccgaataaagggagacaagatttgatatcctccagagatgatgatgtcaacatggaagagcacagtcaggaatgtcctgcggttcaccatggtggagatgacctagaagatgatttcgttaatgaagaagaaccaaaacccgccaaatcaaagaaggcaaagcaatcaggttcaagaccagccacagggacgggaaatgacgtgaagagcgccagtgccaagacaaaagcgaaacaagctcctaaagttgtaaaattctttggttaaagaatgggaattttgttgtagcttaagatacgaatgttccatctggacaaccttgtactgtcaagcggttgtgtgtaacgctgatgacgatgagaatacgtctgccaactgcatacgcctctcgttgcccctaggtgctcttctgtcttctcattgtttggctagcattgggttatgcgagaccagtagaacaattacaatatggaattcgctcagttttcgcatccagatcacccatcaagatacgatt

SEQ ID NO: 19728 - DNA, 8954 bp, Zea Mays
ctagaacgcagcgcaagccgcgacccgtcaaggcgtgaagccgtgaacccacccggagccgcgccacgtcttctccccctcctgacctcccccctgccccctcgtcaagctcatcatccggttccgcctatcggatctcgccgtgcaccgccgctgattccacccaccgctccgcacgcatttgcaccccaactcctcacagatctccccagatctacgcgctccacgcactgccattttcccgctccgattcttcccccactccagtctacgccgcgcttaatcgcccgcccgctgtttcacttccgttgaccgattcccgctcgcatttccacaccctgcgcttggttcggaattggtctcgatggagtaaagtccttgcaatggcggaagacgcgcacgagttgttcgattcctccccgccgcgggaggagggctccgacgagcagctcgcggccgtaccgctcggcgacgaggcgggcgtcgtcgaggaggaggaggcgtcggatccggggatgagtaccagcatgccggccacacccgcgacgccctacgagccgcccccgcggcccaggcggccgcctggagtaccggccgacgcgccactggaggtggtgcgggcggtggaggaggcgatcgcgggcggggcggaccttctccgcgaggtggtctcccaggagcagggcgagctggctcactccgtcgtcgacgtgctgctcggcaccatgggcggtgtggacgaggcaggcgacgccaccggcaccggcgctcctcccaccgtcatgatcagctcgcgtgccgctgtcgccgccgctgagctcctgccttatctccccgaagacgacgagccgtcgccgcgcactcgaacagccttaggtctgcacgccgccctccgcgcctgcactcgcaatagagccatgtgttcttccgcgggcctcctggctgccctcctcgcgtccgcagagaagctgttcgtcgaaatggatcagggtagcagatgggacgggacgccactgcttcaatgcattcagatgttgggtgggcactcgcttagtgtgaaagacctgcattcctggcttgatttggttagaaagtcacttggaacgagctgggccacaccacttatgctagcgcttgagaaggccatgggcagcatggaagcaaaaggtcctgctgtgacatttgagtttgacggggagagctctggtctgcttggcccaggtgacagcaggtggcccttcttaaatggatatgggtttgccacttggatatacatagaatcattctcggatacccttagcacagcaacagctgcggcagccattgctgctgctgcagcggcaacatctggaaaatcatcagcaatgtcagctgctgcggcagccagtgcccttgcaggagaaggaacaacacacatgcctcggcttttcagctttctctcttcagataaccagggtgtggaagcttactttcatggccagttcttggtggtggagagtgtgggtggtaggggtaagaaagcttctttgcacttcacatatgcgttcaagcctcagtgctggtattttgttgggttggagcacacaaacaagcatagtttgctcggaaaggatgacagcgaattgagtctgtatgttgatggaagcctgtatgagagccgtccttttgagtttccacgtatctctaaaccacttgcattttgctgcatcgggacaaatccaccaccaactattgccggcctgcagaggcgccggcggcaatgcccattatttgctgaaatggggcctgtctacatcttcaaagaaccaattgggccagacagaatgagacgtctagcatcccgaggaggagacacactgcccagttttggaaatggcgcaggcttgccatggaaggcaactaatgaccaagttaagagtatggctgaagagagcttttcactcaacaatgggatagggggaagcttgcatcttctttaccatcctagtcttctcactgggcggttttgtccagacgcctcaccttctggttcatcaggcactcatcgaaggcccgcagaggttctcggattggttcatgtctcacctcgtgtgcgaccttcagaatctttatgggccttagcttatgggggtccaatggctttacttccactaaccataggcaatgtacatgtggacagccttgagcctgcacctggggacttgccatcgtctcttgctaccatttccctttctgccccagttttcaggattatttcccaagctattcaacaccctggaaataatgaagaattatgccgtacatttgcaccagagcttttatcacgtgttttacattatgtgttgcaggctcttccaaagttggaaagtggggaagaggttctgactgatgaggagcttgttgctgccattgtatctttgtgccagtctcaaagaaataatcatgaacttaaagtgcagcttttcagcagcttgctgttggacctaaatctatggagttcatgcaattatggtttacagaaggagcttctgtcgtctctcgcagacatggtatttacagagtctgcttgcatgcgagatgccaaggcgatgcaaatgcttcttgatggctgcagaaggtgttactgggtaattcaggaaccggattcaatcgataactttgcatttactggaacaaagcgatctttgggggaagtgaatgctctagtggatgaacttttggttgttattgaactactgctaggagcagcatcttcaacagcagcagcagatgatgtccgctgtttgattggatttattgttgactgcccacagcctaatcaggttgcaagggtgttgcacctcatatataggttgaatgtacaacctaacatttctagggccaacttattttctcaatccttcatcactagtggtggtgtggaagcactacttgttcttttacaacgggaagctaaagtgggtaacaaaaatattttggatcattctagtgcaagtgaaaataatgtgcccaaggatggaagttccaacagaaaagctgatagtgctgacacaagttgtcaggttgatgaaaatcaatcagctgaacgtcatgaaactgtcttccatgaagaagccattgaacatgaagccacaaatgcaaaagatatgctggactcaaatattggaagtaaagtgcctggttctgagaatgggctcttgaagaacctgggtggcattagcttctcaattacttctgataatgtccggaataatgtttacaatgttgacaaaggtgatggaattgttgttggcattattcacattcttggtgctctaattgggtcaggtcacctgaaatttgattctggagctggaagtgcaaatatacctggtggtagtcagaccacacttaatgaagaaggaaatactatgtcagaagatagagtatcattgttactttttgcattgcaaaaggcattccaagcagccccaaggaggcttatgacggcaaatgtctatatggctttgatttctgctgtgattaatgtttcatcagctgatgaaagtcttaatctttatgattctggtcaccgttttgaacatatccaacttttactggttctacttcgctcgcttccatatgcatcgagggcattccaagctcgtgcaatacaggatattctgtttttggcttgtagtcatctagataacagaactacaatgacctcgatttcagagtggccagaatggattttggaggttttgatttcgaaccatgaaatggacacaaagaaaaatgctgatggtgtaagcattggtgagattgaagacctcatacacaattttctgattataatgctggagcattcaatgcgacaaaaagatgggtggaaggatgtggaggcaacaattcattgtgcggagtggctctcaatagttggaggatctagcactggagaccaaaggatcaggcgtgaagaatcattacctatttttaaaaggagattgttgggtgacttgcttgatttttctgccagggagcttcaagttcagaccgaagtaattgcagcagctgcagctggtgttgcagctgagggtttgtctcctgaagaagcaaaaattcaagcagagaatgctgctcatctctcagtagcactagcagagaatgcaatagttattctgatgcttgtggaagatcatctgagatcacaagctcaacatttttgcacatcccttacaggtgatagcatcacatcgtccacatcaatgacttcattggctgccagtcggtcaaattctttgagcacagctggtaaagaacccatggctgctggggtctcaagacgggcatctttgtccagtgatgctggtggccttcctctggatttgcttacttctatggctgattcaaatggacaaatctctgctgccgtgatggaacgtcttacagcagcaacagcagctgaaccttatgattctgtcaagcatgcatttgtgtcttatgggagctgcataactgatcttggagaaagttggaagtaccgaagccgtttgtggtatggtgttggcattccacccaaatctgatatatttggtggtggtggaagtggttgggaatcttggagatctattctagagaaggattcaaatgggatttggattgaatttccacttgtgaagaaatcagttgctgtgctgcaggcacttcttttagatgaatctggacttggtggtggtcttggtattggagggggatctggccctggtatgggggttatgactgccctctatcagttgctagatagcgatcaaccatttctttgcatgctcagaatggttcttgtttcgatgagggaggacgacaatggtgaaggcgatgcttttacgaaagatgttagcataaaggatgtggtatcagaaggaatgggccaccaggctggaagtgtgatgccatttgatggcaacagttattcatctccaagaaaacctcgatctgctcttctttggagtgtgcttggccccatccttaatatgccaataacagagtctaagagacagagagtgttggttgcttcctctattctctactcagaggtatggcacgctattggcagggacaggaaacccctaaggaaacaatacattgagctgattttaccaccgtttgtagcaattcttagaagatggcgaccccttttggctggtattcatgagcttacttcttcagatggacaaaatccactaattgctgatgatcgtgctttggcggcagatgcattacctgtcgaggcttctcttttgatgatatcgcctggttgggctgctgcttttgcatcgccaccagttgcaatggcattggccatgatggctgctggtgcctcaggaacagaaacaagaacacctcctaggaataccttgaataggcgtgacaaagcattgcctgagcgcaaggcagcagcaaaactacagactttctcgagtttccagatgcctatggaaacagcatctaacaagcctgggtccaccctgaaggacaaggcagcagcaaaagctgccgcattggcagccgctcgtgaccttgaacgaactgctaagattggttcaagaaggggccttagtgctgtagcaatggcaacatcaggacaaaggaggagttcgggtgacatcgaacgagcaaagaggtggaatacgtcagaagctatgagtgctgcttgggtggagtgtctgcaatcagatgattccaaatcagttgtgggaagggatttttcagccctttcatacaaatatgtcgcagtacttgtttcttgtttggccttagcacgaaacttacaacgagctgagatggagaggcaaacactagttgatgtgttaattcggcatcgcgcctcaactgggcttcgagcatggcggcatcttcttcattgcctaacagagatgggtagactatatggaccttttgaacatctgtgcactcctgatcgtgttttctggaaattagattttactgaaagctcttcaaggatgagaagatttgtgaaaagaaattacaagggatgtgatcatttaggtgcagctgctgattatgaggaccggaagcttcttaatacttctgcacagtcaaatgaacataactctgaggatgctaattcttcattaacaagcactcttccatcatctgcttctgtaattatggctgatgccatgtcgatgaatgacagaaatgtggaaaatgagcagttagaaactgacactactcgcagcagtgttgatgacgatcagcttcaacattcttcagcagctgatcaacaatcggtaaaaggatcgataggttcaagaacttctgacatttgtgctgatcgaaatttggttaggtctacagttcttgcacctagttatgtgcctagcgaagctgatgagagaattattgttgaactgccatcattaatggtgcgaccattgaaggtggttcgaggaacattccaagtaacttcaaagaggattaacttcataattgatgagcgttcaaatgacagtaacattgatgatgctgcatctactagtggccaatgtgatcaacaagataaagatcgaagctggttggtctcatcactttatcagatatatagcagacgatacttgctacgccgaagtgctttggaattattcatggtagataggtcgaatttcttttttgactttgcggatattgatgcccgtaaaaacgcttatcgggccattgttcataccaaacctcctaacttgaatgacatctttttagctacccagagagctgagcagattcttaaaagaactcagttgatggagcgctgggctaattgggagatcaacaattttgagtacttaatggaacttaacacactggctgggcgcagttacaatgacattactcagtaccctgtttttccctgggtagtagcagattacaaatcccgagtgttgaatctggatgaccctttgtcgtatcgagatctttcaaagccaattggagcactaaaccctgaacgtctaaagaagttccaagaacggtactctacattcgaggatccaatcataccaaagtttcattatggttcacattactccagtgctggcacggtcttgtattaccttttcagagtggagccttttacaacactgtctatacaactgcaagacggcaaatttgaccacgctgatcgcatgttttctgatctttctggtacatgggatagtgttcttgaagacatgagtgatgtaaaagagctagtacccgagatgttttacctccctgaggtatttaccaacataaatggcattgactttgggacaactcaacttggagggaagctagattccgtagaattgcctccctgggctgaaaatcatgtggattttgtccataaacatcggaaggctcttgagagtgagcacgtctctgctcatttgcatgagtggattgatctaatttttggatataaacagaggggcaaagaagcgataatggcaaacaatgtattcttctacataacatatgaggggactgttgacattgacaaaattacaaacccagtggatcggcgagctacacaagatcaaatagcttactttggacaaacaccatctcaactgctgactgtacctcacatgaagaggaagccactggcggaggtcttacaactacagacaatattccgaaatccaagtgaacttaaatcatatgtgcttccacattcagatcgttgcaatgttcctgccagtgctatgcttgtatcaaacgactctattgtagttgttgatgtaaatgccccagcagcacatgtggcacttcaccaatggcaggctaatactccagatggtcagggaacacctttccttttccatcatggtagaaattccacaaattcaaccagtggcgcactcatgcgcattttcaaaggatctgctggttctgcggaagattatgggttcccaagggctatagcatttgctgcttctgcaatccgcagttcagcagttgttgctgtgacatgtgacaaagagataattactggtggccacgttgatggttcattgaagttgatatccctagatggagcgaagacaattgaaactgcttctgggcatattgctccagtgacatgccttgcgctgtcacctgatagcaactaccttgtgacagggtctagagataccacagttatactctggaggattcatcagacaggctcctcacataagaaaaatgctcaagaacctccaccgactacaccaacgacaccacgcagtcctctctctggcagcactagcaccatgagcagcctctcagaaacaaagagacgtcgcgttgaaggtccaatgcatgtaatgagaggacatcttggggaagtaacctgctgctcggttagtccagacttaggacttgttgcttcctcatcaaatgcaacaggcattcttctgcattccttacgcacaggcaggctgataaggaggcttgatgtcgatgaggcacatgcaatatgcttatcttctcaaggaatcattttggtttggaatggaacaaagaaaacattatctaccttcactgtcaatggactccctattgctaactcagttctgttgcctttctctggacaagttagttgcatcgagatttctacagatggccattttgctttatttggaacatctttgttcaacaactacaagtgtgataacagtactgaaactggggatcatgagcttggacccaatggcactgatgatgtatcaaaaaattctgaacaatctgttcacgcgccttcaatctgctttgttgacctgcatacactgaaggtttttcatactctgaagctggcaaagggccaggacatcacagcaattgctctaaacaaagagaacacaaatcttttagtttctactgctgataattttttttatagtctttactgatcccgctgtaagcatcctcgatac

SEQ ID NO: 19729 - DNA, 8831 bp, Zea Mays
gtgaacccacccggagccgcgccacgtcttctccccctcctgacctcccccctgccccctcgtcaagctcatcatccggttccgcctatcggatctcgccgtgcaccgccgctgattccacccaccgctccgcacgcatttgcaccccaactcctcacagatctccccagatctacgcgctccacgcactgccattttcccgctccgattcttcccccactccagtctacgccgcgcttaatcgcccgcccgctgtttcacttccgttgaccgattcccgctcgcatttccacaccctgcgcttggttcggaattggtctcgatggagtaaagtccttgcaatggcggaagacgcgcacgagttgttcgattcctccccgccgcgggaggagggctccgacgagcagctcgcggccgtaccgctcggcgacgaggcgggcgtcgtcgaggaggaggaggcgtcggatccggggatgagtaccagcatgccggccacacccgcgacgccctacgagccgcccccgcggcccaggcggccgcctggagtaccggccgacgcgccactggaggtggtgcgggcggtggaggaggcgatcgcgggcggggcggaccttctccgcgaggtggtctcccaggagcagggcgagctggctcactccgtcgtcgacgtgctgctcggcaccatgggcggtgtggacgaggcaggcgacgccaccggcaccggcgctcctcccaccgtcatgatcagctcgcgtgccgctgtcgccgccgctgagctcctgccttatctccccgaagacgacgagccgtcgccgcgcactcgaacagccttaggtctgcacgccgccctccgcgcctgcactcgcaatagagccatgtgttcttccgcgggcctcctggctgccctcctcgcgtccgcagagaagctgttcgtcgaaatggatcagggtagcagatgggacgggacgccactgcttcaatgcattcagatgttgggtgggcactcgcttagtgtgaaagacctgcattcctggcttgatttggttagaaagtcacttggaacgagctgggccacaccacttatgctagcgcttgagaaggccatgggcagcatggaagcaaaaggtcctgctgtgacatttgagtttgacggggagagctctggtctgcttggcccaggtgacagcaggtggcccttcttaaatggatatgggtttgccacttggatatacatagaatcattctcggatacccttagcacagcaacagctgcggcagccattgctgctgctgcagcggcaacatctggaaaatcatcagcaatgtcagctgctgcggcagccagtgcccttgcaggagaaggaacaacacacatgcctcggcttttcagctttctctcttcagataaccagggtgtggaagcttactttcatggccagttcttggtggtggagagtgtgggtggtaggggtaagaaagcttctttgcacttcacatatgcgttcaagcctcagtgctggtattttgttgggttggagcacacaaacaagcatagtttgctcggaaaggatgacagcgaattgagtctgtatgttgatggaagcctgtatgagagccgtccttttgagtttccacgtatctctaaaccacttgcattttgctgcatcgggacaaatccaccaccaactattgccggcctgcagaggcgccggcggcaatgcccattatttgctgaaatggggcctgtctacatcttcaaagaaccaattgggccagacagaatgagacgtctagcatcccgaggaggagacacactgcccagttttggaaatggcgcaggcttgccatggaaggcaactaatgaccaagttaagagtatggctgaagagagcttttcactcaacaatgggatagggggaagcttgcatcttctttaccatcctagtcttctcactgggcggttttgtccagacgcctcaccttctggttcatcaggcactcatcgaaggcccgcagaggttctcggattggttcatgtctcacctcgtgtgcgaccttcagaatctttatgggccttagcttatgggggtccaatggctttacttccactaaccataggcaatgtacatgtggacagccttgagcctgcacctggggacttgccatcgtctcttgctaccatttccctttctgccccagttttcaggattatttcccaagctattcaacaccctggaaataatgaagaattatgccgtacatttgcaccagagcttttatcacgtgttttacattatgtgttgcaggctcttccaaagttggaaagtggggaagaggttctgactgatgaggagcttgttgctgccattgtatctttgtgccagtctcaaagaaataatcatgaacttaaagtgcagcttttcagcagcttgctgttggacctaaatctatggagttcatgcaattatggtttacagaaggagcttctgtcgtctctcgcagacatggtatttacagagtctgcttgcatgcgagatgccaaggcgatgcaaatgcttcttgatggctgcagaaggtgttactgggtaattcaggaaccggattcaatcgataactttgcatttactggaacaaagcgatctttgggggaagtgaatgctctagtggatgaacttttggttgttattgaactactgctaggagcagcatcttcaacagcagcagcagatgatgtccgctgtttgattggatttattgttgactgcccacagcctaatcaggttgcaagggtgttgcacctcatatataggttgaatgtacaacctaacatttctagggccaacttattttctcaatccttcatcactagtggtggtgtggaagcactacttgttcttttacaacgggaagctaaagtgggtaacaaaaatattttggatcattctagtgcaagtgaaaataatgtgcccaaggatggaagttccaacagaaaagctgatagtgctgacacaagttgtcaggttgatgaaaatcaatcagctgaacgtcatgaaactgtcttccatgaagaagccattgaacatgaagccacaaatgcaaaagatatgctggactcaaatattggaagtaaagtgcctggttctgagaatgggctcttgaagaacctgggtggcattagcttctcaattacttctgataatgtccggaataatgtttacaatgttgacaaaggtgatggaattgttgttggcattattcacattcttggtgctctaattgggtcaggtcacctgaaatttgattctggagctggaagtgcaaatatacctggtggtagtcagaccacacttaatgaagaaggaaatactatgtcagaagatagagtatcattgttactttttgcattgcaaaaggcattccaagcagccccaaggaggcttatgacggcaaatgtctatatggctttgatttctgctgtgattaatgtttcatcagctgatgaaagtcttaatctttatgattctggtcaccgttttgaacatatccaacttttactggttctacttcgctcgcttccatatgcatcgagggcattccaagctcgtgcaatacaggatattctgtttttggcttgtagtcatctagataacagaactacaatgacctcgatttcagagtggccagaatggattttggaggttttgatttcgaaccatgaaatggacacaaagaaaaatgctgatggtgtaagcattggtgagattgaagacctcatacacaattttctgattataatgctggagcattcaatgcgacaaaaagatgggtggaaggatgtggaggcaacaattcattgtgcggagtggctctcaatagttggaggatctagcactggagaccaaaggatcaggcgtgaagaatcattacctatttttaaaaggagattgttgggtgacttgcttgatttttctgccagggagcttcaagttcagcagaccgaagtaattgcagcagctgcagctggtgttgcagctgagggtttgtctcctgaagaagcaaaaattcaagcagagaatgctgctcatctctcagtagcactagcagagaatgcaatagttattctgatgcttgtggaagatcatctgagatcacaagctcaacatttttgcacatcccttacaggtgatagcatcacatcgtccacatcaatgacttcattggctgccagtcggtcaaattctttgagcacagctggtaaagaacccatggctgctggggtctcaagacgggcatctttgtccagtgatgctggtggccttcctctggatttgcttacttctatggctgattcaaatggacaaatctctgctgccgtgatggaacgtcttacagcagcaacagcagctgaaccttatgattctgtcaagcatgcatttgtgtcttatgggagctgcataactgatcttggagaaagttggaagtaccgaagccgtttgtggtatggtgttggcattccacccaaatctgatatatttggtggtggtggaagtggttgggaatcttggagatctattctagagaaggattcaaatgggatttggattgaatttccacttgtgaagaaatcagttgctgtgctgcaggcacttcttttagatgaatctggacttggtggtggtcttggtattggagggggatctggccctggtatgggggttatgactgccctctatcagttgctagatagcgatcaaccatttctttgcatgctcagaatggttcttgtttcgatgagggaggacgacaatggtgaaggcgatgcttttacgaaagatgttagcataaaggatgtggtatcagaaggaatgggccaccaggctggaagtgtgatgccatttgatggcaacagttattcatctccaagaaaacctcgatctgctcttctttggagtgtgcttggccccatccttaatatgccaataacagagtctaagagacagagagtgttggttgcttcctctattctctactcagaggtatggcacgctattggcagggacaggaaacccctaaggaaacaatacattgagctgattttaccaccgtttgtagcaattcttagaagatggcgaccccttttggctggtattcatgagcttacttcttcagatggacaaaatccactaattgctgatgatcgtgctttggcggcagatgcattacctgtcgaggcttctcttttgatgatatcgcctggttgggctgctgcttttgcatcgccaccagttgcaatggcattggccatgatggctgctggtgcctcaggaacagaaacaagaacacctcctaggaataccttgaataggcgtgacaaagcattgcctgagcgcaaggcagcagcaaaactacagactttctcgagtttccagatgcctatggaaacagcatctaacaagcctgggtccaccctgaaggacaaggcagcagcaaaagctgccgcattggcagccgctcgtgaccttgaacgaactgctaagattggttcaagaaggggccttagtgctgtagcaatggcaacatcaggacaaaggaggagttcgggtgacatcgaacgagcaaagaggtggaatacgtcagaagctatgagtgctgcttgggtggagtgtctgcaatcagatgattccaaatcagttgtgggaagggatttttcagccctttcatacaaatatgtcgcagtacttgtttcttgtttggccttagcacgaaacttacaacgagctgagatggagaggcaaacactagttgatgtgttaattcggcatcgcgcctcaactgggcttcgagcatggcggcatcttcttcattgcctaacagagatgggtagactatatggaccttttgaacatctgtgcactcctgatcgtgttttctggaaattagattttactgaaagctcttcaaggatgagaagatttgtgaaaagaaattacaagggatgtgatcatttaggtgcagctgctgattatgaggaccggaagcttcttaatacttctgcacagtcaaatgaacataactctgaggatgctaattcttcattaacaagcactcttccatcatctgcttctgtaattatggctgatgccatgtcgatgaatgacagaaatgtggaaaatgagcagttagaaactgacactactcgcagcagtgttgatgacgatcagcttcaacattcttcagcagctgatcaacaatcggtaaaaggatcgataggttcaagaacttctgacatttgtgctgatcgaaatttggttaggtctacagttcttgcacctagttatgtgcctagcgaagctgatgagagaattattgttgaactgccatcattaatggtgcgaccattgaaggtggttcgaggaacattccaagtaacttcaaagaggattaacttcataattgatgagcgttcaaatgacagtaacattgatgatgctgcatctactagtggccaatgtgatcaacaagataaagatcgaagctggttggtctcatcactttatcagatatatagcagacgatacttgctacgccgaagtgctttggaattattcatggtagataggtcgaatttcttttttgactttgcgagagctgagcagattcttaaaagaactcagttgatggagcgctgggctaattgggagatcaacaattttgagtacttaatggaacttaacacactggctgggcgcagttacaatgacattactcagtaccctgtttttccctgggtagtagcagattacaaatcccgagtgttgaatctggatgaccctttgtcgtatcgagatctttcaaagccaattggagcactaaaccctgaacgtctaaagaagttccaagaacggtactctacattcgaggatccaatcataccaaagtttcattatggttcacattactccagtgctggcacggtcttgtattaccttttcagagtggagccttttacaacactgtctatacaactgcaagacggcaaatttgaccacgctgatcgcatgttttctgatctttctggtacatgggatagtgttcttgaagacatgagtgatgtaaaagagctagtacccgagatgttttacctccctgaggtatttaccaacataaatggcattgactttgggacaactcaacttggagggaagctagattccgtagaattgcctccctgggctgaaaatcatgtggattttgtccataaacatcggaaggctcttgagagtgagcacgtctctgctcatttgcatgagtggattgatctaatttttggatataaacagaggggcaaagaagcgataatggcaaacaatgtattcttctacataacatatgaggggactgttgacattgacaaaattacaaacccagtggatcggcgagctacacaagatcaaatagcttactttggacaaacaccatctcaactgctgactgtacctcacatgaagaggaagccactggcggaggtcttacaactacagacaatattccgaaatccaagtgaacttaaatcatatgtgcttccacattcagatcgttgcaatgttcctgccagtgctatgcttgtatcaaacgactctattgtagttgttgatgtaaatgccccagcagcacatgtggcacttcaccaatggcaggctaatactccagatggtcagggaacacctttccttttccatcatggtagaaattccacaaattcaaccagtggcgcactcatgcgcattttcaaaggatctgctggttctgcggaagattatgggttcccaagggctatagcatttgctgcttctgcaatccgcagttcagcagttgttgctgtgacatgtgacaaagagataattactggtggccacgttgatggttcattgaagttgatatccctagatggagcgaagacaattgaaactgcttctgggcatattgctccagtgacatgccttgcgctgtcacctgatagcaactaccttgtgacagggtctagagataccacagttatactctggaggattcatcagacaggctcctcacataagaaaaatgctcaagaacctccaccgactacaccaacgacaccacgcagtcctctctctggcagcactagcaccatgagcagcctctcagaaacaaagagacgtcgcgttgaaggtccaatgcatgtaatgagaggacatcttggggaagtaacctgctgctcggttagtccagacttaggacttgttgcttcctcatcaaatgcaacaggcattcttctgcattccttacgcacaggcaggctgataaggaggcttgatgtcgatgaggcacatgcaatatgcttatcttctcaaggaatcattttggtttggaatggaacaaagaaaacattatctaccttcactgtcaatggactccctattgctaactcagttctgttgcctttctctggacaagttagttgcatcgagatttctacagatggccattttgctttatttggaacatctttgttcaacaactacaagtgtgataacagtactgaaactggggatcatgagcttggacccaatggcactgatgatgtatcaaaaaattctgaacaatctgttcacgcgccttcaatctgctttgttgacctgcatacactgaaggtttttcatactctgaagctggcaaagggccaggacatcacagcaattgctctaaacaaagagaacacaaatcttttagtttctactgctgataattttttttatagtctttactgatcccgctgtaagcatcctcgatac

SEQ ID NO: 19730 - DNA, 8700 bp, Zea Mays
gtcttctccccctcctgacctcccccctgccccctcgtcaagctcatcatccggttccgcctatcggatctcgccgtgcaccgccgctgattccacccaccgctccgcacgcatttgcaccccaactcctcacagatctccccagatctacgcgctccacgcactgccattttcccgctccgattcttcccccactccagtctacgccgcgcttaatcgcccgcccgctgtttcacttccgttgaccgattcccgctcgcatttccacaccctgcgcttggttcggaattggtctcgatggagtaaagtccttgcaatggcggaagacgcgcacgagttgttcgattcctccccgccgcgggaggagggctccgacgagcagctcgcggccgtaccgctcggcgacgaggcgggcgtcgtcgaggaggaggaggcgtcggatccggggatgagtaccagcatgccggccacacccgcgacgccctacgagccgcccccgcggcccaggcggccgcctggagtaccggccgacgcgccactggaggtggtgcgggcggtggaggaggcgatcgcgggcggggcggaccttctccgcgaggtggtctcccaggagcagggcgagctggctcactccgtcgtcgacgtgctgctcggcaccatgggcggtgtggacgaggcaggcgacgccaccggcaccggcgctcctcccaccgtcatgatcagctcgcgtgccgctgtcgccgccgctgagctcctgccttatctccccgaagacgacgagccgtcgccgcgcactcgaacagccttaggtctgcacgccgccctccgcgcctgcactcgcaatagagccatgtgttcttccgcgggcctcctggctgccctcctcgcgtccgcagagaagctgttcgtcgaaatggatcagggtagcagatgggacgggacgccactgcttcaatgcattcagatgttgggtgggcactcgcttagtgtgaaagacctgcattcctggcttgatttggttagaaagtcacttggaacgagctgggccacaccacttatgctagcgcttgagaaggccatgggcagcatggaagcaaaaggtcctgctgtgacatttgagtttgacggggagagctctggtctgcttggcccaggtgacagcaggtggcccttcttaaatggatatgggtttgccacttggatatacatagaatcattctcggatacccttagcacagcaacagctgcggcagccattgctgctgctgcagcggcaacatctggaaaatcatcagcaatgtcagctgctgcggcagccagtgcccttgcaggagaaggaacaacacacatgcctcggcttttcagctttctctcttcagataaccagggtgtggaagcttactttcatggccagttcttggtggtggagagtgtgggtggtaggggtaagaaagcttctttgcacttcacatatgcgttcaagcctcagtgctggtattttgttgggttggagcacacaaacaagcatagtttgctcggaaaggatgacagcgaattgagtctgtatgttgatggaagcctgtatgagagccgtccttttgagtttccacgtatctctaaaccacttgcattttgctgcatcgggacaaatccaccaccaactattgccggcctgcagaggcgccggcggcaatgcccattatttgctgaaatggggcctgtctacatcttcaaagaaccaattgggccagacagaatgagacgtctagcatcccgaggaggagacacactgcccagttttggaaatggcgcaggcttgccatggaaggcaactaatgaccaagttaagagtatggctgaagagagcttttcactcaacaatgggatagggggaagcttgcatcttctttaccatcctagtcttctcactgggcggttttgtccagacgcctcaccttctggttcatcaggcactcatcgaaggcccgcagaggttctcggattggttcatgtctcacctcgtgtgcgaccttcagaatctttatgggccttagcttatgggggtccaatggctttacttccactaaccataggcaatgtacatgtggacagccttgagcctgcacctggggacttgccatcgtctcttgctaccatttccctttctgccccagttttcaggattatttcccaagctattcaacaccctggaaataatgaagaattatgccgtacatttgcaccagagcttttatcacgtgttttacattatgtgttgcaggctcttccaaagttggaaagtggggaagaggttctgactgatgaggagcttgttgctgccattgtatctttgtgccagtctcaaagaaataatcatgaacttaaagtgcagcttttcagcagcttgctgttggacctaaatctatggagttcatgcaattatggtttacagaaggagcttctgtcgtctctcgcagacatggtatttacagagtctgcttgcatgcgagatgccaaggcgatgcaaatgcttcttgatggctgcagaaggtgttactgggtaattcaggaaccggattcaatcgataactttgcatttactggaacaaagcgatctttgggggaagtgaatgctctagtggatgaacttttggttgttattgaactactgctaggagcagcatcttcaacagcagcagcagatgatgtccgctgtttgattggatttattgttgactgcccacagcctaatcaggttgcaagggtgttgcacctcatatataggttgaatgtacaacctaacatttctagggccaacttattttctcaatccttcatcactagtggtggtgtggaagcactacttgttcttttacaacgggaagctaaagtgggtaacaaaaatattttggatcattctagtgcaagtgaaaataatgtgcccaaggatggaagttccaacagaaaagctgatagtgctgacacaagttgtcaggttgatgaaaatcaatcagctgaacgtcatgaaactgtcttccatgaagaagccattgaacatgaagccacaaatgcaaaagatatgctggactcaaatattggaagtaaagtgcctggttctgagaatgggctcttgaagaacctgggtggcattagcttctcaattacttctgataatgtccggaataatgtttacaatgttgacaaaggtgatggaattgttgttggcattattcacattcttggtgctctaattgggtcaggtcacctgaaatttgattctggagctggaagtgcaaatatacctggtggtagtcagaccacacttaatgaagaaggaaatactatgtcagaagatagagtatcattgttactttttgcattgcaaaaggcattccaagcagccccaaggaggcttatgacggcaaatgtctatatggctttgatttctgctgtgattaatgtttcatcagctgatgaaagtcttaatctttatgattctggtcaccgttttgaacatatccaacttttactggttctacttcgctcgcttccatatgcatcgagggcattccaagctcgtgcaatacaggatattctgtttttggcttgtagtcatctagataacagaactacaatgacctcgatttcagagtggccagaatggattttggaggttttgatttcgaaccatgaaatggacacaaagaaaaatgctgatggtgtaagcattggtgagattgaagacctcatacacaattttctgattataatgctggagcattcaatgcgacaaaaagatgggtggaaggatgtggaggcaacaattcattgtgcggagtggctctcaatagttggaggatctagcactggagaccaaaggatcaggcgtgaagaatcattacctatttttaaaaggagattgttgggtgacttgcttgatttttctgccagggagcttcaagttcaggtgatagcatcacatcgtccacatcaatgacttcattggctgccagtcggtcaaattctttgagcacagctggtaaagaacccatggctgctggggtctcaagacgggcatctttgtccagtgatgctggtggccttcctctggatttgcttacttctatggctgattcaaatggacaaatctctgctgccgtgatggaacgtcttacagcagcaacagcagctgaaccttatgattctgtcaagcatgcatttgtgtcttatgggagctgcataactgatcttggagaaagttggaagtaccgaagccgtttgtggtatggtgttggcattccacccaaatctgatatatttggtggtggtggaagtggttgggaatcttggagatctattctagagaaggattcaaatgggatttggattgaatttccacttgtgaagaaatcagttgctgtgctgcaggcacttcttttagatgaatctggacttggtggtggtcttggtattggagggggatctggccctggtatgggggttatgactgccctctatcagttgctagatagcgatcaaccatttctttgcatgctcagaatggttcttgtttcgatgagggaggacgacaatggtgaaggcgatgcttttacgaaagatgttagcataaaggatgtggtatcagaaggaatgggccaccaggctggaagtgtgatgccatttgatggcaacagttattcatctccaagaaaacctcgatctgctcttctttggagtgtgcttggccccatccttaatatgccaataacagagtctaagagacagagagtgttggttgcttcctctattctctactcagaggtatggcacgctattggcagggacaggaaacccctaaggaaacaatacattgagctgattttaccaccgtttgtagcaattcttagaagatggcgaccccttttggctggtattcatgagcttacttcttcagatggacaaaatccactaattgctgatgatcgtgctttggcggcagatgcattacctgtcgaggcttctcttttgatgatatcgcctggttgggctgctgcttttgcatcgccaccagttgcaatggcattggccatgatggctgctggtgcctcaggaacagaaacaagaacacctcctaggaataccttgaataggcgtgacaaagcattgcctgagcgcaaggcagcagcaaaactacagactttctcgagtttccagatgcctatggaaacagcatctaacaagcctgggtccaccctgaaggacaaggcagcagcaaaagctgccgcattggcagccgctcgtgaccttgaacgaactgctaagattggttcaagaaggggccttagtgctgtagcaatggcaacatcaggacaaaggaggagttcgggtgacatcgaacgagcaaagaggtggaatacgtcagaagctatgagtgctgcttgggtggagtgtctgcaatcagatgattccaaatcagttgtgggaagggatttttcagccctttcatacaaatatgtcgcagtacttgtttcttgtttggccttagcacgaaacttacaacgagctgagatggagaggcaaacactagttgatgtgttaattcggcatcgcgcctcaactgggcttcgagcatggcggcatcttcttcattgcctaacagagatgggtagactatatggaccttttgaacatctgtgcactcctgatcgtgttttctggaaattagattttactgaaagctcttcaaggatgagaagatttgtgaaaagaaattacaagggatgtgatcatttaggtgcagctgctgattatgaggaccggaagcttcttaatacttctgcacagtcaaatgaacataactctgaggatgctaattcttcattaacaagcactcttccatcatctgcttctgtaattatggctgatgccatgtcgatgaatgacagaaatgtggaaaatgagcagttagaaactgacactactcgcagcagtgttgatgacgatcagcttcaacattcttcagcagctgatcaacaatcggtaaaaggatcgataggttcaagaacttctgacatttgtgctgatcgaaatttggttaggtctacagttcttgcacctagttatgtgcctagcgaagctgatgagagaattattgttgaactgccatcattaatggtgcgaccattgaaggtggttcgaggaacattccaagtaacttcaaagaggattaacttcataattgatgagcgttcaaatgacagtaacattgatgatgctgcatctactagtggccaatgtgatcaacaagataaagatcgaagctggttggtctcatcactttatcagatatatagcagacgatacttgctacgccgaagtgctttggaattattcatggtagataggtcgaatttcttttttgactttgcggatattgatgcccgtaaaaacgcttatcgggccattgttcataccaaacctcctaacttgaatgacatctttttagctacccagagagctgagcagattcttaaaagaactcagttgatggagcgctgggctaattgggagatcaacaattttgagtacttaatggaacttaacacactggctgggcgcagttacaatgacattactcagtaccctgtttttccctgggtagtagcagattacaaatcccgagtgttgaatctggatgaccctttgtcgtatcgagatctttcaaagccaattggagcactaaaccctgaacgtctaaagaagttccaagaacggtactctacattcgaggatccaatcataccaaagtttcattatggttcacattactccagtgctggcacggtcttgtattaccttttcagagtggagccttttacaacactgtctatacaactgcaagacggcaaatttgaccacgctgatcgcatgttttctgatctttctggtacatgggatagtgttcttgaagacatgagtgatgtaaaagagctagtacccgagatgttttacctccctgaggtatttaccaacataaatggcattgactttgggacaactcaacttggagggaagctagattccgtagaattgcctccctgggctgaaaatcatgtggattttgtccataaacatcggaaggctcttgagagtgagcacgtctctgctcatttgcatgagtggattgatctaatttttggatataaacagaggggcaaagaagcgataatggcaaacaatgtattcttctacataacatatgaggggactgttgacattgacaaaattacaaacccagtggatcggcgagctacacaagatcaaatagcttactttggacaaacaccatctcaactgctgactgtacctcacatgaagaggaagccactggcggaggtcttacaactacagacaatattccgaaatccaagtgaacttaaatcatatgtgcttccacattcagatcgttgcaatgttcctgccagtgctatgcttgtatcaaacgactctattgtagttgttgatgtaaatgccccagcagcacatgtggcacttcaccaatggcaggctaatactccagatggtcagggaacacctttccttttccatcatggtagaaattccacaaattcaaccagtggcgcactcatgcgcattttcaaaggatctgctggttctgcggaagattatgggttcccaagggctatagcatttgctgcttctgcaatccgcagttcagcagttgttgctgtgacatgtgacaaagagataattactggtggccacgttgatggttcattgaagttgatatccctagatggagcgaagacaattgaaactgcttctgggcatattgctccagtgacatgccttgcgctgtcacctgatagcaactaccttgtgacagggtctagagataccacagttatactctggaggattcatcagacaggctcctcacataagaaaaatgctcaagaacctccaccgactacaccaacgacaccacgcagtcctctctctggcagcactagcaccatgagcagcctctcagaaacaaagagacgtcgcgttgaaggtccaatgcatgtaatgagaggacatcttggggaagtaacctgctgctcggttagtccagacttaggacttgttgcttcctcatcaaatgcaacaggcattcttctgcattccttacgcacaggcaggctgataaggaggcttgatgtcgatgaggcacatgcaatatgcttatcttctcaaggaatcattttggtttggaatggaacaaagaaaacattatctaccttcactgtcaatggactccctattgctaactcagttctgttgcctttctctggacaagttagttgcatcgagatttctacagatggccattttgctttatttggaacatctttgttcaacaactacaagtgtgataacagtactgaaactggggatcatgagcttggacccaatggcactgatgatgtatcaaaaaattctgaacaatctgttcacgcgccttcaatctgctttgttgacctgcatacactgaaggtttttcatactctgaagctggcaaagggccaggacatcacagcaattgctctaaacaaagagaacacaaatcttttagtttctactgctgataattttttttatagtctttactgatcccgctgtaagcatcctcgatac

SEQ ID NO: 19731 - DNA, 8946 bp, Zea Mays
ctccccctcctgacctcccccctgccccctcgtcaagctcatcatccggttccgcctatcggatctcgccgtgcaccgccgctgattccacccaccgctccgcacgcatttgcaccccaactcctcacagatctccccagatctacgcgctccacgcactgccattttcccgctccgattcttcccccactccagtctacgccgcgcttaatcgcccgcccgctgtttcacttccgttgaccgattcccgctcgcatttccacaccctgcgcttggttcggaattggtctcgatggagtaaagtccttgcaatggcggaagacgcgcacgagttgttcgattcctccccgccgcgggaggagggctccgacgagcagctcgcggccgtaccgctcggcgacgaggcgggcgtcgtcgaggaggaggaggcgtcggatccggggatgagtaccagcatgccggccacacccgcgacgccctacgagccgcccccgcggcccaggcggccgcctggagtaccggccgacgcgccactggaggtggtgcgggcggtggaggaggcgatcgcgggcggggcggaccttctccgcgaggtggtctcccaggagcagggcgagctggctcactccgtcgtcgacgtgctgctcggcaccatgggcggtgtggacgaggcaggcgacgccaccggcaccggcgctcctcccaccgtcatgatcagctcgcgtgccgctgtcgccgccgctgagctcctgccttatctccccgaagacgacgagccgtcgccgcgcactcgaacagccttaggtctgcacgccgccctccgcgcctgcactcgcaatagagccatgtgttcttccgcgggcctcctggctgccctcctcgcgtccgcagagaagctgttcgtcgaaatggatcagggtagcagatgggacgggacgccactgcttcaatgcattcagatgttgggtgggcactcgcttagtgtgaaagacctgcattcctggcttgatttggttagaaagtcacttggaacgagctgggccacaccacttatgctagcgcttgagaaggccatgggcagcatggaagcaaaaggtcctgctgtgacatttgagtttgacggggagagctctggtctgcttggcccaggtgacagcaggtggcccttcttaaatggatatgggtttgccacttggatatacatagaatcattctcggatacccttagcacagcaacagctgcggcagccattgctgctgctgcagcggcaacatctggaaaatcatcagcaatgtcagctgctgcggcagccagtgcccttgcaggagaaggaacaacacacatgcctcggcttttcagctttctctcttcagataaccagggtgtggaagcttactttcatggccagttcttggtggtggagagtgtgggtggtaggggtaagaaagcttctttgcacttcacatatgcgttcaagcctcagtgctggtattttgttgggttggagcacacaaacaagcatagtttgctcggaaaggatgacagcgaattgagtctgtatgttgatggaagcctgtatgagagccgtccttttgagtttccacgtatctctaaaccacttgcattttgctgcatcgggacaaatccaccaccaactattgccggcctgcagaggcgccggcggcaatgcccattatttgctgaaatggggcctgtctacatcttcaaagaaccaattgggccagacagaatgagacgtctagcatcccgaggaggagacacactgcccagttttggaaatggcgcaggcttgccatggaaggcaactaatgaccaagttaagagtatggctgaagagagcttttcactcaacaatgggatagggggaagcttgcatcttctttaccatcctagtcttctcactgggcggttttgtccagacgcctcaccttctggttcatcaggcactcatcgaaggcccgcagaggttctcggattggttcatgtctcacctcgtgtgcgaccttcagaatctttatgggccttagcttatgggggtccaatggctttacttccactaaccataggcaatgtacatgtggacagccttgagcctgcacctggggacttgccatcgtctcttgctaccatttccctttctgccccagttttcaggattatttcccaagctattcaacaccctggaaataatgaagaattatgccgtacatttgcaccagagcttttatcacgtgttttacattatgtgttgcaggctcttccaaagttggaaagtggggaagaggttctgactgatgaggagcttgttgctgccattgtatctttgtgccagtctcaaagaaataatcatgaacttaaagtgcagcttttcagcagcttgctgttggacctaaatctatggagttcatgcaattatggtttacagaaggagcttctgtcgtctctcgcagacatggtatttacagagtctgcttgcatgcgagatgccaaggcgatgcaaatgcttcttgatggctgcagaaggtgttactgggtaattcaggaaccggattcaatcgataactttgcatttactggaacaaagcgatctttgggggaagtgaatgctctagtggatgaacttttggttgttattgaactactgctaggagcagcatcttcaacagcagcagcagatgatgtccgctgtttgattggatttattgttgactgcccacagcctaatcaggttgcaagggtgttgcacctcatatataggttgaatgtacaacctaacatttctagggccaacttattttctcaatccttcatcactagtggtggtgtggaagcactacttgttcttttacaacgggaagctaaagtgggtaacaaaaatattttggatcattctagtgcaagtgaaaataatgtgcccaaggatggaagttccaacagaaaagctgatagtgctgacacaagttgtcaggttgatgaaaatcaatcagctgaacgtcatgaaactgtcttccatgaagaagccattgaacatgaagccacaaatgcaaaagatatgctggactcaaatattggaagtaaagtgcctggttctgagaatgggctcttgaagaacctgggtggcattagcttctcaattacttctgataatgtccggaataatgtttacaatgttgacaaaggtgatggaattgttgttggcattattcacattcttggtgctctaattgggtcaggtcacctgaaatttgattctggagctggaagtgcaaatatacctggtggtagtcagaccacacttaatgaagaaggaaatactatgtcagaagatagagtatcattgttactttttgcattgcaaaaggcattccaagcagccccaaggaggcttatgacggcaaatgtctatatggctttgatttctgctgtgattaatgtttcatcagctgatgaaagtcttaatctttatgattctggtcaccgttttgaacatatccaacttttactggttctacttcgctcgcttccatatgcatcgagggcattccaagctcgtgcaatacaggatattctgtttttggcttgtagtcatctagataacagaactacaatgacctcgatttcagagtggccagaatggattttggaggttttgatttcgaaccatgaaatggacacaaagaaaaatgctgatggtgtaagcattggtgagattgaagacctcatacacaattttctgattataatgctggagcattcaatgcgacaaaaagatgggtggaaggatgtggaggcaacaattcattgtgcggagtggctctcaatagttggaggatctagcactggagaccaaaggatcagaatcattacctatttttaaaaggagattgttgggtgacttgcttgatttttctgccagggagcttcaagttcagaccgaagtaattgcagcagctgcagctggtgttgcagctgagggtttgtctcctgaagaagcaaaaattcaagcagagaatgctgctcatctctcagtagcactagcagagaatgcaatagttattctgatgcttgtggaagatcatctgagatcacaagctcaacatttttgcacatcccttacaggtgatagcatcacatcgtccacatcaatgacttcattggctgccagtcggtcaaattctttgagcacagctggtaaagaacccatggctgctggggtctcaagacgggcatctttgtccagtgatgctggtggccttcctctggatttgcttacttctatggctgattcaaatggacaaatctctgctgccgtgatggaacgtcttacagcagcaacagcagctgaaccttatgattctgtcaagcatgcatttgtgtcttatgggagctgcataactgatcttggagaaagttggaagtaccgaagccgtttgtggtatggtgttggcattccacccaaatctgatatatttggtggtggtggaagtggttgggaatcttggagatctattctagagaaggattcaaatgggatttggattgaatttccacttgtgaagaaatcagttgctgtgctgcaggcacttcttttagatgaatctggacttggtggtggtcttggtattggagggggatctggccctggtatgggggttatgactgccctctatcagttgctagatagcgatcaaccatttctttgcatgctcagaatggttcttgtttcgatgagggaggacgacaatggtgaaggcgatgcttttacgaaagatgttagcataaaggatgtggtatcagaaggaatgggccaccaggctggaagtgtgatgccatttgatggcaacagttattcatctccaagaaaacctcgatctgctcttctttggagtgtgcttggccccatccttaatatgccaataacagagtctaagagacagagagtgttggttgcttcctctattctctactcagaggtatggcacgctattggcagggacaggaaacccctaaggaaacaatacattgagctgattttaccaccgtttgtagcaattcttagaagatggcgaccccttttggctggtattcatgagcttacttcttcagatggacaaaatccactaattgctgatgatcgtgctttggcggcagatgcattacctgtcgaggcttctcttttgatgatatcgcctggttgggctgctgcttttgcatcgccaccagttgcaatggcattggccatgatggctgctggtgcctcaggaacagaaacaagaacacctcctaggaataccttgaataggcgtgacaaagcattgcctgagcgcaaggcagcagcaaaactacagactttctcgagtttccagatgcctatggaaacagcatctaacaagcctgggtccaccctgaaggacaaggcagcagcaaaagctgccgcattggcagccgctcgtgaccttgaacgaactgctaagattggttcaagaaggggccttagtgctgtagcaatggcaacatcaggacaaaggaggagttcgggtgacatcgaacgagcaaagaggtggaatacgtcagaagctatgagtgctgcttgggtggagtgtctgcaatcagatgattccaaatcagttgtgggaagggatttttcagccctttcatacaaatatgtcgcagtacttgtttcttgtttggccttagcacgaaacttacaacgagctgagatggagaggcaaacactagttgatgtgttaattcggcatcgcgcctcaactgggcttcgagcatggcggcatcttcttcattgcctaacagagatgggtagactatatggaccttttgaacatctgtgcactcctgatcgtgttttctggaaattagattttactgaaagctcttcaaggatgagaagatttgtgaaaagaaattacaagggatgtgatcatttaggtgcagctgctgattatgaggaccggaagcttcttaatacttctgcacagtcaaatgaacataactctgaggatgctaattcttcattaacaagcactcttccatcatctgcttctgtaattatggctgatgccatgtcgatgaatgacagaaatgtggaaaatgagcagttagaaactgacactactcgcagcagtgttgatgacgatcagcttcaacattcttcagcagctgatcaacaatcggtaaaaggatcgataggttcaagaacttctgacatttgtgctgatcgaaatttggttaggtctacagttcttgcacctagttatgtgcctagcgaagctgatgagagaattattgttgaactgccatcattaatggtgcgaccattgaaggtggttcgaggaacattccaagtaacttcaaagaggattaacttcataattgatgagcgttcaaatgacagtaacattgatgatgctgcatctactagtggccaatgtgatcaacaagataaagatcgaagctggttggtctcatcactttatcagatatatagcagacgatacttgctacgccgaagtgctttggaattattcatggtagataggtcgaatttcttttttgactttgcggatattgatgcccgtaaaaacgcttatcgggccattgttcataccaaacctcctaacttgaatgacatctttttagctacccagagagctgagcagattcttaaaagaactcagttgatggagcgctgggctaattgggagatcaacaattttgagtacttaatggaacttaacacactggctgggcgcagttacaatgacattactcagtaccctgtttttccctgggtagtagcagattacaaatcccgagtgttgaatctggatgaccctttgtcgtatcgagatctttcaaagccaattggagcactaaaccctgaacgtctaaagaagttccaagaacggtactctacattcgaggatccaatcataccaaagtttcattatggttcacattactccagtgctggcacggtcttgtattaccttttcagagtggagccttttacaacactgtctatacaactgcaagacggcaaatttgaccacgctgatcgcatgttttctgatctttctggtacatgggatagtgttcttgaagacatgagtgatgtaaaagagctagtacccgagatgttttacctccctgaggtatttaccaacataaatggcattgactttgggacaactcaacttggagggaagctagattccgtagaattgcctccctgggctgaaaatcatgtggattttgtccataaacatcggaaggctcttgagagtgagcacgtctctgctcatttgcatgagtggattgatctaatttttggatataaacagaggggcaaagaagcgataatggcaaacaatgtattcttctacataacatatgaggggactgttgacattgacaaaattacaaacccagtggatcggcgagctacacaagatcaaatagcttactttggacaaacaccatctcaactgctgactgtacctcacatgaagaggaagccactggcggaggtcttacaactacagacaatattccgaaatccaagtgaacttaaatcatatgtgcttccacattcagatcgttgcaatgttcctgccagtgctatgcttgtatcaaacgactctattgtagttgttgatgtaaatgccccagcagcacatgtggcacttcaccaatggcaggctaatactccagatggtcagggaacacctttccttttccatcatggtagaaattccacaaattcaaccagtggcgcactcatgcgcattttcaaaggatctgctggttctgcggaagattatgggttcccaagggctatagcatttgctgcttctgcaatccgcagttcagcagttgttgctgtgacatgtgacaaagagataattactggtggccacgttgatggttcattgaagttgatatccctagatggagcgaagacaattgaaactgcttctgggcatattgctccagtgacatgccttgcgctgtcacctgatagcaactaccttgtgacagggtctagagataccacagttatactctggaggattcatcagacaggctcctcacataagaaaaatgctcaagaacctccaccgactacaccaacgacaccacgcagtcctctctctggcagcactagcaccatgagcagcctctcagaaacaaagagacgtcgcgttgaaggtccaatgcatgtaatgagaggacatcttggggaagtaacctgctgctcggttagtccagacttaggacttgttgcttcctcatcaaatgcaacaggcattcttctgcattccttacgcacaggcaggctgataaggaggcttgatgtcgatgaggcacatgcaatatgcttatcttctcaaggaatcattttggtttggaatggaacaaagaaaacattatctaccttcactgtcaatggactccctattgctaactcagttctgttgcctttctctggacaagttagttgcatcgagatttctacagatggccattttgctttatttggaacatctttgttcaacaactacaagtgtgataacagtactgaaactggggatcatgagcttggacccaatggcactgatgatgtatcaaaaaattctgaacaatctgttcacgcgccttcaatctgctttgttgacctgcatacactgaaggttaacattaaaaactttgattcaccttcgttctcctttgtgctaccctcaccagaaaagtttttgtgacaggtttttcatactctgaagctggcaaagggccaggacatcacagcaattgctctaaacaaagagaacacaaatcttttagtttctactgctgataattttttttatagtctttactgatcccgctgtaagcatcctcgatac

SEQ ID NO: 19732 - DNA, 8825 bp, Zea Mays
cccctcctgacctcccccctgccccctcgtcaagctcatcatccggttccgcctatcggatctcgccgtgcaccgccgctgattccacccaccgctccgcacgcatttgcaccccaactcctcacagatctccccagatctacgcgctccacgcactgccattttcccgctccgattcttcccccactccagtctacgccgcgcttaatcgcccgcccgctgtttcacttccgttgaccgattcccgctcgcatttccacaccctgcgcttggttcggaattggtctcgatggagtaaagtccttgcaatggcggaagacgcgcacgagttgttcgattcctccccgccgcgggaggagggctccgacgagcagctcgcggccgtaccgctcggcgacgaggcgggcgtcgtcgaggaggaggaggcgtcggatccggggatgagtaccagcatgccggccacacccgcgacgccctacgagccgcccccgcggcccaggcggccgcctggagtaccggccgacgcgccactggaggtggtgcgggcggtggaggaggcgatcgcgggcggggcggaccttctccgcgaggtggtctcccaggagcagggcgagctggctcactccgtcgtcgacgtgctgctcggcaccatgggcggtgtggacgaggcaggcgacgccaccggcaccggcgctcctcccaccgtcatgatcagctcgcgtgccgctgtcgccgccgctgagctcctgccttatctccccgaagacgacgagccgtcgccgcgcactcgaacagccttaggtctgcacgccgccctccgcgcctgcactcgcaatagagccatgtgttcttccgcgggcctcctggctgccctcctcgcgtccgcagagaagctgttcgtcgaaatggatcagggtagcagatgggacgggacgccactgcttcaatgcattcagatgttgggtgggcactcgcttagtgtgaaagacctgcattcctggcttgatttggttagaaagtcacttggaacgagctgggccacaccacttatgctagcgcttgagaaggccatgggcagcatggaagcaaaaggtcctgctgtgacatttgagtttgacggggagagctctggtctgcttggcccaggtgacagcaggtggcccttcttaaatggatatgggtttgccacttggatatacatagaatcattctcggatacccttagcacagcaacagctgcggcagccattgctgctgctgcagcggcaacatctggaaaatcatcagcaatgtcagctgctgcggcagccagtgcccttgcaggagaaggaacaacacacatgcctcggcttttcagctttctctcttcagataaccagggtgtggaagcttactttcatggccagttcttggtggtggagagtgtgggtggtaggggtaagaaagcttctttgcacttcacatatgcgttcaagcctcagtgctggtattttgttgggttggagcacacaaacaagcatagtttgctcggaaaggatgacagcgaattgagtctgtatgttgatggaagcctgtatgagagccgtccttttgagtttccacgtatctctaaaccacttgcattttgctgcatcgggacaaatccaccaccaactattgccggcctgcagaggcgccggcggcaatgcccattatttgctgaaatggggcctgtctacatcttcaaagaaccaattgggccagacagaatgagacgtctagcatcccgaggaggagacacactgcccagttttggaaatggcgcaggcttgccatggaaggcaactaatgaccaagttaagagtatggctgaagagagcttttcactcaacaatgggatagggggaagcttgcatcttctttaccatcctagtcttctcactgggcggttttgtccagacgcctcaccttctggttcatcaggcactcatcgaaggcccgcagaggttctcggattggttcatgtctcacctcgtgtgcgaccttcagaatctttatgggccttagcttatgggggtccaatggctttacttccactaaccataggcaatgtacatgtggacagccttgagcctgcacctggggacttgccatcgtctcttgctaccatttccctttctgccccagttttcaggattatttcccaagctattcaacaccctggaaataatgaagaattatgccgtacatttgcaccagagcttttatcacgtgttttacattatgtgttgcaggctcttccaaagttggaaagtggggaagaggttctgactgatgaggagcttgttgctgccattgtatctttgtgccagtctcaaagaaataatcatgaacttaaagtgcagcttttcagcagcttgctgttggacctaaatctatggagttcatgcaattatggtttacagaaggagcttctgtcgtctctcgcagacatggtatttacagagtctgcttgcatgcgagatgccaaggcgatgcaaatgcttcttgatggctgcagaaggtgttactgggtaattcaggaaccggattcaatcgataactttgcatttactggaacaaagcgatctttgggggaagtgaatgctctagtggatgaacttttggttgttattgaactactgctaggagcagcatcttcaacagcagcagcagatgatgtccgctgtttgattggatttattgttgactgcccacagcctaatcaggttgcaagggtgttgcacctcatatataggttgaatgtacaacctaacatttctagggccaacttattttctcaatccttcatcactagtggtggtgtggaagcactacttgttcttttacaacgggaagctaaagtgggtaacaaaaatattttggatcattctagtgcaagtgaaaataatgtgcccaaggatggaagttccaacagaaaagctgatagtgctgacacaagttgtcaggttgatgaaaatcaatcagctgaacgtcatgaaactgtcttccatgaagaagccattgaacatgaagccacaaatgcaaaagatatgctggactcaaatattggaagtaaagtgcctggttctgagaatgggctcttgaagaacctgggtggcattagcttctcaattacttctgataatgtccggaataatgtttacaatgttgacaaaggtgatggaattgttgttggcattattcacattcttggtgctctaattgggtcaggtcacctgaaatttgattctggagctggaagtgcaaatatacctggtggtagtcagaccacacttaatgaagaaggaaatactatgtcagaagatagagtatcattgttactttttgcattgcaaaaggcattccaagcagccccaaggaggcttatgacggcaaatgtctatatggctttgatttctgctgtgattaatgtttcatcagctgatgaaagtcttaatctttatgattctggtcaccgttttgaacatatccaacttttactggttctacttcgctcgcttccatatgcatcgagggcattccaagctcgtgcaatacaggatattctgtttttggcttgtagtcatctagataacagaactacaatgacctcgatttcagagtggccagaatggattttggaggttttgatttcgaaccatgaaatggacacaaagaaaaatgctgatggtgtaagcattggtgagattgaagacctcatacacaattttctgattataatgctggagcattcaatgcgacaaaaagatgggtggaaggatgtggaggcaacaattcattgtgcggagtggctctcaatagttggaggatctagcactggagaccaaaggatcaggcgtgaagaatcattacctatttttaaaaggagattgttgggtgacttgcttgatttttctgccagggagcttcaagttcagcagaccgaagtaattgcagcagctgcagctggtgttgcagctgagggtttgtctcctgaagaagcaaaaattcaagcagagaatgctgctcatctctcagtagcactagcagagaatgcaatagttattctgatgcttgtggaagatcatctgagatcacaagctcaacatttttgcacatcccttacaggtgatagcatcacatcgtccacatcaatgacttcattggctgccagtcggtcaaattctttgagcacagctggtaaagaacccatggctgctggggtctcaagacgggcatctttgtccagtgatgctggtggccttcctctggatttgcttacttctatggctgattcaaatggacaaatctctgctgccgtgatggaacgtcttacagcagcaacagcagctgaaccttatgattctgtcaagcatgcatttgtgtcttatgggagctgcataactgatcttggagaaagttggaagtaccgaagccgtttgtggtatggtgttggcattccacccaaatctgatatatttggtggtggtggaagtggttgggaatcttggagatctattctagagaaggattcaaatgggatttggattgaatttccacttgtgaagaaatcagttgctgtgctgcaggcacttcttttagatgaatctggacttggtggtggtcttggtattggagggggatctggccctggtatgggggttatgactgccctctatcagttgctagatagcgatcaaccatttctttgcatgctcagaatggttcttgtttcgatgagggaggacgacaatggtgaaggcgatgcttttacgaaagatgttagcataaaggatgtggtatcagaaggaatgggccaccaggctggaagtgtgatgccatttgatggcaacagttattcatctccaagaaaacctcgatctgctcttctttggagtgtgcttggccccatccttaatatgccaataacagagtctaagagacagagagtgttggttgcttcctctattctctactcagaggtatggcacgctattggcagggacaggaaacccctaaggaaacaatacattgagctgattttaccaccgtttgtagcaattcttagaagatggcgaccccttttggctggtattcatgagcttacttcttcagatggacaaaatccactaattgctgatgatcgtgctttggcggcagatgcattacctgtcgaggcttctcttttgatgatatcgcctggttgggctgctgcttttgcatcgccaccagttgcaatggcattggccatgatggctgctggtgcctcaggaacagaaacaagaacacctcctaggaataccttgaataggcgtgacaaagcattgcctgagcgcaaggcagcagcaaaactacagactttctcgagtttccagatgcctatggaaacagcatctaacaagcctgggtccaccctgaaggacaaggcagcagcaaaagctgccgcattggcagccgctcgtgaccttgaacgaactgctaagattggttcaagaaggggccttagtgctgtagcaatggcaacatcaggacaaaggaggagttcgggtgacatcgaacgagcaaagaggtggaatacgtcagaagctatgagtgctgcttgggtggagtgtctgcaatcagatgattccaaatcagttgtgggaagggatttttcagccctttcatacaaatatgtcgcagtacttgtttcttgtttggccttagcacgaaacttacaacgagctgagatggagaggcaaacactagttgatgtgttaattcggcatcgcgcctcaactgggcttcgagcatggcggcatcttcttcattgcctaacagagatgggtagactatatggaccttttgaacatctgtgcactcctgatcgtgttttctggaaattagattttactgaaagctcttcaaggatgagaagatttgtgaaaagaaattacaagggatgtgatcatttaggtgcagctgctgattatgaggaccggaagcttcttaatacttctgcacagtcaaatgaacataactctgaggatgctaattcttcattaacaagcactcttccatcatctgcttctgtaattatggctgatgccatgtcgatgaatgacagaaatgtggaaaatgagcagttagaaactgacactactcgcagcagtgttgatgacgatcagcttcaacattcttcagcagctgatcaacaatcggtaaaaggatcgataggttcaagaacttctgacatttgtgctgatcgaaatttggttaggtctacagttcttgcacctagttatgtgcctagcgaagctgatgagagaattattgttgaactgccatcattaatggtgcgaccattgaaggtggttcgaggaacattccaagtaacttcaaagaggattaacttcataattgatgagcgttcaaatgacagtaacattgatgatgctgcatctactagtggccaatgtgatcaacaagataaagatcgaagctggttggtctcatcactttatcagatatatagcagacgatacttgctacgccgaagtgctttggaattattcatggtagataggtcgaatttcttttttgactttgcggatattgatgcccgtaaaaacgcttatcgggccattgttcataccaaacctcctaacttgaatgacatctttttagctacccagatcaacaattttgagtacttaatggaacttaacacactggctgggcgcagttacaatgacattactcagtaccctgtttttccctgggtagtagcagattacaaatcccgagtgttgaatctggatgaccctttgtcgtatcgagatctttcaaagccaattggagcactaaaccctgaacgtctaaagaagttccaagaacggtactctacattcgaggatccaatcataccaaagtttcattatggttcacattactccagtgctggcacggtcttgtattaccttttcagagtggagccttttacaacactgtctatacaactgcaagacggcaaatttgaccacgctgatcgcatgttttctgatctttctggtacatgggatagtgttcttgaagacatgagtgatgtaaaagagctagtacccgagatgttttacctccctgaggtatttaccaacataaatggcattgactttgggacaactcaacttggagggaagctagattccgtagaattgcctccctgggctgaaaatcatgtggattttgtccataaacatcggaaggctcttgagagtgagcacgtctctgctcatttgcatgagtggattgatctaatttttggatataaacagaggggcaaagaagcgataatggcaaacaatgtattcttctacataacatatgaggggactgttgacattgacaaaattacaaacccagtggatcggcgagctacacaagatcaaatagcttactttggacaaacaccatctcaactgctgactgtacctcacatgaagaggaagccactggcggaggtcttacaactacagacaatattccgaaatccaagtgaacttaaatcatatgtgcttccacattcagatcgttgcaatgttcctgccagtgctatgcttgtatcaaacgactctattgtagttgttgatgtaaatgccccagcagcacatgtggcacttcaccaatggcaggctaatactccagatggtcagggaacacctttccttttccatcatggtagaaattccacaaattcaaccagtggcgcactcatgcgcattttcaaaggatctgctggttctgcggaagattatgggttcccaagggctatagcatttgctgcttctgcaatccgcagttcagcagttgttgctgtgacatgtgacaaagagataattactggtggccacgttgatggttcattgaagttgatatccctagatggagcgaagacaattgaaactgcttctgggcatattgctccagtgacatgccttgcgctgtcacctgatagcaactaccttgtgacagggtctagagataccacagttatactctggaggattcatcagacaggctcctcacataagaaaaatgctcaagaacctccaccgactacaccaacgacaccacgcagtcctctctctggcagcactagcaccatgagcagcctctcagaaacaaagagacgtcgcgttgaaggtccaatgcatgtaatgagaggacatcttggggaagtaacctgctgctcggttagtccagacttaggacttgttgcttcctcatcaaatgcaacaggcattcttctgcattccttacgcacaggcaggctgataaggaggcttgatgtcgatgaggcacatgcaatatgcttatcttctcaaggaatcattttggtttggaatggaacaaagaaaacattatctaccttcactgtcaatggactccctattgctaactcagttctgttgcctttctctggacaagttagttgcatcgagatttctacagatggccattttgctttatttggaacatctttgttcaacaactacaagtgtgataacagtactgaaactggggatcatgagcttggacccaatggcactgatgatgtatcaaaaaattctgaacaatctgttcacgcgccttcaatctgctttgttgacctgcatacactgaaggtttttcatactctgaagctggcaaagggccaggacatcacagcaattgctctaaacaaagagaacacaaatcttttagtttctactgctgataattttttttatagtctttactgatcccgctgtaagcatcctcgatac

SEQ ID NO: 19733 - DNA, 8932 bp, Zea Mays
ctcccccctgccccctcgtcaagctcatcatccggttccgcctatcggatctcgccgtgcaccgccgctgattccacccaccgctccgcacgcatttgcaccccaactcctcacagatctccccagatctacgcgctccacgcactgccattttcccgctccgattcttcccccactccagtctacgccgcgcttaatcgcccgcccgctgtttcacttccgttgaccgattcccgctcgcatttccacaccctgcgcttggttcggaattggtctcgatggagtaaagtccttgcaatggcggaagacgcgcacgagttgttcgattcctccccgccgcgggaggagggctccgacgagcagctcgcggccgtaccgctcggcgacgaggcgggcgtcgtcgaggaggaggaggcgtcggatccggggatgagtaccagcatgccggccacacccgcgacgccctacgagccgcccccgcggcccaggcggccgcctggagtaccggccgacgcgccactggaggtggtgcgggcggtggaggaggcgatcgcgggcggggcggaccttctccgcgaggtggtctcccaggagcagggcgagctggctcactccgtcgtcgacgtgctgctcggcaccatgggcggtgtggacgaggcaggcgacgccaccggcaccggcgctcctcccaccgtcatgatcagctcgcgtgccgctgtcgccgccgctgagctcctgccttatctccccgaagacgacgagccgtcgccgcgcactcgaacagccttaggtctgcacgccgccctccgcgcctgcactcgcaatagagccatgtgttcttccgcgggcctcctggctgccctcctcgcgtccgcagagaagctgttcgtcgaaatggatcagggtagcagatgggacgggacgccactgcttcaatgcattcagatgttgggtgggcactcgcttagtgtgaaagacctgcattcctggcttgatttggttagaaagtcacttggaacgagctgggccacaccacttatgctagcgcttgagaaggccatgggcagcatggaagcaaaaggtcctgctgtgacatttgagtttgacggggagagctctggtctgcttggcccaggtgacagcaggtggcccttcttaaatggatatgggtttgccacttggatatacatagaatcattctcggatacccttagcacagcaacagctgcggcagccattgctgctgctgcagcggcaacatctggaaaatcatcagcaatgtcagctgctgcggcagccagtgcccttgcaggagaaggaacaacacacatgcctcggcttttcagctttctctcttcagataaccagggtgtggaagcttactttcatggccagttcttggtggtggagagtgtgggtggtaggggtaagaaagcttctttgcacttcacatatgcgttcaagcctcagtgctggtattttgttgggttggagcacacaaacaagcatagtttgctcggaaaggatgacagcgaattgagtctgtatgttgatggaagcctgtatgagagccgtccttttgagtttccacgtatctctaaaccacttgcattttgctgcatcgggacaaatccaccaccaactattgccggcctgcagaggcgccggcggcaatgcccattatttgctgaaatggggcctgtctacatcttcaaagaaccaattgggccagacagaatgagacgtctagcatcccgaggaggagacacactgcccagttttggaaatggcgcaggcttgccatggaaggcaactaatgaccaagttaagagtatggctgaagagagcttttcactcaacaatgggatagggggaagcttgcatcttctttaccatcctagtcttctcactgggcggttttgtccagacgcctcaccttctggttcatcaggcactcatcgaaggcccgcagaggttctcggattggttcatgtctcacctcgtgtgcgaccttcagaatctttatgggccttagcttatgggggtccaatggctttacttccactaaccataggcaatgtacatgtggacagccttgagcctgcacctggggacttgccatcgtctcttgctaccatttccctttctgccccagttttcaggattatttcccaagctattcaacaccctggaaataatgaagaattatgccgtacatttgcaccagagcttttatcacgtgttttacattatgtgttgcaggctcttccaaagttggaaagtggggaagaggttctgactgatgaggagcttgttgctgccattgtatctttgtgccagtctcaaagaaataatcatgaacttaaagtgcagcttttcagcagcttgctgttggacctaaatctatggagttcatgcaattatggtttacagaaggagcttctgtcgtctctcgcagacatggtatttacagagtctgcttgcatgcgagatgccaaggcgatgcaaatgcttcttgatggctgcagaaggtgttactgggtaattcaggaaccggattcaatcgataactttgcatttactggaacaaagcgatctttgggggaagtgaatgctctagtggatgaacttttggttgttattgaactactgctaggagcagcatcttcaacagcagcagcagatgatgtccgctgtttgattggatttattgttgactgcccacagcctaatcaggttgcaagggtgttgcacctcatatataggttgaatgtacaacctaacatttctagggccaacttattttctcaatccttcatcactagtggtggtgtggaagcactacttgttcttttacaacgggaagctaaagtgggtaacaaaaatattttggatcattctagtgcaagtgaaaataatgtgcccaaggatggaagttccaacagaaaagctgatagtgctgacacaagttgtcaggttgatgaaaatcaatcagctgaacgtcatgaaactgtcttccatgaagaagccattgaacatgaagccacaaatgcaaaagatatgctggactcaaatattggaagtaaagtgcctggttctgagaatgggctcttgaagaacctgggtggcattagcttctcaattacttctgataatgtccggaataatgtttacaatgttgacaaaggtgatggaattgttgttggcattattcacattcttggtgctctaattgggtcaggtcacctgaaatttgattctggagctggaagtgcaaatatacctggtggtagtcagaccacacttaatgaagaaggaaatactatgtcagaagatagagtatcattgttactttttgcattgcaaaaggcattccaagcagccccaaggaggcttatgacggcaaatgtctatatggctttgatttctgctgtgattaatgtttcatcagctgatgaaagtcttaatctttatgattctggtcaccgttttgaacatatccaacttttactggttctacttcgctcgcttccatatgcatcgagggcattccaagctcgtgcaatacaggatattctgtttttggcttgtagtcatctagataacagaactacaatgacctcgatttcagagtggccagaatggattttggaggttttgatttcgaaccatgaaatggacacaaagaaaaatgctgatggtgtaagcattggtgagattgaagacctcatacacaattttctgattataatgctggagcattcaatgcgacaaaaagatgggtggaaggatgtggaggcaacaattcattgtgcggagtggctctcaatagttggaggatctagcactggagaccaaaggatcaggcgtgaagaatcattacctatttttaaaaggagattgttgggtgacttgcttgatttttctgccagggagcttcaagttcagaccgaagtaattgcagcagctgcagctggtgttgcagctgagggtttgtctcctgaagaagcaaaaattcaagcagagaatgctgctcatctctcagtagcactagcagagaatgcaatagttattctgatgcttgtggaagatcatctgagatcacaagctcaacatttttgcacatcccttacaggtgatagcatcacatcgtccacatcaatgacttcattggctgccagtcggtcaaattctttgagcacagctggtaaagaacccatggctgctggggtctcaagacgggcatctttgtccagtgatgctggtggccttcctctggatttgcttacttctatggctgattcaaatggacaaatctctgctgccgtgatggaacgtcttacagcagcaacagcagctgaaccttatgattctgtcaagcatgcatttgtgtcttatgggagctgcataactgatcttggagaaagttggaagtaccgaagccgtttgtggtatggtgttggcattccacccaaatctgatatatttggtggtggtggaagtggttgggaatcttggagatctattctagagaaggattcaaatgggatttggattgaatttccacttgtgaagaaatcagttgctgtgctgcaggcacttcttttagatgaatctggacttggtggtggtcttggtattggagggggatctggccctggtatgggggttatgactgccctctatcagttgctagatagcgatcaaccatttctttgcatgctcagaatggttcttgtttcgatgagggaggacgacaatggtgaaggcgatgcttttacgaaagatgttagcataaaggatgtggtatcagaaggaatgggccaccaggctggaagtgtgatgccatttgatggcaacagttattcatctccaagaaaacctcgatctgctcttctttggagtgtgcttggccccatccttaatatgccaataacagagtctaagagacagagagtgttggttgcttcctctattctctactcagaggtatggcacgctattggcagggacaggaaacccctaaggaaacaatacattgagctgattttaccaccgtttgtagcaattcttagaagatggcgaccccttttggctggtattcatgagcttacttcttcagatggacaaaatccactaattgctgatgatcgtgctttggcggcagatgcattacctgtcgagatattcaagacaaacattgtgccatttagcatgatagtccttatgagaaagttttagaaaaaaggcttctcttttgatgatatcgcctggttgggctgctgcttttgcatcgccaccagttgcaatggcattggccatgatggctgctggtgcctcaggaacagaaacaagaacacctcctaggaataccttgaataggcgtgacaaagcattgcctgagcgcaaggcagcagcaaaactacagactttctcgagtttccagatgcctatggaaacagcatctaacaagcctgggtccaccctgaaggacaaggcagcagcaaaagctgccgcattggcagccgctcgtgaccttgaacgaactgctaagattggttcaagaaggggccttagtgctgtagcaatggcaacatcaggacaaaggaggagttcgggtgacatcgaacgagcaaagaggtggaatacgtcagaagctatgagtgctgcttgggtggagtgtctgcaatcagatgattccaaatcagttgtgggaagggatttttcagccctttcatacaaatatgtcgcagtacttgtttcttgtttggccttagcacgaaacttacaacgagctgagatggagaggcaaacactagttgatgtgttaattcggcatcgcgcctcaactgggcttcgagcatggcggcatcttcttcattgcctaacagagatgggtagactatatggaccttttgaacatctgtgcactcctgatcgtgttttctggaaattagattttactgaaagctcttcaaggatgagaagatttgtgaaaagaaattacaagggatgtgatcatttaggtgcagctgctgattatgaggaccggaagcttcttaatacttctgcacagtcaaatgaacataactctgaggatgctaattcttcattaacaagcactcttccatcatctgcttctgtaattatggctgatgccatgtcgatgaatgacagaaatgtggaaaatgagcagttagaaactgacactactcgcagcagtgttgatgacgatcagcttcaacattcttcagcagctgatcaacaatcggtaaaaggatcgataggttcaagaacttctgacatttgtgctgatcgaaatttggttaggtctacagttcttgcacctagttatgtgcctagcgaagctgatgagagaattattgttgaactgccatcattaatggtgcgaccattgaaggtggttcgaggaacattccaagtaacttcaaagaggattaacttcataattgatgagcgttcaaatgacagtaacattgatgatgctgcatctactagtggccaatgtgatcaacaagataaagatcgaagctggttggtctcatcactttatcagatatatagcagacgatacttgctacgccgaagtgctttggaattattcatggtagataggtcgaatttcttttttgactttgcggatattgatgcccgtaaaaacgcttatcgggccattgttcataccaaacctcctaacttgaatgacatctttttagctacccagagagctgagcagattcttaaaagaactcagttgatggagcgctgggctaattgggagatcaacaattttgagtacttaatggaacttaacacactggctgggcgcagttacaatgacattactcagtaccctgtttttccctgggtagtagcagattacaaatcccgagtgttgaatctggatgaccctttgtcgtatcgagatctttcaaagccaattggagcactaaaccctgaacgtctaaagaagttccaagaacggtactctacattcgaggatccaatcataccaaagtttcattatggttcacattactccagtgctggcacggtcttgtattaccttttcagagtggagccttttacaacactgtctatacaactgcaagacggcaaatttgaccacgctgatcgcatgttttctgatctttctggtacatgggatagtgttcttgaagacatgagtgatgtaaaagagctagtacccgagatgttttacctccctgaggtatttaccaacataaatggcattgactttgggacaactcaacttggagggaagctagattccgtagaattgcctccctgggctgaaaatcatgtggattttgtccataaacatcggaaggctcttgagagtgagcacgtctctgctcatttgcatgagtggattgatctaatttttggatataaacagaggggcaaagaagcgataatggcaaacaatgtattcttctacataacatatgaggggactgttgacattgacaaaattacaaacccagtggatcggcgagctacacaagatcaaatagcttactttggacaaacaccatctcaactgctgactgtacctcacatgaagaggaagccactggcggaggtcttacaactacagacaatattccgaaatccaagtgaacttaaatcatatgtgcttccacattcagatcgttgcaatgttcctgccagtgctatgcttgtatcaaacgactctattgtagttgttgatgtaaatgccccagcagcacatgtggcacttcaccaatggcaggctaatactccagatggtcagggaacacctttccttttccatcatggtagaaattccacaaattcaaccagtggcgcactcatgcgcattttcaaaggatctgctggttctgcggaagattatgggttcccaagggctatagcatttgctgcttctgcaatccgcagttcagcagttgttgctgtgacatgtgacaaagagataattactggtggccacgttgatggttcattgaagttgatatccctagatggagcgaagacaattgaaactgcttctgggcatattgctccagtgacatgccttgcgctgtcacctgatagcaactaccttgtgacagggtctagagataccacagttatactctggaggattcatcagacaggctcctcacataagaaaaatgctcaagaacctccaccgactacaccaacgacaccacgcagtcctctctctggcagcactagcaccatgagcagcctctcagaaacaaagagacgtcgcgttgaaggtccaatgcatgtaatgagaggacatcttggggaagtaacctgctgctcggttagtccagacttaggacttgttgcttcctcatcaaatgcaacaggcattcttctgcattccttacgcacaggcaggctgataaggaggcttgatgtcgatgaggcacatgcaatatgcttatcttctcaaggaatcattttggtttggaatggaacaaagaaaacattatctaccttcactgtcaatggactccctattgctaactcagttctgttgcctttctctggacaagttagttgcatcgagatttctacagatggccattttgctttatttggaacatctttgttcaacaactacaagtgtgataacagtactgaaactggggatcatgagcttggacccaatggcactgatgatgtatcaaaaaattctgaacaatctgttcacgcgccttcaatctgctttgttgacctgcatacactgaaggtttttcatactctgaagctggcaaagggccaggacatcacagcaattgctctaaacaaagagaacacaaatcttttagtttctactgctgataattttttttatagtctttactgatcccgctgtaagcatcctcgatac

SEQ ID NO: 19734 - DNA, 8185 bp, Zea Mays
ctcccccctgccccctcgtcaagctcatcatccggttccgcctatcggatctcgccgtgcaccgccgctgattccacccaccgctccgcacgcatttgcaccccaactcctcacagatctccccagatctacgcgctccacgcactgccattttcccgctccgattcttcccccactccagtctacgccgcgcttaatcgcccgcccgctgtttcacttccgttgaccgattcccgctcgcatttccacaccctgcgcttggttcggaattggtctcgatggagtaaagtccttgcaatggcggaagacgcgcacgagttgttcgattcctccccgccgcgggaggagggctccgacgagcagctcgcggccgtaccgctcggcgacgaggcgggcgtcgtcgaggaggaggaggcgtcggatccggggatgagtaccagcatgccggccacacccgcgacgccctacgagccgcccccgcggcccaggcggccgcctggagtaccggccgacgcgccactggaggtggtgcgggcggtggaggaggcgatcgcgggcggggcggaccttctccgcgaggtggtctcccaggagcagggcgagctggctcactccgtcgtcgacgtgctgctcggcaccatgggcggtgtggacgaggcaggcgacgccaccggcaccggcgctcctcccaccgtcatgatcagctcgcgtgccgctgtcgccgccgctgagctcctgccttatctccccgaagacgacgagccgtcgccgcgcactcgaacagccttaggtctgcacgccgccctccgcgcctgcactcgcaatagagccatgtgttcttccgcgggcctcctggctgccctcctcgcgtccgcagagaagctgttcgtcgaaatggatcagggtagcagatgggacgggacgccactgcttcaatgcattcagatgttgggtgggcactcgcttagtgtgaaagacctgcattcctggcttgatttggttagaaagtcacttggaacgagctgggccacaccacttatgctagcgcttgagaaggccatgggcagcatggaagcaaaaggtcctgctgtgacatttgagtttgacggggagagctctggtctgcttggcccaggtgacagcaggtggcccttcttaaatggatatgggtttgccacttggatatacatagaatcattctcggatacccttagcacagcaacagctgcggcagccattgctgctgctgcagcggcaacatctggaaaatcatcagcaatgtcagctgctgcggcagccagtgcccttgcaggagaaggaacaacacacatgcctcggcttttcagctttctctcttcagataaccagggtgtggaagcttactttcatggccagttcttggtggtggagagtgtgggtggtaggggtaagaaagcttctttgcacttcacatatgcgttcaagcctcagtgctggtattttgttgggttggagcacacaaacaagcatagtttgctcggaaaggatgacagcgaattgagtctgtatgttgatggaagcctgtatgagagccgtccttttgagtttccacgtatctctaaaccacttgcattttgctgcatcgggacaaatccaccaccaactattgccggcctgcagaggcgccggcggcaatgcccattatttgctgaaatggggcctgtctacatcttcaaagaaccaattgggccagacagaatgagacgtctagcatcccgaggaggagacacactgcccagttttggaaatggcgcaggcttgccatggaaggcaactaatgaccaagttaagagtatggctgaagagagcttttcactcaacaatgggatagggggaagcttgcatcttctttaccatcctagtcttctcactgggcggttttgtccagacgcctcaccttctggttcatcaggcactcatcgaaggcccgcagaggttctcggattggttcatgtctcacctcgtgtgcgaccttcagaatctttatgggccttagcttatgggggtccaatggctttacttccactaaccataggcaatgtacatgtggacagccttgagcctgcacctggggacttgccatcgtctcttgctaccatttccctttctgccccagttttcaggattatttcccaagctattcaacaccctggaaataatgaagaattatgccgtacatttgcaccagagcttttatcacgtgttttacattatgtgttgcaggctcttccaaagttggaaagtggggaagaggttctgactgatgaggagcttgttgctgccattgtatctttgtgccagtctcaaagaaataatcatgaacttaaagtgcagcttttcagcagcttgctgttggacctaaatctatggagttcatgcaattatggtttacagaaggagcttctgtcgtctctcgcagacatggtatttacagagtctgcttgcatgcgagatgccaaggcgatgcaaatgcttcttgatggctgcagaaggtgttactgggtaattcaggaaccggattcaatcgataactttgcatttactggaacaaagcgatctttgggggaagtgaatgctctagtggatgaacttttggttgttattgaactactgctaggagcagcatcttcaacagcagcagcagatgatgtccgctgtttgattggatttattgttgactgcccacagcctaatcaggttgcaagggtgttgcacctcatatataggttgaatgtacaacctaacatttctagggccaacttattttctcaatccttcatcactagtggtggtgtggaagcactacttgttcttttacaacgggaagctaaagtgggtaacaaaaatattttggatcattctagtgcaagtgaaaataatgtgcccaaggatggaagttccaacagaaaagctgatagtgctgacacaagttgtcaggttgatgaaaatcaatcagctgaacgtcatgaaactgtcttccatgaagaagccattgaacatgaagccacaaatgcaaaagatatgctggactcaaatattggaagtaaagtgcctggttctgagaatgggctcttgaagaacctgggtggcattagcttctcaattacttctgataatgtccggaataatgtttacaatgttgacaaaggtgatggaattgttgttggcattattcacattcttggtgctctaattgggtcaggtcacctgaaatttgattctggagctggaagtgcaaatatacctggtggtagtcagaccacacttaatgaagaaggaaatactatgtcagaagatagagtatcattgttactttttgcattgcaaaaggcattccaagcagccccaaggaggcttatgacggcaaatgtctatatggctttgatttctgctgtgattaatgtttcatcagctgatgaaagtcttaatctttatgattctggtcaccgttttgaacatatccaacttttactggttctacttcgctcgcttccatatgcatcgagggcattccaagctcgtgcaatacaggatattctgtttttggcttgtagtcatctagataacagaactacaatgacctcgatttcagagtggccagaatggattttggaggttttgatttcgaaccatgaaatggacacaaagaaaaatgctgatggtgtaagcattggtgagattgaagacctcatacacaattttctgattataatgctggagcattcaatgcgacaaaaagatgggtggaaggatgtggaggcaacaattcattgtgcggagtggctctcaatagttggaggatctagcactggagaccaaaggatcaggcgtgaagaatcattacctatttttaaaaggagattgttgggtgacttgcttgatttttctgccagggagcttcaagttcagcagaccgaagtaattgcagcagctgcagctggtgttgcagctgagggtttgtctcctgaagaagcaaaaattcaagcagagaatgctgctcatctctcagtagcactagcagagaatgcaatagttattctgatgcttgtggaagatcatctgagatcacaagctcaacatttttgcacatcccttacaggtgatagcatcacatcgtccacatcaatgacttcattggctgccagtcggtcaaattctttgagcacagctggtaaagaacccatggctgctggggtctcaagacgggcatctttgtccagtgatgctggtggccttcctctggatttgcttacttctatggctgattcaaatggacaaatctctgctgccgtgatggaacgtcttacagcagcaacagcagctgaaccttatgattctgtcaagcatgcatttgtgtcttatgggagctgcataactgatcttggagaaagttggaagtaccgaagccgtttgtggtatggtgttggcattccacccaaatctgatatatttggtggtggtggaagtggttgggaatcttggagatctattctagagaaggattcaaatgggatttggattgaatttccacttgtgaagaaatcagttgctgtgctgcaggcacttcttttagatgaatctggacttggtggtggtcttggtattggagggggatctggccctggtatgggggttatgactgccctctatcagttgctagatagcgatcaaccatttctttgcatgctcagaatggttcttgtttcgatgagggaggacgacaatggtgaaggcgatgcttttacgaaagatgttagcataaaggatgtggtatcagaaggaatgggccaccaggctggaagtgtgatgccatttgatggcaacagttattcatctccaagaaaacctcgatctgctcttctttggagtgtgcttggccccatccttaatatgccaataacagagtctaagagacagagagtgttggttgcttcctctattctctactcagaggtatggcacgctattggcagggacaggaaacccctaaggaaacaatacattgagctgattttaccaccgtttgtagcaattcttagaagatggcgaccccttttggctggtattcatgagcttacttcttcagatggacaaaatccactaattgctgatgatcgtgctttggcggcagatgcattacctgtcgaggcttctcttttgatgatatcgcctggttgggctgctgcttttgcatcgccaccagttgcaatggcattggccatgatggctgctggtgcctcaggaacagaaacaagaacacctcctaggaataccttgaataggcgtgacaaagcattgcctgagcgcaaggcagcagcaaaactacagactttctcgagtttccagatgcctatggaaacagcatctaacaagcctgggtccaccctgaaggacaaggcagcagcaaaagctgccgcattggcagccgctcgtgaccttgaacgaactgctaagattggttcaagaaggggccttagtgctgtagcaatggcaacatcaggacaaaggaggagttcgggtgacatcgaacgagcaaagaggtggaatacgtcagaagctatgagtgctgcttgggtggagtgtctgcaatcagatgattccaaatcagttgtgggaagggatttttcagccctttcatacaaatatgtcgcagtacttgtttcttgtttggccttagcacgaaacttacaacgagctgagatggagaggcaaacactagttgatgtgttaattcggcatcgcgcctcaactgggcttcgagcatggcggcatcttcttcattgcctaacagagatgggtagactatatggaccttttgaacatctgtgcactcctgatcgtgttttctggaaattagattttactgaaagctcttcaaggatgagaagatttgtgaaaagaaattacaagggatgtgatcatttaggtgcagctgctgattatgaggaccggaagcttcttaatacttctgcacagtcaaatgaacataactctgaggatgctaattcttcattaacaagcactcttccatcatctgcttctgtaattatggctgatgccatgtcgatgaatgacagaaatgtggaaaatgagcagttagaaactgacactactcgcagcagtgttgatgacgatcagcttcaacattcttcagcagctgatcaacaatcggtaaaaggatcgataggttcaagaacttctgacatttgtgctgatcgaaatttggttaggtctacagttcttgcacctagttatgtgcctagcgaagctgatgagagaattattgttgaactgccatcattaatggtgcgaccattgaaggtggttcgaggaacattccaagtaacttcaaagaggattaacttcataattgatgagcgttcaaatgacagtaacattgatgatgctgcatctactagtggccaatgtgatcaacaagataaagatcgaagctggttggtctcatcactttatcagatatatagcagacgatacttgctacgccgaagtgctttggaattattcatggtagataggtcgaatttcttttttgactttgcggatattgatgcccgtaaaaacgcttatcgggccattgttcataccaaacctcctaacttgaatgacatctttttagctacccagatataaacagaggggcaaagaagcgataatggcaaacaatgtattcttctacataacatatgaggggactgttgacattgacaaaattacaaacccagtggatcggcgagctacacaagatcaaatagcttactttggacaaacaccatctcaactgctgactgtacctcacatgaagaggaagccactggcggaggtcttacaactacagacaatattccgaaatccaagtgaacttaaatcatatgtgcttccacattcagatcgttgcaatgttcctgccagtgctatgcttgtatcaaacgactctattgtagttgttgatgtaaatgccccagcagcacatgtggcacttcaccaatggcaggctaatactccagatggtcagggaacacctttccttttccatcatggtagaaattccacaaattcaaccagtggcgcactcatgcgcattttcaaaggatctgctggttctgcggaagattatgggttcccaagggctatagcatttgctgcttctgcaatccgcagttcagcagttgttgctgtgacatgtgacaaagagataattactggtggccacgttgatggttcattgaagttgatatccctagatggagcgaagacaattgaaactgcttctgggcatattgctccagtgacatgccttgcgctgtcacctgatagcaactaccttgtgacagggtctagagataccacagttatactctggaggattcatcagacaggctcctcacataagaaaaatgctcaagaacctccaccgactacaccaacgacaccacgcagtcctctctctggcagcactagcaccatgagcagcctctcagaaacaaagagacgtcgcgttgaaggtccaatgcatgtaatgagaggacatcttggggaagtaacctgctgctcggttagtccagacttaggacttgttgcttcctcatcaaatgcaacaggcattcttctgcattccttacgcacaggcaggctgataaggaggcttgatgtcgatgaggcacatgcaatatgcttatcttctcaaggaatcattttggtttggaatggaacaaagaaaacattatctaccttcactgtcaatggactccctattgctaactcagttctgttgcctttctctggacaagttagttgcatcgagatttctacagatggccattttgctttatttggaacatctttgttcaacaactacaagtgtgataacagtactgaaactggggatcatgagcttggacccaatggcactgatgatgtatcaaaaaattctgaacaatctgttcacgcgccttcaatctgctttgttgacctgcatacactgaaggtttttcatactctgaagctggcaaagggccaggacatcacagcaattgctctaaacaaagagaacacaaatcttttagtttctactgctgataattttttttatagtctttactgatcccgctgtaagcatcctcgatac

SEQ ID NO: 19735 - DNA, 8501 bp, Zea Mays
ctcccccctgccccctcgtcaagctcatcatccggttccgcctatcggatctcgccgtgcaccgccgctgattccacccaccgctccgcacgcatttgcaccccaactcctcacagatctccccagatctacgcgctccacgcactgccattttcccgctccgattcttcccccactccagtctacgccgcgcttaatcgcccgcccgctgtttcacttccgttgaccgattcccgctcgcatttccacaccctgcgcttggttcggaattggtctcgatggagtaaagtccttgcaatggcggaagacgcgcacgagttgttcgattcctccccgccgcgggaggagggctccgacgagcagctcgcggccgtaccgctcggcgacgaggcgggcgtcgtcgaggaggaggaggcgtcggatccggggatgagtaccagcatgccggccacacccgcgacgccctacgagccgcccccgcggcccaggcggccgcctggagtaccggccgacgcgccactggaggtggtgcgggcggtggaggaggcgatcgcgggcggggcggaccttctccgcgaggtggtctcccaggagcagggcgagctggctcactccgtcgtcgacgtgctgctcggcaccatgggcggtgtggacgaggcaggcgacgccaccggcaccggcgctcctcccaccgtcatgatcagctcgcgtgccgctgtcgccgccgctgagctcctgccttatctccccgaagacgacgagccgtcgccgcgcactcgaacagccttaggtctgcacgccgccctccgcgcctgcactcgcaatagagccatgtgttcttccgcgggcctcctggctgccctcctcgcgtccgcagagaagctgttcgtcgaaatggatcagggtagcagatgggacgggacgccactgcttcaatgcattcagatgttgggtgggcactcgcttagtgtgaaagacctgcattcctggcttgatttggttagaaagtcacttggaacgagctgggccacaccacttatgctagcgcttgagaaggccatgggcagcatggaagcaaaaggtcctgctgtgacatttgagtttgacggggagagctctggtctgcttggcccaggtgacagcaggtggcccttcttaaatggatatgggtttgccacttggatatacatagaatcattctcggatacccttagcacagcaacagctgcggcagccattgctgctgctgcagcggcaacatctggaaaatcatcagcaatgtcagctgctgcggcagccagtgcccttgcaggagaaggaacaacacacatgcctcggcttttcagctttctctcttcagataaccagggtgtggaagcttactttcatggccagttcttggtggtggagagtgtgggtggtaggggtaagaaagcttctttgcacttcacatatgcgttcaagcctcagtgctggtattttgttgggttggagcacacaaacaagcatagtttgctcggaaaggatgacagcgaattgagtctgtatgttgatggaagcctgtatgagagccgtccttttgagtttccacgtatctctaaaccacttgcattttgctgcatcgggacaaatccaccaccaactattgccggcctgcagaggcgccggcggcaatgcccattatttgctgaaatggggcctgtctacatcttcaaagaaccaattgggccagacagaatgagacgtctagcatcccgaggaggagacacactgcccagttttggaaatggcgcaggcttgccatggaaggcaactaatgaccaagttaagagtatggctgaagagagcttttcactcaacaatgggatagggggaagcttgcatcttctttaccatcctagtcttctcactgggcggttttgtccagacgcctcaccttctggttcatcaggcactcatcgaaggcccgcagaggttctcggattggttcatgtctcacctcgtgtgcgaccttcagaatctttatgggccttagcttatgggggtccaatggctttacttccactaaccataggcaatgtacatgtggacagccttgagcctgcacctggggacttgccatcgtctcttgctaccatttccctttctgccccagttttcaggattatttcccaagctattcaacaccctggaaataatgaagaattatgccgtacatttgcaccagagcttttatcacgtgttttacattatgtgttgcaggctcttccaaagttggaaagtggggaagaggttctgactgatgaggagcttgttgctgccattgtatctttgtgccagtctcaaagaaataatcatgaacttaaagtgcagcttttcagcagcttgctgttggacctaaatctatggagttcatgcaattatggtttacagaaggagcttctgtcgtctctcgcagacatggtatttacagagtctgcttgcatgcgagatgccaaggcgatgcaaatgcttcttgatggctgcagaaggtgttactgggtaattcaggaaccggattcaatcgataactttgcatttactggaacaaagcgatctttgggggaagtgaatgctctagtggatgaacttttggttgttattgaactactgctaggagcagcatcttcaacagcagcagcagatgatgtccgctgtttgattggatttattgttgactgcccacagcctaatcaggttgcaagggtgttgcacctcatatataggttgaatgtacaacctaacatttctagggccaacttattttctcaatccttcatcactagtggtggtgtggaagcactacttgttcttttacaacgggaagctaaagtgggtaacaaaaatattttggatcattctagtgcaagtgaaaataatgtgcccaaggatggaagttccaacagaaaagctgatagtgctgacacaagttgtcaggttgatgaaaatcaatcagctgaacgtcatgaaactgtcttccatgaagaagccattgaacatgaagccacaaatgcaaaagatatgctggactcaaatattggaagtaaagtgcctggttctgagaatgggctcttgaagaacctgggtggcattagcttctcaattacttctgataatgtccggaataatgtttacaatgttgacaaaggtgatggaattgttgttggcattattcacattcttggtgctctaattgggtcaggtcacctgaaatttgattctggagctggaagtgcaaatatacctggtggtagtcagaccacacttaatgaagaaggaaatactatgtcagaagatagagtatcattgttactttttgcattgcaaaaggcattccaagcagccccaaggaggcttatgacggcaaatgtctatatggctttgatttctgctgtgattaatgtttcatcagctgatgaaagtcttaatctttatgattctggtcaccgttttgaacatatccaacttttactggttctacttcgctcgcttccatatgcatcgagggcattccaagctcgtgcaatacaggatattctgtttttggcttgtagtcatctagataacagaactacaatgacctcgatttcagagtggccagaatggattttggaggttttgatttcgaaccatgaaatggacacaaagaaaaatgctgatggtgtaagcattggtgagattgaagacctcatacacaattttctgattataatgctggagcattcaatgcgacaaaaagatgggtggaaggatgtggaggcaacaattcattgtgcggagtggctctcaatagttggaggatctagcactggagaccaaaggatcaggcgtgaagaatcattacctatttttaaaaggagattgttgggtgacttgcttgatttttctgccagggagcttcaagttcagaccgaagtaattgcagcagctgcagctggtgttgcagctgagggtttgtctcctgaagaagcaaaaattcaagcagagaatgctgctcatctctcagtagcactagcagagaatgcaatagttattctgatgcttgtggaagatcatctgagatcacaagctcaacatttttgcacatcccttacaggtgatagcatcacatcgtccacatcaatgacttcattggctgccagtcggtcaaattctttgagcacagctggtaaagaacccatggctgctggggtctcaagacgggcatctttgtccagtgatgctggtggccttcctctggatttgcttacttctatggctgattcaaatggacaaatctctgctgccgtgatggaacgtcttacagcagcaacagcagctgaaccttatgattctgtcaagcatgcatttgtgtcttatgggagctgcataactgatcttggagaaagttggaagtaccgaagccgtttgtggtatggtgttggcattccacccaaatctgatatatttggtggtggtggaagtggttgggaatcttggagatctattctagagaaggattcaaatgggatttggattgaatttccacttgtgaagaaatcagttgctgtgctgcaggcacttcttttagatgaatctggacttggtggtggtcttggtattggagggggatctggccctggtatgggggttatgactgccctctatcagttgctagatagcgatcaaccatttctttgcatgctcagaatggttcttgtttcgatgagggaggacgacaatggtgaaggcgatgcttttacgaaagatgttagcataaaggatgtggtatcagaaggaatgggccaccaggctggaagtgtgatgccatttgatggcaacagttattcatctccaagaaaacctcgatctgctcttctttggagtgtgcttggccccatccttaatatgccaataacagagtctaagagacagagagtgttggttgcttcctctattctctactcagaggtatggcacgctattggcagggacaggaaacccctaaggaaacaatacattgagctgattttaccaccgtttgtagcaattcttagaagatggcgaccccttttggctggtattcatgagcttacttcttcagatggacaaaatccactaattgctgatgatcgtgctttggcggcagatgcattacctgtcgaggcttctcttttgatgatatcgcctggttgggctgctgcttttgcatcgccaccagttgcaatggcattggccatgatggctgctggtgcctcaggaacagaaacaagaacacctcctaggaataccttgaataggcgtgacaaagcattgcctgagcgcaaggcagcagcaaaactacagactttctcgagtttccagatgcctatggaaacagcatctaacaagcctgggtccaccctgaaggacaaggcagcagcaaaagctgccgcattggcagccgctcgtgaccttgaacgaactgctaagattggttcaagaaggggccttagtgctgtagcaatggcaacatcaggacaaaggaggagttcgggtgacatcgaacgagcaaagaggtggaatacgtcagaagctatgagtgctgcttgggtggagtgtctgcaatcagatgattccaaatcagttgtgggaagggatttttcagccctttcatacaaatatgtcgcagtacttgtttcttgtttggccttagcacgaaacttacaacgagctgagatggagaggcaaacactagttgatgtgttaattcggcatcgcgcctcaactgggcttcgagcatggcggcatcttcttcattgcctaacagagatgggtagactatatggaccttttgaacatctgtgcactcctgatcgtgttttctggaaattagattttactgaaagctcttcaaggatgagaagatttgtgaaaagaaattacaagggatgtgatcatttaggtgcagctgctgattatgaggaccggaagcttcttaatacttctgcacagtcaaatgaacataactctgaggatgctaattcttcattaacaagcactcttccatcatctgcttctgtaattatggctgatgccatgtcgatgaatgacagaaatgtggaaaatgagcagttagaaactgacactactcgcagcagtgttgatgacgatcagcttcaacattcttcagcagctgatcaacaatcggtaaaaggatcgataggttcaagaacttctgacatttgtgctgatcgaaatttggttaggtctacagttcttgcacctagttatgtgcctagcgaagctgatgagagaattattgttgaactgccatcattaatggtgcgaccattgaaggtggttcgaggaacattccaagtaacttcaaagaggattaacttcataattgatgagcgttcaaatgacagtaacattgatgatgctgcatctactagtggccaatgtgatcaacaagataaagatcgaagctggttggtctcatcactttatcagatatatagcagacgatacttgctacgccgaagtgctttggaattattcatggtagataggtcgaatttcttttttgactttgcggatattgatgcccgtaaaaacgcttatcgggccattgttcataccaaacctcctaacttgaatgacatctttttagctacccagagagctgagcagattcttaaaagaactcagttgatggagcgctgggctaattgggagatcaacaattttgagtacttaatggaacttaacacactggctgggcgcagttacaatgacattactcagtaccctgtttttccctgggtagtagcagattacaaatcccgagtgttgaatctggatgaccctttgtcgtatcgagatctttcaaagccaattggagcactaaaccctgaacgtctaaagaagttccaagaacggtactctacattcgaggatccaatcataccaaagtttcattatggttcacattactccagtgctggcacggtcttgtattaccttttcagagtggagccttttacaacactgtctatacaactgcaagacggcaaatttgaccacgctgatcgcatgttttctgatctttctggtacatgggatagtgttcttgaagacatgagtgatgtaaaagagctagtacccgagatgttttacctccctgaggtatttaccaacataaatggcattgactttgggacaactcaacttggagggaagctagattccgtagaattgcctccctgggctgaaaatcatgtggattttgtccataaacatcggaaggctcttgagagtgagcacgtctctgctcatttgcatgagtggattgatctaatttttggatataaacagaggggcaaagaagcgataatggcaaacaatgtattcttctacataacatatgaggggactgttgacattgacaaaattacaaacccagtggatcggcgagctacacaagatcaaatagcttactttggacaaacaccatctcaactgctgactgtacctcacatgaagaggaagccactggcggaggtcttacaactacaggtggccacgttgatggttcattgaagttgatatccctagatggagcgaagacaattgaaactgcttctgggcatattgctccagtgacatgccttgcgctgtcacctgatagcaactaccttgtgacagggtctagagataccacagttatactctggaggattcatcagacaggctcctcacataagaaaaatgctcaagaacctccaccgactacaccaacgacaccacgcagtcctctctctggcagcactagcaccatgagcagcctctcagaaacaaagagacgtcgcgttgaaggtccaatgcatgtaatgagaggacatcttggggaagtaacctgctgctcggttagtccagacttaggacttgttgcttcctcatcaaatgcaacaggcattcttctgcattccttacgcacaggcaggctgataaggaggcttgatgtcgatgaggcacatgcaatatgcttatcttctcaaggaatcattttggtttggaatggaacaaagaaaacattatctaccttcactgtcaatggactccctattgctaactcagttctgttgcctttctctggacaagttagttgcatcgagatttctacagatggccattttgctttatttggaacatctttgttcaacaactacaagtgtgataacagtactgaaactggggatcatgagcttggacccaatggcactgatgatgtatcaaaaaattctgaacaatctgttcacgcgccttcaatctgctttgttgacctgcatacactgaaggtttttcatactctgaagctggcaaagggccaggacatcacagcaattgctctaaacaaagagaacacaaatcttttagtttctactgctgataattttttttatagtctttactgatcccgctgtaagcatcctcgatac

SEQ ID NO: 19736 - DNA, 8851 bp, Zea Mays
ctcccccctgccccctcgtcaagctcatcatccggttccgcctatcggatctcgccgtgcaccgccgctgattccacccaccgctccgcacgcatttgcaccccaactcctcacagatctccccagatctacgcgctccacgcactgccattttcccgctccgattcttcccccactccagtctacgccgcgcttaatcgcccgcccgctgtttcacttccgttgaccgattcccgctcgcatttccacaccctgcgcttggttcggaattggtctcgatggagtaaagtccttgcaatggcggaagacgcgcacgagttgttcgattcctccccgccgcgggaggagggctccgacgagcagctcgcggccgtaccgctcggcgacgaggcgggcgtcgtcgaggaggaggaggcgtcggatccggggatgagtaccagcatgccggccacacccgcgacgccctacgagccgcccccgcggcccaggcggccgcctggagtaccggccgacgcgccactggaggtggtgcgggcggtggaggaggcgatcgcgggcggggcggaccttctccgcgaggtggtctcccaggagcagggcgagctggctcactccgtcgtcgacgtgctgctcggcaccatgggcggtgtggacgaggcaggcgacgccaccggcaccggcgctcctcccaccgtcatgatcagctcgcgtgccgctgtcgccgccgctgagctcctgccttatctccccgaagacgacgagccgtcgccgcgcactcgaacagccttaggtctgcacgccgccctccgcgcctgcactcgcaatagagccatgtgttcttccgcgggcctcctggctgccctcctcgcgtccgcagagaagctgttcgtcgaaatggatcagggtagcagatgggacgggacgccactgcttcaatgcattcagatgttgggtgggcactcgcttagtgtgaaagacctgcattcctggcttgatttggttagaaagtcacttggaacgagctgggccacaccacttatgctagcgcttgagaaggccatgggcagcatggaagcaaaaggtcctgctgtgacatttgagtttgacggggagagctctggtctgcttggcccaggtgacagcaggtggcccttcttaaatggatatgggtttgccacttggatatacatagaatcattctcggatacccttagcacagcaacagctgcggcagccattgctgctgctgcagcggcaacatctggaaaatcatcagcaatgtcagctgctgcggcagccagtgcccttgcaggagaaggaacaacacacatgcctcggcttttcagctttctctcttcagataaccagggtgtggaagcttactttcatggccagttcttggtggtggagagtgtgggtggtaggggtaagaaagcttctttgcacttcacatatgcgttcaagcctcagtgctggtattttgttgggttggagcacacaaacaagcatagtttgctcggaaaggatgacagcgaattgagtctgtatgttgatggaagcctgtatgagagccgtccttttgagtttccacgtatctctaaaccacttgcattttgctgcatcgggacaaatccaccaccaactattgccggcctgcagaggcgccggcggcaatgcccattatttgctgaaatggggcctgtctacatcttcaaagaaccaattgggccagacagaatgagacgtctagcatcccgaggaggagacacactgcccagttttggaaatggcgcaggcttgccatggaaggcaactaatgaccaagttaagagtatggctgaagagagcttttcactcaacaatgggatagggggaagcttgcatcttctttaccatcctagtcttctcactgggcggttttgtccagacgcctcaccttctggttcatcaggcactcatcgaaggcccgcagaggttctcggattggttcatgtctcacctcgtgtgcgaccttcagaatctttatgggccttagcttatgggggtccaatggctttacttccactaaccataggcaatgtacatgtggacagccttgagcctgcacctggggacttgccatcgtctcttgctaccatttccctttctgccccagttttcaggattatttcccaagctattcaacaccctggaaataatgaagaattatgccgtacatttgcaccagagcttttatcacgtgttttacattatgtgttgcaggctcttccaaagttggaaagtggggaagaggttctgactgatgaggagcttgttgctgccattgtatctttgtgccagtctcaaagaaataatcatgaacttaaagtgcagcttttcagcagcttgctgttggacctaaatctatggagttcatgcaattatggtttacagaaggagcttctgtcgtctctcgcagacatggtatttacagagtctgcttgcatgcgagatgccaaggcgatgcaaatgcttcttgatggctgcagaaggtgttactgggtaattcaggaaccggattcaatcgataactttgcatttactggaacaaagcgatctttgggggaagtgaatgctctagtggatgaacttttggttgttattgaactactgctaggagcagcatcttcaacagcagcagcagatgatgtccgctgtttgattggatttattgttgactgcccacagcctaatcaggttgcaagggtgttgcacctcatatataggttgaatgtacaacctaacatttctagggccaacttattttctcaatccttcatcactagtggtggtgtggaagcactacttgttcttttacaacgggaagctaaagtgggtaacaaaaatattttggatcattctagtgcaagtgaaaataatgtgcccaaggatggaagttccaacagaaaagctgatagtgctgacacaagttgtcaggttgatgaaaatcaatcagctgaacgtcatgaaactgtcttccatgaagaagccattgaacatgaagccacaaatgcaaaagatatgctggactcaaatattggaagtaaagtgcctggttctgagaatgggctcttgaagaacctgggtggcattagcttctcaattacttctgataatgtccggaataatgtttacaatgttgacaaaggtgatggaattgttgttggcattattcacattcttggtgctctaattgggtcaggtcacctgaaatttgattctggagctggaagtgcaaatatacctggtggtagtcagaccacacttaatgaagaaggaaatactatgtcagaagatagagtatcattgttactttttgcattgcaaaaggcattccaagcagccccaaggaggcttatgacggcaaatgtctatatggctttgatttctgctgtgattaatgtttcatcagctgatgaaagtcttaatctttatgattctggtcaccgttttgaacatatccaacttttactggttctacttcgctcgcttccatatgcatcgagggcattccaagctcgtgcaatacaggatattctgtttttggcttgtagtcatctagataacagaactacaatgacctcgatttcagagtggccagaatggattttggaggttttgatttcgaaccatgaaatggacacaaagaaaaatgctgatggtgtaagcattggtgagattgaagacctcatacacaattttctgattataatgctggagcattcaatgcgacaaaaagatgggtggaaggatgtggaggcaacaattcattgtgcggagtggctctcaatagttggaggatctagcactggagaccaaaggatcaggcgtgaagaatcattacctatttttaaaaggagattgttgggtgacttgcttgatttttctgccagggagcttcaagttcagcagaccgaagtaattgcagcagctgcagctggtgttgcagctgagggtttgtctcctgaagaagcaaaaattcaagcagagaatgctgctcatctctcagtagcactagcagagaatgcaatagttattctgatgcttgtggaagatcatctgagatcacaagctcaacatttttgcacatcccttacaggtgatagcatcacatcgtccacatcaatgacttcattggctgccagtcggtcaaattctttgagcacagctggtaaagaacccatggctgctggggtctcaagacgggcatctttgtccagtgatgctggtggccttcctctggatttgcttacttctatggctgattcaaatggacaaatctctgctgccgtgatggaacgtcttacagcagcaacagcagctgaaccttatgattctgtcaagcatgcatttgtgtcttatgggagctgcataactgatcttggagaaagttggaagtaccgaagccgtttgtggtatggtgttggcattccacccaaatctgatatatttggtggtggtggaagtggttgggaatcttggagatctattctagagaaggattcaaatgggatttggattgaatttccacttgtgaagaaatcagttgctgtgctgcaggcacttcttttagatgaatctggacttggtggtggtcttggtattggagggggatctggccctggtatgggggttatgactgccctctatcagttgctagatagcgatcaaccatttctttgcatgctcagaatggttcttgtttcgatgagggaggacgacaatggtgaaggcgatgcttttacgaaagatgttagcataaaggatgtggtatcagaaggaatgggccaccaggctggaagtgtgatgccatttgatggcaacagttattcatctccaagaaaacctcgatctgctcttctttggagtgtgcttggccccatccttaatatgccaataacagagtctaagagacagagagtgttggttgcttcctctattctctactcagagggacaggaaacccctaaggaaacaatacattgagctgattttaccaccgtttgtagcaattcttagaagatggcgaccccttttggctggtattcatgagcttacttcttcagatggacaaaatccactaattgctgatgatcgtgctttggcggcagatgcattacctgtcgaggcttctcttttgatgatatcgcctggttgggctgctgcttttgcatcgccaccagttgcaatggcattggccatgatggctgctggtgcctcaggaacagaaacaagaacacctcctaggaataccttgaataggcgtgacaaagcattgcctgagcgcaaggcagcagcaaaactacagactttctcgagtttccagatgcctatggaaacagcatctaacaagcctgggtccaccctgaaggacaaggcagcagcaaaagctgccgcattggcagccgctcgtgaccttgaacgaactgctaagattggttcaagaaggggccttagtgctgtagcaatggcaacatcaggacaaaggaggagttcgggtgacatcgaacgagcaaagaggtggaatacgtcagaagctatgagtgctgcttgggtggagtgtctgcaatcagatgattccaaatcagttgtgggaagggatttttcagccctttcatacaaatatgtcgcagtacttgtttcttgtttggccttagcacgaaacttacaacgagctgagatggagaggcaaacactagttgatgtgttaattcggcatcgcgcctcaactgggcttcgagcatggcggcatcttcttcattgcctaacagagatgggtagactatatggaccttttgaacatctgtgcactcctgatcgtgttttctggaaattagattttactgaaagctcttcaaggatgagaagatttgtgaaaagaaattacaagggatgtgatcatttaggtgcagctgctgattatgaggaccggaagcttcttaatacttctgcacagtcaaatgaacataactctgaggatgctaattcttcattaacaagcactcttccatcatctgcttctgtaattatggctgatgccatgtcgatgaatgacagaaatgtggaaaatgagcagttagaaactgacactactcgcagcagtgttgatgacgatcagcttcaacattcttcagcagctgatcaacaatcggtaaaaggatcgataggttcaagaacttctgacatttgtgctgatcgaaatttggttaggtctacagttcttgcacctagttatgtgcctagcgaagctgatgagagaattattgttgaactgccatcattaatggtgcgaccattgaaggtggttcgaggaacattccaagtaacttcaaagaggattaacttcataattgatgagcgttcaaatgacagtaacattgatgatgctgcatctactagtggccaatgtgatcaacaagataaagatcgaagctggttggtctcatcactttatcagatatatagcagacgatacttgctacgccgaagtgctttggaattattcatggtagataggtcgaatttcttttttgactttgcggatattgatgcccgtaaaaacgcttatcgggccattgttcataccaaacctcctaacttgaatgacatctttttagctacccagagagctgagcagattcttaaaagaactcagttgatggagcgctgggctaattgggagatcaacaattttgagtacttaatggaacttaacacactggctgggcgcagttacaatgacattactcagtaccctgtttttccctgggtagtagcagattacaaatcccgagtgttgaatctggatgaccctttgtcgtatcgagatctttcaaagccaattggagcactaaaccctgaacgtctaaagaagttccaagaacggtactctacattcgaggatccaatcataccaaagtttcattatggttcacattactccagtgctggcacggtcttgtattaccttttcagagtggagccttttacaacactgtctatacaactgcaagacggcaaatttgaccacgctgatcgcatgttttctgatctttctggtacatgggatagtgttcttgaagacatgagtgatgtaaaagagctagtacccgagatgttttacctccctgaggtatttaccaacataaatggcattgactttgggacaactcaacttggagggaagctagattccgtagaattgcctccctgggctgaaaatcatgtggattttgtccataaacatcggaaggctcttgagagtgagcacgtctctgctcatttgcatgagtggattgatctaatttttggatataaacagaggggcaaagaagcgataatggcaaacaatgtattcttctacataacatatgaggggactgttgacattgacaaaattacaaacccagtggatcggcgagctacacaagatcaaatagcttactttggacaaacaccatctcaactgctgactgtacctcacatgaagaggaagccactggcggaggtcttacaactacagacaatattccgaaatccaagtgaacttaaatcatatgtgcttccacattcagatcgttgcaatgttcctgccagtgctatgcttgtatcaaacgactctattgtagttgttgatgtaaatgccccagcagcacatgtggcacttcaccaatggcaggctaatactccagatggtcagggaacacctttccttttccatcatggtagaaattccacaaattcaaccagtggcgcactcatgcgcattttcaaaggatctgctggttctgcggaagattatgggttcccaagggctatagcatttgctgcttctgcaatccgcagttcagcagttgttgctgtgacatgtgacaaagagataattactggtggccacgttgatggttcattgaagttgatatccctagatggagcgaagacaattgaaactgcttctgggcatattgctccagtgacatgccttgcgctgtcacctgatagcaactaccttgtgacagggtctagagataccacagttatactctggaggattcatcagacaggctcctcacataagaaaaatgctcaagaacctccaccgactacaccaacgacaccacgcagtcctctctctggcagcactagcaccatgagcagcctctcagaaacaaagagacgtcgcgttgaaggtccaatgcatgtaatgagaggacatcttggggaagtaacctgctgctcggttagtccagacttaggacttgttgcttcctcatcaaatgcaacaggcattcttctgcattccttacgcacaggcaggctgataaggaggcttgatgtcgatgaggcacatgcaatatgcttatcttctcaaggaatcattttggtttggaatggaacaaagaaaacattatctaccttcactgtcaatggactccctattgctaactcagttctgttgcctttctctggacaagttagttgcatcgagatttctacagatggccattttgctttatttggaacatctttgttcaacaactacaagtgtgataacagtactgaaactggggatcatgagcttggacccaatggcactgatgatgtatcaaaaaattctgaacaatctgttcacgcgccttcaatctgctttgttgacctgcatacactgaaggtttttcatactctgaagctggcaaagggccaggacatcacagcaattgctctaaacaaagagaacacaaatcttttagtttctactgctgataattttttttatagtctttactgatcccgctgtaagcatcctcgatac

SEQ ID NO: 19737 - DNA, 4003 bp, Zea Mays
aaggaaatccctcctctcttgccggccgtgggcaaagccctacggccggcctccccagcgccttctaaccctagcctcaagttctctctctagatcagccacgacgccctgcgccgtgcacagcctccttgcctccaccggcgacaacgcagtcgccacccccttctccctcccctcgcatgcagctctaacccataaacagtacccgtgggactgtagtgcccccagccatccataacaccacacctcatatagatattcaagacaaacattgtgccatttagcatgatagtccttatgagaaagttttagaaaaaaggcttctcttttgatgatatcgcctggttgggctgctgcttttgcatcgccaccagttgcaatggcattggccatgatggctgctggtgcctcaggaacagaaacaagaacacctcctaggaataccttgaataggcgtgacaaagcattgcctgagcgcaaggcagcagcaaaactacagactttctcgagtttccagatgcctatggaaacagcatctaacaagcctgggtccaccctgaaggacaaggcagcagcaaaagctgccgcattggcagccgctcgtgaccttgaacgaactgctaagattggttcaagaaggggccttagtgctgtagcaatggcaacatcaggacaaaggaggagttcgggtgacatcgaacgagcaaagaggtggaatacgtcagaagctatgagtgctgcttgggtggagtgtctgcaatcagatgattccaaatcagttgtgggaagggatttttcagccctttcatacaaatatgtcgcagtacttgtttcttgtttggccttagcacgaaacttacaacgagctgagatggagaggcaaacactagttgatgtgttaattcggcatcgcgcctcaactgggcttcgagcatggcggcatcttcttcattgcctaacagagatgggtagactatatggaccttttgaacatctgtgcactcctgatcgtgttttctggaaattagattttactgaaagctcttcaaggatgagaagatttgtgaaaagaaattacaagggatgtgatcatttaggtgcagctgctgattatgaggaccggaagcttcttaatacttctgcacagtcaaatgaacataactctgaggatgctaattcttcattaacaagcactcttccatcatctgcttctgtaattatggctgatgccatgtcgatgaatgacagaaatgtggaaaatgagcagttagaaactgacactactcgcagcagtgttgatgacgatcagcttcaacattcttcagcagctgatcaacaatcggtaaaaggatcgataggttcaagaacttctgacatttgtgctgatcgaaatttggttaggtctacagttcttgcacctagttatgtgcctagcgaagctgatgagagaattattgttgaactgccatcattaatggtgcgaccattgaaggtggttcgaggaacattccaagtaacttcaaagaggattaacttcataattgatgagcgttcaaatgacagtaacattgatgatgctgcatctactagtggccaatgtgatcaacaagataaagatcgaagctggttggtctcatcactttatcagatatatagcagacgatacttgctacgccgaagtgctttggaattattcatggtagataggtcgaatttcttttttgactttgcggatattgatgcccgtaaaaacgcttatcgggccattgttcataccaaacctcctaacttgaatgacatctttttagctacccagagagctgagcagattcttaaaagaactcagttgatggagcgctgggctaattgggagatcaacaattttgagtacttaatggaacttaacacactggctgggcgcagttacaatgacattactcagtaccctgtttttccctgggtagtagcagattacaaatcccgagtgttgaatctggatgaccctttgtcgtatcgagatctttcaaagccaattggagcactaaaccctgaacgtctaaagaagttccaagaacggtactctacattcgaggatccaatcataccaaagtttcattatggttcacattactccagtgctggcacggtcttgtattaccttttcagagtggagccttttacaacactgtctatacaactgcaagacggcaaatttgaccacgctgatcgcatgttttctgatctttctggtacatgggatagtgttcttgaagacatgagtgatgtaaaagagctagtacccgagatgttttacctccctgaggtatttaccaacataaatggcattgactttgggacaactcaacttggagggaagctagattccgtagaattgcctccctgggctgaaaatcatgtggattttgtccataaacatcggaaggctcttgagagtgagcacgtctctgctcatttgcatgagtggattgatctaatttttggatataaacagaggggcaaagaagcgataatggcaaacaatgtattcttctacataacatatgaggggactgttgacattgacaaaattacaaacccagtggatcggcgagctacacaagatcaaatagcttactttggacaaacaccatctcaactgctgactgtacctcacatgaagaggaagccactggcggaggtcttacaactacagacaatattccgaaatccaagtgaacttaaatcatatgtgcttccacattcagatcgttgcaatgttcctgccagtgctatgcttgtatcaaacgactctattgtagttgttgatgtaaatgccccagcagcacatgtggcacttcaccaatggcaggctaatactccagatggtcagggaacacctttccttttccatcatggtagaaattccacaaattcaaccagtggcgcactcatgcgcattttcaaaggatctgctggttctgcggaagattatgggttcccaagggctatagcatttgctgcttctgcaatccgcagttcagcagttgttgctgtgacatgtgacaaagagataattactggtggccacgttgatggttcattgaagttgatatccctagatggagcgaagacaattgaaactgcttctgggcatattgctccagtgacatgccttgcgctgtcacctgatagcaactaccttgtgacagggtctagagataccacagttatactctggaggattcatcagacaggctcctcacataagaaaaatgctcaagaacctccaccgactacaccaacgacaccacgcagtcctctctctggcagcactagcaccatgagcagcctctcagaaacaaagagacgtcgcgttgaaggtccaatgcatgtaatgagaggacatcttggggaagtaacctgctgctcggttagtccagacttaggacttgttgcttcctcatcaaatgcaacaggcattcttctgcattccttacgcacaggcaggctgataaggaggcttgatgtcgatgaggcacatgcaatatgcttatcttctcaaggaatcattttggtttggaatggaacaaagaaaacattatctaccttcactgtcaatggactccctattgctaactcagttctgttgcctttctctggacaagttagttgcatcgagatttctacagatggccattttgctttatttggaacatctttgttcaacaactacaagtgtgataacagtactgaaactggggatcatgagcttggacccaatggcactgatgatgtatcaaaaaattctgaacaatctgttcacgcgccttcaatctgctttgttgacctgcatacactgaaggtttttcatactctgaagctggcaaagggccaggacatcacagcaattgctctaaacaaagagaacacaaatcttttagtttctactgctgataattttttttatagtctttactgatcccgctgtaagcatcctcgatac

SEQ ID NO: 19738 - DNA, 4069 bp, Zea Mays
aggaaatccctcctctcttgccggccgtgggcaaagccctacggccggcctccccagcgccttctaaccctagcctcaagttctctctctagatcagccacgacgccctgcgccgtgcacagcctccttgcctccaccggcgacaacgcagtcgccacccccttctccctcccctcgcatgcagctctaacccataaacagtacccgtgggactgtagtgcccccagccatccataacaccacacctcatataggcttaaagagggtggtttaaggaacatttaaatttgacgtggttgcaaacaacacaaaacttgtagtatattcaagacaaacattgtgccatttagcatgatagtccttatgagaaagttttagaaaaaaggcttctcttttgatgatatcgcctggttgggctgctgcttttgcatcgccaccagttgcaatggcattggccatgatggctgctggtgcctcaggaacagaaacaagaacacctcctaggaataccttgaataggcgtgacaaagcattgcctgagcgcaaggcagcagcaaaactacagactttctcgagtttccagatgcctatggaaacagcatctaacaagcctgggtccaccctgaaggacaaggcagcagcaaaagctgccgcattggcagccgctcgtgaccttgaacgaactgctaagattggttcaagaaggggccttagtgctgtagcaatggcaacatcaggacaaaggaggagttcgggtgacatcgaacgagcaaagaggtggaatacgtcagaagctatgagtgctgcttgggtggagtgtctgcaatcagatgattccaaatcagttgtgggaagggatttttcagccctttcatacaaatatgtcgcagtacttgtttcttgtttggccttagcacgaaacttacaacgagctgagatggagaggcaaacactagttgatgtgttaattcggcatcgcgcctcaactgggcttcgagcatggcggcatcttcttcattgcctaacagagatgggtagactatatggaccttttgaacatctgtgcactcctgatcgtgttttctggaaattagattttactgaaagctcttcaaggatgagaagatttgtgaaaagaaattacaagggatgtgatcatttaggtgcagctgctgattatgaggaccggaagcttcttaatacttctgcacagtcaaatgaacataactctgaggatgctaattcttcattaacaagcactcttccatcatctgcttctgtaattatggctgatgccatgtcgatgaatgacagaaatgtggaaaatgagcagttagaaactgacactactcgcagcagtgttgatgacgatcagcttcaacattcttcagcagctgatcaacaatcggtaaaaggatcgataggttcaagaacttctgacatttgtgctgatcgaaatttggttaggtctacagttcttgcacctagttatgtgcctagcgaagctgatgagagaattattgttgaactgccatcattaatggtgcgaccattgaaggtggttcgaggaacattccaagtaacttcaaagaggattaacttcataattgatgagcgttcaaatgacagtaacattgatgatgctgcatctactagtggccaatgtgatcaacaagataaagatcgaagctggttggtctcatcactttatcagatatatagcagacgatacttgctacgccgaagtgctttggaattattcatggtagataggtcgaatttcttttttgactttgcggatattgatgcccgtaaaaacgcttatcgggccattgttcataccaaacctcctaacttgaatgacatctttttagctacccagagagctgagcagattcttaaaagaactcagttgatggagcgctgggctaattgggagatcaacaattttgagtacttaatggaacttaacacactggctgggcgcagttacaatgacattactcagtaccctgtttttccctgggtagtagcagattacaaatcccgagtgttgaatctggatgaccctttgtcgtatcgagatctttcaaagccaattggagcactaaaccctgaacgtctaaagaagttccaagaacggtactctacattcgaggatccaatcataccaaagtttcattatggttcacattactccagtgctggcacggtcttgtattaccttttcagagtggagccttttacaacactgtctatacaactgcaagacggcaaatttgaccacgctgatcgcatgttttctgatctttctggtacatgggatagtgttcttgaagacatgagtgatgtaaaagagctagtacccgagatgttttacctccctgaggtatttaccaacataaatggcattgactttgggacaactcaacttggagggaagctagattccgtagaattgcctccctgggctgaaaatcatgtggattttgtccataaacatcggaaggctcttgagagtgagcacgtctctgctcatttgcatgagtggattgatctaatttttggatataaacagaggggcaaagaagcgataatggcaaacaatgtattcttctacataacatatgaggggactgttgacattgacaaaattacaaacccagtggatcggcgagctacacaagatcaaatagcttactttggacaaacaccatctcaactgctgactgtacctcacatgaagaggaagccactggcggaggtcttacaactacagacaatattccgaaatccaagtgaacttaaatcatatgtgcttccacattcagatcgttgcaatgttcctgccagtgctatgcttgtatcaaacgactctattgtagttgttgatgtaaatgccccagcagcacatgtggcacttcaccaatggcaggctaatactccagatggtcagggaacacctttccttttccatcatggtagaaattccacaaattcaaccagtggcgcactcatgcgcattttcaaaggatctgctggttctgcggaagattatgggttcccaagggctatagcatttgctgcttctgcaatccgcagttcagcagttgttgctgtgacatgtgacaaagagataattactggtggccacgttgatggttcattgaagttgatatccctagatggagcgaagacaattgaaactgcttctgggcatattgctccagtgacatgccttgcgctgtcacctgatagcaactaccttgtgacagggtctagagataccacagttatactctggaggattcatcagacaggctcctcacataagaaaaatgctcaagaacctccaccgactacaccaacgacaccacgcagtcctctctctggcagcactagcaccatgagcagcctctcagaaacaaagagacgtcgcgttgaaggtccaatgcatgtaatgagaggacatcttggggaagtaacctgctgctcggttagtccagacttaggacttgttgcttcctcatcaaatgcaacaggcattcttctgcattccttacgcacaggcaggctgataaggaggcttgatgtcgatgaggcacatgcaatatgcttatcttctcaaggaatcattttggtttggaatggaacaaagaaaacattatctaccttcactgtcaatggactccctattgctaactcagttctgttgcctttctctggacaagttagttgcatcgagatttctacagatggccattttgctttatttggaacatctttgttcaacaactacaagtgtgataacagtactgaaactggggatcatgagcttggacccaatggcactgatgatgtatcaaaaaattctgaacaatctgttcacgcgccttcaatctgctttgttgacctgcatacactgaaggtttttcatactctgaagctggcaaagggccaggacatcacagcaattgctctaaacaaagagaacacaaatcttttagtttctactgctgataattttttttatagtctttactgatcccgctgtaagcatcctcgatac

SEQ ID NO: 19739 - DNA, 3342 bp, Zea Mays
cttatgagaaagttttagaaaaaaggcttctcttttgatgatatcgcctggttgggctgctgcttttgcatcgccaccagttgcaatggcattggccatgatggctgctggtgcctcaggaacagaaacaagaacacctcctaggaataccttgaataggcgtgacaaagcattgcctgagcgcaaggcagcagcaaaactacagactttctcgagtttccagatgcctatggaaacagcatctaacaagcctgggtccaccctgaaggacaaggcagcagcaaaagctgccgcattggcagccgctcgtgaccttgaacgaactgctaagattggttcaagaaggggccttagtgctgtagcaatggcaacatcaggacaaaggaggagttcgggtgacatcgaacgagcaaagaggtggaatacgtcagaagctatgagtgctgcttgggtggagtgtctgcaatcagatgattccaaatcagttgtgggaagggatttttcagccctttcatacaaatatgtcgcagtacttgtttcttgtttggccttagcacgaaacttacaacgagctgagatggagaggcaaacactagttgatgtgttaattcggcatcgcgcctcaactgggcttcgagcatggcggcatcttcttcattgcctaacagagatgggtagactatatggaccttttgaacatctgtgcactcctgatcgtgttttctggaaattagattttactgaaagctcttcaaggatgagaagatttgtgaaaagaaattacaagggatgtgatcatttaggtgcagctgctgattatgaggaccggaagcttcttaatacttctgcacagtcaaatgaacataactctgaggatgctaattcttcattaacaagcactcttccatcatctgcttctgtaattatggctgatgccatgtcgatgaatgacagaaatgtggaaaatgagcagttagaaactgacactactcgcagcagtgttgatgacgatcagcttcaacattcttcagcagctgatcaacaatcggtaaaaggatcgataggttcaagaacttctgacatttgtgctgatcgaaatttggttaggtctacagttcttgcacctagttatgtgcctagcgaagctgatgagagaattattgttgaactgccatcattaatggtgcgaccattgaaggtggttcgaggaacattccaagtaacttcaaagaggattaacttcataattgatgagcgttcaaatgacagtaacattgatgatgctgcatctactagtggccaatgtgatcaacaagataaagatcgaagctggttggtctcatcactttatcagatatatagcagacgatacttgctacgccgaagtgctttggaattattcatggtagataggtcgaatttcttttttgactttgcggatattgatgcccgtaaaaacgcttatcgggccattgttcataccaaacctcctaacttgaatgacatctttttagctacccagagagctgagcagattcttaaaagaactcagttgatggagcgctgggctaattgggagatcaacaattttgagtacttaatggaacttaacacactggctgggcgcagttacaatgacattactcagtaccctgtttttccctgggtagtagcagattacaaatcccgagtgttgaatctggatgaccctttgtcgtatcgagatctttcaaagccaattggagcactaaaccctgaacgtctaaagaagttccaagaacggtactctacattcgaggatccaatcataccaaagtttcattatggttcacattactccagtgctggcacggtcttgtattaccttttcagagtggagccttttacaacactgtctatacaactgcaagacggcaaatttgaccacgctgatcgcatgttttctgatctttctggtacatgggatagtgttcttgaagacatgagtgatgtaaaagagctagtacccgagatgttttacctccctgaggtatttaccaacataaatggcattgactttgggacaactcaacttggagggaagctagattccgtagaattgcctccctgggctgaaaatcatgtggattttgtccataaacatcggaaggctcttgagagtgagcacgtctctgctcatttgcatgagtggattgatctaatttttggatataaacagaggggcaaagaagcgataatggcaaacaatgtattcttctacataacatatgaggggactgttgacattgacaaaattacaaacccagtggatcggcgagctacacaagatcaaatagcttactttggacaaacaccatctcaactgctgactgtacctcacatgaagaggaagccactggcggaggtcttacaactacaggtggccacgttgatggttcattgaagttgatatccctagatggagcgaagacaattgaaactgcttctgggcatattgctccagtgacatgccttgcgctgtcacctgatagcaactaccttgtgacagggtctagagataccacagttatactctggaggattcatcagacaggctcctcacataagaaaaatgctcaagaacctccaccgactacaccaacgacaccacgcagtcctctctctggcagcactagcaccatgagcagcctctcagaaacaaagagacgtcgcgttgaaggtccaatgcatgtaatgagaggacatcttggggaagtaacctgctgctcggttagtccagacttaggacttgttgcttcctcatcaaatgcaacaggcattcttctgcattccttacgcacaggcaggctgataaggaggcttgatgtcgatgaggcacatgcaatatgcttatcttctcaaggaatcattttggtttggaatggaacaaagaaaacattatctaccttcactgtcaatggactccctattgctaactcagttctgttgcctttctctggacaagttagttgcatcgagatttctacagatggccattttgctttatttggaacatctttgttcaacaactacaagtgtgataacagtactgaaactggggatcatgagcttggacccaatggcactgatgatgtatcaaaaaattctgaacaatctgttcacgcgccttcaatctgctttgttgacctgcatacactgaaggtttttcatactctgaagctggcaaagggccaggacatcacagcaattgctctaaacaaagagaacacaaatcttttagtttctactgctgataattttttttatagtctttactgatcccgctgtaagcatcctcgatac

SEQ ID NO: 19740 - DNA, 3701 bp, Zea Mays
agaaagttttagaaaaaaggcttctcttttgatgatatcgcctggttgggctgctgcttttgcatcgccaccagttgcaatggcattggccatgatggctgctggtgcctcaggaacagaaacaagaacacctcctaggaataccttgaataggcgtgacaaagcattgcctgagcgcaaggcagcagcaaaactacagactttctcgagtttccagatgcctatggaaacagcatctaacaagcctgggtccaccctgaaggacaaggcagcagcaaaagctgccgcattggcagccgctcgtgaccttgaacgaactgctaagattggttcaagaaggggccttagtgctgtagcaatggcaacatcaggacaaaggaggagttcgggtgacatcgaacgagcaaagaggtggaatacgtcagaagctatgagtgctgcttgggtggagtgtctgcaatcagatgattccaaatcagttgtgggaagggatttttcagccctttcatacaaatatgtcgcagtacttgtttcttgtttggccttagcacgaaacttacaacgagctgagatggagaggcaaacactagttgatgtgttaattcggcatcgcgcctcaactgggcttcgagcatggcggcatcttcttcattgcctaacagagatgggtagactatatggaccttttgaacatctgtgcactcctgatcgtgttttctggaaattagattttactgaaagctcttcaaggatgagaagatttgtgaaaagaaattacaagggatgtgatcatttaggtgcagctgctgattatgaggaccggaagcttcttaatacttctgcacagtcaaatgaacataactctgaggatgctaattcttcattaacaagcactcttccatcatctgcttctgtaattatggctgatgccatgtcgatgaatgacagaaatgtggaaaatgagcagttagaaactgacactactcgcagcagtgttgatgacgatcagcttcaacattcttcagcagctgatcaacaatcggtaaaaggatcgataggttcaagaacttctgacatttgtgctgatcgaaatttggttaggtctacagttcttgcacctagttatgtgcctagcgaagctgatgagagaattattgttgaactgccatcattaatggtgcgaccattgaaggtggttcgaggaacattccaagtaacttcaaagaggattaacttcataattgatgagcgttcaaatgacagtaacattgatgatgctgcatctactagtggccaatgtgatcaacaagataaagatcgaagctggttggtctcatcactttatcagatatatagcagacgatacttgctacgccgaagtgctttggaattattcatggtagataggtcgaatttcttttttgactttgcggatattgatgcccgtaaaaacgcttatcgggccattgttcataccaaacctcctaacttgaatgacatctttttagctacccagagagctgagcagattcttaaaagaactcagttgatggagcgctgggctaattgggagatcaacaattttgagtacttaatggaacttaacacactggctgggcgcagttacaatgacattactcagtaccctgtttttccctgggtagtagcagattacaaatcccgagtgttgaatctggatgaccctttgtcgtatcgagatctttcaaagccaattggagcactaaaccctgaacgtctaaagaagttccaagaacggtactctacattcgaggatccaatcataccaaagtttcattatggttcacattactccagtgctggcacggtcttgtattaccttttcagagtggagccttttacaacactgtctatacaactgcaagacggcaaatttgaccacgctgatcgcatgttttctgatctttctggtacatgggatagtgttcttgaagacatgagtgatgtaaaagagctagtacccgagatgttttacctccctgaggtatttaccaacataaatggcattgactttgggacaactcaacttggagggaagctagattccgtagaattgcctccctgggctgaaaatcatgtggattttgtccataaacatcggaaggctcttgagagtgagcacgtctctgctcatttgcatgagtggattgatctaatttttggataaacagaggggcaaagaagcgataatggcaaacaatgtattcttctacataacatatgaggggactgttgacattgacaaaattacaaacccagtggatcggcgagctacacaagatcaaatagcttactttggacaaacaccatctcaactgctgactgtacctcacatgaagaggaagccactggcggaggtcttacaactacagacaatattccgaaatccaagtgaacttaaatcatatgtgcttccacattcagatcgttgcaatgttcctgccagtgctatgcttgtatcaaacgactctattgtagttgttgatgtaaatgccccagcagcacatgtggcacttcaccaatggcaggctaatactccagatggtcagggaacacctttccttttccatcatggtagaaattccacaaattcaaccagtggcgcactcatgcgcattttcaaaggatctgctggttctgcggaagattatgggttcccaagggctatagcatttgctgcttctgcaatccgcagttcagcagttgttgctgtgacatgtgacaaagagataattactggtggccacgttgatggttcattgaagttgatatccctagatggagcgaagacaattgaaactgcttctgggcatattgctccagtgacatgccttgcgctgtcacctgatagcaactaccttgtgacagggtctagagataccacagttatactctggaggattcatcagacaggctcctcacataagaaaaatgctcaagaacctccaccgactacaccaacgacaccacgcagtcctctctctggcagcactagcaccatgagcagcctctcagaaacaaagagacgtcgcgttgaaggtccaatgcatgtaatgagaggacatcttggggaagtaacctgctgctcggttagtccagacttaggacttgttgcttcctcatcaaatgcaacaggcattcttctgcattccttacgcacaggcaggctgataaggaggcttgatgtcgatgaggcacatgcaatatgcttatcttctcaaggaatcattttggtttggaatggaacaaagaaaacattatctaccttcactgtcaatggactccctattgctaactcagttctgttgcctttctctggacaagttagttgcatcgagatttctacagatggccattttgctttatttggaacatctttgttcaacaactacaagtgtgataacagtactgaaactggggatcatgagcttggacccaatggcactgatgatgtatcaaaaaattctgaacaatctgttcacgcgccttcaatctgctttgttgacctgcatacactgaaggtttttcatactctgaagctggcaaagggccaggacatcacagcaattgctctaaacaaagagaacacaaatcttttagtttctactgctgataattttttttatagtctttactgatcccgctgtaagcatcctcgatac

SEQ ID NO: 19741 - DNA, 5045 bp, Zea Mays
gttgattcttgctaagagcctctccttgattcctaaatccagcatacccttgagagtcttttctttagtcgggtaagtcttgctgagtaattccatactcagggttttattccctgttgtttttcaggttctaaccttgtgttgccgtgatggtgttaagtgccggtgggctcggccttcttataagtctaagtaactcttctatacttcttattaaggatggtcacttgagctagcatatattttaaacttataaataatttataacagtttaaagttatttctttgaatcacctttgtaatcactccgatcatacaaagtaaaatttttgtaacttgtaaaatttggtaataagatttccgctgcaaagatgttgatgtgtgtgatttgtgtttacttaatctcgcggttctggttgtaagtggtttatccgatgtccttggggcaatcggacggatcctgttaagttatctggtgcacatgcatggccatctgaggtctttaggacaaggataggtgcatgtgggcccgataccttgggaggttctgccacatccgctgtcgataatccagcttgagcccccggatgcataaacctgcaaggcaaatttaggcttgggccttaggtacccaactcatgttgggtcctacaaggttagttacaatagtcttagggacccaaatgcaagttttgtctcccttacatttggcccctaacttcttagcaattaccttcttaccctttctacaaatagcaaaggaagcattgcaagcataataaattgtagaaggttcattcattactttcctaggaacatgaacaacattttttctaggcatagcatttttcctagcaacatttctatcatgcataatagaagaactagaagcaaccatggcatgagaatcaaaagcatcataacttctagaagcattcctagaatgtctcctatcatgatacatgaaagcatggttcttatgagcactactagccataggggccttccctttctccttggcggagatggaaaccttatggcttgttaagttcttgacctctctcttgaagccaagaccatccttaattgaggggtgtctaccaatcgtgtaggcatcccttgcaaattttattttatcaatctcactcttgctagtcttaagttgggcattaagactagccaattcatcattcaatttagaaattgaaactaggtgtttactacaagcatcaacatcaaaatctttacacctattacaaattgtaatatgctctacacaagatgttgatttatttgctatttctaacttagcattcaaatcatcatttatgctctttaagctagaaatagagtcatggcatgtagacaattcactagaaagcatttcattccttttaatttctaaagcaagggatttttgtgcctctacaaacttatcatgttcttcatataaaagatcctcttgcttttctaataacctattcttatcattcaaggcatcaattaattcattaattttatcaaccttggttctatctaggcccttgaataaacatgaataatctatttcatcatcatcactagactcatcctcacttgaagaagcataagtagtattccaagcacataccttcttctccttcgccatgaggcatgtgtgacgctcgttggggaagaggaccgatttgttgaaggcggtggcggcgagtccttcgttgtcggggtcggacgacgaacaatccgagtcccactccttgccgaggtgtgcctcgcccttagccttcttgtaagctttcttcttttccctcttgttcccttgttcctggtcactatcattgtcgggacagttagcgataaaatgaccaaccttaccacatttgaagcatgagcgcttccccttcgtcttgttcttgttaggctgccccttgcgtccctttagcgccgtcttgaagcgcttgatgatgagggccatctcttcatcattgagcccggccgcctcaacttgcgccaccttgctaggtagcgcctccttgctcctcgttgccttgagaggaatgggttgaggctcatggattggaccgttcaacgcatcgtccacgtatctcgcctccttgatcatcattctcccactcacaaacttcccaagtacttcttcgggtgacatcttggtgtacctaggattttcacgaatattgttcacaagatgtggatcaaggacagtaaaagaccttagcattaggcgaacgacgtcgtggtccgtccatcgcgtgcttccgtagctccttattttgttgatgagggtcttgagccagttgtatgtttgggttggctcctctccccttatcattgcaaatctcccaagctcgccctccaccaactccatcttggtgagcatggtgacgtcgttcccctcatgtgagatcctgagggtgtcccagatctgcttggcattgtccaagccgctcaccttattgtactcttccctgcacaaagatgctaaaaggacagtagtagcttgtgcatttttatggatttgttcatttataaacataggactatcagtactatcaaatttcattccactctcaacaatctcccatatgcttggatggagagagaataagtgactacgcattttgtgactccaaaatccgtagtcctccccatcaaagtgtggaggtttgccaagagggatggaaagcaaatgtgcatttgaactatgcagaatacgagaataatcgaaagagaagtttgaattaaccgtcttccttttctcgtagtcgttgtcgtcgtccttttgggaagaagaggactcgtcgctgtcgtcatagtagacgatttccttgatgcgccttgtcttcttcttcttcccatctttacgtttgtggcccgagcccgagtcggtaggcttgtcatccttcggctcgttgacgaaggactccttctccttatcgttgatcacaatccccttgcccttaggatccatctcttcgggctgttagtccctttcttgaagagaacgactctgataccaattgagagcacctagagggggggtgaataggtgatcctgggaaacttgaaaacttaatgccacaaaaacttggttaagcgttagcacaataatgccaagtggctagagaggagtcttagcaaaacacaataaccacaaagagatcaacacagagatggcacagtggtttatcccgtggttcggccaagtccaacgcttgcctactccacgttgtggcgtcccaacggacgagggttgcaatcaacccctctcaagcggtccaaggacccacttgaataccacggtgttttgctttgtatactataccccgcttgcgaggaatctccacaacttggagtctctcgcccttacactttgatgttcacaaagaagcacggagtaagggagggatgagcaatgcacacaagacacaaaatcagagtgacaacacgcacacaagtcgcaacaagagctcacaacacaacccgacgagttcacaactcaaatagagctctagatgctatcacaaagaatcaaatgcgcggaatcgaagtcttggtgctttggaatgcttagagaatgcttggtgtcctcctccatgcgtctaggggtcccttttatagccccaaggcagctaggagtcgttgagagcattccaggaaggcaatccttgccttcagtcgcctggcgcaccggacagtctggtgcaccactggacactgtccggtgcggatctctttccttatttggcgaagccgaccattgcagattcagagccgttggcgcaccggacactgtccggtgcacaccggacagtctggtgcccccttgtgaccgttggctcggccacgcgtcacgcgtggaatcctcggccgaccgttggcctggctgaccgttggctcaccggacagtccggtgcaccaccggacagtccggtgatttatagccgtacgccgttaatcatctcccgagagcgacgagttcgcctgtgaatggctcaccggacagtccggtacaccaccggacagtccggtgatttatagccgtacaccgccgtcgaagtcccgagagcagcaagttcgccagagccagcctggcgcaccagacactgtccggtgcaccaccggacactgtccggtgcacccagactgagcagactttggctgaacaaagccatctcttttccaattcgatttctcctgtttccagcacttagacacaatacattagttctcaaaacattgtactaagtctagaaacatacctttagacttgatttgcactttgtccatcacttggcatagattttcacttaagcacttgtgttggcactcaatcaccaaaatacttagaaatggcccaagggcacatttccctttcaatcacatcaattgcttttgtattatggctatcactttgtattatagggaacaaggcccatgacatttcagtggaaaactctatagtggaggcagtggggagcatccaagaggagccactgctggagcatcatatgtgcatgcagaaggatcagggctatatacgaagttactcgaccgaaagcttggctcttgtgtggggctccaacaagaattagtgagaattttgcactcttcttaatacctcgcgcgaccggggccttgcatgccattggtgcacagcagtgtgtgccctcttggccacatccagaaaagcagagtgagcttcgagaggagctcttgatgactcgattgctaagtgcttgtggtggttggagacggcgttagtagggtgtggtatttgtaagtggccgaaacgaagcgcgaagatgatgtgatcaacttgttagcacatgcatatgaggttgagatgaggattcaggacgccgatgatctgctggatgggttagaactagcgaacaagattgctgtagtggcggacgcaggttaaggtttgcggtttaccctactctattcgcgatctttgccataagccaaactaaggccctgtttgggaacaaagtttttgaaaactacagtttttgaaatactat

SEQ ID NO: 19742 - DNA, 2337 bp, Zea Mays
aagagcctctccttgattcctaaatccagcatacccttgagagtcttttctttagtcgggtaagtcttgctgagtaattccatactcagggttttattccctgttgtttttcaggttctaaccttgtgttgccgtgatggtgttaagtgccggtgggctcggccttcttataagtctaaggaacaaggcccatgacatttcagtggaaaactctatagtggaggcagtggggagcatccaagaggagccactgctggagcatcatatgtgcatgcagaaggatcagggctatatacgaagttactcgaccgaaagcttggctcttgtgtggggctccaacaagaattagtgagaattttgcactcttcttaatacctcggtaagaatactaaagtcaccgatgaaagtttgtatctctatcacactttaagctcatgtatttacatagtgctaccttggttatatgttataccttttgagcttaggtataaggtagtgaataggtttagaacttaattaggttgcaaaagttttttgtggtagaggtgtctattccgcttcctcggcggtcaccaatgctgctcaatcatttctgaaaatttgtatctctttcctgtcaatcctactatgctgctcattgcccaacatccaagtcgtatgtttccatctgatgttgcccccctttagcacctcttagactccactttgatgtttgatgatggttaggctccatccctatagaagacaatgattcaacatatatcgctttagctgttgctccagccatgtgtgttgctcatgtagggcaccacgaacacgctcgagtgagcatgactatagccatgactcttgggtctaatggttgtgggcttagggccctagcgacatgacatatcgttccctcgcgagccatggtttgctatcgaatcatcccttctaagaggctagggtcgcaccccgccttccatgttgtcatgtcattatactcttatagaattcatagttaatacttgtttcaaccaaacaacttctatctttcccacaaccgtcaactcacaacatcttcctcaacttgcaactagaatctaatttttagaaatttacaactcaaccaagcaaaaccttttgtatggatgattgactctagtgcaagcagaagactgttgattatatatccaagaggtaataataatctatgagaacactaatggacctttagggtaaaagtatctacatatacaaagagactaacatgctagaagtgatacacacatcttaactggtgtcgactctctccctgttgttgtgggttctcaaactaccatcgttctttcactcgctatgtgtgtggtgctagcacaccggcctcgcggtgattttatccctattgttagaatataagtaaatagtccattcatctctattaatttaagcttttggattgaactaattaactataaagagccagaggtctcgagcttgaatcctggttaacataattaaataaaataattggtgtttgctccaattccacatctgagccttgagagaagctcaacatgatgggctgttggaacataggtgaattattcacctatctctatcaatttaatcttttgggttgaactggttagtacatgcaactcaataccggtacatatagatactttggagacgttgttgttggatttatgaagttttgatcggtaatgaacgtgaagaccacggataaacatgttactactcctgatacgctaggacgtgtgactacttccactgcattcgcactcttttttctactatgttacgcatacaatgttaacaatctttaatcttatcttctaattgtatataaaatgtagtctatatatgctaacatatagtgcacatattttcttacatgaacgccacctggttcacgatgaggaacagcgcgaccggggccttgcatgccattggtgcacagcagtgtgtgccctcttggccacatccagaaaagcagagtgagcttcgagaggagctcttgatgactcgattgctaagtgcttgtggtggttggagacggcgttagtagggtgtggtatttgtaagtggccgaaacgaagcgcgaagatgatgtgatcaacttgttagcacatgcatatgaggttgagatgaggattcaggacgccgatgatctgctggatgggttagaactagcgaacaagattgctgtagtggcggacgcaggttaaggtttgcggtttaccctactctattcgcgatctttgccataagccaaactaaggccctgtttgggaacaaagtttttgaaaactacagtttttgaaatactat

SEQ ID NO: 19743 - DNA, 2137 bp, Zea Mays
gtcacgctcagctcggcagctcaacccagttaggtcagctgaaacaccgtgttcctcgtctcgcgtcttcttctactcctccctcgttcccgttgatgcgagcgaaacagatcaaaaaggagattcgagagagagaaaaaaaacaggaaacaaaaaaaatccaccgctcccgaggcacggcggcgtcgagcgcgcgacacctccggcggctccacagtgccggcgatcgagctccgcccgcccgcggatgctccgggctcggcgcagtaaggcccaggaatccacgctcgtagccagatctcggggtggtgctcggaagtggagttcgttcggtccctgcctccctggtggggatggggtggtccgccgggctgtggtggcttttggcggcggtgtgggtggtggtggcggcggctgcgacggcggagggtgaggtcgcggtcggggcggcgccgaggcggcacgcgtacgcgtcgatgatgtacatgggcacgccacgggactacgagttctacgtggccacgcgcgtcatgatgctgtccctgcgccggctcagccccaacgccgaccgcgtcgtcatcgcgtccctcgacgtcccgccgctctgggttcaggcactgaaaaatgacggggtaaaggtggtctctgtgaagaatttgaaaaatccttacgagaaacaagaaaatttcaacagacgattcaaattgactttaaacaagctgtatgcatggagcttggtttcatatgagcgagttgttatgcttgactctgacaacattttcctccaaaatactgatgagttatttcagtgtggtcagttctgtgctgtcttcatcaatccctgtatcttccatacaggtctttttgtgcttcagccctcaatggatgtttttaagaacatgctacatgagctagcggttggacgtgaaaacccagatggggcagaccaaggcttcctagctagttatttcccggacttgcttgatcagccaatgttccatccaccagctaatggtacaaaactttggggtacttatcgcctccccctaggctaccagatggatgcatcttactattatctgaagcttcgctggagtattccatgtggaccgaacagtgtgattacattcccaagcgctccatggtttaagccatggtactggtggtcttggcctgttttacctttggggctctcttggcatgaacaacgtcgtgaaaacctagggtattcatcggagataccactagtattaattcaggctgtactgtacattggagtcatagcagtgacccgacttgcgcggcctagcttgtcgaagatgtgctacaacagaagaatggagaaaaacactatgttcttgctctcccttctcagaatagtggcagcttggtccatacttgctgcctacaccatacccttcttcatcatcccaaggaccgtgcatccgctgcttggctggcccctctacttgctcggttctttctcactttcctccattgtgatcaacattttcttcctccacccgatcaccgtcctcacaacatggtttggattcatcggcgcactcgtggtgatggccttcccttggtatctaaatggcgtcgtcagggccttggcagtgtttgcgtatgcgttctgctgcgcgcccttgatctgggcttctctggtcaagacaatgagctccttgcaggtcctgatcgagagggatgcattcaggctcggagaacctaaccagaatgccgagttcacaaagctatactgagtaaatctgcagcctgggagcaagaggagttgtatcttgtggaacccatcaggaaaacctcaagaacccatggttgttgttgtcttgcacatgtaggtgacaatgacatacaggggaaattggtgcgggaactgaagaggaacggtctggggccagttcttagctattttgatttattgttcctcggaaaggccaagccatttttggctttgttttgtactgtaaatgatatgatcggtttcgtcaccaatgaagaagggttggaagttcagacggcatgatgttagaaacagtacttcgtttttaccgtggtataattgtgtggcttctcctgtacgttttatacccctttcgttttataactgctgttcctg

SEQ ID NO: 19744 - DNA, 1301 bp, Zea Mays
gaaacagatcaaaaaggagattcgagagagagaaaaaaaacaggaaacaaaaaaaatccaccgctcccgaggcacggcggcgtcgagcgcgcgacacctccggcggctccacagtgccggcgatcgagctccgcccgcccgcggatgctccgggctcggcgcagtaaggcccaggaatccacgctcgtagccagatctcggggtggtgctcggaagtggagttcgttcggtccctgcctccctggtggggatggggtggtccgccgggctgtggtggcttttggcggcggtgtgggtggtggtggcggcggctgcgacggcggagggtgaggtcgcggtcggggcggcgccgaggcggcacgcgtacgcgtcgatgatgtacatgggcacgccacgggactacgagttctacgtggccacgcgcgtcatgatgctgtccctgcgccggctcagccccaacgccgaccgcgtcgtcatcgcgtccctcgacgtcccgccgctctgggttcaggcactgaaaaatgacggggtaaaggtggtctctgtgaagaatttgaaaaatccttacgagaaacaagaaaatttcaacagacgattcaaattgactttaaacaagctgtatgcatggagcttggtttcatatgagcgagttgttatgcttgactctgacaacattttcctccaaaatactgatgagttatttcagtgtggtcagttctgtgctgtcttcatcaatccctgtatcttccatacaggtctttttgtgcttcagccctcaatggatgtttttaagaacatgctacatgagctagcggttggacgtgaaaacccagatggggcagaccaaggcttcctagctagttatttcccggacttgcttgatcagccaatgttccatccaccagctaatggtacaaaactttggggtacttatcgcctccccctaggctaccagatggatgcatcttactattatctgaagcttcgctggagtattccatgtggaccgaacagtgtgattacattcccaagcgctccatggtttaagccatggtactggtggtcttggcctgttttacctttggggctctcttggcatgaacaacgtcgtgaaaacctaggataaggatgtccacgttattatatcctgacgtggttggtaacatgtcatgaagaaaagcactctatcttctttagaataaagatgcattggggggagcattatgccattatcatgcctgtttgtcttttaggataaagttgcacaaggcaaaaaagttgtcatgctttttaaaatcttt

SEQ ID NO: 19745 - DNA, 961 bp, Zea Mays
gcggatcctagagacacgcacgcgacgtgggctcctcggagcgcgtgcctcagagtggccggagaagttttttgaagtggagatgaaggtgcgcgactatgaaattgaccagtatggtgttgtcaacaatgcaatctatgctagctactgccaacatggtcgtcacgagctgcttgagagcgtaggcatcagtgcagatgcagtggcgcgcagtggggaatccctggctctctctgagttgaacctcaagtactttgcccctttgaggagtggcgataagtttgttgttaaggtgaggcttgcaggcatcaaaggtgtacggatgatattcgaccacatcattacaaaactgcctaatcatgagctaattctggaggcaaaggcaacggctgtttgcctgaacaaagactactatcctacccgtattcctcgtgaactattgtccaagatgcagctcttcttacccgtggacagcagagggtcaaatgaagacgttaataatcggaataacagctgcaactaattctggaggcaaagacaagggctgtttgttcgaactgaagactaccatctcatctccaaaactgtttatgtcatccaagctgcagctcctcatcgaagaatatagtagaatccctccgttcttttttatttgtcgtggtttagttcaaaaatgaactagcggacaataaatattcgagaacggatgtagtagaatctagtcttggagactggcggctgcttggtcctgcagtgccaacgaaaaccacctatgtatctccatctcaggagcgctgtcatagaagagcacagtccatcttcattctttgtaactgttcacccgaaacatttgatccgttactgcagtcgtttggtacagaaagctcttcttgctctggaggaataatatgtgctatgtacatctgcttgttgtattaggaacatgaaaggaaattgtcgg

SEQ ID NO: 19746 - DNA, 967 bp, Zea Mays
aaaggggatctactaattttgcccatctcgtagcagtcactgcgcacacatccatagcagttagccggagaagttttttgaagtggagatgaaggtgcgcgactatgaaattgaccagtatggtgttgtcaacaatgcaatctatgctagctactgccaacatggtcgtcacgagctgcttgagagcgtaggcatcagtgcagatgcagtggcgcgcagtggggaatccctggctctctctgagttgaacctcaagtactttgcccctttgaggagtggcgataagtttgttgttaaggtgaggcttgcaggcatcaaaggtgtacggatgatattcgaccacatcattacaaaactgcctaatcatgagctaattctggaggcaaaggcaacggctgtttgcctgaacaaagactactatcctacccgtattcctcgtgaactattgtccaagatgcagctcttcttacccgtggacagcagagggtcaaatgaagacgttaataatcggaataacagctgcaactaattctggaggcaaagacaagggctgtttgttcgaactgaagactaccatctcatctccaaaactgtttatgtcatccaagctgcagctcctcatcgaagaatatagtagaatccctccgttcttttttatttgtcgtggtttagttcaaaaatgaactagcggacaataaatattcgagaacggatgtagtagaatctagtcttggagactggcggctgcttggtcctgcagtgccaacgaaaaccacctatgtatctccatctcaggagcgctgtcatagaagagcacagtccatcttcattctttgtaactgttcacccgaaacatttgatccgttactgcagtcgtttggtacagaaagctcttcttgctctggaggaataatatgtgctatgtacatctgcttgttgtattaggaacatgaaaggaaattgtcgg

SEQ ID NO: 19747 - DNA, 1088 bp, Zea Mays
gatcgatcgagctcttcagctaagaacgtgtagtacgtgccacgccactctagctacaggcctcgcacaatgcagcagcagatggccggcctcgttcatcatcaggccatcgggatggtgagcttcagctccggcgccaatgcccgccaccacgtggcggtgcacgccggccgggcgcgtctcggcagggtcacggcggctgcgcggcccaagtactgcccgctccggggcgcggctgccgtcgccgcccccttggccagcggccgcgagctgctcgaccaacacactcgccctagcaacaccacatcgagccagcagcttactaccaccgtcaggaaggacaagtttttcgagatcgagatggaggtgcgcgacgacgagcttgacgagtacggcgtcgtcaacaacgccatctacgccagctacctccatagcggtcgtgacgtggtgcttgagaagctgggcatcagcgtggactactggacatccacgggcaacgccatggctctttcagagctcaacctcaagtatttcgcgcctttgagggttcgtcgtgaaggtgaagcctgtccaaatcaaaggcgtgcggatgattgtggagcacatgatcgaggccctgccggatcgtaagctcgtcatggaaggcagagcgaccgtcgtttgcctcaacaaggacttccgtccaactcgggtattcccggagttagcagcaagagccaaggaagttttctcctgcaaggttgcataaacgacgacgactactactactagaggcgtaatatatatagtagtagtaacagataataagatgcaagcacgaaggaaagcaaattctactcactgctttggcggtctctcttctgtgctgtcatggtcgtgtatatggttcaattcgttccgctaaattttgtacatcaatcaaatcgtataaataaataaataaataaatgagaactgagatgtgtgtactgttcaaactgtctcagctgtgctaacactaatcaggatgcaaggttctttggagcttctcctcgatttacttgatgttgcgagacagaacagaaggtccttcgatacctgccttcaat

SEQ ID NO: 19748 - DNA, 1350 bp, Zea Mays
agaaatttaaatttagaaacttaatcgtgtccagcagccaggataacggaaagtaacgccgcgtaagaaaaacctttcggtctaaacatttcgtcgaacgccagcggcgagtcgagctcgagctcgagccccagtcaccgcagccatgctcctcacgaaaccctacctctccaactcgctccttccagtcccatccccgccgccgtcgggccctactctcagctccaaccatgcaagcccccttgccgcccctacttgccgtcgcagccgcctccgcatctccgccacatccacggctgcgccgtctccttcgtcggctgccgctgccaccgcgtcgctgagtcgagtggacgtgctctcggaggcgctcccttttattcagcgattcaaaggcaagacggtggtggtcaagtacggcggtgcggcgatgaagtccccggagctgcaggcgtccgtgatccgcgatctcgtgctgctctcctgcgtcggcctccgccccgtgcttgttcacggcggcggtccggagattaattcctggctgctgcgcgtcggcgtcgagccgcagttccgcgacggcctccgcgtcacggacgcgctcaccatggaggtcgtcgagatggtgctagtcgggaagcggcgctgggattcgtcggcgaggtttcgcgcgtggacgccaccgtcctccatcccatcatcgccgcgggccatatcccggttatcgccaccgttgccgccgacgagactgggcaagcctataacatcaatgctgatacggcggctggcgagattgccgctgccgtgggcgccgagaagctgctgttgctcacagatgtgtctggcattttggcggaccgtaatgaccctgggagcctggtgaaggtggtcgacattgctggggtgcggaagatggtggctgacgggaaggtagctggtgggatgatacccaaggtggagtgttgtgttcacgcccttgcacaaggtgtacacaccgcaagtatcattgatgggcgtgttccacactctcttctgcttgagattctcacagacgagggcacaggcaccatgatcactggctgagctgcttcatgccttcaggaaacgggctgagaagcgaagcgtttggtggccagaaaccgattctgacggccagaagccgatccaaacaggcccgatgttggattgaataatattttttgaaatgcttgatcgtgaacatcagttgtccttcagaggaaacacgacaggttcttgctccagttcaagctccagccgattcaagctccagttcgcccagccccagccggacgacaggtgccagtagaccgaggagggccaagatccagcagatgc

SEQ ID NO: 19749 - DNA, 1336 bp, Zea Mays
agaaatttaaatttagaaacttaatcgtgtccagcagccaggataacggaaagtaacgccgcgtaagaaaaacctttcggtctaaacatttcgtcgaacgccagcggcgagtcgagctcgagctcgagccccagtcaccgcagccatgctcctcacgaaaccctacctctccaactcgctccttccagtcccatccccgccgccgtcgggccctactctcagctccaaccatgcaagcccccttgccgcccctacttgccgtcgcagccgcctccgcatctccgccacatccacggctgcgccgtctccttcgtcggctgccgctgccaccgcgtcgctgagtcgagtggacgtgctctcggaggcgctcccttttattcagcgattcaaaggcaagacggtggtggtcaagtacggcggtgcggcgatgaagtccccggagctgcaggcgtccgtgatccgcgatctcgtgctgctctcctgcgtcggcctccgccccgtgcttgttcacggcggcggtccggagattaattcctggctgctgcgcgtcggcgtcgagccgcagttccgcgacggcctccgcgtcacggacgcgctcaccatggaggtcgtcgagatggtgctagtcgggaagcggcgctgggattcgtcggcgaggtttcgcgcgtggacgccaccgtcctccatcccatcatcgccgcgggccatatcccggttatcgccaccgttgccgccgacgagactgggcaagcctataacatcaatgctgatacggcggctggcgagattgccgctgccgtgggcgccgagaagctgctgttgctcacagatgtgtctggcattttggcggaccgtaatgaccctgggagcctggtgaaggtggtcgacattgctggggtgcggaagatggtggctgacgggaaggtagctggtgggatgatacccaaggtggagtgttgtgttcacgcccttgcacaaggtgtacacaccgcaagtatcattgatgggcgtgttccacactctcttctgcttgagattctcacagacgagggcacaggcaccatgatcactggctgagctgcttcatgccttcaggaaacgggctgagaagcgaagcgtttggtggccagaaaccgattctgacggccagaagccgatccaaacaggcccgatgttggattgaataatattttttgaaatgcttgatcgtgaacatcagttgtccttcaggttcttgctccagttcaagctccagccgattcaagctccagttcgcccagccccagccggacgacaggtgccagtagaccgaggagggccaagatccagcagatgc

SEQ ID NO: 19750 - DNA, 1602 bp, Zea Mays
agaaatttaaatttagaaacttaatcgtgtccagcagccaggataacggaaagtaacgccgcgtaagaaaaacctttcggtctaaacatttcgtcgaacgccagcggcgagtcgagctcgagctcgagccccagtcaccgcagccatgctcctcacgaaaccctacctctccaactcgctccttccagtcccatccccgccgccgtcgggccctactctcagctccaaccatgcaagcccccttgccgcccctacttgccgtcgcagccgcctccgcatctccgccacatccacggctgcgccgtctccttcgtcggctgccgctgccaccgcgtcgctgagtcgagtggacgtgctctcggaggcgctcccttttattcagcgattcaaaggcaagacggtggtggtcaagtacggcggtgcggcgatgaagtccccggagctgcaggcgtccgtgatccgcgatctcgtgctgctctcctgcgtcggcctccgccccgtgcttgttcacggcggcggtccggagattaattcctggctgctgcgcgtcggcgtcgagccgcagttccgcgacggcctccgcgtcacggacgcgctcaccatggaggtcgtcgagatggtgctagtcgggaagcggcgctgggattcgtcggcgaggtttcgcgcgtggacgccaccgtcctccatcccatcatcgccgcgggccatatcccggttatcgccaccgttgccgccgacgagactgggcaagcctataacatcaatgctgatacggcggctggcgagattgccgctgccgtgggcgccgagaagctgctgttgctcacagatgtgtctggcattttggcggaccgtaatgaccctgggagcctggtgaaggtggtcgacattgctggggtgcggaagatggtggctgacgggaaggtagctggtgggatgatacccaaggtggagtgttgtgttcacgcccttgcacaaggtgtacacaccgcaagtatcattgatgggcgtgttccacactctcttctgcttgagattctcacagacgagggcacaggcaccatgatcactggctgagctgcttcatgccttcaggaaacgggctgagaagcgaagcgtttggtggccagaaaccgattctgacggccagaagccgatccaaacaggcccgatgttggattgaataatattttttgaaatgcttgatcgtgaacatcagttgtccttcagacttggttcggctgccgcccaggttgagcagcagcaggcgcagtactgcagtgcaatggataggacaagagacttgatatggcaccactttgtcaggttactcgcgaggattggagacagaacatcgacggtggagcccgaagtcccgttgcaggcaacattttttttccctttgctttccacaagaccacagccatggcacagggaactccacctacatccaatggccgaagtgccttccttttggttgtttactgcacttgtggaaaactttctccctgctcatagcacattcgagaaaagctggcagctccggtactccacccattctccggtgaatgctgaatctattcccaatcatgctgtccattt

SEQ ID NO: 19751 - DNA, 1231 bp, Zea Mays
cgcgtaagaaaaacctttcggtctaaacatttcgtcgaacgccagcggcgagtcgagctcgagctcgagccccagtcaccgcagccatgctcctcacgaaaccctacctctccaactcgctccttccagtcccatccccgccgccgtcgggccctactctcagctccaaccatgcaagcccccttgccgcccctacttgccgtcgcagccgcctccgcatctccgccacatccacggctgcgccgtctccttcgtcggctgccgctgccaccgcgtcgctgagtcgagtggacgtgctctcggaggcgctcccttttattcagcgattcaaaggcaagacggtggtggtcaagtacggcggtgcggcgatgaagtccccggagctgcaggcgtccgtgatccgcgatctcgtgctgctctcctgcgtcggcctccgccccgtgcttgttcacggcggcggtccggagattaattcctggctgctgcgcgtcggcgtcgagccgcagttccgcgacggcctccgcgtcacggacgcgctcaccatggaggtcgtcgagatggtgctagtcgggaaggtcaacaaaaaccttgtttccctcatcaacatcgcgggaggcaccgccattggtctgtgcggcaaggacgcgcgccttatcaccgctcgcccgtctccaaatgcagcggcgctgggattcgtcggcgaggtttcgcgcgtggacgccaccgtcctccatcccatcatcgccgcgggccatatcccggttatcgccaccgttgccgccgacgagactgggcaagcctataacatcaatgctgatacggcggctggcgagattgccgctgccgtgggcgccgagaagctgctgttgctcacagatgtgtctggcattttggcggaccgtaatgaccctgggagcctggtgaaggtggtcgacattgctggggtgcggaagatggtggctgacgggaaggtagctggtgggatgatacccaaggtggagtgttgtgttcacgcccttgcacaaggtgtacacaccgcaagtatcattgatgggcgtgttccacactctcttctgcttgagattctcacagacgagggcacaggcaccatgatcactggctgagctgcttcatgccttcagggttcacgcttcacatgatcatttgcaatttgaatggctccagtgctgtcgcacagaagaggcgtaggagtatcacaagagacactaag

SEQ ID NO: 19752 - DNA, 1249 bp, Zea Mays
cgcgtaagaaaaacctttcggtctaaacatttcgtcgaacgccagcggcgagtcgagctcgagctcgagccccagtcaccgcagccatgctcctcacgaaaccctacctctccaactcgctccttccagtcccatccccgccgccgtcgggccctactctcagctccaaccatgcaagcccccttgccgcccctacttgccgtcgcagccgcctccgcatctccgccacatccacggctgcgccgtctccttcgtcggctgccgctgccaccgcgtcgctgagtcgagtggacgtgctctcggaggcgctcccttttattcagcgattcaaaggcaagacggtggtggtcaagtacggcggtgcggcgatgaagtccccggagctgcaggcgtccgtgatccgcgatctcgtgctgctctcctgcgtcggcctccgccccgtgcttgttcacggcggcggtccggagattaattcctggctgctgcgcgtcggcgtcgagccgcagttccgcgacggcctccgcgtcacggacgcgctcaccatggaggtcgtcgagatggtgctagtcgggaaggtcaacaaaaaccttgtttccctcatcaacatcgcgggaggcaccgccattggtctgtgcggcaaggacgcgcgccttatcaccgctcgcccgtctccaaatgcagcggcgctgggattcgtcggcgaggtttcgcgcgtggacgccaccgtcctccatcccatcatcgccgcgggccatatcccggttatcgccaccgttgccgccgacgagactgggcaagcctataacatcaatgctgatacggcggctggcgagattgccgctgccgtgggcgccgagaagctgctgttgctcacagatgtgtctggcattttggcggaccgtaatgaccctgggagcctggtgaaggtggtcgacattgctggggtgcggaagatggtggctgacgggaaggtagctggtgggatgatacccaaggtggagtgttgtgttcacgcccttgcacaaggtgtacacaccgcaagtatcattgatgggcgtgttccacactctcttctgcttgagattctcacagacgagggcacaggcaccatgatcactggctgagctgcttcatgccttcagggttcttgctccagttcaagctccagccgattcaagctccagttcgcccagccccagccggacgacaggtgccagtagaccgaggagggccaagatccagcagatgc

SEQ ID NO: 19753 - DNA, 1515 bp, Zea Mays
cgcgtaagaaaaacctttcggtctaaacatttcgtcgaacgccagcggcgagtcgagctcgagctcgagccccagtcaccgcagccatgctcctcacgaaaccctacctctccaactcgctccttccagtcccatccccgccgccgtcgggccctactctcagctccaaccatgcaagcccccttgccgcccctacttgccgtcgcagccgcctccgcatctccgccacatccacggctgcgccgtctccttcgtcggctgccgctgccaccgcgtcgctgagtcgagtggacgtgctctcggaggcgctcccttttattcagcgattcaaaggcaagacggtggtggtcaagtacggcggtgcggcgatgaagtccccggagctgcaggcgtccgtgatccgcgatctcgtgctgctctcctgcgtcggcctccgccccgtgcttgttcacggcggcggtccggagattaattcctggctgctgcgcgtcggcgtcgagccgcagttccgcgacggcctccgcgtcacggacgcgctcaccatggaggtcgtcgagatggtgctagtcgggaaggtcaacaaaaaccttgtttccctcatcaacatcgcgggaggcaccgccattggtctgtgcggcaaggacgcgcgccttatcaccgctcgcccgtctccaaatgcagcggcgctgggattcgtcggcgaggtttcgcgcgtggacgccaccgtcctccatcccatcatcgccgcgggccatatcccggttatcgccaccgttgccgccgacgagactgggcaagcctataacatcaatgctgatacggcggctggcgagattgccgctgccgtgggcgccgagaagctgctgttgctcacagatgtgtctggcattttggcggaccgtaatgaccctgggagcctggtgaaggtggtcgacattgctggggtgcggaagatggtggctgacgggaaggtagctggtgggatgatacccaaggtggagtgttgtgttcacgcccttgcacaaggtgtacacaccgcaagtatcattgatgggcgtgttccacactctcttctgcttgagattctcacagacgagggcacaggcaccatgatcactggctgagctgcttcatgccttcaggacttggttcggctgccgcccaggttgagcagcagcaggcgcagtactgcagtgcaatggataggacaagagacttgatatggcaccactttgtcaggttactcgcgaggattggagacagaacatcgacggtggagcccgaagtcccgttgcaggcaacattttttttccctttgctttccacaagaccacagccatggcacagggaactccacctacatccaatggccgaagtgccttccttttggttgtttactgcacttgtggaaaactttctccctgctcatagcacattcgagaaaagctggcagctccggtactccacccattctccggtgaatgctgaatctattcccaatcatgctgtccattt

SEQ ID NO: 19754 - DNA, 3256 bp, Zea Mays
cagcattgccgcatccacatccccgtccctggtggtcgcccctcctggagctcgccgccaccatctcgattttgttttcccgaccacagcgccaccgcccaacgctaacctgccgctccacgagtctcgacaaattatcgacgcgactggcacccctccccctccactggtgattgtcgccgtcagcatcttcctccggtcctcccaagagcaagccttctagaagttaaagaagcagccagaaccatgacatcccgtttctggggacagggggacagtgagtctgaggaagaggaggaagaagttgagtcagaacagggcagcgataatgatgatgatggaggtcatggtggtgcgggacgcggtgcccaaaaccgatatttgaagaatcaagaagatgacagcgatgagtctgacacaggtcaccgtgagatccgctccctgagggacaagcacaatgaggagatgagatctattgttgatcagatgcgtaatgcaatgaagatcaatgactgggtgagcttgcaggagagttttgagaagcttaacaaaaatcttgagaaggttgttcgtgtcaatgaatctactaaggtaccaaaaatgtatatcaaagctcttgtgttgctggaggacttcaaggctgaagcccctgcaaacaaggaggccaaggagaagatgagcagcagcaattcaaaggcactcaataagatgagccaaaaactcacgaagaacaacaagcaatataaagagcagatccagaagtgcagggagcatccagagagttttgaagatgaagctgcggatgataaagatatggatgatgatgatgttgatgaaagtgatgcagagatcgaagatcctgataaaatagctatgtcagaatcagaagaggatcacgatgaagaggatggcgacaaggagggttgggaacagaaaaggagtaagaaggataagatgatggataagcagttcttgaaagatccaagtgaaatcacatgggatattgtcgataagaaactcagagagattatagcatcaaggggaaagaaaggtactggaaggatcgagcgtgttgagcagttaacgtttttaacccgtgtggccaaaacaccagctcagaagcttgaaaccctcttccatgtgatttctgcgcagtttgatgttaaccctagtctacttgggcatatgccagtcaatgtgtggaagaagtgtgtcaataatatgcttcttgtgcttgacatactccagcagtatcctaacattgtagtagacacctcatttgagcctgatgagaaagaaactcaaaagggtgcagactacaatggaacaatacatattgtcggtgacctggttgcattccttgagagactggactctgaatttttgaagaccttacagtgcacagatccgtacacaaaagattatgttcagaggcttagagaggaacccctgtttctggttgtcgcacagaatgtccaagattatcttgaaagggttggaaacctcaaagctgctgccaaggttgcactgcgtcgtgttgaactggtttactataaaccccaagaagtgtatgatgcaatgagaaaacttgcagagcagcctgaagactgtgtggatgatgatgatgcagaggctggtgatgaacatcaagcagtagatgacaatagaggaccatcaccatttgttgcaattccagaggttgtgcaccggaagcctacttttccagagagtggtagaactttgatggatggattgatgtccttaatttacaagtatggagatgaaaggaccaaagcccgtgcaatgctgtgtgacatatatcaccatgcgatctctgatgagttttcagtggctcgtgacttgcttttaatgagtcatttgcaagatggtgttcagctcatggacatatcatcacagattttattcaatagagtcatggcccagttagggctgtgtgctttcagggctggtttgataaatgaagcccatggttgcttgactgagctctactttacagggagggtgaaagaattgcttgcacaaggtgtgcaacaaagcagataccatgaaaaaactcctgaacaggaaagacttgagaggaggaggcaaatgccttaccatatgcatataaacctggagcttttggaagccacacacttgatctgtgcgatgctgattgaagtccccaatatggctgccagcacctatgacaagcggaggcctatgagcaaaacattccgaaggcttctcgaagtgagtgaaaggcagacatttgttgggccgcctgagaatgtgagggaccatgtaatggctgccacaagagccctcaaaaagggtgatcaccaaaaggctttcagtgtcataaattcgctggagatttggaagcttttgaggaacagagagcatgttcttgagatgttgaagcttaagatcaaggaggaagctcttagaacctatctttcatcatactcgtcttcctacaagtcgttgagccttaaccagctcaccaccatgtttgatctcagcgagcagcatgcccacagtattgttagcaaaatgatgatgcatgaagagcttcaggctagctggcaccagccaacaaagtgcaccgtgtttcacagcctggatcaaaccaggcttcaggagctactcttccaggttgcagaaaaaatatcggtcctggtggagacaaacgagagggcatacgagttaagaactggtggtactcttgaggggctaccgcccaggcgcaggggcgaggctcaggattcatccaagtggcaggagagctttgtcgcatcacaggggcggcagggtggtggcaaccggtttggatactccggtagaggtgcagcatctggtcaaagtggtggactccagaggggcaggggcaatcatgtttcccgcgggggatacggtggcaatacacgatttcaggatgcaagtgcacacatggtgaacctgaacagggttggtagggttgttagtgtttagaagtgcgtaaatttttgaagcacctgccctttccataattacaaacttcctgttctaagctcagtcatccaactattttctctatttcgttgtaagagtttggtactgtcggggtttgattagtgatagatccggctatcaaaattttggtcttttttcttcgactatgaacaaataatatatagaattttctatgtaaatttatattcttgtttttagcattgaggatattaatcttcataaaaataaattttaaatccgt

SEQ ID NO: 19755 - DNA, 3223 bp, Zea Mays
ctggtggtcgcccctcctggagctcgccgccaccatctcgattttgttttcccgaccacagcgccaccgcccaacgctaacctgccgctccacgagtctcgacaaattatcgacgcgactggcacccctccccctccactggtgattgtcgccgtcagcatcttcctccggtcctcccaagagcaagccttctagaagttaaagaagcagccagaaccatgacatcccgtttctggggacagggggacagtgagtctgaggaagaggaggaagaagttgagtcagaacagggcagcgataatgatgatgatggaggtcatggtggtgcgggacgcggtgcccaaaaccgatatttgaagaatcaagaagatgacagcgatgagtctgacacaggtcaccgtgagatccgctccctgagggacaagcacaatgaggagatgagatctattgttgatcagatgcgtaatgcaatgaagatcaatgactgggtgagcttgcaggagagttttgagaagcttaacaaaaatcttgagaaggttgttcgtgtcaatgaatctactaaggtaccaaaaatgtatatcaaagctcttgtgttgctggaggacttcaaggctgaagcccctgcaaacaaggaggccaaggagaagatgagcagcagcaattcaaaggcactcaataagatgagccaaaaactcacgaagaacaacaagcaatataaagagcagatccagaagtgcagggagcatccagagagttttgaagatgaagctgcggatgataaagatatggatgatgatgatgttgatgaaagtgatgcagagatcgaagatcctgataaaatagctatgtcagaatcagaagaggatcacgatgaagaggatggcgacaaggagggttgggaacagaaaaggagtaagaaggataagatgatggataagcagttcttgaaagatccaagtgaaatcacatgggatattgtcgataagaaactcagagagattatagcatcaaggggaaagaaaggtactggaaggatcgagcgtgttgagcagttaacgtttttaacccgtgtggccaaaacaccagctcagaagcttgaaaccctcttccatgtgatttctgcgcagtttgatgttaaccctagtctacttgggcatatgccagtcaatgtgtggaagaagtgtgtcaataatatgcttcttgtgcttgacatactccagcagtatcctaacattgtagtagacacctcatttgagcctgatgagaaagaaactcaaaagggtgcagactacaatggaacaatacatattgtcggtgacctggttgcattccttgagagactggactctgaatttttgaagaccttacagtgcacagatccgtacacaaaagattatgttcagaggcttagagaggaacccctgtttctggttgtcgcacagaatgtccaagattatcttgaaagggttggaaacctcaaagctgctgccaaggttgcactgcgtcgtgttgaactggtttactataaaccccaagaagtgtatgatgcaatgagaaaacttgcagagcagcctgaagactgtgtggatgatgatgatgcagaggctggtgatgaacatcaagcagtagatgacaatagaggaccatcaccatttgttgcaattccagaggttgtgcaccggaagcctacttttccagagagtggtagaactttgatggatggattgatgtccttaatttacaagtatggagatgaaaggaccaaagcccgtgcaatgctgtgtgacatatatcaccatgcgatctctgatgagttttcagtggctcgtgacttgcttttaatgagtcatttgcaagatggtgttcagctcatggacatatcatcacagattttattcaatagagtcatggcccagttagggctgtgtgctttcagggctggtttgataaatgaagcccatggttgcttgactgagctctactttacagggagggtgaaagaattgcttgcacaaggtgtgcaacaaagcagataccatgaaaaaactcctgaacagacttgagaggaggaggcaaatgccttaccatatgcatataaacctggagcttttggaagccacacacttgatctgtgcgatgctgattgaagtccccaatatggctgccagcacctatgacaagcggaggcctatgagcaaaacattccgaaggcttctcgaagtgagtgaaaggcagacatttgttgggccgcctgagaatgtgagggaccatgtaatggctgccacaagagccctcaaaaagggtgatcaccaaaaggctttcagtgtcataaattcgctggagatttggaagcttttgaggaacagagagcatgttcttgagatgttgaagcttaagatcaaggaggaagctcttagaacctatctttcatcatactcgtcttcctacaagtcgttgagccttaaccagctcaccaccatgtttgatctcagcgagcagcatgcccacagtattgttagcaaaatgatgatgcatgaagagcttcaggctagctggcaccagccaacaaagtgcaccgtgtttcacagcctggatcaaaccaggcttcaggagctactcttccaggttgcagaaaaaatatcggtcctggtggagacaaacgagagggcatacgagttaagaactggtggtactcttgaggggctaccgcccaggcgcaggggcgaggctcaggattcatccaagtggcaggagagctttgtcgcatcacaggggcggcagggtggtggcaaccggtttggatactccggtagaggtgcagcatctggtcaaagtggtggactccagaggggcaggggcaatcatgtttcccgcgggggatacggtggcaatacacgatttcaggatgcaagtgcacacatggtgaacctgaacagggttggtagggttgttagtgtttagaagtgcgtaaatttttgaagcacctgccctttccataattacaaacttcctgttctaagctcagtcatccaactattttctctatttcgttgtaagagtttggtactgtcggggtttgattagtgatagatccggctatcaaaattttggtcttttttcttcgactatgaacaaataatatatagaattttctatgtaaatttatattcttgtttttagcattgaggatattaatcttcataaaaataaattttaaatccgt

SEQ ID NO: 19756 - DNA, 982 bp, Zea Mays
ttaagatttattccttcagtaaattatctgactttaaatcaaatcaagcgtactctgtaattgtttgacagatatcttttgttttgtcctatttacatctcgcttagatttaaaccacagaactaaatcatccgtgtatctttaattaaaaaatatagaaaatcctctttatctccatgtcggccaacatactgttagccttatccaatcaacaccctaccttgttccttatctactcttttccttggaacaaaaatcccatacgttgcctcctcccttgccgtgacgcacggctcctggaagcctctctccccaccgcatcttctatcttcggttccttgctctgcaccgccgcctgctcatccatatcccatggtgcccagccgagcagcccatggaggcttcccacgcccagccctctctactgatggccgccgtccctactccatcttacggcactgctctctgcctctcccatggacgagctcgccctgccccccatctccttcaccacgctgctccctgcctccttgttggtcggccataccctctgctcctccccaccgtccgcagccccgacgtcgtcgccgtgtttagtcatggtgattcctaacccctttattttatttcactaattcttctaatgcgagcagatttttattgatgttgatatgcggttatgtgtatttgtgtgcgagtgtggcggagagaaagatctcaggtttttggatggagaagaagcgaggccagtgcgacgctcgctatgtgctcgacgtacgctagctgatcacgtgaggcggagttcaagagccgagttgatctcaagatgatgaaatgatgaactactccgacaaacgatgttgacgaatcgacctaatgagagatggacctatcaagtgccgagatgaatatggtcaccaagtggtcatcaattaacaacactaacgtagtgttatcccaggcaagccccggtgcatttgcc

SEQ ID NO: 19757 - DNA, 1061 bp, Zea Mays
ttaagatttattccttcagtaaattatctgactttaaatcaaatcaagcgtactctgtaattgtttgacagatatcttttgttttgtcctatttacatctcgcttagatttaaaccacaaaactaaatcatccgtgtatctttaattaaaaaatatagaaaatcctctttatctccatgtcggccaacatactgttagccttatccaatcaacaccctaccttgttcattatctactcttttccttggaacaaaaatcccatacgttgcctcctcccttgctgtgacgcacggctcctggaagcctctctccccaccgcatcttctatcttcggttccttgctctgcaccgccgcctgctcatccatatcccatggtgcccagccgagcagcccatggaggcttcccacgcccagccctctctactgatggccgccgtccctactccatcttacggcactgctctctgcctctcccatggacgagctcgccctgccccccatctccttcaccacgctgctccctgcctccttgttggtcggccataccctctgctcctccccaccgtccgcagccccgacgtcgtcgccgtgtttagtcatggtgattcctaacccctttattttatttcactaattcttctaatgcgagcagatttttattgatgttgatatgcggttatgtgtatttgtgtgcgagtgtggcggagagaaagatctcaggtttttggatggagaagaagcgaggccagtgcgacgctcgctatgtgctcgacgtacgctagctgatcacgtgaggcggagttcaagagccgagttgatctcaagatgatgaaatgatgaactactccgacaaacgatgttgacgaatcgacctaatgagagatggacctatcaagtgccgagatgaatatggtcaccaagtggtcgtcaattaacaacactaacgtagtgttatcccaggcaagccccggtgcatttgccacctccttgttgttttaaaacttttatcacttatatgctgcattaggtgataggagttgagtgatgaaatagttgatgc

SEQ ID NO: 19758 - DNA, 778 bp, Zea Mays
agccgttgaggtagccggagccgactgtacgttgtagctcatggaccttgacgcaatagcggctgcagaggaggaggagcgcatgctcgaggactttaatgaggctgaggatgctaggttcttcattggtttcggtgagaatgaaacccatggagatcctattcatatcgatactgtcgctggctctgcagtagggactggcacaggctccacaagcctgccagagttagtccctgatcctgatgctggtggaagcaactcgcactcaaagaaaaggtccaagtgctggaatgactttgatgaattgactaagattgtggatggcaaaaaagtcaggtatgctgctcgttgcaagcactgtaagcaaactcttagtgctcgttctacttctggtactggtcatttgcttcgtcataattgccctgctaagaaagcacatgaacgctgtgggcaagtccaatctgtgcttaagtacaatgctgacggtactttgcaacgttgggagtactctgcttctattgctaggactgaactatgtcgtttgattgctagggatgaccttcctttatggcatggttctactcctgcttttcaatgttatatcaatcgttctcacaatcctagatttgtgcatgtttctagacagaccactgccagggacatggttaaattttataatgaacgtatgagtgtaggtaaacaggaaaatggctgggcaatatggctatccgttattggagccagccttaacagcgtgaaaatggatgctggttcgtga

SEQ ID NO: 19759 - DNA, 2116 bp, Zea Mays
agtatacaacagccagcccaataatgacatatgggacacgtcactatcgaagagcttgtagttgtaggagcagatcgcggtaagcttaccacctaggcaccggcggacccgccagtccgcccctgcatccagtgatccagtcaatcgcggacgcccgcttggccgcttccatgggttccatgaggcggagttccgtgcggcttctcatagggttcctgctaattcggctcaattggtgctcggcggtgggcgacaagggcgcggagaaagtaggcgtggctttcccggtggtggtgagcacctggccgttccgtgaggcggtcagagcggcgtggaaggtggtttcgaccggtgaaggatggggttcggccgtcgatgctgtcgtcgctggctgctccgcctgcgaggacctccgctgcgatggtacagttggtccaggtggaagtccagatgagaatggggaaaccactttagatgctcttgtcatgaatggggtaacatctgcattactttctcgtgcagcagttcaggttgatattttattttgttccatcattcagagtggatgcacattgcattattttcgcttaaggaaactgtcaggcaacaatggaaattggagctgtggcggccatgagatatgtgaaggatggaatcaaggcagcaaagttagtcatggagcacagcgagcatactctgctcgttggagagaaagcaacagcatttgcaatttcaatgggtcttccaggaccaactaacctcagttcaccagagtcaattgagaaatgggaaaagtggaaacagaaccactgccaaccaaacttctggaaaaatgttgatcctgtcggtaagtgtggtccataccatcctatcaatttagcctcagttgaagttgagggttctgtaaagaatgaggtagtggggagtcaaggtggtctctgccaggggtattttgaaagtgataatttactggagccaataaagtccaatttgaaggttgttaatcgccacaaccatgacacaatttctatggctgtgattgacaagatgggccacatagcagttgggacatcaaccaatggtgctacatttaaaattccaggaagggtgggcgatggaccaataccaggatcttcttcatatggtgatgatgaagttggggcttgtggagcaactggtgatggtgatattatgatgcgcttccttccatggtaatgaaaacataatttctgttgaaaatgacatttgaaaaaggatggctgagtgtgatgtctagcttgtcaattggaaccggattagttgctccaatctatgatttaatttgaaagaaagatgacagagttgtgctctgattattatgaacttctttttccctcatgtttattttttcaagtgtagcatcctagtacatgatggtatgcaatttcaatcatctttgggcaatcaattttaaacagtccctgatccaactgcaaacactaatgctggtaacagcatatgctagttgtttactctatcgtaactctatcgactcttgtgcacttcgtgccaatcttattataaattctgttgtagctaccaagtggtagagagcatgcgacaagggatggatcctcgagatgctgccacagatgctatatcgagaattgcccgcaaatacccagatttcatcggtgccgtatttgcagtcaacaaggaaggggtgcatgccggggcatgccacggatggacattccaatactccgtacggaattccagcatgcaagatgtggaggtcattacagtatatccttagcaatcgcaattcaacgaaaacaaaagtttgctttatcagcatgtttaaaaatgtcacggctgcccccctgttgatgttttaaaaatgttctgtgcggattatttcaatgttttcttaaagtcgattgttttgaaactagtagtactgtatgtaccaatctgaccttagttgttttttccctggaaagtgttgaatgtcttggaaagtcgaaaccttggatcttctctgttggagttggagttgattgtacagaagttagacttggatatagtcaacttcgtcgaaccagctatcatgtttataataatatatcgtagcctg

SEQ ID NO: 19760 - DNA, 1789 bp, Zea Mays
agtatacaacagccagcccaataatgacatatgggacacgtcactatcgaagagcttgtagttgtaggagcagatcgcggtaagcttaccacctaggcaccggcggacccgccagtccgcccctgcatccagtgatccagtcaatcgcggacgcccgcttggccgcttccatgggttccatgaggcggagttccgtgcggcttctcatagggttcctgctaattcggctcaattggtgctcggcggtgggcgacaagggcgcggagaaagtaggcgtggctttcccggtggtggtgagcacctggccgttccgtgaggcggtcagagcggcgtggaaggtggtttcgaccggtgaaggatggggttcggccgtcgatgctgtcgtcgctggctgctccgcctgcgaggacctccgctgcgatggtacagattacgtgtgcttctggtatgctgctgttctctgccacgcaccgatcggaggttgtacgtgtggaggatcggtgggcgcggtttgaaggctgaacggcggcgaggagccagcgatcgtgagagaaggaaaacaagttggtccaggtggaagtccagatgagaatggggaaaccactttagatgctcttgtcatgaatggggaaactgtcaggcaacaatggaaattggagctgtggcggccatgagatatgtgaaggatggaatcaaggcagcaaagttagtcatggagcacagcgagcatactctgctcgttggagagaaagcaacagcatttgcaatttcaatgggtcttccaggaccaactaacctcagttcaccagagtcaattgagaaatgggaaaagtggaaacagaaccactgccaaccaaacttctggaaaaatgttgatcctgtcggtaagtgtggtccataccatcctatcaatttagcctcagttgaagttgagggttctgtaaagaatgaggtagtggggagtcaaggtggtctctgccaggggtattttgaaagtgataatttactggagccaataaagtccaatttgaaggttgttaatcgccacaaccatgacacaatttctatggctgtgattgacaagatgggccacatagcagttgggacatcaaccaatggtgctacatttaaaattccaggaagggtgggcgatggaccaataccaggatcttcttcatatggtgatgatgaagttggggcttgtggagcaactggtgatggtgatattatgatgcgcttccttccatgctaccaagtggtagagagcatgcgacaagggatggatcctcgagatgctgccacagatgctatatcgagaattgcccgcaaatacccagatttcatcggtgccgtatttgcagtcaacaaggaaggggtgcatgccggggcatgccacggatggacattccaatactccgtacggaattccagcatgcaagatgtggaggtcattacagtatatccttagcaatcgcaattcaacgaaaacaaaagtttgctttatcagcatgtttaaaaatgtcacggctgcccccctgttgatgttttaaaaatgttctgtgcggattatttcaatgttttcttaaagtcgattgttttgaaactagtagtactgtatgtaccaatctgaccttagttgttttttccctggaaagtgttgaatgtcttggaaagtcgaaaccttggatcttctctgttggagttggagttgattgtacagaagttagacttggatatagtcaacttcgtcgaaccagctatcatgtttataataatatatcgtagcctg

SEQ ID NO: 19761 - DNA, 1679 bp, Zea Mays
agtatacaacagccagcccaataatgacatatgggacacgtcactatcgaagagcttgtagttgtaggagcagatcgcggtaagcttaccacctaggcaccggcggacccgccagtccgcccctgcatccagtgatccagtcaatcgcggacgcccgcttggccgcttccatgggttccatgaggcggagttccgtgcggcttctcatagggttcctgctaattcggctcaattggtgctcggcggtgggcgacaagggcgcggagaaagtaggcgtggctttcccggtggtggtgagcacctggccgttccgtgaggcggtcagagcggcgtggaaggtggtttcgaccggtgaaggatggggttcggccgtcgatgctgtcgtcgctggctgctccgcctgcgaggacctccgctgcgatggtacagttggtccaggtggaagtccagatgagaatggggaaaccactttagatgctcttgtcatgaatggggtaacatctgcattactttctcgtgcagcagttcaggcaacaatggaaattggagctgtggcggccatgagatatgtgaaggatggaatcaaggcagcaaagttagtcatggagcacagcgagcatactctgctcgttggagagaaagcaacagcatttgcaatttcaatgggtcttccaggaccaactaacctcagttcaccagagtcaattgagaaatgggaaaagtggaaacagaaccactgccaaccaaacttctggaaaaatgttgatcctgtcggtaagtgtggtccataccatcctatcaatttagcctcagttgaagttgagggttctgtaaagaatgaggtagtggggagtcaaggtggtctctgccaggggtattttgaaagtgataatttactggagccaataaagtccaatttgaaggttgttaatcgccacaaccatgacacaatttctatggctgtgattgacaagatgggccacatagcagttgggacatcaaccaatggtgctacatttaaaattccaggaagggtgggcgatggaccaataccaggatcttcttcatatggtgatgatgaagttggggcttgtggagcaactggtgatggtgatattatgatgcgcttccttccatgctaccaagtggtagagagcatgcgacaagggatggatcctcgagatgctgccacagatgctatatcgagaattgcccgcaaatacccagatttcatcggtgccgtatttgcagtcaacaaggaaggggtgcatgccggggcatgccacggatggacattccaatactccgtacggaattccagcatgcaagatgtggaggtcattacagtatatccttagcaatcgcaattcaacgaaaacaaaagtttgctttatcagcatgtttaaaaatgtcacggctgcccccctgttgatgttttaaaaatgttctgtgcggattatttcaatgttttcttaaagtcgattgttttgaaactagtagtactgtatgtaccaatctgaccttagttgttttttccctggaaagtgttgaatgtcttggaaagtcgaaaccttggatcttctctgttggagttggagttgattgtacagaagttagacttggatatagtcaacttcgtcgaaccagctatcatgtttataataatatatcgtagcctg

SEQ ID NO: 19762 - DNA, 1350 bp, Zea Mays
atgtgtttctgcttgatctatagagtgttggtccaggtggaagtccagatgagaatggggaaaccactttagatgctcttgtcatgaatggggtaacatctgcattactttctcgtgcagcagttcaggttgatattttattttgttccatcattcagagtggatgcacattgcattattttcgcttaaggaaactgtcaggcaacaatggaaattggagctgtggcggccatgagatatgtgaaggatggaatcaaggcagcaaagttagtcatggagcacagcgagcatactctgctcgttggagagaaagcaacagcatttgcaatttcaatgggtcttccaggaccaactaacctcagttcaccagagtcaattgagaaatgggaaaagtggaaacagaaccactgccaaccaaacttctggaaaaatgttgatcctgtcggtaagtgtggtccataccatcctatcaatttagcctcagttgaagttgagggttctgtaaagaatgaggtagtggggagtcaaggtggtctctgccaggggtattttgaaagtgataatttactggagccaataaagtccaatttgaaggttgttaatcgccacaaccatgacacaatttctatggctgtgattgacaagatgggccacatagcagttgggacatcaaccaatggtgctacatttaaaattccaggaagggtgggcgatggaccaataccaggatcttcttcatatggtgatgatgaagttggggcttgtggagcaactggtgatggtgatattatgatgcgcttccttccatgctaccaagtggtagagagcatgcgacaagggatggatcctcgagatgctgccacagatgctatatcgagaattgcccgcaaatacccagatttcatcggtgccgtatttgcagtcaacaaggaaggggtgcatgccggggcatgccacggatggacattccaatactccgtacggaattccagcatgcaagatgtggaggtcattacagtatatccttagcaatcgcaattcaacgaaaacaaaagtttgctttatcagcatgtttaaaaatgtcacggctgcccccctgttgatgttttaaaaatgttctgtgcggattatttcaatgttttcttaaagtcgattgttttgaaactagtagtactgtatgtaccaatctgaccttagttgttttttccctggaaagtgttgaatgtcttggaaagtcgaaaccttggatcttctctgttggagttggagttgattgtacagaagttagacttggatatagtcaacttcgtcgaaccagctatcatgtttataataatatatcgtagcctg

SEQ ID NO: 19763 - DNA, 1324 bp, Zea Mays
atcaccttcatcgtctatcagccagctccattctatctactgctactctcagtactatatatctatccgcagttccatagttcttccagctgctctacacatacacatacacgctagctctagctctcacatcgattgagatcatcagagaggtggaagaagaagaagctaagataccagatcgaggaagagaggcggtgcggtggttggtagatgatggagagggtcgaggacttagggctcagcctcagcctcagctcgtccctcgcgtctcctcgcactcaccatgtcgccaccatgctgctacgcgctccagagaagaggttcctggagatgccactgctgctgcccgcgaagcggacgaccgaggtcaccggcgaggatggcctgcgaggcggcagcgatgaggaggacggcggctgcggcatcgacggctccaggaagaagctccggctgtccaaggaccagtccgcggtgctcgaggatagcttccgggagcacccaactctcaaccctgtaagtactagtagtatagtagtagcagctagcattaagagctacagttctgtggttcatcctcccggccgctcaccaagactcctgatggacgaacgtacagctaggctaggcagcagtagctttcaatcattcgccggttctcgaccttatcaacctgcctgtgactgtgactgtgactgtgagctgtactaacttgcttattaatggcgtgcagcggcagaaggcagccttggcgcagcagctaggcctgcggccccgccaggtggaggtgtggttccagaacaggcgcgccaggacgaagctgaagcagacggaggtggactgcgagtacctgaagcgctgctgcgagacgctgacggaggagaaccggcggctgcagaaggaggtgcaggagctccgcgcgctcaagctcgtgtcgccgcacctctacatgcacatgtccccgcccaccaccctcaccatgtgcccctcctgcgagcgcgtctcctcgtccaacggcaactccgcagctgccacggcggccgcgcgcgcgcgcgccggcgccggcgccggcgccatcgtctgccacccgatcgaccgagccactagtacgtagtagtagtagctgctacactagctagctgttgctgtacacgggccggccgtacgtgtaagccaacaaaacagtctctctgcgcatttattcgaccgtgcaaacgactgttccctcgttaatcttagtattattattattgactaatagctagtcacccacagtattagacttgaagatccagcagattacagttactttactgtgtttttg

SEQ ID NO: 19764 - DNA, 1131 bp, Zea Mays
cttcatgcatttgctttcgacccaagctagctttgagtaaggataatcatacgaaatgatttgctcgattgtcgataaggtttcctggttctggttccattgcttggatttactgcagaatttgaaactcgcctcagatttagatgattagctactttcgtcatcccatgcccgcggcccgcggggtgcggtaaaagcgtcgcaggcaatgatgcatcgcggattaagcaaattgctgtggtggcctgagggaatcaatgattcacagagatgggagataatttgcaagttgtctatcggcattgtgaaaggactggaccaccttcacacagcatcgcagaaaccaatcattcatggcaatctgaaaacaaataacattatgcttgacgctgatttccagcccaggatatcagacttcggcctctaccttctgctgaaccctgctgctgcgcaggagatgcttgagacatctgcaatgcagggttataaggctccagagctgatcaagattagggatggcaccagggagagtgatatctacagtttgggagtgattatgctcgagatgcttgctcagaaggaggccgcaaatgatgaatcgccaaatgcgcgtgacatccatttgccggtctctttcagagatctggttctcgagaggaagatatctgaagctttcagttccgagcttatcatacagagcaagaattctgggaaggagggcaatctgaatgcctactttgaattggcaacggcttgctgtaatccatcatcgtcattgagaccagatacaaagaaaatactaaaaaggcttgaagacatagcaagataacaatagatgcgcgcggcggtgaggctccagtctgtttagaaagtgtggtgtgttatagcagcggccagcaggatagctttgacgtcccttgtattgtttgttacttcctgcatacagcagagattgtgttgggggcatttggaaaatgatcctaacataagctaggagccccaagcatgtatagaaaagtatattttcctcgtaacaacataggaactcatccgagaacataatgtgtgtgctttcagcgtggaaatttcataaaattttcttaaattgcatttgtctttcttgtaggtttt

SEQ ID NO: 19765 - DNA, 1001 bp, Zea Mays
acatcaagaagatacaatagtactaagattactctcggtctctacacactaaaatgtacacaaccaaacagagatgaaaaaacaataggagaaacaaactcttcccaaaacaaactatcactcacaacagtctttcacgctaaccactaactagacaatactaggatcaaggttgagacactccataagaaacgtctttaggaagaatacaacatataagacgctgtcgttgcgatgacccaccaataaaggcccgatgacccaccaataaaggccagatcaaaggttttcacctaagagaaaagaccctcggtacttcagataatgcattcatcatggtcaaggccagatataaccaattaagatcagacctagagatttctccccgaagtcgatgagaccgactcctataagttccatcaaaatcaaagatcaccagctttgcctccaccttctttccatacttataccgacataccaccaaatcttggctaatatcaaatggacatgaactctgaaacagagccctatcgaatcttggtgcagatatttatgcgacaataatcgttgggcggacagagcaacttatctgataactaagcatgagcatatggtagaacaaaacaatgaaataatttctcttttcgtaaggtgtatttgaatccggttagtcttttcggattatatgttggccatcaattacttttacaagataactgattgttgcaaaaccaattcctattaagagatactcccttagttctaatatattagtcgttttaacacttttttgtccttattaaaatggatgacaataaatctagacacgcatataaaacacatacatcaaatattgtatgaatccattaacactctaaaacgaatactattttgggacgaagagagtatatgttacatgcatttgttgacatgatctttatctactaagcatacatatagtatgtatgtttctttgtcaatacatacaaagattgatttcc

SEQ ID NO: 19766 - DNA, 1917 bp, Zea Mays
cacttctttcccttccacacaacacacagctcactcaactcccctcccgcttcgtcagctcatcatcataaaccaaacagagagctctctctcggtcgttccattccaggatgctgcttaacccggcgtccatgctggacaccatccggcagcacctcctggaggagccaccagcggcggccgacgagagcttcgggatcctggtggcggaccagtggagcgactcgctcccgttccgcaccgacgacgccgacgacatggtggtgttcggggcgctgcaggacgccttcgcctacggctggctgcccgacggctccttcgcgcacgtgaagcccgagccggtgcggtcccccgactcctactactcctcctcctacgacggctcctgcttcggcggcctcccgtacccggagcagccactgacgcccggcagcgagggcgaggcggccgccacgcccagccccaggagggaggaggccgcggcggccgtggccaggggcaagcactacaggggcgtcaggcagcgcccgtggggcaagttcgcggcggagatcagggacccggccaagaacggcgcgcgcgtctggctcggcacctacgacaccgccgaggacgccgcgctcgcctacgaccgcgccgcctaccgcatgcgcggctcgcgcgcgctcctcaacttcccgctccgcatcggctccgagatcgccgccgcggccgccggggacaagcggccgttggcgttgcccgagcccgccacctcctcggactcgtcctcgtcctccaccggcggctcgcccaagaggcggaagcgaggcgaggccgccgccgccaacatggccatggcgctggtgcccccgccttcccagcttagccggccggcccagccatggttccctgccgcgccggtcgagcaggcggcgatgccgccgcgcgtggagcagctcgtcatctagctagccccgcgcgttaaaccgggctcgcggcgagacaatgaggcgtgcaagtgcaacgacgggtgcgccggtggaaagctgaggaaaacaggacgatgccctgcgctgcacttgcgcgaatgcgacggcgcgcggaatgcgataagctcgggagcaattgggggtccggatgccgctgttgctccgtgcaactcgcgcaagtggaaagaagctgtctgtgtgtagattcatccaagtgtcttgtctgcaaacggattttcggtatatgcgtccttgtcacctgtcagggtggtgtggtgtgagggcttgggcttgtgctgctgataagtttggagatctgtacaaagaaaaaacgtagggagaagatgagatcaagaacagtcgttgaaaaacagaaaagaaccacaaatgggagcgccgtggtctgataaatatcctgcaggctaaaccaggcgcgcaagtcaacagaacaacgacctgaactcgtggcatggaatcggaatcgaaatcgaaatcaccaccctcaaaccaaaactgcggaggcgaagctagcactaaacaaacgctgctgacgtggcaggaaggtggcttgctcacggcagcagtatcgagacgagaggatggcttggagaaggcaaagagcacgtgaacgccagcaagagattctaactgccgcaaccattgtccagatcattgatgaggaggaagaacgtcctcgtcgtctctctgtaattgggagggcgacgctagctgcacagggctattggttgggggctacgttcattgtcatttatcatgcagtttctgctaagaacgactagtcagggttcgctacagtgcagaaggtaactgccttgcggatgcttgcattgcatattggagaggctacaaacgggcttgatgatttattttcgtattgggggagagagtcgtccttacgagtgtggatcacttcactagaactata

SEQ ID NO: 19767 - DNA, 3312 bp, Zea Mays
ccgagccacatcgcagtttattcggtgttcgagactagaagcctggagaaacgtttgttgttcttccagaacacgccctcggaatcctatcgcctcccacagcacacgacgcgcctttgctgaactctctctgtcgccatgctgccggcggtcgccgctgcatcccccggcctctcacatctgccgcgctaccaccaccttggccgtcgctttcacctccgccgccaccgccttctacctgctattccggccaggctatcgtgtggggccacccacgcccgccgccttctccttgccggcgcgttcgcaaaaggggagggttcttcaggacaggatgttgatcactctgctggtgccacaaattctgggtctgcataccttggtctcttcgttcgattgcttggcttggataatgacacccgtgatagggagcatgctgtttgcacactctatcaatactcccttggtggaaggaagagcatcgatgagataatgcaattccctggttgtattgttctcatcattagcctcctgaaatcagagtccattcttgcctgcgaagcagccacaggtcttctgcgtaacattacgtcagttcacatatataggaagatggctggtgagagtggagcaatggaagaaatcattaatcttctctgtaaatctacaataacccccaagattctagagcagtgtttgtgtaccatttggaacttttctattgatgaaaaatggaggtacaaggttctgaagagcgatgtcctaatgaagattgttggttacctggatgaagaagacatacaagtcaaagaagccgctggtggtatcatatcaaatttagctttgagttcctctagtcatggagctttggttgaagtaggcgtcatcccaaaattggttcatcttttgcaaaccaaagaagatgactataagattattagaaaggaagctaaaagttcactaatacagctggccactgatgattgttactacagccttataatagaggagggtctagttcgggttcctttggttggctcagctgcatataaagcctttaaacctctccctcattcatggccctcttttcctgatggctctaagattcagcggagttctcatccctcaaagtacggtgctaccgaactgctccttggcttgagtgtcaatgagaacgatacaaaaccagatgaagctaaaattaatgctatgataggacgttctaatcagcaattccttgcacgtgttggagctattgagttggatgatcaaggacaagaggaatctggatctgaaaagaatgacatgtataccattttgccatgggtagatggtgttgcacggttagttttaatccttggacttgaagatgtctctgcaatcaaaaaggctgctagagcaatgggtgatgcatcaataaatgaacatatgcgtacctcattcaaggaagctggggctgttaaacctctacttcagctgctcaagcacaaagatgtacatgttagagaagctggtgcttatgcgttggaaaaattatgtgtaagtgccacagtctgccataatatcaaaacagaaggtggactagaattgcttgtaaatatagtcaaggatcgacatactccagtagaactactagagaagataatttatatactttctcgaatgtttgacatggggatttgcatggttgctgtgccggatactgaaggttataaggatagtgaaaacagtgcaaagacatctgttaaccaagagatgtccagtatgattgttggcaaacatatcaactatgctgtggttctacatactaaagtttcagcgaggaccctctttgggacacacagatctttaagacacaacttatgcagtccatggcgagttgatctttgattttgatgctatctcacacttaacggaagttctaaaggaagcatcgccaaggttgcaagcaaaagtctgttgtgtacttgaccatatagcagcttcggagcaacatgccaccgcaatgactgctgcttgcactggttcagtaattgaagctattcttgaaataggggttattcatgggaccagaagtgactctgagaactttgaaattcctagtgtagttataaaagaactcagtgaggctgtgtctgcagctgtgaggttactctcaaagttattgaactttgatcttttcatccgcagcataaacggtgaaaaaatcacttctttgctaagaagaacgctcaaatcaaatttcccccttcagtcaaaggattgtcttgcggcatgcctcattaagctagaatccagagctggcttatcaggagatcatggtgttagtagtatagatatggagataactatctatgagactattccaaggctaattgagcaaatgatgatatcactttcgtttgaaaataaaagaagtgctgtaatagagctcaacaagataatatctggtggtgtgctggaatatacaagagcagtggcagattctggaggcatatttccactggtgaaaatgcttgaagaggcggatggagatgcactggaggctatcttatctatcttatataatctgagcatggatccagagaatcacccagcaataattgctgctggagcagtgcctctgttgaagcggattgttcgtacagaagccccacaatggagtagtgcaattcagctgttgagaacattgcctgtatgacattgatgaagaaaatggccattcatcgccaacaaacattataaactgcacttagggcctgtttggtttgatggctaacttgccacactttgcctaacttttgtgcctaaggttagttcttcaattcgaacgactaaccttaggcaaagtgtggcacatttagccacgaaccaaacagccccttagtgcatgcacagccaatttcttagattgaggttgcggttgaacctagctccagctccctatcatcatcaaaatttgaattttatgatctggaagaaagcatcagcaaggcatttcctccaaagtagcgatatatgctgcccttttggctagttgaaaagcacaccggggcctgatgtgtccttttgctcacatcacatgccacggcaatagctagtaccacgaactattttggataccggcagtttgctggttgtgagaggacccaagaaagttcaaattgtagcttgctaaatcgtcgtgtttcgacactaggtgactttactctttaaaaatgctatcctttttgtgtaacctgaaatcctgaataacctccacggtgccaatatcaaaagaatctctttttgactccagctggggtaatcgtg

SEQ ID NO: 19768 - DNA, 3779 bp, Zea Mays
ccgagccacatcgcagtttattcggtgttcgagactagaagcctggagaaacgtttgttgttcttccagaacacgccctcggaatcctatcgcctcccacagcacacgacgcgcctttgctgaactctctctgtcgccatgctgccggcggtcgccgctgcatcccccggcctctcacatctgccgcgctaccaccaccttggccgtcgctttcacctccgccgccaccgccttctacctgctattccggccaggctatcgtgtggggccacccacgcccgccgccttctccttgccggcgcgttcgcaaaaggggagggttcttcaggacaggatgttgatcactctgctggtgccacaaattctgggtctgcataccttggtctcttcgttcgattgcttggcttggataatgacacccgtgatagggagcatgctgtttgcacactctatcaatactcccttggtggaaggaagagcatcgatgagataatgcaattccctggttgtattgttctcatcattagcctcctgaaatcagagtccattcttgcctgcgaagcagccacaggtcttctgcgtaacattacgtcagttcacatatataggaagatggctggtgagagtggagcaatggaagaaatcattaatcttctctgtaaatctacaataacccccaagattctagagcagtgtttgtgtaccatttggaacttttctattgatgaaaaatggaggtacaaggttctgaagagcgatgtcctaatgaagattgttggttacctggatgaagaagacatacaagtcaaagaagccgctggtggtatcatatcaaatttagctttgagttcctctagtcatggagctttggttgaagtaggcgtcatcccaaaattggttcatcttttgcaaaccaaagaagatgactataagattattagaaaggaagctaaaagttcactaatacagctggccactgatgattgttactacagccttataatagaggagggtctagttcgggttcctttggttggctcagctgcatataaagcctttaaacctctccctcattcatggccctcttttcctgatggctctaagattcagcggagttctcatccctcaaagtacggtgctaccgaactgctccttggcttgagtgtcaatgagaacgatacaaaaccagatgaagctaaaattaatgctatgataggacgttctaatcagcaattccttgcacgtgttggagctattgagttggatgatcaaggacaagaggaatctggatctgaaaagaatgacatgtataccattttgccatgggtagatggtgttgcacggttagttttaatccttggacttgaagatgtctctgcaatcaaaaaggctgctagagcaatgggtgatgcatcaataaatgaacatatgcgtacctcattcaaggaagctggggctgttaaacctctacttcagctgctcaagcacaaagatgtacatgttagagaagctggtgcttatgcgttggaaaaattatgtgtaagtgccacagtctgccataatatcaaaacagaaggtggactagaattgcttgtaaatatagtcaaggatcgacatactccagtagaactactagagaagataatttatatactttctcgaatgtttgacatggggatttgcatggttgctgtgccggatactgaaggttataaggatagtgaaaacagtgcaaagacatctgttaaccaagagatgtccagcgagttgatctttgattttgatgctatctcacacttaacggaagttctaaaggaagcatcgccaaggttgcaagcaaaagtctgttgtgtacttgaccatatagcagcttcggagcaacatgccaccgcaatgactgctgcttgcactggttcagtaattgaagctattcttgaaataggggttattcatgggaccagaagtgactctgagaactttgaaattcctagtgtagttataaaagaactcagtgaggctgtgtctgcagctgtgaggttactctcaaagttattgaactttgatcttttcatccgcagcataaacggtgaaaaaatcacttctttgctaagaagaacgctcaaatcaaatttcccccttcagtcaaaggattgtcttgcggcatgcctcattaagctagaatccagagctggcttatcaggagatcatggtgttagtagtatagatatggagataactatctatgagactattccaaggctaattgagcaaatgatgatatcactttcgtttgaaaataaaagaagtgctgtaatagagctcaacaagataatatctggtggtgtgctggaatatacaagagcagtggcagattctggaggcatatttccactggtgaaaatgcttgaagaggcggatggagatgcactggaggctatcttatctatcttatataatctgagcatggatccagagaatcacccagcaataattgctgctggagcagtgcctctgttgaagcggattgttcgtacagaagccccacaatggagtagtgcaattcagctgttgagaacattgcctgtatgacattgatgaagaaaatggccattcatcgccaacaaacattataaactgcacttagggcctgtttggtttgatggctaacttgccacactttgcctaacttttgtgcctaaggttagttcttcaattcgaacgactaaccttaggcaaagtgtggcacatttagccacgaaccaaacagccccttagtgcatgcacaggtacattgttaagatttcatcagtgtctacacgatcagtttgttccaaatgcctctgcgattatgattctttgaggttgttaatcactagggatgctagtcaccgtatcacttttacatgtataccttctctcttaacattacaatggtagaggataaccataattggagtacatatttggatatggatacaaggtttactgcctttcttggatgtttaggagacaaaattgatgcaaaaataaaattcaattagtactcacaggactactagctgctttgggaattttctggaatatataaaaagaagtgaactcaaaaccattcaactttttatcttagtttcagttgcgcattgctgaatttaacatatgtgcaattaagggttggcaatcataatactcatggatagaagtagaatttgtgaaggttctaagaatttattttctggtcctccttgatgactcgacgatgatcagagcatagggaggcatacttttatcttcgaacaaacctttggtggatatacaagtatttgttgactgaagaatccgatgcagcagaaaatgtctttgaaaaaccaatttcttagattgaggttgcggttgaacctagctccagctccctatcatcatcaaaatttgaattttatgatctggaagaaagcatcagcaaggcatttcctccaaagtagcgatatatgctgcccttttggctagttgaaaagcacaccggggcctgatgtgtccttttgctcacatcacatgccacggcaatagctagtaccacgaactattttggataccggcagtttgctggttgtgagaggacccaagaaagttcaaattgtagcttgctaaatcgtcgtgtttcgacactaggtgactttactctttaaaaatgctatcctttttgtgtaacctgaaatcctgaataacctccacggtgccaatatcaaaagaatctctttttgactccagctggggtaatcgtg

SEQ ID NO: 19769 - DNA, 3196 bp, Zea Mays
gccacatcgcagtttattcggtgttcgagactagaagcctggagaaacgtttgttgttcttccagaacacgccctcggaatcctatcgcctcccacagcacacgacgcgcctttgctgaactctctctgtcgccatgctgccggcggtcgccgctgcatcccccggcctctcacatctgccgcgctaccaccaccttggccgtcgctttcacctccgccgccaccgccttctacctgctattccggccaggctatcgtgtggggccacccacgcccgccgccttctccttgccggcgcgttcgcaaaaggggagggttcttcaggacaggatgttgatcactctgctggtgccacaaattctgggtctgcataccttggtctcttcgttcgattgcttggcttggataatgacacccgtgatagggagcatgctgtttgcacactctatcaatactcccttggtggaaggaagagcatcgatgagataatgcaattccctggttgtattgttctcatcattagcctcctgaaatcagagtccattcttgcctgcgaagcagccacaggtcttctgcgtaacattacgtcagttcacatatataggaagatggctggtgagagtggagcaatggaagaaatcattaatcttctctgtaaatctacaataacccccaagattctagagcagtgtttgtgtaccatttggaacttttctattgatgaaaaatggaggtacaaggttctgaagagcgatgtcctaatgaagattgttggttacctggatgaagaagacatacaagtcaaagaagccgctggtggtatcatatcaaatttagctttgagttcctctagtcatggagctttggttgaagtaggcgtcatcccaaaattggttcatcttttgcaaaccaaagaagatgactataagattattagaaaggaagctaaaagttcactaatacagctggccactgatgattgttactacagccttataatagaggagggtctagttcgggttcctttggttggctcagctgcatataaagcctttaaacctctccctcattcatggccctcttttcctgatggctctaagattcagcggagttctcatccctcaaagtacggtgctaccgaactgctccttggcttgagtgtcaatgagaacgatacaaaaccagatgaagctaaaattaatgctatgataggacgttctaatcagcaattccttgcacgtgttggagctattgagttggatgatcaaggacaagaggaatctggatctgaaaagaatgacatgtataccattttgccatgggtagatggtgttgcacggttagttttaatccttggacttgaagatgtctctgcaatcaaaaaggctgctagagcaatgggtgatgcatcaataaatgaacatatgcgtacctcattcaaggaagctggggctgttaaacctctacttcagctgctcaagcacaaagatgtacatgttagagaagctggtgcttatgcgttggaaaaattatgtgtaagtgccacagtctgccataatatcaaaacagaaggtggactagaattgcttgtaaatatagtcaaggatcgacatactccagtagaactactagagaagataatttatatactttctcgaatgtttgacatggggatttgcatggttgctgtgccggatactgaaggttataaggatagtgaaaacagtgcaaagacatctgttaaccaagagatgtccagcgagttgatctttgattttgatgctatctcacacttaacggaagttctaaaggaagcatcgccaaggttgcaagcaaaagtctgttgtgtacttgaccatatagcagcttcggagcaacatgccaccgcaatgactgctgcttgcactggttcagtaattgaagctattcttgaaataggggttattcatgggaccagaagtgactctgagaactttgaaattcctagtgtagttataaaagaactcagtgaggctgtgtctgcagctgtgaggttactctcaaagttattgaactttgatcttttcatccgcagcataaacggtgaaaaaatcacttctttgctaagaagaacgctcaaatcaaatttcccccttcagtcaaaggattgtcttgcggcatgcctcattaagctagaatccagagctggcttatcaggagatcatggtgttagtagtatagatatggagataactatctatgagactattccaaggctaattgagcaaatgatgatatcactttcgtttgaaaataaaagaagtgctgtaatagagctcaacaagataatatctggtggtgtgctggaatatacaagagcagtggcagattctggaggcatatttccactggtgaaaatgcttgaagaggcggatggagatgcactggaggctatcttatctatcttatataatctgagcatggatccagagaatcacccagcaataattgctgctggagcagtgcctctgttgaagcggattgttcgtacagaagccccacaatggagtagtgcaattcagctgttgagaacattgcctgtatgacattgatgaagaaaatggccattcatcgccaacaaacattataaactgcacttagggcctgtttggtttgatggctaacttgccacactttgcctaacttttgtgcctaaggttagttcttcaattcgaacgactaaccttaggcaaagtgtggcacatttagccacgaaccaaacagccccttagtgcatgcacagccaatttcttagattgaggttgcggttgaacctagctccagctccctatcatcatcaaaatttgaattttatgatctggaagaaagcatcagcaaggcatttcctccaaagtagcgatatatgctgcccttttggctagttgaaaagcacaccggggcctgatgtgtccttttgctcacatcacatgccacggcaatagctagtaccacgaactattttggataccggcagtttgctggttgtgagaggacccaagaaagttcaaattgtagcttgctaaatcgtcgtgtttcgacactaggtgactttactctttaaaaatgctatcctttttgtgtaacctgaaatcctgaataacctccacggtgccaatatcaaaagaatctctttttgactccagctggggtaatcgtg

SEQ ID NO: 19770 - DNA, 3644 bp, Zea Mays
cgcagtttattcggtgttcgagactagaagcctggagaaacgtttgttgttcttccagaacacgccctcggaatcctatcgcctcccacagcacacgacgcgcctttgctgaactctctctgtcgccatgctgccggcggtcgccgctgcatcccccggcctctcacatctgccgcgctaccaccaccttggccgtcgctttcacctccgccgccaccgccttctacctgctattccggccaggctatcgtgtggggccacccacgcccgccgccttctccttgccggcgcgttcgcaaaaggggagggttcttcaggacaggatgttgatcactctgctggtgccacaaattctgggtctgcataccttggtctcttcgttcgattgcttggcttggataatgacacccgtgatagggagcatgctgtttgcacactctatcaatactcccttggtggaaggaagagcatcgatgagataatgcaattccctggttgtattgttctcatcattagcctcctgaaatcagagtccattcttgcctgcgaagcagccacaggtcttctgcgtaacattacgtcagttcacatatataggaagatggctggtgagagtggagcaatggaagaaatcattaatcttctctgtaaatctacaataacccccaagattctagagcagtgtttgtgtaccatttggaacttttctattgatgaaaaatggaggtacaaggttctgaagagcgatgtcctaatgaagattgttggttacctggatgaagaagacatacaagtcaaagaagccgctggtggtatcatatcaaatttagctttgagttcctctagtcatggagctttggttgaagtaggcgtcatcccaaaattggttcatcttttgcaaaccaaagaagatgactataagattattagaaaggaagctaaaagttcactaatacagctggccactgatgattgttactacagccttataatagaggagggtctagttcgggttcctttggttggctcagctgcatataaagcctttaaacctctccctcattcatggccctcttttcctgatggctctaagattcagcggagttctcatccctcaaagtacggtgctaccgaactgctccttggcttgagtgtcaatgagaacgatacaaaaccagatgaagctaaaattaatgctatgataggacgttctaatcagcaattccttgcacgtgttggagctattgagttggatgatcaaggacaagaggaatctggatctgaaaagaatgacatgtataccattttgccatgggtagatggtgttgcacggttagttttaatccttggacttgaagatgtctctgcaatcaaaaaggctgctagagcaatgggtgatgcatcaataaatgaacatatgcgtacctcattcaaggaagctggggctgttaaacctctacttcagctgctcaagcacaaagatgtacatgttagagaagctggtgcttatgcgttggaaaaattatgtgtaagtgccacagtctgccataatatcaaaacagaaggtggactagaattgcttgtaaatatagtcaaggatcgacatactccagtagaactactagagaagataatttatatactttctcgaatgtttgacatggggatttgcatggttgctgtgccggatactgaaggttataaggatagtgaaaacagtgcaaagacatctgttaaccaagagatgtccagcgagttgatctttgattttgatgctatctcacacttaacggaagttctaaaggaagcatcgccaaggttgcaagcaaaagtctgttgtgtacttgaccatatagcagcttcggagcaacatgccaccgcaatgactgctgcttgcactggttcagtaattgaagctattcttgaaataggggttattcatgcataaacggtgaaaaaatcacttctttgctaagaagaacgctcaaatcaaatttcccccttcagtcaaaggattgtcttgcggcatgcctcattaagctagaatccagagctggcttatcaggagatcatggtgttagtagtatagatatggagataactatctatgagactattccaaggctaattgagcaaatgatgatatcactttcgtttgaaaataaaagaagtgctgtaatagagctcaacaagataatatctggtggtgtgctggaatatacaagagcagtggcagattctggaggcatatttccactggtgaaaatgcttgaagaggcggatggagatgcactggaggctatcttatctatcttatataatctgagcatggatccagagaatcacccagcaataattgctgctggagcagtgcctctgttgaagcggattgttcgtacagaagccccacaatggagtagtgcaattcagctgttgagaacattgcctgtatgacattgatgaagaaaatggccattcatcgccaacaaacattataaactgcacttagggcctgtttggtttgatggctaacttgccacactttgcctaacttttgtgcctaaggttagttcttcaattcgaacgactaaccttaggcaaagtgtggcacatttagccacgaaccaaacagccccttagtgcatgcacaggtacattgttaagatttcatcagtgtctacacgatcagtttgttccaaatgcctctgcgattatgattctttgaggttgttaatcactagggatgctagtcaccgtatcacttttacatgtataccttctctcttaacattacaatggtagaggataaccataattggagtacatatttggatatggatacaaggtttactgcctttcttggatgtttaggagacaaaattgatgcaaaaataaaattcaattagtactcacaggactactagctgctttgggaattttctggaatatataaaaagaagtgaactcaaaaccattcaactttttatcttagtttcagttgcgcattgctgaatttaacatatgtgcaattaagggttggcaatcataatactcatggatagaagtagaatttgtgaaggttctaagaatttattttctggtcctccttgatgactcgacgatgatcagagcatagggaggcatacttttatcttcgaacaaacctttggtggatatacaagtatttgttgactgaagaatccgatgcagcagaaaatgtctttgaaaaaccaatttcttagattgaggttgcggttgaacctagctccagctccctatcatcatcaaaatttgaattttatgatctggaagaaagcatcagcaaggcatttcctccaaagtagcgatatatgctgcccttttggctagttgaaaagcacaccggggcctgatgtgtccttttgctcacatcacatgccacggcaatagctagtaccacgaactattttggataccggcagtttgctggttgtgagaggacccaagaaagttcaaattgtagcttgctaaatcgtcgtgtttcgacactaggtgactttactctttaaaaatgctatcctttttgtgtaacctgaaatcctgaataacctccacggtgccaatatcaaaagaatctctttttgactccagctggggtaatcgtg

SEQ ID NO: 19771 - DNA, 4269 bp, Zea Mays
gtttattcggtgttcgagactagaagcctggagaaacgtttgttgttcttccagaacacgccctcggaatcctatcgcctcccacagcacacgacgcgcctttgctgaactctctctgtcgccatgctgccggcggtcgccgctgcatcccccggcctctcacatctgccgcgctaccaccaccttggccgtcgctttcacctccgccgccaccgccttctacctgctattccggccaggctatcgtgtggggccacccacgcccgccgccttctccttgccggcgcgttcgcaaaaggggagggttcttcaggacaggatgttgatcactctgctggtgccacaaattctgggtctgcataccttggtctcttcgttcgattgcttggcttggataatgacacccgtgatagggagcatgctgtttgcacactctatcaatactcccttggtggaaggaagagcatcgatgagataatgcaattccctggttgtattgttctcatcattagcctcctgaaatcagagtccattcttgcctgcgaagcagccacaggtcttctgcgtaacattacgtcagttcacatatataggaagatggctggtgagagtggagcaatggaagaaatcattaatcttctctgtaaatctacaataacccccaagattctagagcagtgtttgtgtaccatttggaacttttctattgatgaaaaatggaggtacaaggttctgaagagcgatgtcctaatgaagattgttggttacctggatgaagaagacatacaagtcaaagaagccgctggtggtatcatatcaaatttagctttgagttcctctagtcatggagctttggttgaagtaggcgtcatcccaaaattggttcatcttttgcaaaccaaagaagatgactataagattattagaaaggaagctaaaagttcactaatacagctggccactgatgattgttactacagccttataatagaggagggtctagttcgggttcctttggttggctcagctgcatataaagcctttaaacctctccctcattcatggccctcttttcctgatggctctaagattcagcggagttctcatccctcaaagtacggtgctaccgaactgctccttggcttgagtgtcaatgagaacgatacaaaaccagatgaagctaaaattaatgctatgataggacgttctaatcagcaattccttgcacgtgttggagctattgagttggatgatcaaggacaagaggaatctggatctgaaaagaatgacatgtataccattttgccatgggtagatggtgttgcacggttagttttaatccttggacttgaagatgtctctgcaatcaaaaaggctgctagagcaatgggtgatgcatcaataaatgaacatatgcgtacctcattcaaggaagctggggctgttaaacctctacttcagctgctcaagcacaaagatgtacatgttagagaagctggtgcttatgcgttggaaaaattatgtgtaagtgccacagtctgccataatatcaaaacagaaggtggactagaattgcttgtaaatatagtcaaggatcgacatactccagtagaactactagagaagccggatactgaaggttataaggatagtgaaaacagtgcaaagacatctgttaaccaagagatgtccaggttcgtttgagcctttgtggctatgcatgtgcctttctttacttttttttatatttttttgggaaatctttccattcccttaattcataataaagtgttgttgtagttttatgcacacatgagaaatggtataatattaccgcattaaatgtcttactgtttattcagtttatattgtttatataaatgtgtgagaccttgcacgattggtctgttaataatgtttaagttttatgcatgcatattatcaattgggtcttcagttataaatgagtttgctcttttatttacaataccttattagtgctatggccaatgttgtattactcttccccaaaaaattctgccttttttttcttagccacattgatctggcacctttgttccttactagcatttgaatatactcccataaccacgtctttctctatcgcggtaacaccaatttatcttctactgctgctctctgtcactgcatttatcaatgacagtatgattgttggcaaacatatcaactatgctgtggttctacatactaaagtttcagcgaggaccctctttgggacacacagatctttaagacacaacttatgcagtccatggcgagttgatctttgattttgatgctatctcacacttaacggaagttctaaaggaagcatcgccaaggttgcaagcaaaagtctgttgtgtacttgaccatatagcagcttcggagcaacatgccaccgcaatgactgctgcttgcactggttcagtaattgaagctattcttgaaataggggttattcatgcataaacggtgaaaaaatcacttctttgctaagaagaacgctcaaatcaaatttcccccttcagtcaaaggattgtcttgcggcatgcctcattaagctagaatccagagctggcttatcaggagatcatggtgttagtagtatagatatggagataactatctatgagactattccaaggctaattgagcaaatgatgatatcactttcgtttgaaaataaaagaagtgctgtaatagagctcaacaagataatatctggtggtgtgctggaatatacaagagcagtggcagattctggaggcatatttccactggtgaaaatgcttgaagaggcggatggagatgcactggaggctatcttatctatcttatataatctgagcatggatccagagaatcacccagcaataattgctgctggagcagtgcctctgttgaagcggattgttcgtacagaagccccacaatggagtagtgcaattcagctgttgagaacattgcctgtatgacattgatgaagaaaatggccattcatcgccaacaaacattataaactgcacttagggcctgtttggtttgatggctaacttgccacactttgcctaacttttgtgcctaaggttagttcttcaattcgaacgactaaccttaggcaaagtgtggcacatttagccacgaaccaaacagccccttagtgcatgcacaggtacattgttaagatttcatcagtgtctacacgatcagtttgttccaaatgcctctgcgattatgattctttgaggttgttaatcactagggatgctagtcaccgtatcacttttacatgtataccttctctcttaacattacaatggtagaggataaccataattggagtacatatttggatatggatacaaggtttactgcctttcttggatgtttaggagacaaaattgatgcaaaaataaaattcaattagtactcacaggactactagctgctttgggaattttctggaatatataaaaagaagtgaactcaaaaccattcaactttttatcttagtttcagttgcgcattgctgaatttaacatatgtgcaattaagggttggcaatcataatactcatggatagaagtagaatttgtgaaggttctaagaatttattttctggtcctccttgatgactcgacgatgatcagagcatagggaggcatacttttatcttcgaacaaacctttggtggatatacaagtatttgttgactgaagaatccgatgcagcagaaaatgtctttgaaaaagtttggattgttttaccctgttgcttaatacaccactagcaataatgacatcctttactgaacatgattttcttttgcagccaatttcttagattgaggttgcggttgaacctagctccagctccctatcatcatcaaaatttgaattttatgatctggaagaaagcatcagcaaggcatttcctccaaagtagcgatatatgctgcccttttggctagttgaaaagcacaccggggcctgatgtgtccttttgctcacatcacatgccacggcaatagctagtaccacgaactattttggataccggcagtttgctggttgtgagaggacccaagaaagttcaaattgtagcttgctaaatcgtcgtgtttcgacactaggtgactttactctttaaaaatgctatcctttttgtgtaacctgaaatcctgaataacctccacggtgccaatatcaaaagaatctctttttgactccagctggggtaatcgtg

SEQ ID NO: 19772 - DNA, 3779 bp, Zea Mays
gtgttcgagactagaagcctggagaaacgtttgttgttcttccagaacacgccctcggaatcctatcgcctcccacagcacacgacgcgcctttgctgaactctctctgtcgccatgctgccggcggtcgccgctgcatcccccggcctctcacatctgccgcgctaccaccaccttggccgtcgctttcacctccgccgccaccgccttctacctgctattccggccaggctatcgtgtggggccacccacgcccgccgccttctccttgccggcgcgttcgcaaaaggggagggttcttcaggacaggatgttgatcactctgctggtgccacaaattctgggtctgcataccttggtctcttcgttcgattgcttggcttggataatgacacccgtgatagggagcatgctgtttgcacactctatcaatactcccttggtggaaggaagagcatcgatgagataatgcaattccctggttgtattgttctcatcattagcctcctgaaatcagagtccattcttgcctgcgaagcagccacaggtcttctgcgtaacattacgtcagttcacatatataggaagatggctggtgagagtggagcaatggaagaaatcattaatcttctctgtaaatctacaataacccccaagattctagagcagtgtttgtgtaccatttggaacttttctattgatgaaaaatggaggtacaaggttctgaagagcgatgtcctaatgaagattgttggttacctggatgaagaagacatacaagtcaaagaagccgctggtggtatcatatcaaatttagctttgagttcctctagtcatggagctttggttgaagtaggcgtcatcccaaaattggttcatcttttgcaaaccaaagaagatgactataagattattagaaaggaagctaaaagttcactaatacagctggccactgatgattgttactacagccttataatagaggagggtctagttcgggttcctttggttggctcagctgcatataaagcctttaaacctctccctcattcatggccctcttttcctgatggctctaagattcagcggagttctcatccctcaaagtacggtgctaccgaactgctccttggcttgagtgtcaatgagaacgatacaaaaccagatgaagctaaaattaatgctatgataggacgttctaatcagcaattccttgcacgtgttggagctattgagttggatgatcaaggacaagaggaatctggatctgaaaagaatgacatgtataccattttgccatgggtagatggtgttgcacggttagttttaatccttggacttgaagatgtctctgcaatcaaaaaggctgctagagcaatgggtgatgcatcaataaatgaacatatgcgtacctcattcaaggaagctggggctgttaaacctctacttcagctgctcaagcacaaagatgtacatgttagagaagctggtgcttatgcgttggaaaaattatgtgtaagtgccacagtctgccataatatcaaaacagaaggtggactagaattgcttgtaaatatagtcaaggatcgacatactccagtagaactactagagaagataatttatatactttctcgaatgtttgacatggggatttgcatggttgctgtgccggatactgaaggttataaggatagtgaaaacagtgcaaagacatctgttaaccaagagatgtccaggttcgtttgagcctttgtggctatgcatgtgcctttctttacttttttttatatttttttgggaaatctttccattcccttaattcataataaagtgttgttgtagttttatgcacacatgagaaatggtataatattaccgcattaaatgtcttactgtttattcagtttatattgtttatataaatgtgtgagaccttgcacgattggtctgttaataatgtttaagttttatgcatgcatattatcaattgggtcttcagttataaatgagtttgctcttttatttacaataccttattagtgctatggccaatgttgtattactcttccccaaaaaattctgccttttttttcttagccacattgatctggcacctttgttccttactagcatttgaatatactcccataaccacgtctttctctatcgcggtaacaccaatttatcttctactgctgctctctgtcactgcatttatcaatgacagtatgattgttggcaaacatatcaactatgctgtggttctacatactaaagtttcagcgaggaccctctttgggacacacagatctttaagacacaacttatgcagtccatggcgagttgatctttgattttgatgctatctcacacttaacggaagttctaaaggaagcatcgccaaggttgcaagcaaaagtctgttgtgtacttgaccatatagcagcttcggagcaacatgccaccgcaatgactgctgcttgcactggttcagtaattgaagctattcttgaaataggggttattcatgggaccagaagtgactctgagaactttgaaattcctagtgtagttataaaagaactcagtgaggctgtgtctgcagctgtgaggttactctcaaagttattgaactttgatcttttcatccgcagcataaacggtgaaaaaatcacttctttgctaagaagaacgctcaaatcaaatttcccccttcagtcaaaggattgtcttgcggcatgcctcattaagctagaatccagagctggcttatcaggagatcatggtgttagtagtatagatatggagataactatctatgagactattccaaggctaattgagcaaatgatgatatcactttcgtttgaaaataaaagaagtgctgtaatagagctcaacaagataatatctggtggtgtgctggaatatacaagagcagtggcagattctggaggcatatttccactggtgaaaatgcttgaagaggcggatggagatgcactggaggctatcttatctatcttatataatctgagcatggatccagagaatcacccagcaataattgctgctggagcagtgcctctgttgaagcggattgttcgtacagaagccccacaatggagtagtgcaattcagctgttgagaacattgcctgtatgacattgatgaagaaaatggccattcatcgccaacaaacattataaactgcacttagggcctgtttggtttgatggctaacttgccacactttgcctaacttttgtgcctaaggttagttcttcaattcgaacgactaaccttaggcaaagtgtggcacatttagccacgaaccaaacagccccttagtgcatgcacagccaatttcttagattgaggttgcggttgaacctagctccagctccctatcatcatcaaaatttgaattttatgatctggaagaaagcatcagcaaggcatttcctccaaagtagcgatatatgctgcccttttggctagttgaaaagcacaccggggcctgatgtgtccttttgctcacatcacatgccacggcaatagctagtaccacgaactattttggataccggcagtttgctggttgtgagaggacccaagaaagttcaaattgtagcttgctaaatcgtcgtgtttcgacactaggtgactttactctttaaaaatgctatcctttttgtgtaacctgaaatcctgaataacctccacggtgccaatatcaaaagaatctctttttgactccagctggggtaatcgtg

SEQ ID NO: 19773 - DNA, 3621 bp, Zea Mays
gttcgagactagaagcctggagaaacgtttgttgttcttccagaacacgccctcggaatcctatcgcctcccacagcacacgacgcgcctttgctgaactctctctgtcgccatgctgccggcggtcgccgctgcatcccccggcctctcacatctgccgcgctaccaccaccttggccgtcgctttcacctccgccgccaccgccttctacctgctattccggccaggctatcgtgtggggccacccacgcccgccgccttctccttgccggcgcgttcgcaaaaggggagggttcttcaggacaggatgttgatcactctgctggtgccacaaattctgggtctgcataccttggtctcttcgttcgattgcttggcttggataatgacacccgtgatagggagcatgctgtttgcacactctatcaatactcccttggtggaaggaagagcatcgatgagataatgcaattccctggttgtattgttctcatcattagcctcctgaaatcagagtccattcttgcctgcgaagcagccacaggtcttctgcgtaacattacgtcagttcacatatataggaagatggctggtgagagtggagcaatggaagaaatcattaatcttctctgtaaatctacaataacccccaagattctagagcagtgtttgtgtaccatttggaacttttctattgatgaaaaatggaggtacaaggttctgaagagcgatgtcctaatgaagattgttggttacctggatgaagaagacatacaagtcaaagaagccgctggtggtatcatatcaaatttagctttgagttcctctagtcatggagctttggttgaagtaggcgtcatcccaaaattggttcatcttttgcaaaccaaagaagatgactataagattattagaaaggaagctaaaagttcactaatacagctggccactgatgattgttactacagccttataatagaggagggtctagttcgggttcctttggttggctcagctgcatataaagcctttaaacctctccctcattcatggccctcttttcctgatggctctaagattcagcggagttctcatccctcaaagtacggtgctaccgaactgctccttggcttgagtgtcaatgagaacgatacaaaaccagatgaagctaaaattaatgctatgataggacgttctaatcagcaattccttgcacgtgttggagctattgagttggatgatcaaggacaagaggaatctggatctgaaaagaatgacatgtataccattttgccatgggtagatggtgttgcacggttagttttaatccttggacttgaagatgtctctgcaatcaaaaaggctgctagagcaatgggtgatgcatcaataaatgaacatatgcgtacctcattcaaggaagctggggctgttaaacctctacttcagctgctcaagcacaaagatgtacatgttagagaagctggtgcttatgcgttggaaaaattatgtgtaagtctgccataatatcaaaacagaaggtggactagaattgcttgtaaatatagtcaaggatcgacatactccagtagaactactagagaagataatttatatactttctcgaatgtttgacatggggatttgcatggttgctgtgccggatactgaaggttataaggatagtgaaaacagtgcaaagacatctgttaaccaagagatgtccagcgagttgatctttgattttgatgctatctcacacttaacggaagttctaaaggaagcatcgccaaggttgcaagcaaaagtctgttgtgtacttgaccatatagcagcttcggagcaacatgccaccgcaatgactgctgcttgcactggttcagtaattgaagctattcttgaaataggggttattcatgcataaacggtgaaaaaatcacttctttgctaagaagaacgctcaaatcaaatttcccccttcagtcaaaggattgtcttgcggcatgcctcattaagctagaatccagagctggcttatcaggagatcatggtgttagtagtatagatatggagataactatctatgagactattccaaggctaattgagcaaatgatgatatcactttcgtttgaaaataaaagaagtgctgtaatagagctcaacaagataatatctggtggtgtgctggaatatacaagagcagtggcagattctggaggcatatttccactggtgaaaatgcttgaagaggcggatggagatgcactggaggctatcttatctatcttatataatctgagcatggatccagagaatcacccagcaataattgctgctggagcagtgcctctgttgaagcggattgttcgtacagaagccccacaatggagtagtgcaattcagctgttgagaacattgcctgtatgacattgatgaagaaaatggccattcatcgccaacaaacattataaactgcacttagggcctgtttggtttgatggctaacttgccacactttgcctaacttttgtgcctaaggttagttcttcaattcgaacgactaaccttaggcaaagtgtggcacatttagccacgaaccaaacagccccttagtgcatgcacaggtacattgttaagatttcatcagtgtctacacgatcagtttgttccaaatgcctctgcgattatgattctttgaggttgttaatcactagggatgctagtcaccgtatcacttttacatgtataccttctctcttaacattacaatggtagaggataaccataattggagtacatatttggatatggatacaaggtttactgcctttcttggatgtttaggagacaaaattgatgcaaaaataaaattcaattagtactcacaggactactagctgctttgggaattttctggaatatataaaaagaagtgaactcaaaaccattcaactttttatcttagtttcagttgcgcattgctgaatttaacatatgtgcaattaagggttggcaatcataatactcatggatagaagtagaatttgtgaaggttctaagaatttattttctggtcctccttgatgactcgacgatgatcagagcatagggaggcatacttttatcttcgaacaaacctttggtggatatacaagtatttgttgactgaagaatccgatgcagcagaaaatgtctttgaaaaaccaatttcttagattgaggttgcggttgaacctagctccagctccctatcatcatcaaaatttgaattttatgatctggaagaaagcatcagcaaggcatttcctccaaagtagcgatatatgctgcccttttggctagttgaaaagcacaccggggcctgatgtgtccttttgctcacatcacatgccacggcaatagctagtaccacgaactattttggataccggcagtttgctggttgtgagaggacccaagaaagttcaaattgtagcttgctaaatcgtcgtgtttcgacactaggtgactttactctttaaaaatgctatcctttttgtgtaacctgaaatcctgaataacctccacggtgccaatatcaaaagaatctctttttgactccagctggggtaatcgtg

SEQ ID NO: 19774 - DNA, 3120 bp, Zea Mays
gttcgagactagaagcctggagaaacgtttgttgttcttccagaacacgccctcggaatcctatcgcctcccacagcacacgacgcgcctttgctgaactctctctgtcgccatgctgccggcggtcgccgctgcatcccccggcctctcacatctgccgcgctaccaccaccttggccgtcgctttcacctccgccgccaccgccttctacctgctattccggccaggctatcgtgtggggccacccacgcccgccgccttctccttgccggcgcgttcgcaaaaggggagggttcttcaggacaggatgttgatcactctgctggtgccacaaattctgggtctgcataccttggtctcttcgttcgattgcttggcttggataatgacacccgtgatagggagcatgctgtttgcacactctatcaatactcccttggtggaaggaagagcatcgatgagataatgcaattccctggttgtattgttctcatcattagcctcctgaaatcagagtccattcttgcctgcgaagcagccacaggtcttctgcgtaacattacgtcagttcacatatataggaagatggctggtgagagtggagcaatggaagaaatcattaatcttctctgtaaatctacaataacccccaagattctagagcagtgtttgtgtaccatttggaacttttctattgatgaaaaatggaggtacaaggttctgaagagcgatgtcctaatgaagattgttggttacctggatgaagaagacatacaagtcaaagaagccgctggtggtatcatatcaaatttagctttgagttcctctagtcatggagctttggttgaagtaggcgtcatcccaaaattggttcatcttttgcaaaccaaagaagatgactataagattattagaaaggaagctaaaagttcactaatacagctggccactgatgattgttactacagccttataatagaggagggtctagttcgggttcctttggttggctcagctgcatataaagcctttaaacctctccctcattcatggccctcttttcctgatggctctaagattcagcggagttctcatccctcaaagtacggtgctaccgaactgctccttggcttgagtgtcaatgagaacgatacaaaaccagatgaagctaaaattaatgctatgataggacgttctaatcagcaattccttgcacgtgttggagctattgagttggatgatcaaggacaagaggaatctggatctgaaaagaatgacatgtataccattttgccatgggtagatggtgttgcacggttagttttaatccttggacttgaagatgtctctgcaatcaaaaaggctgctagagcaatgggtgatgcatcaataaatgaacatatgcgtacctcattcaaggaagctggggctgttaaacctctacttcagctgctcaagcacaaagatgtacatgttagagaagctggtgcttatgcgttggaaaaattatgtgtaagtgccacagtctgccataatatcaaaacagaaggtggactagaattgcttgtaaatatagtcaaggatcgacatactccagtagaactactagagaagccggatactgaaggttataaggatagtgaaaacagtgcaaagacatctgttaaccaagagatgtccagcgagttgatctttgattttgatgctatctcacacttaacggaagttctaaaggaagcatcgccaaggttgcaagcaaaagtctgttgtgtacttgaccatatagcagcttcggagcaacatgccaccgcaatgactgctgcttgcactggttcagtaattgaagctattcttgaaataggggttattcatgggaccagaagtgactctgagaactttgaaattcctagtgtagttataaaagaactcagtgaggctgtgtctgcagctgtgaggttactctcaaagttattgaactttgatcttttcatccgcagcataaacggtgaaaaaatcacttctttgctaagaagaacgctcaaatcaaatttcccccttcagtcaaaggattgtcttgcggcatgcctcattaagctagaatccagagctggcttatcaggagatcatggtgttagtagtatagatatggagataactatctatgagactattccaaggctaattgagcaaatgatgatatcactttcgtttgaaaataaaagaagtgctgtaatagagctcaacaagataatatctggtggtgtgctggaatatacaagagcagtggcagattctggaggcatatttccactggtgaaaatgcttgaagaggcggatggagatgcactggaggctatcttatctatcttatataatctgagcatggatccagagaatcacccagcaataattgctgctggagcagtgcctctgttgaagcggattgttcgtacagaagccccacaatggagtagtgcaattcagctgttgagaacattgcctgtatgacattgatgaagaaaatggccattcatcgccaacaaacattataaactgcacttagggcctgtttggtttgatggctaacttgccacactttgcctaacttttgtgcctaaggttagttcttcaattcgaacgactaaccttaggcaaagtgtggcacatttagccacgaaccaaacagccccttagtgcatgcacagccaatttcttagattgaggttgcggttgaacctagctccagctccctatcatcatcaaaatttgaattttatgatctggaagaaagcatcagcaaggcatttcctccaaagtagcgatatatgctgcccttttggctagttgaaaagcacaccggggcctgatgtgtccttttgctcacatcacatgccacggcaatagctagtaccacgaactattttggataccggcagtttgctggttgtgagaggacccaagaaagttcaaattgtagcttgctaaatcgtcgtgtttcgacactaggtgactttactctttaaaaatgctatcctttttgtgtaacctgaaatcctgaataacctccacggtgccaatatcaaaagaatctctttttgactccagctggggtaatcgtg

SEQ ID NO: 19775 - DNA, 857 bp, Zea Mays
ctcgtcgtcagattcagatacgtacagtacagtagccgccaatgctgtgtccatgcatgcatcatgttctcgtatataatcgttccagtacagctcggcgcactcggtgctggaggtgagcgaggcggaccacggcgcgtgctcggcgagcaacccgctgcggtcgcaccagggccagagcaccaccatcccgctcaccaaggccggcacccgctacttcatctgcggcgcccccggccactgcgcctcgggcatgaaggtcgccatcaccgtctccggcggcggcggcggcggcagcagcagcgccgacaacaccgcgactccgtcgggtccctccgtgcgggcgacgaacacgaagccggcgtccggtggcgcgacgacgacggacgagtcggactccagcgcggctggcagcggcgcccgcctcgcgatgggcctgctgttcggggccgcgggcctcgctgcaataatgggctgaattgaggacccgctagggaaaaggcagtgcggtttcacgaatttcctatttagtttcctgcgttctctgcttgcgtccccgagtcgcgaggctgagtgttcggccgtgcatatttttcgtatacttttgctgtgtttttttggggctattcgttgttcaatactgttgtttcagaataaaatttcatccttgaccattccatgcaactgtttgacagtggacctgcgagggaagagccttttctcactcgtatttaaacggccgtcgtggaccttgacgtcgtcccaagccactcgactcgacgacgacatcatgtggcaaacagaggactcgaacggcccacggcaaagtatcaatgaatcatctgtctttttttttt

SEQ ID NO: 19776 - DNA, 1963 bp, Zea Mays
aacggaaggtcctcccgcgatcgcatccagccgtccggcccataccgcgaatgtccacgaccgctgcaaaagtttcttcttcaggttcttaatcagtaatcacgcacggacgataaatccaagtaaggaaatccccgatgatctcctgcgcgtcgcagcgccagccactcgattagtggagtccaccaaccaagcacgcgtccctccccgtcccagatcccatcccgcggcagccggtcagtccgatccatctccagtacccagcccgtcacccgccttccccgttcgctctcgtcggcgcgcgatggagggtctcatcaaggggttggtccacgtggccatcgacgccgtggaggacgccgtgagggagagggaccacggccgcgccgacgacgacgaggtgccgaggaggagggcggcccaaagctccgatccagatgacgacggggaggaggaacgcgacgaacgatcgcggtcgacgtgggccgaggtcgtctccgagcagaagggcagcgatccggacgagcgccgggaccatcgaagctcggggcgggacaatcgccatgagaggagggatgacgagggttggaaaagggccgatggtcggaaccagcagcagcaccacgcaggccggcagaaccagtgcgagggggaggaaaggtgggatggcagtggcagccggcggcgtcagcaacagcagcaggcacaaggatacgggaatcagcatcaggaagaagaaaggataaacgatggaggctggcagaccgtcggtgagaaaaagcgccatggaagaccacagcagtctgaagcatggaatggatacagaaagccaccatcagaacaaaagtactctgaggatgtcggtcatatccaccaaggactcaatttcgagcccaccagggaggagctgaatagcttatcgaaagcgtgtagccgactttgggagctcgatatgaaccgtattgttcctggtaaggactacataatcgactgtggcaaggggaagaaagtttatcagaagggtgatatggcatctgaaagcttgttcagctggctaggcgacgatgtgctaagaaaacccacctactcacgtttctgcgcacttctggataactacaacccccaccaggggtacaaagaagttgttacccagcaggataagcacgaagaaatagctttcgttgaagagatcgctagaacagcgccaattaagtacttgcaccggtacttagtgcagaagggggctgtgcctcaggactacgaggacttcaagagaatgctgacatccctatggtttgatttgtatggaagaggtggcaactctagctgctcttctgcctttgagcatgtgtttgttggtgagatcaaaggacggggacaaggggagagtgaggtatcaggcttccataactggattcagttttacctggaagaagccaagggaaatgtggattaccaaggttatatatttccaaggcgccgtggtgaatcgcctgattcagagatacagctgctgactgttcagtttgagtggcatggcgtgctgaaatcggtatccagcacgttgattggcgtcagtcctgagtttgaggttgcactctacacgttgtgcttttttgttggaggggaagacaaccgcgtcgatattggcccgtatagtgtgaacgtcaagtgctaccgattggggaacaacaaaattggatcagcctttcccattgtagagaactgattatctggtaccatactgttcaatttgttgctgccatctgcaatagtattgctacttgcactgctaaaaagttgacgaccgagactgaagttacttttcatgattttgttgctgtggatgtggaagctttccgatgtatattttctgcctttgtcatgtttatttactgatatgctgtttgttgatgaaaattcagtacggtctgcaaagacaaaggtgagcataagaatgcag

SEQ ID NO: 19777 - DNA, 1877 bp, Zea Mays
atccagccgtccggcccataccgcgaatgtccacgaccgctgcaaaagtttcttcttcaggttcttaatcagtaatcacgcacggacgataaatccaagtaaggaaatccccgatgatctcctgcgcgtcgcagcgccagccactcgattagtggagtccaccaaccaagcacgcgtccctccccgtcccagatcccatcccgcggcagccggtcagtccgatccatctccagtacccagcccgtcacccgccttccccgttcgctctcgtcggcgcgcgatggagggtctcatcaaggggttggtccacgtggccatcgacgccgtggaggacgccgtgagggagagggaccacggccgcgccgacgacgacgaggtgccgaggaggagggcggcccaaagctccgatccagatgacgacggggaggaggaacgcgacgaacgatcgcggtcgacgtgggccgaggtcgtctccgagcagaagggcagcgatccggacgagcgccgggaccatcgaagctcggggcgggacaatcgccatgagaggagggatgacgagggttggaaaagggccgatggtcggaaccagcagcagcaccacgcaggccggcagaaccagtgcgagggggaggaaaggtgggatggcagtggcagccggcggcgtcagcaacagcagcaggcacaaggatacgggaatcagcatcaggaagaagaaaggataaacgatggaggctggcagaccgtcggtgagaaaaagcgccatggaagaccacagcagtctgaagcatggaatggatacagaaagccaccatcagaacaaaagtactctgaggatgtcggtcatatccaccaaggactcaatttcgagcccaccagggaggagctgaatagcttatcgaaagcgtgtagccgactttgggagctcgatatgaaccgtattgttcctgctggctaggcgacgatgtgctaagaaaacccacctactcacgtttctgcgcacttctggataactacaacccccaccaggggtacaaagaagttgttacccagcaggataagcacgaagaaatagctttcgttgaagagatcgctagaacagcgccaattaagtacttgcaccggtacttagtgcagaagggggctgtgcctcaggactacgaggacttcaagagaatgctgacatccctatggtttgatttgtatggaagaggtggcaactctagctgctcttctgcctttgagcatgtgtttgttggtgagatcaaaggacggggacaaggggagagtgaggtatcaggcttccataactggattcagttttacctggaagaagccaagggaaatgtggattaccaaggttatatatttccaaggcgccgtggtgaatcgcctgattcagagatacagctgctgactgttcagtttgagtggcatggcgtgctgaaatcggtatccagcacgttgattggcgtcagtcctgagtttgaggttgcactctacacgttgtgcttttttgttggaggggaagacaaccgcgtcgatattggcccgtatagtgtgaacgtcaagtgctaccgattggggaacaacaaaattggatcagcctttcccattgtagagaactgattatctggtgctatgcttctgcaggtaccatactgttcaatttgttgctgccatctgcaatagtattgctacttgcactgctaaaaagttgacgaccgagactgaagttacttttcatgattttgttgctgtggatgtggaagctttccgatgtatattttctgcctttgtcatgtttatttactgatatgctgtttgttgatgaaaattcagtacggtctgcaaagacaaaggtgagcataagaatgcag

SEQ ID NO: 19778 - DNA, 1973 bp, Zea Mays
atccagccgtccggcccataccgcgaatgtccacgaccgctgcaaaagtttcttcttcaggttcttaatcagtaatcacgcacggacgataaatccaagtaaggaaatccccgatgatctcctgcgcgtcgcagcgccagccactcgattagtggagtccaccaaccaagcacgcgtccctccccgtcccagatcccatcccgcggcagccggtcagtccgatccatctccagtacccagcccgtcacccgccttccccgttcgctctcgtcggcgcgcgatggagggtctcatcaaggggttggtccacgtggccatcgacgccgtggaggacgccgtgagggagagggaccacggccgcgccgacgacgacgaggtgccgaggaggagggcggcccaaagctccgatccagatgacgacggggaggaggaacgcgacgaacgatcgcggtcgacgtgggccgaggacaatcgccatgagaggagggatgacgagggttggaaaagggccgatggtcggaaccagcagcagcaccacgcaggccggcagaaccagtgcgagggggaggaaaggtgggatggcagtggcagccggcggcgtcagcaacagcagcaggcacaaggatacgggaatcagcatcaggaagaagaaaggataaacgatggaggctggcagaccgtcggtgagaaaaagcgccatggaagaccacagcagtctgaagcatggaatggatacagaaagccaccatcagaacaaaagtactctgaggatgtcggtcatatccaccaaggactcaatttcgagcccaccagggaggagctgaatagcttatcgaaagcgtgtagccgactttgggagctcgatatgaaccgtattgttcctggtaaggactacataatcgactgtggcaaggggaagaaagtttatcagaagggtgatatggcatctgaaagcttgttcagctggctaggcgacgatgtgctaagaaaacccacctactcacgtttctgcgcacttctggataactacaacccccaccaggggtacaaagaagttgttacccagcaggataagcacgaagaaatagctttcgttgaagagatcgctagaacagcgccaattaagtacttgcaccggtacttagtgcagaagggggctgtgcctcaggactacgaggacttcaagagaatgctgacatccctatggtttgatttgtatggaagaggtggcaactctagctgctcttctgcctttgagcatgtgtttgttggtgagatcaaaggacggggacaaggggagagtgaggtatcaggcttccataactggattcagttttacctggaagaagccaagggaaatgtggattaccaaggttatatatttccaaggcgccgtggtgaatcgcctgattcagagatacagctgctgactgttcagtttgagtggcatggcgtgctgaaatcggtatccagcacgttgattggcgtcagtcctgagtttgaggttgcactctacacgttgtgcttttttgttggaggggaagacaaccgcgtcgatattggcccgtatagtgtgaacgtcaagtgctaccgattggggaacaacaaaattggatcagcctttcccattgtagagaactgattatctggtgctatgcttctgcaggtttccaaatattcactttcttcgtttcataatcaattacgtgaagttaacaatgtactattttacttgtgcatgaaaaggtaccatactgttcaatttgttgctgccatctgcaatagtattgctacttgcactgctaaaaagttgacgaccgagactgaagttacttttcatgattttgttgctgtggatgtggaagctttccgatgtatattttctgcctttgtcatgtttatttactgatatgctgtttgttgatgaaaattcagtacggtctgcaaagacaaaggtgagcataagaatgcag

SEQ ID NO: 19779 - DNA, 5120 bp, Zea Mays
cgccagatctccaagtctccgtgtcaggtcaccgcaatccaagccacacagctttcgcctccggcgctagggtttcgcctccctccttgttcggtccgcgagtgtaccaggaccaggtgatttcttcccctttgatctgctgtgacgtgggagatgccgccgaagtctaagaggggtggcgctgccgccgcgaggaaggcgccggtgacgaggggccggatggggagggcgcaggctgcggcggaagcggcgccggttgtggaggagatggaggcgcctgctgaggaggtgaaggccgccgaggaggtcccgaaggtggtggaggcaccgaaggtggtggaggactcgaaggtggtggaggagccgaaaccctcgcctctgctgccgcaacagccggtggtggtggtggagaaagactccgatatcgcagccaacggtgccaaccagggtgaagatgacagagctgcaaaagaaatatatgaagaagaggacaaaggtgaacggctggagtttgaggatgaaccagaatatgaagaggaggctgctgtagactatgatgagaaagatttggagcagtatgaagagcaatatgaggatggtgatgaagaggtggagtatactgaagacgtggttgaagtggagacagatatggtggatgaggaacttgatgaaggtggtgatgatgtggagggggagggatacgaaaatgctgacgaagaccatcatgtggatggagatgatgaggagcataatgaaatggttaaagagcaccgtaagcggaaggagtttgaaatttttgttggtggactagataaagatgcaacagaaaatgaccttatgaaggtttttggtgaagttggtgagatcactgaagttcgtctgatgatgaaccctgtcacaaagaagaataaaggctttgccttcctgcgatatgcaactgtagagcaagcaaggcgtgctgtttcagagctaaagaatccactggtgcggggtaaacaatgtggcgttgctccaagtcatgacaatgatacactctttgttggcaatatctgtaaaacatggacaaaagaacatttgaaggataaactgaagagttatggtgtcgaaagttttgacgacttactacttgctgaggacactaacaatcctgggatgaatcgtggctatgccttgcttgagttttctactcgacctgaggcaatggatgctttcaggacattacaaaagagggatgtagtatttggagttgatcgtagcgcaaaggtttcctttgctgattcctaccctcaagtcgatgatgaaataatggcacaggtcagaactgtatttcttgatggccttcctccctcatgggatgaagaccgtgttaagaaatatctcaaaaagtatggagctattgagaaagtcgaacttgcacgaaacatgccagctgccaagagaaaggattttgggtttgttacatttgatacacatgataatgctgttgcatgtactgaagggatgagtaactctgagatcggtgaaggtgaacacaaggcaaaagtaagggctagactgtcgagaccattgcagagaccacctagaatgaaacatggattgagaggaaattttagagttgggcatggtgccccgcgaggtggccgtttaccatattctcgtgctcctccacctcgcaggcctccgccacgtcttattcggcctgctgttagccgcttaccatccatcaggagtcatccgttgaagcggcccatagatattagagataggcgtcctgctatgtcaatgccagatagagctaggcgtttccctccagagagatcttatgacaggaggcccccagctccagtttacctgaagagaagtccaaggagagaatacgggaggcgtgatgaacttcctcctccaaggagcagagctacaactgattacattaccagagttccggttgatagacgtccctctttgagggatgattattcaccccggggatcaggttattcagacctcggtcctcgtagtgctccccgtctttctgataggcgagcttatgctgatgatagttatggggagaagtttgaccggcctttagtggcctatagggagggtcgcggccgtgattatgacaccatttctggatcaaagcgtccgtatgcagatatggatgatgtgcctcggtaccaagaaatcggtgtccgtcagtctaaggcacgtttagactacgacattggtggcagcagtgctcggtatggagatacatatagtgagaggtctggacgaccacatgcgggatatagtagcagccgatctatccctgttcatgattcagcatatggcagcagccgtcatggaatgagttatggaggttctgctagcagtgctgatgctggtggtatgtacccaccgagttacagtggtagctatgggtctcgtggatctgatgttggtgggagttcatattcttcactttactcgggtcgcaatttgggtaccagcagtggtggctactatggaggtagcggttccagttcatattactaagatttggcatcacctcgtctttgtggaacagatttggcatcataggactttggtgtaggccctgcattttatggagctcctcgatttaagccacacagatctgtaaaagaagtgccaagcacccaagtgaggcaatgttttccaataagacatttcaacgaagccagaccatcgatttggttcgagcagtagttctgaggacgttctggcttgtttatgtaatgtaaggatttgctttatctggtcaagagttctgaacataacaaccagatatggtgttttaagtgtttcgacatgtttacttccagtgtttctataacattattgagacagatatggagtgtactttgaggtagtttctgcaattcaagttatttggggattacatcttgtgatgtgccggcaaaggccaggcttacaaaagaagttttggaatgagtgcttcttgtaaggctgttagtttctgaaaccctcccttcccttctgtcttctagaggatcaataatcaccaagacagaatgttgattggtcagacttaaattctggacttctatgttgcattccgggtacaaatggtttaatgggttgccaaattttgagagaaactgcttgtgtcaaaaaatttcccaagcagttactttggtttctccaaagtttaagataacagaacttgaagcaaaaggacatttgaaacattgagtatagccttgcaatactatgactatatagagcacaaggcatcatgtaaatctaacaagcagtgccagtattttacagaagggtaggcctagtgcagtggtgagaggctgagagctgactcactgagttaccaggttgcgggtttgaaacagcctctccgcatttgcaggggaaggcttgccttggctcatcctttttctagaccccattcaagttcggtttatcctttccccaggccccactcatgtgcgagccttcgacactgggtctggcctttagtgctagtattgaacaccaccctggtttgatactttgatcacccactatttacgatttttttggagtgttttgtggagtatggattactaacaattttgagcttaatgggcattggatgattgcaagctttcaagaatcttgctggaggtgtaacacactaactgatcaagctacagaaaaaagtatgatttgtctgacaccattaacttctaaccataatttcacaacatagtttgggaccaaacctttagctcaatattgtcacacttagccacttaggctttaaagccaccatatgtgtgatatatcttatcagtctagtatatgataccatgcttgtttgtgtggataatttttactaaatgataacttggccaagaatttacctttatataaaaaaaaactcggccggggagggaaaagaccaccctcccggtattccatataagaagagaccgaaacaatggtcccggccgagaaaatccccgaaccctggcccctcatcactaacgggccgacgtcaactgtccactctgcaacggcccaaccggagggtggcgcacaagacatcgtatcccgagagcggatggggcacagcgaggggttttttttttaaccaagcctgaaaattcgctcccgataggaatcgagcccaggacttggagttgctactcggaagtcctcaacctctaggctagaggccctttcgcaatttacctttatataagttgaagaaacagggtgtgctgtgttgctgtggtttgacagtgactaattctgtatggtgacctgcaaagtagctgaaagatgactagtaatatcaatgcccagctatgcaggccgcagagagcttaaatgcaagcttaacttataactgctggtgtcatcttttgagttttagcaaggaaaactcatgcactaactttggatttacttgagctagggataataacactattggatcctgagttcagactgagagacagttttgtccttgaaattgttttttggagataacctagtgatgccactgagtaggatgaaggatcaatatgtagtttcatgaagagaggctgctctgagatgtcttgcagtatgcagaaacacattttgtgtgcttattaatgtacttgagggccattatttgttacttatgtgttataataattattggagtaggacttcatgagggaaattgatgatggtattagatctagtagaactgttgattgccaattgtgcacagaagtaatgctatatgcaatgacaccaatgagtttggttactgggagccagtatatgtgggaatcagcacctggtggtgcccatttgaaaaaacaagttgaaggggattatttttcttttgcgtggcaacgatgatagatctgaaagcagaaataatttcttgaaaaacagtagccatagaattaagtacaagaatgctctattcaaattctgagttgaaggctgttgaatttttctccccagttgctggagcaaactcaaggatctagcacatttaagtttaactatctagtcaagtattcaacataaagatacttcagaatcacaatgaaaagtctacaatctgcatattaattgta

SEQ ID NO: 19780 - DNA, 2546 bp, Zea Mays
ccgcaatccaagccacacagctttcgcctccggcgctagggtttcgcctccctccttgttcggtccgcgagtgtaccaggaccaggtgatttcttcccctttgatctgctgtgacgtgggagatgccgccgaagtctaagaggggtggcgctgccgccgcgaggaaggcgccggtgacgaggggccggatggggagggcgcaggctgcggcggaagcggcgccggttgtggaggagatggaggcgcctgctgaggaggtgaaggccgccgaggaggtcccgaaggtggtggaggcaccgaaggtggtggaggactcgaaggtggtggaggagccgaaaccctcgcctctgctgccgcaacagccggtggtggtggtggagaaagactccgatatcgcagccaacggtgccaaccagggtgaagatgacagagctgcaaaagaaatatatgaagaagaggacaaaggtgaacggctggagtttgaggatgaaccagaatatgaagaggaggctgctgtagactatgatgagaaagatttggagcagtatgaagagcaatatgaggatggtgatgaagaggtggagtatactgaagacgtggttgaagtggagacagatatggtggatgaggaacttgatgaaggtggtgatgatgtggagggggagggatacgaaaatgctgacgaagaccatcatgtggatggagatgatgaggagcataatgaaatggttaaagagcaccgtaagcggaaggagtttgaaatttttgttggtggactagataaagatgcaacagaaaatgaccttatgaaggtttttggtgaagttggtgagatcactgaagttcgtctgatgatgaaccctgtcacaaagaagaataaaggctttgccttcctgcgatatgcaactgtagagcaagcaaggcgtgctgtttcagagctaaagaatccactggtgcggggtaaacaatgtggcgttgctccaagtcatgacaatgatacactctttgttggcaatatctgtaaaacatggacaaaagaacatttgaaggataaactgaagagttatggtgtcgaaagttttgacgacttactacttgctgaggacactaacaatcctgggatgaatcgtggctatgccttgcttgagttttctactcgacctgaggcaatggatgctttcaggacattacaaaagagggatgtagtatttggagttgatcgtagcgcaaaggtttcctttgctgattcctaccctcaagtcgatgatgaaataatggcacaggtcagaactgtatttcttgatggccttcctccctcatgggatgaagaccgtgttaagaaatatctcaaaaagtatggagctattgagaaagtcgaacttgcacgaaacatgccagctgccaagagaaaggattttgggtttgttacatttgatacacatgataatgctgttgcatgtactgaagggatgagtaactctgagatcggtgaaggtgaacacaaggcaaaagtaagggctagactgtcgagaccattgcagagaccacctagaatgaaacatggattgagaggaaattttagagttgggcatggtgccccgcgaggtggccgtttaccatattctcgtgctcctccacctcgcaggcctccgccacgtcttattcggcctgctgttagccgcttaccatccatcaggagtcatccgttgaagcggcccatagatattagagataggcgtcctgctatgtcaatgccagatagagctaggcgtttccctccagagagatcttatgacaggaggcccccagctccagtttacctgaagagaagtccaaggagagaatacgggaggcgtgatgaacttcctcctccaaggagcagagctacaactgattacattaccagagttccggttgatagacgtccctctttgagggatgattattcaccccggggatcaggttattcagacctcggtcctcgtagtgctccccgtctttctgataggcgagcttatgctgatgatagttatggggagaagtttgaccggcctttagtggcctatagggagggtcgcggccgtgattatgacaccatttctggatcaaagcgtccgtatgcagatatggatgatgtgcctcggtaccaagaaatcggtgtccgtcagtctaaggcacgtttagactacgacattggtggcagcagtgctcggtatggagatacatatagtgagaggtctggacgaccacatgcgggatatagtagcagccgatctatccctgttcatgattcagcatatggcagcagccgtcatggaatgagttatggaggttctgctagcagtgctgatgctggtggtatgtacccaccgagttacagtggtagctatgggtctcgtggatctgatgttggtgggagttcatattcttcactttactcgggtcgcaatttgggtaccagcagtggtggctactatggaggtagcggttccagttcatattactaaggacttttgattaagagtgtggagaagccctaacaaaag

SEQ ID NO: 19781 - DNA, 921 bp, Zea Mays
accgcgaaattttacgggtcgcacgtcccgcgccgcgcggcgtgtcggtcaaggtgcccccacgcgccgcggttggcgccgccgccgctgccgcccaccgccgcccgcgtgcgcccaccgccacctgttgccgcctaaggggaacgcctccgttataacccaacgcttcaccatccatgccgtcctccaccaccgcttcaccatcccctccaggcccaccaccaccatggcctctccttccccttcttcccccgcccgcgcctccggccgccgcgtgccgccgccgtgctggacgaccgacgagaccctcgcgctcgcgcgggcctacaccgcgcgccgcctcgccgtcggccgggagcacctgacctccaccgactgggccgccgtagccgcggccgccccgtccaagaccgccaggcagtgccgccacaagatcgagaagctccgccgacgcctccggtccaaccgccgacgcccatgcccgctcctcgacgccatggatctcctcgacggcccttccccgcccttcttttccaagtcccagtcccgatccacgtccctgtcctcgtcgccgccgccaccggcggcggtttccacgccgtctcccccttcccctcccgcatctccgcccaggaagaggcggcgggacgatgcctgggacgaggacggtgtgagcgacgtggtgggtgctctgagggccatcggggagggtttcctgcgggcggaggagaggaggatggaggccgcacgggagacgcagaggatgcggatggagatggcgctccggcacctcgatgcacagaggaggctcatggacgcgcttgtcggccgcatcatcgacgccttggactgaagtggtggcacaaagatgtttcctctcaaggacttttgattaagagtgtggagaagccctaacaaaag

SEQ ID NO: 19782 - DNA, 1367 bp, Zea Mays
ctgccgtttgatggtgtttgtatgtatgactggcctaggagacccgactttattttaccatactgcccttttggttacttgcttccggacgcccggtctcctttatgtgactgaggtgtgagcagagtttggttggttaaaaaaaggtccctgggctcagggctgcaaagcctgtaaggactctaggagtcaaggtgagtcagtgtcctacaccaaaatttcacttaactagaaaggaaaaagcaaacttcaaacttgagtcgtcattaacaaaaaaaacttgagcagtcaatagcaaatccaaagaataaaaggttcaggattcagcatctatgtgtcactgacaccaaaagagacaaatggagctagacgggtcagtccaacatgtagcggttgtgtctggttaggtgacaataaactctaaattttacagtataatattaaagattgtatcgaatcggaggattaatgtcggaccatatttctatccattttgaactagattttatttagagtctaaaaaattgtgaagaaacattaccaaccggacagtttttctgtgtttcgcaaaaacaaaacaaatcaccagtgtgaaagtgtgtgtttgcgtagatacgaaacagaggtcgactaagtcgcaactcgcaagcaatagagagcgaagacatagccaagcgacgtcgtggccccgtcctctcgtcaagcagatcttcgtccacgggcggcatggatggcccgagaggcctcgcgccggggcgcgggcgcgggcgtggggaagggtggacggtgccgccggaatggatcggcggttccgggtccggccagggcgccgtccccgatggctcgtggagttacagctgggggtggacatcggggcccgaaggtggctggggctatggccacggctcggcgcagggcccccgcggcgctgcagacgggtttgcctacggctacggcggcagcggtggtggaggaagcgggcgtggcggatttgaattcagcttcggtggcctatctggcggttttggctggcgagccggtggcgggccgtttggggttggaggaggccacggcagctggagcgcgcgcggtggtgggttcggcggcggcgggaggcagcggccaccgcgaggccgcggacgtggcagcaactgaagaaggccgattagcatctgggagcatagtctatactggttgtggcatcatggcatgaatgactgtacccgtaacagtaatcaatacgcctttgcttcaaactgtgttcaacagttaacactcttctaatatatattactccatctgttttttatttatcgcgttttaatttaaaaataaaacggatgacaaacattcgagaatgaaattag

SEQ ID NO: 19783 - DNA, 3011 bp, Zea Mays
cagccatggcgtcctctcctctcccgtccctccccacaggcacaggcccaccgcccacacacactcggcgccgctggcctctttgcttgcttctttctttctccctcttccctttggaccctttccagttgtccacgctcccatctttttcaccaccccttctccttctctctctcccccccaccctcgcccttctcccaccgcgcgcttgccctccggccgggcgcccgtcccgtccttccctacttgtaccagcccctcttttccaatttcatcctctccctccaattccaccatccctctctctctctctcgctcgccacccgcaccactctcgctcggtgtgtgggagagagaggaggggagggagctaggctggcatggccggccgcttgagctgcgcatgcctacaattcagtaccagtactagcaaagcaagctaggaagcttgccgacctgggctacaagaggagcgccaagaagtgcaaggagaagtttgagaacgtgcacaagtactacaagcgcacaaaggaaggccgcgccggcaggcaggacggcaagagctaccgcttcttcgaggagctggaggcgttgcacgcagccgcgccgcagccgccaccacagcacttgccggcagccagcaccgccccgcagttgcacgccctcgccgcgccagtatccccgacgccccagcagcagttgccggcatccagcgccgccccgccgttgcacgccttccccgcgccagtatccgcgccgccgccgttgagttcaatgccactgctgacagggccgatgcagccagcgcccatatcatcggcggccccagccccggcaccggtggatctgctcgtggcccaccagcccctcaacctgcaaggcttcagcttctcttccatgtcggactcggagtccgacgacgagtccgaggacgacgacatgacggcggagacaggcggaaaccaggaccgcctcggcaagcggaagcgcggcgacggcggcggcagcagcagcaacaagatgatgtctttcttcgaggggctcatgcagcaggtcgtcgacaggcaggaggaaatgcagcggcggttcctggagaccatggagaagcgggaggccgagcgcacggctcgggaggaggcgtggcgcaggcaggaggtcgcccgcctcaaccgcgagcaggagcagctcgctcaggagcgcgccgccgcggcctccagggacgccgccatcatcgccttcctccagcgcatcggcgggcagtccgtgcagccccctgctaccgccgttgttgtcccaatgccagcaccggtgtcagtccataccacgccgccgaaacaaccttctcgccagcagcagcaaccgccgccgccgtcgccccaggccggccaggcgacaccgcagtcgaagccaatctcagccgcgccgctccagcagcaaccgccacagcagcaaccgaaggatacgtcgcagcaggacgccggcacgccgcgcagcttgcccccggcgtctagccagtcactcgagctggtgcccgtcgccgccacggagcaccacgtcgattccgggctaggaggaggggatggaggtgcggcgtcgtcatcgcggtggcccaagaccgaggtgcacgcgctcatccagctgcgcatggacctggacatgcgctaccaggagacaggtcccaagggtcctctctgggaggatatttcgtccgggatgcggcggctgggatacaaccggagctccaagcggtgcaaggagaagtgggagaacatcaacaagtactacaagaaggtgaaggagagcaacaagaagcggcccgaggactccaagacctgcccatacttccaccagctcgaggccatctacaacagaaagcacctccgcagcctcacaaccgcggccacatcgtccgccgccgccgctcctcgtcccgcctacccagatcagctgaacccgagcaggcaagagatagaggggaagaacatcaacgatgacaagaggaacaacggtggatcaggtggaggcacgcaggtgccgaccagcaatggcgagacagcgacgacgacgacgacgacgacgctcgtcgcgttcgacgccgacaccggcatgaagaagaagacatcgtcagggagttgaacgagcacccgcgtcgggagttcacgacggaggacgagacggacagcgacgacatgggcgacgagtacaccgacgacggcgaggaaggcgaagacgacggcaaaatgcagtacaggatacagttccagaggccgaacccgggcggcaccaacaccgcgccagcaccggcagcagcgacgacggctgcgccagcggtgccgacttcggctccgaccagcaccttcctcgccatggttcaataggggcgcgggcggcacccctctcaaaccgtacgtacgtatatgcgtccaaaccaaaaacctgcgcgcatcaccgtcaccgtcacctcctcctttactttaccagtccaccaagcatgcaccatcagtccatcacactgttctcttgttcatcctgtaatcccccgtgccattccattatttattgatttgtttcgtgtataataagatccccaccgttgcggaggatgcagagtgaggctgtggtggtagagcaaaaaggaagagtccagtccctcagtaataacttatttataggtcatcgtcgatcgcgttaaacgagaactgtacatcgatgtaacagtcagtccatgatgtttttcctccctttttttttagttactcccttcccgggacggcagtatacaagtttgtataagagtatacaagaattacagacagttcaagcaacctggagcttgcggaggtgagaaggtgtttttgccgttgggaatctacattttttttgtcgatcctttttcttttaacagtggatataattaaatcctgttacttgttacagtgtacattaatcgtgttgttattccagtactctgccctttgtggcaaatatacatgagcagttttaccgttgcc

SEQ ID NO: 19784 - DNA, 4173 bp, Zea Mays
ccctttggaccctttccagttgtccacgctcccatctttttcaccaccccttctccttctctctctcccccccaccctcgcccttctcccaccgcgcgcttgccctccggccgggcgcccgtcccgtccttccctacttgtaccagcccctcttttccaatttcatcctctccctccaattccaccatccctctctctctctctcgctcgccacccgcaccactctcgctcggtgtgtgggagagagaggaggggagggagctaggctggcatggccggccgcttgagctgcgcatgcctacaattcagtaccagtactagcaaagcaagctaggtaggagtaacacctccccaattgctacttctactgagttagccatcccgtcgtcccggcagtcacttctacaagtacgcacgcagctacccagcagggcggctatactaatccctccctgcctctgccttccttccgaggaccgccgcggcgggccggggtgcgcgcacccgccatgcagcagcagcaccagggtggcggcggcggcggtggcggaggctcacagttcggggccccgccgccggacatgggccccttctcgccgacgccggctgctaccggtcccatgccgctgagcagcaggcctccgtcggcgcagccgcagcagcaaccgaggaccagctacgaagaattggcgcccatggtgcctggggccgccgctgccagtggcttcgacgacgagacgatgggtagtggcggcggcggcggcgggtcgtcgggcgcgtccagcaaccggtggccgcgggaggagacgcaggcgctcatcaggatccggtcggagatggacgcaaccttccgcgacgcgacgctcaaaggccccctatgggaggacgtctccaggtaaaggagcgagagagagagagacaggggaactcgtcgtcgtcctcgtccagacgcatttgcagtctggttcaagaagcctgtctccggcatgattttttttccctgcggaaagcggctaacggtttcgtggaatttagcagccgcgcccacatgaaatgatggataattatcctgcgtcgctcgctgcgcccaattcccctcgaatttcgttttgttttcccgtttccgtcccagtctaatcaaatgcgtctcgatttcagcgagacggcaggggagagacagagagagagagagagagagctggaaggcagtactcctaggtgcagtagccagtagggtgaaccggtgaaggaatctgggcgcctgcgcgcctggggatcgtaccacggtggtgagtgcgggagtgcaggcagctgctgccgtcgctgcaggctgcaggctgccactgtctcctgctttcatggctccagtttttgggaaaagaaggaaggcagccttcctctcccatcccaatgcggcctccttgctttcatgactcaccagtgcatcatcagcttcacatcccctctgatccctaaaaatacgagatggtttgtgattaactataattccattctgctgcagtacctccacctccttcggctcgcactcttctctcctcgctctcgcctgtccttccaaaattccaattcttcccatcttcttgtctctttcctccagaggccttgatgtgttatgccactacattagatgcttcctccagtaaacgctgccactgcccatcatttaattcttcttcctcgccgatcacttgattctttgcacgtaagtaatggctgaccggaacctttgtgtacgcgtctttgtcactgctgtggctttcaggaagcttgccgacctgggctacaagaggagcgccaagaagtgcaaggagaagtttgagaacgtgcacaagtactacaagcgcacaaaggaaggccgcgccggcaggcaggacggcaagagctaccgcttcttcgaggagctggaggcgttgcacgcagccgcgccgcagccgccaccacagcacttgccggcagccagcaccgccccgcagttgcacgccctcgccgcgccagtatccccgacgccccagcagcagttgccggcatccagcgccgccccgccgttgcacgccttccccgcgccagtatccgcgccgccgccgttgagttcaatgccactgctgacagggccgatgcagccagcgcccatatcatcggcggccccagccccggcaccggtggatctgctcgtggcccaccagcccctcaacctgcaaggcttcagcttctcttccatgtcggactcggagtccgacgacgagtccgaggacgacgacatgacggcggagacaggcggaaaccaggaccgcctcggcaagcggaagcgcggcgacggcggcggcagcagcagcaacaagatgatgtctttcttcgaggggctcatgcagcaggtcgtcgacaggcaggaggaaatgcagcggcggttcctggagaccatggagaagcgggaggccgagcgcacggctcgggaggaggcgtggcgcaggcaggaggtcgcccgcctcaaccgcgagcaggagcagctcgctcaggagcgcgccgccgcggcctccagggacgccgccatcatcgccttcctccagcgcatcggcgggcagtccgtgcagccccctgctaccgccgttgttgtcccaatgccagcaccggtgtcagtccataccacgccgccgaaacaaccttctcgccagcagcagcaaccgccgccgccgtcgccccaggccggccaggcgacaccgcagtcgaagccaatctcagccgcgccgctccagcagcaaccgccacagcagcaaccgaaggatacgtcgcagcaggacgccggcacgccgcgcagcttgcccccggcgtctagccagtcactcgagctggtgcccgtcgccgccacggagcaccacgtcgattccgggctaggaggaggggatggaggtgcggcgtcgtcatcgcggtggcccaagaccgaggtgcacgcgctcatccagctgcgcatggacctggacatgcgctaccaggagacaggtcccaagggtcctctctgggaggatatttcgtccgggatgcggcggctgggatacaaccggagctccaagcggtgcaaggagaagtgggagaacatcaacaagtactacaagaaggtgaaggagagcaacaagaagcggcccgaggactccaagacctgcccatacttccaccagctcgaggccatctacaacagaaagcacctccgcagcctcacaaccgcggccacatcgtccgccgccgccgctcctcgtcccgcctacccagatcagctgaacccgagcaggcaagagatagaggggaagaacatcaacgatgacaagaggaacaacggtggatcaggtggaggcacgcaggtgccgaccagcaatggcgagacagcgacgacgacgacgacgacgacgctcgtcgcgttcgacgccgacaccggcatgaagaagaagacatcgtcagggagttgaacgagcacccgcgtcgggagttcacgacggaggacgagacggacagcgacgacatgggcgacgagtacaccgacgacggcgaggaaggcgaagacgacggcaaaatgcagtacaggatacagttccagaggccgaacccgggcggcaccaacaccgcgccagcaccggcagcagcgacgacggctgcgccagcggtgccgacttcggctccgaccagcaccttcctcgccatggttcaataggggcgcgggcggcacccctctcaaaccatccccaccgttgcggaggatgcagagtgaggctgtggtggtagagcaaaaaggaagagtccagtccctcagtaataacttatttataggtcatcgtcgatcgcgttaaacgagaactgtacatcgatgtaacagtcagtccatgatgtttttcctccctttttttttagttactcccttcccgggacggcagtatacaagtttgtataagagtatacaagaattacagacagttcaagcaacctggagcttgcggaggtgagaaggtgtttttgccgttgggaatctacattttttttgtcgatcctttttcttttaacagtggatataattaaatcctgttacttgttacagtgtacattaatcgtgttgttattccagtactctgccctttgtggcaaatatacatgagcagttttaccgttgcc

SEQ ID NO: 19785 - DNA, 2930 bp, Zea Mays
ctcgtcgtcgtcctcgtccagacgcatttgcagtctggttcaagaagcctgtctccggcatgattttttttccctgcggaaagcggctaacggtttcgtggaatttagcagccgcgcccacatgaaatgatggataattatcctgcgtcgctcgctgcgcccaattcccctcgaatttcgttttgttttcccgtttccgtcccagtctaatcaaatgcgtctcgatttcagcgagacggcaggggagagacagagagagagagagagagagctggaaggcagtactcctaggtgcagtagccagtagggtgaaccggtgaaggaatctgggcgcctgcgcgcctggggatcgtaccacggtggaagcttgccgacctgggctacaagaggagcgccaagaagtgcaaggagaagtttgagaacgtgcacaagtactacaagcgcacaaaggaaggccgcgccggcaggcaggacggcaagagctaccgcttcttcgaggagctggaggcgttgcacgcagccgcgccgcagccgccaccacagcacttgccggcagccagcaccgccccgcagttgcacgccctcgccgcgccagtatccccgacgccccagcagcagttgccggcatccagcgccgccccgccgttgcacgccttccccgcgccagtatccgcgccgccgccgttgagttcaatgccactgctgacagggccgatgcagccagcgcccatatcatcggcggccccagccccggcaccggtggatctgctcgtggcccaccagcccctcaacctgcaaggcttcagcttctcttccatgtcggactcggagtccgacgacgagtccgaggacgacgacatgacggcggagacaggcggaaaccaggaccgcctcggcaagcggaagcgcggcgacggcggcggcagcagcagcaacaagatgatgtctttcttcgaggggctcatgcagcaggtcgtcgacaggcaggaggaaatgcagcggcggttcctggagaccatggagaagcgggaggccgagcgcacggctcgggaggaggcgtggcgcaggcaggaggtcgcccgcctcaaccgcgagcaggagcagctcgctcaggagcgcgccgccgcggcctccagggacgccgccatcatcgccttcctccagcgcatcggcgggcagtccgtgcagccccctgctaccgccgttgttgtcccaatgccagcaccggtgtcagtccataccacgccgccgaaacaaccttctcgccagcagcagcaaccgccgccgccgtcgccccaggccggccaggcgacaccgcagtcgaagccaatctcagccgcgccgctccagcagcaaccgccacagcagcaaccgaaggatacgtcgcagcaggacgccggcacgccgcgcagcttgcccccggcgtctagccagtcactcgagctggtgcccgtcgccgccacggagcaccacgtcgattccgggctaggaggaggggatggaggtgcggcgtcgtcatcgcggtggcccaagaccgaggtgcacgcgctcatccagctgcgcatggacctggacatgcgctaccaggagacaggtcccaagggtcctctctgggaggatatttcgtccgggatgcggcggctgggatacaaccggagctccaagcggtgcaaggagaagtgggagaacatcaacaagtactacaagaaggtgaaggagagcaacaagaagcggcccgaggactccaagacctgcccatacttccaccagctcgaggccatctacaacagaaagcacctccgcagcctcacaaccgcggccacatcgtccgccgccgccgctcctcgtcccgcctacccagatcagctgaacccgagcaggcaagagatagaggggaagaacatcaacgatgacaagaggaacaacggtggatcaggtggaggcacgcaggtgccgaccagcaatggcgagacagcgacgacgacgacgacgacgacgctcgtcgcgttcgacgccgacaccggcatgaagaagaagacatcgtcagggagttgaacgagcacccgcgtcgggagttcacgacggaggacgagacggacagcgacgacatgggcgacgagtacaccgacgacggcgaggaaggcgaagacgacggcaaaatgcagtacaggatacagttccagaggccgaacccgggcggcaccaacaccgcgccagcaccggcagcagcgacgacggctgcgccagcggtgccgacttcggctccgaccagcaccttcctcgccatggttcaataggggcgcgggcggcacccctctcaaaccgtacgtacgtatatgcgtccaaaccaaaaacctgcgcgcatcaccgtcaccgtcacctcctcctttactttaccagtccaccaagcatgcaccatcagtccatcacactgttctcttgttcatcctgtaatcccccgtgccattccattatttattgatttgtttcgtgtataataagatccccaccgttgcggaggatgcagagtgaggctgtggtggtagagcaaaaaggaagagtccagtccctcagtaataacttatttataggtcatcgtcgatcgcgttaaacgagaactgtacatcgatgtaacagtcagtccatgatgtttttcctccctttttttttagttactcccttcccgggacggcagtatacaagtttgtataagagtatacaagaattacagacagttcaagcaacctggagcttgcggaggtgagaaggtgtttttgccgttgggaatctacattttttttgtcgatcctttttcttttaacagtggatataattaaatcctgttacttgttacagtgtacattaatcgtgttgttattccagtactctgccctttgtggcaaatatacatgagcagttttaccgttgcc

SEQ ID NO: 19786 - DNA, 2993 bp, Zea Mays
ctccagtttttgggaaaagaaggaaggcagccttcctctcccatcccaatgcggcctccttgctttcatgactcaccagtgcatcatcagcttcacatcccctctgatccctaaaaatacgagatggtttgtgattaactataattccattctgctgcagtacctccacctccttcggctcgcactcttctctcctcgctctcgcctgtccttccaaaattccaattcttcccatcttcttgtctctttcctccagaggccttgatgtgttatgccactacattagatgcttcctccagtaaacgctgccactgcccatcatttaattcttcttcctcgccgatcacttgattctttgcacgtaagtaatggctgaccggaacctttgtgtacgcgtctttgtcactgctgtggctttcaggaagcttgccgacctgggctacaagaggagcgccaagaagtgcaaggagaagtttgagaacgtgcacaagtactacaagcgcacaaaggaaggccgcgccggcaggcaggacggcaagagctaccgcttcttcgaggagctggaggcgttgcacgcagccgcgccgcagccgccaccacagcacttgccggcagccagcaccgccccgcagttgcacgccctcgccgcgccagtatccccgacgccccagcagcagttgccggcatccagcgccgccccgccgttgcacgccttccccgcgccagtatccgcgccgccgccgttgagttcaatgccactgctgacagggccgatgcagccagcgcccatatcatcggcggccccagccccggcaccggtggatctgctcgtggcccaccagcccctcaacctgcaaggcttcagcttctcttccatgtcggactcggagtccgacgacgagtccgaggacgacgacatgacggcggagacaggcggaaaccaggaccgcctcggcaagcggaagcgcggcgacggcggcggcagcagcagcaacaagatgatgtctttcttcgaggggctcatgcagcaggtcgtcgacaggcaggaggaaatgcagcggcggttcctggagaccatggagaagcgggaggccgagcgcacggctcgggaggaggcgtggcgcaggcaggaggtcgcccgcctcaaccgcgagcaggagcagctcgctcaggagcgcgccgccgcggcctccagggacgccgccatcatcgccttcctccagcgcatcggcgggcagtccgtgcagccccctgctaccgccgttgttgtcccaatgccagcaccggtgtcagtccataccacgccgccgaaacaaccttctcgccagcagcagcaaccgccgccgccgtcgccccaggccggccaggcgacaccgcagtcgaagccaatctcagccgcgccgctccagcagcaaccgccacagcagcaaccgaaggatacgtcgcagcaggacgccggcacgccgcgcagcttgcccccggcgtctagccagtcactcgagctggtgcccgtcgccgccacggagcaccacgtcgattccgggctaggaggaggggatggaggtgcggcgtcgtcatcgcggtggcccaagaccgaggtgcacgcgctcatccagctgcgcatggacctggacatgcgctaccaggagacaggtcccaagggtcctctctgggaggatatttcgtccgggatgcggcggctgggatacaaccggagctccaagcggtgcaaggagaagtgggagaacatcaacaagtactacaagaaggtgaaggagagcaacaagaagcggcccgaggactccaagacctgcccatacttccaccagctcgaggccatctacaacagaaagcacctccgcagcctcacaaccgcggccacatcgtccgccgccgccgctcctcgtcccgcctacccagatcagctgaacccgagcaggcaagagatagaggggaagaacatcaacgatgacaagaggaacaacggtggatcaggtggaggcacgcaggtgccgaccagcaatggcgagacagcgacgacgacgacgacgacgacgctcgtcgcgttcgacgccgacaccggcatgaagaagccagaagacatcgtcagggagttgaacgagcacccgcgtcgggagttcacgacggaggacgagacggacagcgacgacatgggcgacgagtacaccgacgacggcgaggaaggcgaagacgacggcaaaatgcagtacaggatacagttccagaggccgaacccgggcggcaccaacaccgcgccagcaccggcagcagcgacgacggctgcgccagcggtgccgacttcggctccgaccagcaccttcctcgccatggttcaataggggcgcgggcggcacccctctcaaaccgtacgtacgtatatgcgtccaaaccaaaaacctgcgcgcatcaccgtcaccgtcacctcctcctttactttaccagtccaccaagcatgcaccatcagtccatcacactgttctcttgttcatcctgtaatcccccgtgccattccattatttattgatttgtttcgtgtataataagatccccaccgttgcggaggatgcagagtgaggctgtggtggtagagcaaaaaggaagagtccagtccctcagtaataacttatttataggtcatcgtcgatcgcgttaaacgagaactgtacatcgatgtaacagtcagtccatgatgtttttcctccctttttttttagttactcccttcccgggacggcagtatacaagtttgtataagagtatacaagaattacagacagttcaagcaacctggagcttgcggaggtgagaaggtgtttttgccgttgggaatctacattttttttgtcgatcctttttcttttaacagtggatataattaaatcctgttacttgttacagtgtacattaatcgtgttgttattccagtactctgccctttgtggcaaatatacatgagcagttttaccgttgcc

SEQ ID NO: 19787 - DNA, 2331 bp, Zea Mays
ctcctcgctctcgcctgtccttccaaaattccaattcttcccatcttcttgtctctttcctccagaggccttgatgtgttatgccactacattagatgcttcctccagaagcttgccgacctgggctacaagaggagcgccaagaagtgcaaggagaagtttgagaacgtgcacaagtactacaagcgcacaaaggaaggccgcgccggcaggcaggacggcaagagctaccgcttcttcgaggagctggaggcgttgcacgcagccgcgccgcagccgccaccacagcacttgccggcagccagcaccgccccgcagttgcacgccctcgccgcgccagtatccccgacgccccagcagcagttgccggcatccagcgccgccccgccgttgcacgccttccccgcgccagtatccgcgccgccgccgttgagttcaatgccactgctgacagggccgatgcagccagcgcccatatcatcggcggccccagccccggcaccggtggatctgctcgtggcccaccagcccctcaacctgcaaggcttcagcttctcttccatgtcggactcggagtccgacgacgagtccgaggacgacgacatgacggcggagacaggcggaaaccaggaccgcctcggcaagcggaagcgcggcgacggcggcggcagcagcagcaacaagatgatgtctttcttcgaggggctcatgcagcaggtcgtcgacaggcaggaggaaatgcagcggcggttcctggagaccatggagaagcgggaggccgagcgcacggctcgggaggaggcgtggcgcaggcaggaggtcgcccgcctcaaccgcgagcaggagcagctcgctcaggagcgcgccgccgcggcctccagggacgccgccatcatcgccttcctccagcgcatcggcgggcagtccgtgcagccccctgctaccgccgttgttgtcccaatgccagcaccggtgtcagtccataccacgccgccgaaacaaccttctcgccagcagcagcaaccgccgccgccgtcgccccaggccggccaggcgacaccgcagtcgaagccaatctcagccgcgccgctccagcagcaaccgccacagcagcaaccgaaggatacgtcgcagcaggacgccggcacgccgcgcagcttgcccccggcgtctagccagtcactcgagctggtgcccgtcgccgccacggagcaccacgtcgattccgggctaggaggaggggatggaggtgcggcgtcgtcatcgcggtggcccaagaccgaggtgcacgcgctcatccagctgcgcatggacctggacatgcgctaccaggagacaggtcccaagggtcctctctgggaggatatttcgtccgggatgcggcggctgggatacaaccggagctccaagcggtgcaaggagaagtgggagaacatcaacaagtactacaagaaggtgaaggagagcaacaagaagcggcccgaggactccaagacctgcccatacttccaccagctcgaggccatctacaacagaaagcacctccgcagcctcacaaccgcggccacatcgtccgccgccgccgctcctcgtcccgcctacccagatcagctgaacccgagcaggcaagagatagaggggaagaacatcaacgatgacaagaggaacaacggtggatcaggtggaggcacgcaggtgccgaccagcaatggcgagacagcgacgacgacgacgacgacgacgctcgtcgcgttcgacgccgacaccggcatgaagaagaagacatcgtcagggagttgaacgagcacccgcgtcgggagttcacgacggaggacgagacggacagcgacgacatgggcgacgagtacaccgacgacggcgaggaaggcgaagacgacggcaaaatgcagtacaggatacagttccagaggccgaacccgggcggcaccaacaccgcgccagcaccggcagcagcgacgacggctgcgccagcggtgccgacttcggctccgaccagcaccttcctcgccatggttcaataggggcgcgggcggcacccctctcaaaccgtacttactcccttcccgggacggcagtatacaagtttgtataagagtatacaagaattacagacagttcaagcaacctggagcttgcggaggtgagaaggtgtttttgccgttgggaatctacattttttttgtcgatcctttttcttttaacagtggatataattaaatcctgttacttgttacagtgtacattaatcgtgttgttattccagtactctgccctttgtggcaaatatacatgagcagttttaccgttgcc

SEQ ID NO: 19788 - DNA, 1365 bp, Zea Mays
atgcatctgtggcacccaccgctcccagctggcccgctcgtctgcgacgtcagtttgcacctgctcccgctccgtccacggcaggctgaaaatatcctcgggactggtttggtggacagagaaacgaaggggatccatggaagcccccaacgatccccttcatttccctgtccacaaaaccaagcctcaagggtccatttctttctttggctcctgtccgagagtaaaactctaactaaatttaacttgagcattagaaagaaactagaaggtctatcatgtttgttctgtacactaccggagcttctttcagagatctttgataggaatttgggtgctcactttctttcaattaggcagctttagcttagcaataaaaggttttagtttgtaattccttcttgtcctgcagctctgtgtgtgtgtgttgggggggggggggatttggaagctaagaaataacacttgttttcagggagtggggtggaaagacatgacttcgctgttactgaaaattgcaacaatgctgcagagttggtctattctatgccctcagggaaggagacgtttgctgggaagctgagaaagctgaaatccttggccacagcccacaagaccaataagaatttctggataaaccaagtggagaacaaatgggagaaatacatgttccaacaagcccagaattgggaagacaaagaaattccagaaaaagtgaaggcgaagcttgctgaaagtcttttggaggaacgagacatttcaaagaggcgttggtttagtgtgttaagtctgggagagtcctcagcttagttgtgtatgttgggagaatgattgttgtcaaggaaagtccttcaagtatggagctgtaatgtttcttgcagctttttctgggtttttttgaataggtgaaaatccatctgtaaggcctagtttgacaactctatttttctaagagattttaatttcctcaacgaaaaatgactaatttcccttgataaaataaaaatcccttagaaaatagagttgtcaaactagccctaaactgtaatcagatgtttttatctttgctaatgctaatcctgggacaatgccctaaaactcaaaaaaaaaagtagcacgtggttaaagttaattcattccagatgcaaaaattactatggagtcaaccgaggaaaagatccgtgagctgttcgcatgcatcaaatcctatcgtatctaggtggtctccacgagatattatcctgacagactggtccagcaacacggggcttttcttgttgcttattaatgcaattgtgaccatgacaacgaactgctccatgattatcagctcgcataccgaagattgtatagtagatagggggt

SEQ ID NO: 19789 - DNA, 852 bp, Zea Mays
cctgctcgcgtccgcagccacggccgccgcgtcagccccgccttcctcccgcccatcccctccgatcatcccgcctccccccacgtcgcacacaacccgccatccactctcctgccccatccccgcctccgtcatacgcgcagagcccgcctgagatccgctgcaacaaatgatgtctcccccgtccagctcgatgccccgcccccactatctccgctctctactgctctctacgcgccgtcggcaaaaatggcatgggagatccgccacctcaactccccattaccgcggtcccatatctcctctccccattactgtggtccatggatttctcgagtcagtgggaggtccgtcatccatggaaggtccgccacctcctcctcggtccgcagcaaaaatggcgtgggagatccgccagctcacctcctcccattaccgcgccagcgcctgatatggaaggtacattgagactgcaatagtcaccaagaagagatacaatgatctaaagcggggttcaggtgcaagaaccaaacatgtgatggttttctactgcccaactcaggttggttgccaatcaaacgaaaagtacccattgagtggttgtggagaaatagttgaaagttggtggatcaaccaaacatatattacgtcgaaattggagactcattttgtttgatcagttattaatcatatatgttgtggttattaatcttatatgttgtgtttatctgacactataggtaaaaggcttatacatgccagatttaaagtttaatggttggagctcaatttgtttttagtgccacaaacactttaaatgatatggtattttaatttcggggcactattttg

SEQ ID NO: 19790 - DNA, 636 bp, Zea Mays
cccgcctccccccacgtcgcacacaacccgccatccactctcctgccccatccccgcctccgtcatacgcgcagagcccgcctgagatccgctgcaacaaatgatgtctcccccgtccagctcgatgccccgcccccactatctccgctctctactgctctctacgcgccgtcggcaaaaatggcatgggagatccgccacctcaactccccattaccgcggtcccatatctcctctccccattactgtggtccatggatttctcgagtcagtgggaggtccgtcatccatggaaggtccgccacctcctcctcggtccgcagcaaaaatggcgtgggagatccgccagctcacctcctcccattaccgcgccagcgcctgatatggaaggtcccagatttcctctccccattcctttctcctaattggttataaaaagtcacttagtggccctgccgccagatctgctggtcaatcgagcgtcaggaatgttagcttcttagtttggcgaactaggggatgggttggtctgggtggatcttgggttgcgggtctacgaccgagccgcatgatcattgatgcaatttcgtgtgaggatgctgcttgcatgagtacacagattgtgcttttgtttct

SEQ ID NO: 19791 - DNA, 817 bp, Zea Mays
cccgcctccccccacgtcgcacacaacccgccatccactctcctgccccatccccgcctccgtcatacgcgcagagcccgcctgagatccgctgcaacaaatgatgtctcccccgtccagctcgatgccccgcccccactatctccgctctctactgctctctacgcgccgtcggcaaaaatggcatgggagatccgccacctcaactccccattaccgcggtcccatatctcctctccccattactgtggtccatggatttctcgagtcagtgggaggtccgtcatccatggaaggtccgccacctcctcctcggtccgcagcaaaaatggcgtgggagatccgccagctcacctcctcccattaccgcgccagcgcctgatatggaaggtacattgagactgcaatagtcaccaagaagagatacaatgatctaaagcggtactttaattgcacatgcccacgttgtgtaaaggggttcaggtgcaagaaccaaacatgtgatggttttctactgcccaactcaggttggttgccaatcaaacgaaaagtacccattgagtggttgtggagaaatagttgaaagttggtggatcaaccaaacatatattacgtcgaaattggagactcattttgtttgatcagttattaatcatatatgttgtggttattaatcttatatgttgtgtttatctgacactataggtaaaaggcttatacatgccagatttaaagtttaatggttggagctcaatttgtttttagtgccacaaacactttaaatgatatggtattttaatttcggggcactattttg

SEQ ID NO: 19792 - DNA, 1412 bp, Zea Mays
gcgagcgagaacgcggtttcatcacaggggtctggtggctgggtggctgggtgtgaaagggccgtgcgggaagctaaccaccgcgaaagcgcctctgggggagtcagacgaacgaagcaatccaaccgaacgaaccgacctaggtcgtcgtcggctcgtcccctccgcaggaccggttcgccgtctcgtcccgatctcgccgcctgcccgccgcgccctattaccgccatggaggcgctgtggaagcaggcctccaggctcaaggaccaggtctctcggcagggtgtgttcaagcagtttggctacgggaattctgataatgcgtttacagatgagtcagaggttaaactgcatcagagattggaaaagctttacttatcgactcgtgctgctaaacattttcaaagggacattgttcggggcgtggagggctatatagtcacaggatctaaacaagtcgaaatagggaataaattgtctgatgacagccagaaatacggtgttggaaacacatgtacaagtggtgatactttgtccaaagctgctacatatttcggaaaggcacgctcacagatggaaaaggagcgtggcaatatgttgaaagcatttggcacacaggtggcagagccactgcgggcgatggttatgggtgcacctttagaggatgccagacatatggcccagagatatgacagaacgaggcaagaagctgaagcacaggctgtcgaagtatcaagacggcagaacagggtgagggaatctactgggaatggcgatatggtatcaaaattggaagctgccgagtacaagcttgaagaactgaagtcaaacatggtgggattagggaaggaagctattgcagcaatgtcggctgttgaggctcagcagcaacggttgaccttacagcgtctcattgcactggttgaggctgagagaacttaccatcagagagttctggagatacttgacaaattggaagaagaaatggtgtctgagcgccaaaaaattgaagcacccccgactccagcagctgaaaattatataccaccaccagcaccaccatcttatgatgaaattaatggagcatttgcatccacttctgttaacgagtcagtccaatctgtcgatttcttccttggagaggcccttgattcatttaatgctgaaagtgagtttgagcttaccttgtcagctggtgacattgtaattgtccgaaagatctcaagcaatggttgggcagaaggtgaatgcaagggcaaagcaggatggttccctcatgcttatatcgaaaggcaggaacgtgttctagcaagcaaagttccacatatattttaggtaagactatttcacttctggagtctcaaggtgaaatggtcaagttgcatggaatttgaagctcctgctggatacct

SEQ ID NO: 19793 - DNA, 1390 bp, Zea Mays
cgcggtttcatcacaggggtctggtggctgggtggctgggtgtgaaagggccgtgcgggaagctaaccaccgcgaaagcgcctctgggggagtcagacgaacgaagcaatccaaccgaacgaaccgacctaggtcgtcgtcggctcgtcccctccgcaggaccggttcgccgtctcgtcccgatctcgccgcctgcccgccgcgccctattaccgccatggaggcgctgtggaagcaggcctccaggctcaaggaccaggtctctcggcagggtgtgttcaagcagtttggctacgggaattctgataatgcgtttacagatgagtcagaggttaaactgcatcagagattggaaaagctttacttatcgactcgtgctgctaaaggacattgttcggggcgtggagggctatatagtcacaggatctaaacaagtcgaaatagggaataaattgtctgatgacagccagaaatacggtgttggaaacacatgtacaagtggtgatactttgtccaaagctgctacatatttcggaaaggcacgctcacagatggaaaaggagcgtggcaatatgttgaaagcatttggcacacaggtggcagagccactgcgggcgatggttatgggtgcacctttagaggatgccagacatatggcccagagatatgacagaacgaggcaagaagctgaagcacaggctgtcgaagtatcaagacggcagaacagggtgagggaatctactgggaatggcgatatggtatcaaaattggaagctgccgagtacaagcttgaagaactgaagtcaaacatggtgggattagggaaggaagctattgcagcaatgtcggctgttgaggctcagcagcaacggttgaccttacagcgtctcattgcactggttgaggctgagagaacttaccatcagagagttctggagatacttgacaaattggaagaagaaatggtgtctgagcgccaaaaaattgaagcacccccgactccagcagctgaaaattatataccaccaccagcaccaccatcttatgatgaaattaatggagcatttgcatccacttctgttaacgagtcagtccaatctgtcgatttcttccttggagaggcccttgattcatttaatgctgaaagtgagtttgagcttaccttgtcagctggtgacattgtaattgtccgaaagatctcaagcaatggttgggcagaaggtgaatgcaagggcaaagcaggatggttccctcatgcttatatcgaaaggcaggaacgtgttctagcaagcaaagttccacatatattttaggtaagactatttcacttctggagtctcaaggtgaaatggtcaagttgcatggaatttgaagctcctgctggatacct

SEQ ID NO: 19794 - DNA, 1690 bp, Zea Mays
gcggtttcatcacaggggtctggtggctgggtggctgggtgtgaaagggccgtgcgggaagctaaccaccgcgaaagcgcctctgggggagtcagacgaacgaagcaatccaaccgaacgaaccgacctaggtcgtcgtcggctcgtcccctccgcaggaccggttcgccgtctcgtcccgatctcgccgcctgcccgccgcgccctattaccgccatggaggcgctgtggaagcaggcctccaggctcaaggaccaggtctctcggcagtttggctacgggaattctgataatgcgtttacagatgagtcagaggttaaactgcatcagagattggaaaagctttacttatcgactcgtgctgctaaacattttcaaagggacattgttcggggcgtggagggctatatagtcacaggatctaaacaagtcgaaatagggaataaattgtctgatgacagccagaaatacggtgttggaaacacatgtacaagtggtgatactttgtccaaagctgctacatatttcggaaaggcacgctcacagatggaaaaggagcgtggcaatatgttgaaagcatttggcacacaggtggcagagccactgcgggcgatggttatgggtgcacctttagaggatgccagacatatggcccagagatatgacagaacgaggcaagaagctgaagcacaggctgtcgaagtatcaagacggcagaacagggtgagggaatctactgggaatggcgatatggtatcaaaattggaagctgccgagtacaagcttgaagaactgaagtcaaacatggtgggattagggaaggaagctattgcagcaatgtcggctgttgaggctcagcagcaacggttgaccttacagcgtctcattgcactggttgaggctgagagaacttaccatcagagagttctggagatacttgacaaattggaagaagaaatggtgtctgagcgccaaaaaattgaagcacccccgactccagcagctgaaaattatataccaccaccagcaccaccatcttatgatgaaattaatggagcatttgcatccacttctgttaacgagtcagtccaatctgtcgatttcttccttggagaggcccttgattcatttaatgctgaaagtgagtttgagcttaccttgtcagctggtgacattgtaattgtccgaaagatctcaagcaatggttgggcagaaggtgaatgcaagggcaaagcaggatggttccctcatgcttatatcgaaaggcaggaacgtgttctagcaagcaaagttccacatatattttaggagtttctggcagtcgcattacacggttttcatttctattgttgggagctggaactgtatccatgttttcacttcctcttagtttccgcgatgtaattactggctgtcatgtgcatagattaaatttacttccctttttttagtctggaaaaggttttggatgtaacatatttttgagagaccaattggatatgggttaccttgatattgtgaaagagttaaaaactagctgttttatagatttttcttacctggacttcatcgcatgtttcttatagaaaagaacatgggccgtttttttctgggtaagactatttcacttctggagtctcaaggtgaaatggtcaagttgcatggaatttgaagctcctgctggatacct

SEQ ID NO: 19795 - DNA, 1672 bp, Zea Mays
ctgggtggctgggtgtgaaagggccgtgcgggaagctaaccaccgcgaaagcgcctctgggggagtcagacgaacgaagcaatccaaccgaacgaaccgacctaggtcgtcgtcggctcgtcccctccgcaggaccggttcgccgtctcgtcccgatctcgccgcctgcccgccgcgccctattaccgccatggaggcgctgtggaagcaggcctccaggctcaaggaccaggtctctcggcagggtgtgttcaagcagtttggctacgggaattctgataatgcgtttacagatgagtcagaggttaaactgcatcagagattggaaaagctttacttatcgactcgtgctgctaaacattttcaaagggacattgttcggggcgtggagggctatatagtcacaggatctaaacaagtcgaaatagggaataaattgtctgatgacagccagaaatacggtgttggaaacacatgtacaagtggtgatactttgtccaaagctgctacatatttcggaaaggcacgctcacagatggaaaaggagcgtggcaatatgttgaaagcatttggcacacagagccactgcgggcgatggttatgggtgcacctttagaggatgccagacatatggcccagagatatgacagaacgaggcaagaagctgaagcacaggctgtcgaagtatcaagacggcagaacagggtgagggaatctactgggaatggcgatatggtatcaaaattggaagctgccgagtacaagcttgaagaactgaagtcaaacatggtgggattagggaaggaagctattgcagcaatgtcggctgttgaggctcagcagcaacggttgaccttacagcgtctcattgcactggttgaggctgagagaacttaccatcagagagttctggagatacttgacaaattggaagaagaaatggtgtctgagcgccaaaaaattgaagcacccccgactccagcagctgaaaattatataccaccaccagcaccaccatcttatgatgaaattaatggagcatttgcatccacttctgttaacgagtcagtccaatctgtcgatttcttccttggagaggcccttgattcatttaatgctgaaagtgagtttgagcttaccttgtcagctggtgacattgtaattgtccgaaagatctcaagcaatggttgggcagaaggtgaatgcaagggcaaagcaggatggttccctcatgcttatatcgaaaggcaggaacgtgttctagcaagcaaagttccacatatattttaggagtttctggcagtcgcattacacggttttcatttctattgttgggagctggaactgtatccatgttttcacttcctcttagtttccgcgatgtaattactggctgtcatgtgcatagattaaatttacttccctttttttagtctggaaaaggttttggatgtaacatatttttgagagaccaattggatatgggttaccttgatattgtgaaagagttaaaaactagctgttttatagatttttcttacctggacttcatcgcatgtttcttatagaaaagaacatgggccgtttttttctgggtaagactatttcacttctggagtctcaaggtgaaatggtcaagttgcatggaatttgaagctcctgctggatacct

SEQ ID NO: 19796 - DNA, 1907 bp, Zea Mays
tcaccgccgagcagcttcgagcccactaaaagcctttggcaccccaagaccgccggtaccatgccggtcctccgctccccgttcgccgggggcgacctccccgccggcgacgccgacccggactacctctatttcctcgaacacatccgcatcgacggtgactcctacaccctcgagctcccctcccacggcgactccccgccatcactcatcaagtacgagaccccgttcgccagcccctccgacggcgagtgcgtctccgatccctcccagggccgcctcagcggcaaccgcagcgcgcaagacgagagggaaccggtggagtcggcgtcattggagacgggacccgcgtggtacgattgtctccatgacgtcgacgaggactaccgcctcttcctgcagcacacgcgcgttgtggacggccaattggttctggagatcgggggcgtcgtcgtcaactacgataacccggttgctgtggaatctccgggggagaaggatacgcagcggggggaagaggcggtttttgcttcgccgggggaagggatcagtgttgcagcggggagcgatcaggtcgcctccggtgctccagcgacggctgtttcggagcagaacgcgtccgattggcgtgcggatccatcaccacggcgtgaggtgaacgatggcggagatgaggggctgtcggatgcaagcgcgctgaagggcgcgtattgggaggcgagctcaagcgatggccgtcgtgcaccccctactaattcggggggaaaggtagaaaaggaactaggtattatatggcctacacatatcacaagaaggccagattcagatttcaagcgaaggttgatcaaggcccttacaaaaccagttgctcggaaggaatactatagattgtttgacacggttactatccgtactccgttaatgaagctgcggcaggtccgcaacgaaacaaaattctatcctaccgaagagatgggcagttcatatttggaccattacccagatctggcggagcaaattatgaacaatggccgtcgtaatggcctagctctgatgcgcgggtttctcttctggttgcaggtagcctagtaattattttggcaccgcctgttgtctctatctttgcattttgtttgaaaaagttctcatatatcaaatccatatgcttccatatcttttgttcaagcgcaattgtacaagcgtaaacctgtcgttctctatattgaactacatattttttttgtttgggtacaactattcattttgttttgctgagataggcattttctttgcctgcgtggctccaagtcaatataggcgcccatcgggtctggttaagcagacctgatgtcaattatactggaaccagttttgtttgcagcatcagtacatactgtcttcttattgccaggcctaagcagcaatgtgaatctgctaactttgagcttcattcttctgcagaacgcagtacatgaagatcagttcaagccatgggtagatgattctaataaagaacatgaagttatttatttggtggattgagctcgcactgacttggtggctatatcattcgtttgcttgatttcgcccgatggtggtaataactctgcgcgcgtgacaaattgtcctcagcggagactgtacggattccaacatgcgatggaaacctcgatcctgggacctggaataccatgttcacgagtatctattggatagcaatgcacatacattccagctgttgagtgaataaacggttcctcattgaaaataatacatgaacgctctatcttatgcattgtgtgattacgtctgggatgtgacccctgtagagttttcccaagactggagttagggtttggtcaatccgatgagttgttgcacttgatctccctatcatttaggatgct

SEQ ID NO: 19797 - DNA, 814 bp, Zea Mays
aaaaattaaaaatatgccagtagcccagtacgtttcttttacataaggggggaaaggtagaaaaggaactaggtattatatggcctacacatatcacaagaaggccagattcagatttcaagcgaaggttgatcaaggcccttacaaaaccagttgctcggaaggaatactatagattgtttgacacggttactatccgtactccgttaatgaagctgcggcaggtccgcaacgaaacaaaattctatcctaccgaagagatgggcagttcatatttggaccattacccagatctggcggagcaaattatgaacaatggccgtcgtaatggcctagctctgatgcgcgggtttctcttctggttgcagaacgcagtacatgaagatcagttcaagccatgggtagatgattctaataaagaacatgaagttatttatttggtggattgagctcgcactgacttggtggctatatcattcgtttgcttgatttcgcccgatggtggtaataactctgcgcgcgtgacaaattgtcctcagcggagactgtacggattccaacatgcgatggaaacctcgatcctgggacctggaataccatgttcacgagtatctattggatagcaatgcacatacattccagctgttgagtgaataaacggttcctcattgaaaataatacatgaacgctctatcttatgcattgtgtgattacgtctgggatgtgacccctgtagagttttcccaagactggagttagggtttggtcaatccgatgagttgttgcacttgatctccctatcatttaggatgct

SEQ ID NO: 19798 - DNA, 1420 bp, Zea Mays
gtcacaccttgtctcctcggctcctggctcctgttggacgccactcgccaccccactttccaaaccagaccacagccgaaaacccccgatcatgccgccgccggtcgaaccctacatcccttcgttcaccgccggcttgtccgcgcacgaggccgccgatgccgacaaagactacctctacttcctccgccacgtccgcctcgacggagacgcctacacggtcgtgattccgtccaaggacggcgcctcctgtcctccccagatcatcaggtacgaacaaccgcactccgatcacaatgccggggcccccgtcgcgggctctgaatgcgggagacaaagggcccatcccccgtcggaggagaactcttgggctacgggtgaggccgccccacacggcgtgaagcgcaaggttccaggcgcgagccccgccggcgaggtccgaagcggtgctgtccgtatggaagaggacaccccgacattggtggcgaagtccgcgtggtatgacttgcaacccgacatcgacgatgactaccgcttcttcctccagaatgctcgcgtggtgaatgacaaattggtgttcaagacggggaactgttcaataactatcggggaccatagtgatgctgaggagcacgacgacaccgaggaggaagagaaagaggaggaaggggaaggggaagaggatgatgaagaagaagcagacgaccttcctgcgtcagggcagtcgggggaggacggtatcggtatggaggaggccggtcctgtgtcagagacagaggacggtgttgactcggatttgccaattccaaaggtgaaggatgaagtggtgagcaaaaatgaagaggatgatgtggggcctggatcagatttgcatattactaacgatcaggtgtattgtgagacggagaaggtgaaagaaggaggagggaatacgttgaatgatctagccaggagaacaacagatttggatcctttggacaagaaggaagcaagctcaagcaagggacatctggccatgcctctcaatccttcggaattacaaggcgttatatggcccccacatatcaatgagaggccaaattcagtttttaaagagaagttgattgagtttctcatcaaaccatttacacaggaagaatatgataggtattttgctctggctagtgatcgcattccaatggtcaaagaacgaaggacccgtaatacggtggcatactatcactggacgcatgagatgagcaagtcatactttgataggtacccaggagctctgccttgcagaagcaagaaacagaaggctctgcccttggatgccatatgaagagacaatgctgagagcacagccagcctaaggcaaaggtcctcccgctactggctgctgaaagcaagatgtcgttgcgcgatatcctcttttacctat

SEQ ID NO: 19799 - DNA, 1287 bp, Zea Mays
cgccactcgccaccccactttccaaaccagaccacagccgaaaacccccgatcatgccgccgccggtcgaaccctacatcccttcgttcaccgccggcttgtccgcgcacgaggccgccgatgccgacaaagactacctctacttcctccgccacgtccgcctcgacggagacgcctacacggtcgtgattccgtccaaggacggcgcctcctgtcctccccagatcatcaggtacgaacaaccgcactccgatcacaatgccggggcccccgtcgcgggctctgaatgcgggagacaaagggcccatcccccgtcggaggagaactcttgggctacgggtgaggccgccccacacggcgtgaagcgcaaggttccaggcgcgagccccgccggcgaggtccgaagcggtgctgtccgtatggaagaggacaccccgacattggtggcgaagtccgcgtggtatgacttgcaacccgacatcgacgatgactaccgcttcttcctccagaatgctcgcgtggtgaatgacaaattggtgttcaagacggggaactgttcaataactatcggggaccatagtgatgctgaggagcacgacgacaccgaggaggaagagaaagaggaggaaggggaaggggaagaggatgatgaagaagaagcagacgaccttcctgcgtcagggcagtcgggggaggacggtatcggtatggaggaggccggtcctgtgtcagagacagaggacggtgttgactcggatttgccaattccaaaggtgaaggatgaagtggtgagcaaaaatgaagaggatgatgtggggcctggatcagatttgcatattactaacgatcaggtgtattgtgagacggagaaggtgaaagaaggaggagggaatacgttgaatgatctagccaggagaacaacagatttggatcctttggacaagaaggaagcaagctcaagcaagggacatctggccatgcctctcaatccttcggaattacaaggcgttatatggcccccacatatcaatgagaggccaaattcagtttttaaagagaagttgattgagtttctcatcaaaccatttacacaggaagaatatgataggtattttgctctggctagtgatcgcattccaatggtcaaagaacgaaggacccgtaatacggtggcatactatcactggacgcatgagatgagcaagtcatactttgataggtacccagagtgcgcatattgtattcttcagagttctagtacctcatatgcttggaacttggagcact

SEQ ID NO: 19800 - DNA, 2255 bp, Zea Mays
cgccactcgccaccccactttccaaaccagaccacagccgaaaacccccgatcatgccgccgccggtcgaaccctacatcccttcgttcaccgccggcttgtccgcgcacgaggccgccgatgccgacaaagactacctctacttcctccgccacgtccgcctcgacggagacgcctacacggtcgtgattccgtccaaggacggcgcctcctgtcctccccagatcatcaggtacgaacaaccgcactccgatcacaatgccggggcccccgtcgcgggctctgaatgcgggagacaaagggcccatcccccgtcggaggagaactcttgggctacgggtgaggccgccccacacggcgtgaagcgcaaggttccaggcgcgagccccgccggcgaggtccgaagcggtgctgtccgtatggaagaggacaccccgacattggtggcgaagtccgcgtggtatgacttgcaacccgacatcgacgatgactaccgcttcttcctccagaatgctcgcgtggtgaatgacaaattggtgttcaagacggggaactgttcaataactatcggggaccatagtgatgctgaggagcacgacgacaccgaggaggaagagaaagaggaggaaggggaaggggaagaggatgatgaagaagaagcagacgaccttcctgcgtcagggcagtcgggggaggacggtatcggtatggaggaggccggtcctgtgtcagagacagaggacggtgttgactcggatttgccaattccaaagcttaggattcgctcaaatgccactatgtgaacacgcttcgctaaaaaaccattatgaatcatatgcttacagacaaaatgccatttagggggttatctgaaacataaacttcttttactaaactgactggatgcttgtgcccctggcgacataatcgctgtcgctcatggatcggtccggttccagctgccaggttttcttcaggctctgctctatgcggttgggttagggaaaggagcgatacccactgctgctgcggtgaattgggtgctgaaagatggcctcgggtaccttagcaagatcatgttgtccaaattcggacgccattttgatgttaaccccaaagggtggcgactgtttgctgattttctggagattctgactccagtgttccctcacctgtttgttccagttggggtggctgctggtgctggccgctcagcagcttctttgatacaggctaagacttactttagtattgattatcaatattctatagtctgcatttatggaaatctatgctcattatagcgcaacataggtgttctgccttgtgtatctcggtatcctcataattggtagccatatgaacatgagacttatgatatggccactagaagatgtatgactatctgaagattttcatagcatgtttatactttatactcacctgagcgacggcgattatggccaggggcacaagcgtccagtcagtttagtaaaagaagtttatgtttcaaataaccctctaaatggtattttgtctgtaagcatatgattgataatggtctcttagcgaagcgtgttcacataatgacatttgagcgaatcctaagtttcataatggcagaaatccaattttcttttgtaaaggtgaaggatgaagtggtgagcaaaaatgaagaggatgatgtggggcctggatcagatttgcatattactaacgatcaggtgtattgtgagacggagaaggtgaaagaaggaggagggaatacgttgaatgatctagccaggagaacaacagatttggatcctttggacaagaaggaagcaagctcaagcaagggacatctggccatgcctctcaatccttcggaattacaaggcgttatatggcccccacatatcaatgagaggccaaattcagtttttaaagagaagttgattgagtttctcatcaaaccatttacacaggaagaatatgataggtattttgctctggctagtgatcgcattccaatggtcaaagaacgaaggacccgtaatacggtggcatactatcactggacgcatgagatgagcaagtcatactttgataggtacccaggagctctgccttgcagaagcaagaaacagaaggctctgcccttggatgccatatgaagagacaatgctgagagcacagccagcctaaggcaaaggtcctcccgctactggctgctgaaagcaagatgtcgttgcgcgatatcctcttttacctat

SEQ ID NO: 19801 - DNA, 1471 bp, Zea Mays
cgccactcgccaccccactttccaaaccagaccacagccgaaaacccccgatcatgccgccgccggtcgaaccctacatcccttcgttcaccgccggcttgtccgcgcacgaggccgccgatgccgacaaagactacctctacttcctccgccacgtccgcctcgacggagacgcctacacggtcgtgattccgtccaaggacggcgcctcctgtcctccccagatcatcaggtacgaacaaccgcactccgatcacaatgccggggcccccgtcgcgggctctgaatgcgggagacaaagggcccatcccccgtcggaggagaactcttgggctacgggtgaggccgccccacacggcgtgaagcgcaaggttccaggcgcgagccccgccggcgaggtccgaagcggtgctgtccgtatggaagaggacaccccgacattggtggcgaagtccgcgtggtatgacttgcaacccgacatcgacgatgactaccgcttcttcctccagaatgctcgcgtggtgaatgacaaattggtgttcaagacggggaactgttcaataactatcggggaccatagtgatgctgaggagcacgacgacaccgaggaggaagagaaagaggaggaaggggaaggggaagaggatgatgaagaagaagcagacgaccttcctgcgtcagggcagtcgggggaggacggtatcggtatggaggaggccggtcctgtgtcagagacagaggacggtgttgactcggatttgccaattccaaaggatgaagtggtgagcaaaaatgaagaggatgatgtggggcctggatcagatttgcatattactaacgatcaggtgtattgtgagacggagaaggtgaaagaaggaggagggaatacgttgaatgatctagccaggagaacaacagatttggatcctttggacaagaaggaagcaagctcaagcaagggacatctggccatgcctctcaatccttcggaattacaaggcgttatatggcccccacatatcaatgagaggccaaattcagtttttaaagagaagttgattgagtttctcatcaaaccatttacacaggaagaatatgataggtattttgctctggctagtgatcgcattccaatggtcaaagaacgaaggacccgtaatacggtggcatactatcactggacgcatgagatgagcaagtcatactttgataggtacccagatcttgctcagcaattcagtctccaacgcaataactatacaaatggcttggctcttttgcgtgggcttttcttctggttgcagaacattgagctagaagaccaattcagaccatggagcgatgaatttaaaaagtaccgagttgtcatggaatgtttgtagagggtttacccatactagccattactccatccagttcagaaagtcgtttggtaagttagcgcggtcgtctctgtgcaactctctgacct

SEQ ID NO: 19802 - DNA, 1465 bp, Zea Mays
cgccactcgccaccccactttccaaaccagaccacagccgaaaacccccgatcatgccgccgccggtcgaaccctacatcccttcgttcaccgccggcttgtccgcgcacgaggccgccgatgccgacaaagactacctctacttcctccgccacgtccgcctcgacggagacgcctacacggtcgtgattccgtccaaggacggcgcctcctgtcctccccagatcatcaggtacgaacaaccgcactccgatcacaatgccggggcccccgtcgcgggctctgaatgcgggagacaaagggcccatcccccgtcggaggagaactcttgggctacgggtgaggccgccccacacggcgtgaagcgcaaggttccaggcgcgagccccgccggcgaggtccgaagcggtgctgtccgtatggaagaggacaccccgacattggtggcgaagtccgcgtggtatgacttgcaacccgacatcgacgatgactaccgcttcttcctccagaatgctcgcgtggtgaatgacaaattggtgttcaagacggggaactgttcaataactatcggggaccatagtgatgctgaggagcacgacgacaccgaggaggaagagaaagaggaggaaggggaaggggaagaggatgatgaagaagaagcagacgaccttcctgcgtcagggcagtcgggggaggacggtatcggtatggaggaggccggtcctgtgtcagagacagaggacggtgttgactcggatttgccaattccaaaggtgaaggatgaagtggtgagcaaaaatgaagaggatgatgtggggcctggatcagatttgcatattactaacgatcagacggagaaggtgaaagaaggaggagggaatacgttgaatgatctagccaggagaacaacagatttggatcctttggacaagaaggaagcaagctcaagcaagggacatctggccatgcctctcaatccttcggaattacaaggcgttatatggcccccacatatcaatgagaggccaaattcagtttttaaagagaagttgattgagtttctcatcaaaccatttacacaggaagaatatgataggtattttgctctggctagtgatcgcattccaatggtcaaagaacgaaggacccgtaatacggtggcatactatcactggacgcatgagatgagcaagtcatactttgataggtacccagatcttgctcagcaattcagtctccaacgcaataactatacaaatggcttggctcttttgcgtgggcttttcttctggttgcagaacattgagctagaagaccaattcagaccatggagcgatgaatttaaaaagtaccgagttgtcatggaatgtttgtagagggtttacccatactagccattactccatccagttcagaaagtcgtttggtaagttagcgcggtcgtctctgtgcaactctctgacct

SEQ ID NO: 19803 - DNA, 1194 bp, Zea Mays
cgccactcgccaccccactttccaaaccagaccacagccgaaaacccccgatcatgccgccgccggtcgaaccctacatcccttcgttcaccgccggcttgtccgcgcacgaggccgccgatgccgacaaagactacctctacttcctccgccacgtccgcctcgacggagacgcctacacggtcgtgattccgtccaaggacggcgcctcctgtcctccccagatcatcagaatgctcgcgtggtgaatgacaaattggtgttcaagacggggaactgttcaataactatcggggaccatagtgatgctgaggagcacgacgacaccgaggaggaagagaaagaggaggaaggggaaggggaagaggatgatgaagaagaagcagacgaccttcctgcgtcagggcagtcgggggaggacggtatcggtatggaggaggccggtcctgtgtcagagacagaggacggtgttgactcggatttgccaattccaaaggatgaagtggtgagcaaaaatgaagaggatgatgtggggcctggatcagatttgcatattactaacgatcaggtgtattgtgagacggagaaggtgaaagaaggaggagggaatacgttgaatgatctagccaggagaacaacagatttggatcctttggacaagaaggaagcaagctcaagcaagggacatctggccatgcctctcaatccttcggaattacaaggcgttatatggcccccacatatcaatgagaggccaaattcagtttttaaagagaagttgattgagtttctcatcaaaccatttacacaggaagaatatgataggtattttgctctggctagtgatcgcattccaatggtcaaagaacgaaggacccgtaatacggtggcatactatcactggacgcatgagatgagcaagtcatactttgataggtacccagatcttgctcagcaattcagtctccaacgcaataactatacaaatggcttggctcttttgcgtgggcttttcttctggttgcagaacattgagctagaagaccaattcagaccatggagcgatgaatttaaaaagtaccgagttgtcatggaatgtttgtagagggtttacccatactagccattactccatccagttcagaaagtcgtttggtaagttagcgcggtcgtctctgtgcaactctctgacct

SEQ ID NO: 19804 - DNA, 1694 bp, Zea Mays
ctcacttacacgtgggatccacataagtcaatgacatgtggatatctaaagttgtaatcttttaatggtatagatccaattattcctttttgtaacacgtcttgcttataaagggagaaaattggatttctgccattatgaagcttaggattcgctcaaatgccactatgtgaacacgcttcgctaaaaaaccattatgaatcatatgcttacagacaaaatgccatttagggggttatctgaaacataaacttcttttactaaactgactggatgcttgtgcccctggcgacataatcgctgtcgctcatggatcggtccggttccagctgccaggttttcttcaggctctgctctatgcggttgggttagggaaaggagcgatacccactgctgctgcggtgaattgggtgctgaaagatggcctcgggtaccttagcaagatcatgttgtccaaattcggacgccattttgatgttaaccccaaagggtggcgactgtttgctgattttctggagattctgactccagtgttccctcacctgtttgttccagttggggtggctgctggtgctggccgctcagcagcttctttgatacaggctaagacttactttagtattgattatcaatattctatagtctgcatttatggaaatctatgctcattatagcgcaacataggtgttctgccttgtgtatctcggtatcctcataattggtagccatatgaacatgagacttatgatatggccactagaagatgtatgactatctgaagattttcatagcatgtttatactttatactcacctgagcgacggcgattatggccaggggcacaagcgtccagtcagtttagtaaaagaagtttatgtttcaaataaccctctaaatggtattttgtctgtaagcatatgattgataatggtctcttagcgaagcgtgttcacataatgacatttgagcgaatcctaagtttcataatggcagaaatccaattttcttttgtaaaggtgaaggatgaagtggtgagcaaaaatgaagaggatgatgtggggcctggatcagatttgcatattactaacgatcaggtgtattgtgagacggagaaggtgaaagaaggaggagggaatacgttgaatgatctagccaggagaacaacagatttggatcctttggacaagaaggaagcaagctcaagcaagggacatctggccatgcctctcaatccttcggaattacaaggcgttatatggcccccacatatcaatgagaggccaaattcagtttttaaagagaagttgattgagtttctcatcaaaccatttacacaggaagaatatgataggtattttgctctggctagtgatcgcattccaatggtcaaagaacgaaggacccgtaatacggtggcatactatcactggacgcatgagatgagcaagtcatactttgataggtacccagatcttgctcagcaattcagtctccaacgcaataactatacaaatggcttggctcttttgcgtgggcttttcttctggttgcagaccatggagcgatgaatttaaaaagtaccgagttgtcatggaatgtttgtagagggtttacccatactagccattactccatccagttcagaaagtcgtttggtaagttagcgcggtcgtctctgtgcaactctctgacct

SEQ ID NO: 19805 - DNA, 1720 bp, Zea Mays
ctcacttacacgtgggatccacataagtcaatgacatgtggatatctaaagttgtaatcttttaatggtatagatccaattattcctttttgtaacacgtcttgcttataaagggagaaaattggatttctgccattatgaagcttaggattcgctcaaatgccactatgtgaacacgcttcgctaaaaaaccattatgaatcatatgcttacagacaaaatgccatttagggggttatctgaaacataaacttcttttactaaactgactggatgcttgtgcccctggcgacataatcgctgtcgctcatggatcggtccggttccagctgccaggttttcttcaggctctgctctatgcggttgggttagggaaaggagcgatacccactgctgctgcggtgaattgggtgctgaaagatggcctcgggtaccttagcaagatcatgttgtccaaattcggacgccattttgatgttaaccccaaagggtggcgactgtttgctgattttctggagattctgactccagtgttccctcacctgtttgttccagttggggtggctgctggtgctggccgctcagcagcttctttgatacaggctaagacttactttagtattgattatcaatattctatagtctgcatttatggaaatctatgctcattatagcgcaacataggtgttctgccttgtgtatctcggtatcctcataattggtagccatatgaacatgagacttatgatatggccactagaagatgtatgactatctgaagattttcatagcatgtttatactttatactcacctgagcgacggcgattatggccaggggcacaagcgtccagtcagtttagtaaaagaagtttatgtttcaaataaccctctaaatggtattttgtctgtaagcatatgattgataatggtctcttagcgaagcgtgttcacataatgacatttgagcgaatcctaagtttcataatggcagaaatccaattttcttttgtaaaggtgaaggatgaagtggtgagcaaaaatgaagaggatgatgtggggcctggatcagatttgcatattactaacgatcaggtgtattgtgagacggagaaggtgaaagaaggaggagggaatacgttgaatgatctagccaggagaacaacagatttggatcctttggacaagaaggaagcaagctcaagcaagggacatctggccatgcctctcaatccttcggaattacaaggcgttatatggcccccacatatcaatgagaggccaaattcagtttttaaagagaagttgattgagtttctcatcaaaccatttacacaggaagaatatgataggtattttgctctggctagtgatcgcattccaatggtcaaagaacgaaggacccgtaatacggtggcatactatcactggacgcatgagatgagcaagtcatactttgataggtacccagatcttgctcagcaattcagtctccaacgcaataactatacaaatggcttggctcttttgcgtgggcttttcttctggttgcagaacattgagctagaagaccaattcagaccatggagcgatgaatttaaaaagtaccgagttgtcatggaatgtttgtagagggtttacccatactagccattactccatccagttcagaaagtcgtttggtaagttagcgcggtcgtctctgtgcaactctctgacct

SEQ ID NO: 19806 - DNA, 9133 bp, Zea Mays
cgcgggcccatgtcaggagacggcttcaggtggttgaagaaacggacacaaaggaggaagaagctacagttcagaccacaagccggcgaaatagaaagccaaatcctcgcgtctcaggggccgagtgggtaaactgagtgggctgtgtccctatgattgggccgtgggcctcttaacaagatataagaacaattcagcgtaatggaaaagggggaagaaaatactaacaaaccattctcccagttctgactctctcgtctgctgtctctcttcgactcattcttcctctgcttcgtcttcctcgcctccgacaagtcaccggacgcccagtccgctgacaagtggtatcggatacaagttcgttcctatggcggcaccttcgtattatacccgtcgcgcgaagatggcgggcgcacccgatcccggcgtagcagcggcattggaagcacaatccaagtccattgatgtccagtcgcgaaccctagcagcacagtcgaaggttctccaacaactatgcgatcgcctcgaatcccaggaccagaggtggagcgaattggagcgaaccgtgaacaagaacgcagccaacgtcagcgtcattcaggagaaattgggcgagggcaggatggctgcggcgcatgaagaactcactcgagtattgggtgatagaatcaatgcccagatggtggaactgcgtgggtcgcagatgaatcgcatcgacgacctggccgcacaagctactacacgcgtagctgttctggaaaatgccacatcagtgctcgaatcgtggaggcccaaggtggagagttccatcgatgctgtgcgaacttcagttgatacgatgcggtcagaacttgctcgcctcacacaactgctggaaggaggggcttcaagcagtcaggatggccgaccaagcattctggggccatatgtgccagtggcggagcgcccacctgtggccgcagtcaacaccagcaagcccaacgggcaccacgacgcattgcatcatcgggagtatggagttgagaatggtcccattccaacccatctcccgaacaatgcacatgccagaggggctgggaggaaatatgcaagagccctattatgggaaaaatttggggagtttgccgaagcttaactttccatctttcgatggtgagaaccccaagttgtggatgactaggtgtgaagattattttctcatgtattcagtagacccaaggatgtggattaaggttgcatccatgcagttcataggcactgctgctcgctggcttcagtcggtagagtccaggattattcacatttcttggggggaatttgggcgcctagttcttgaacgctttggtaaggatcaacaccaattgttactccggcaattgttccatgttcggcaaactgggacagtggctgcatatgtggaggagttctcccaattgatagataaacttaatgcatatcagtccatgtctgaacctttgtactacactttaaaatttgtggatggtcttagagatgatgttaaagctgttgttatgcttcaacggccacaagatttggatactgctgcaattcttgctcagttgcaggaggaagcaggcacattattgaagaagaaggagtacagatggcaggaagctaccaaccctgccagggctgctgttcgacaagttgctggccatcagtggtatcctaaggaggtcaagcaaattggtacaggcaagatggaggaaaaaccttcaggcagcaggaacccttctactgatgatcgaattgcttcactatatgcctatcgtaaagcgaaatgcctatgctataaatgtggattaaaatactctcgagatcatcagtgtgctgatacagttcaattgcacgtggtcgaggagttgtggcaaatggttcaggcatccgaagatgaatcaggaacatgttcggacatggatgaagatggacctgaactgaatattatggtgttatcccaagctgcggcacgaggacatgaagctccgcgtacgatgaagtttgtgggacatattgaaggcatggacatattggctgcttgattcaggaagctctcacacgtttatcagcagtgaggtggcagctaacttgccaggactagttcctgtcgataagtctctgcaagtacaggttgccaatggatcacatctgtgctgcactcatcagatcttggatgcttcatggtccattagtggggtaacattttcttctacactcaaggtgctacaactgtcaacttatgaccttataattgggatggattggcttgagaaacatagcccgatgttgatccactggtctcaaaaatggcttagcattcctctcaaagactccactgtcaccctgcatggcgtcaggtcatcagttatacagacagcagtcatccaagtgtgtagcctccaggaattgtcagacaaggaacatgctatcttagccgatttacctgaagatatacaagctgtggtatttcagtttcctacggtttttgacatccctactggtatgcctccaataagagaatgtgaccatcaaattccacttgtagcaggtgcccgaccagtacagatgagaccatacagatatgctcctgctcttaaaaatgaaattgagcaacaagtaacagacatgttacaagctggcacaatacaacacagccacagtgagtttgcttcttcagtaatattggtaaagaagaaggacaatacttatcgcttctgtgtcgactataggcatttgaatgccttgacagtcaaaacaaaatatccagtacctattattgatgaattcttggatgaattgtatggggcagtatggttttctacattggatcttagagctggtttccatcagatccgaatgagcccacaggatcaacacaagactgcattccaaactcatcatggccacttcgaattcaaggttatgccatttggcctttcaggagctcctgcaacattccaaggtgccatgaattctacattggccccattactcaggaaatgtgtgctggtgttctttgatgacatattgatataaagcaagacatgggaagaacatttgcaacatttgacacaggtcttgcatattttacataaggaacaatggtatattaagctctccaagtgtgcttttgccaagcagcaaattgcttatttgggccatgttatttctgtaaatggagtggctacagacccaaacaaggtggaagctgtgtcgtcttggccaacacctgtgaattgcaaggaactccggggatttttgggcctagcaggatactacaggaagtttgtcaaaaattttggagttatagctcgccctctcactgatctgctgaaaaagggagtgatctttgtttggactcaggttcatataacagcatttgaaacattgaagcattctctagttacagctcctgtgctatccttacctaacttttctaggccctttgcaattgagactgatgcctctagcagaggaattggggcagtgctgttacaagataaccatcctttagcttatgtgagcaaggcattgggtgttaaaaaccaaggattgtcaacatatgagaaggagtaccttgctattttgatggctgtggacaaatggcgacagtatcttcagcatgctgaatttattatctattcagatcacagaagcttgtcccatttaacagaacaacgcttgacaactccttggcaacagcgtgtgttctccaaattaataggccttcagtacaaaatcatgtatcgaaagggtactgataatggggctgcagatgcactttcaagaaggccatcagctgagttgtacaacatttcttcggccacacctcagtggttgcttcaggtcatggatggttacaaaaatgatgatcaggcccagaaattgctagctgctttgtctgtcactcctgcgccactgggaccatatacactcaaggctggaattctgcggtataaagacagaatatggattggcaacaatttccctctccagaaccagattatgttgggtttacatgacagcccggtggggggccattcagggtttccggtgacttaccgaagggttaagcagctcttttcttggccatcgatgaagacctctgttaaagattatgtaaaatcatgtgctatttgtcaacagtccaaacccgatagaagcaagtatccaggcctcttgcagccattaccagtacctgatcaggcttgggatgtcatcagcatggacttcgtagagggccttccacgatcatctaatgctgacaccattttggtagtggttgacacattctcgaaatacagccattttattccattgctgcacccattttcagcactgaaggtcgcccaacttttcatggactccgtttacaagctccatggctttccactctccattgtgtcagaccgtgacatgatatttactagtcggttttggcaagaacttttcaagttggctgggactacgctgaaaatgagctcttcttatcacccacaaaccgatggccagacagaacgcgtgaatcagtgtcttgaaacatttcttcgcagctttgttcacgcctgtccaacaaagtggtcttcctggttatctctcgcagaatactggtataacaccagcttccactcatctctaggacgttctcctttcgaggtattgtatggccgtaccccacgacagttggggttaactctgggtgatgcctcatctttaatggaccttcaaacatggctgaatcaaagagagttgatggtgaaactcatccagcagcatttggctcgtgcacagcagaggatgaagtctcaagcggataaagggcgcactgaaagagaattcaatgtaggggatatggtctatctcaaacttcagccatatgtccaatcgtcagtggctactcgggcaaatcacaagctcagcttcaagttttttgggccatatttgattcttcaacgtgtgggcaaagtggcatataagttgcagttgccaccttcagctagcatccacccagttgttcatgtgtctcagctcaaactttcagtcggcaatagacaagtgagctctgcacttcctgatgctatgagccagatgcaggttcctgtgcagatattggatagacgcatagtaatgcgaggaggcaaagcggtacaacaggtgcttatcaaatggtctcaaggtgatgatactctttctagttgggaggatgaagaggcgttgcggtccaaatttccagaagcagccgcttggggtcaagcggagtttcaaggaggggacaatgtcaggagacggcttcaggtggttgaagaaacggacacaaaggaggaagaagctacagttcagaccacaagccggcggaatagaaagccaaatcctcgcgtctcaggggccgagtgagtaaactgagtgggctgtgtccctatgattgggccgtgggccttgtaacaagatataagaacaattcagcgtaatggaaaaggggggaagaaaatactaacaaacctgctgtctctcttcgactgctgtctctcttcgactcgttcttcctctgcttcgtcttcctcgcctccgacaagtcaccggacgcccagtccgctgacagcccacatctagcattgcaggttgctgtggggattgctgatttactagcttggtgccacagtgatggctagtgaggcgcgggtaaaattatgagcagtagggagactgtcctgccatagtgccatgtgatcctgctcctgttgcccgccgtcggtgggatcgtaaaatatggctctctcgcggcgtcctcggaaagcaggaatgtcaacattgccatgagtggttacgctgcgctgggccccgcaacgaacgccgcccgcctccttcgccacctagacctacacctactagagcaaccactcacttgctcgacagcgtggctagctagccccgctccacgtccagatgacccgagtaggccggatggcgtagagggggcagggaacagcgtagaggagggggagtaagaaaggagaggacacacacatacacagagagcgagagagcgagcgagagagagagatagatgggggcgattggaggtgacgagcaggtgcagttggacaatgtggatggggccgaggtggccaatgacggcggtgcaggtgctgcgggaaggctggagaagatactggtctctgtgaggctgagaccgctcagcgacaaggagattgcaaggagggacccggcggagtgggagtgcatcaacgacactaccatcatctcccggagcaccttcccggaccggcctactgctccgactacgtattcatttgatagggtatttcgttctgactgtaataccaaagaagtatatgaggaaggggccaaagcagttgctctctctgtagttagtggcattaactcaagtgtttttgcatatggtcaaacaagtagtggaaaaacatacaccatgactggaataacggaacatacagcagcagatatctatgattacattggcaagcatgaagagagagcatttgtattgaaattttcagcaattgaaatatataacgaagttgtaagggatcttcttagtgcagaaaacacatcacttagactttgggatgatgcagagaagggaacatatatagagaaccttacagaggtgatcttgagggatttggaccacctgaaagaacttatttctgtgtgtgaagctcaaaggaggaccggcgagacatacttaaatggaaacagctccagatcacaccaaatacttaaactgactattgaaagttctgctcgtgagttctcaggtaaggacaagtcaacaacacttgttgctagtgtgaacttcgttgatttggctggaagtgaacgtgcatctcaggcattgtcagttggggctaggctgaaggaaggttgtcatattaatagaagtctacttaccctaggaactgtgatccggaaactaagcaaggtaagaaatgggcacataccataccgagattcaaagctcacacgcatattacagatttctctaggaggcaatgcaagaacagcaattatttgtacaatgagcccagcccgaagccatatggaacagtcaaggaataccttgttgtttgcaagttgtgcaaaggaagtggtgacaaatgcccaggttaatgtggttatgtctgataaagcattaattaagcaattacaaaaagaacttgcaaggttggaaagtgaattgcgatgcccagcttcatatcctggtcttgaagcattagtgaaggaaaaagataatcaaatcctggagatggagaaagaaattaaggaactgaagttacaacgtgatgtcgctgaatctagactgcaagatctgctcaaggttgttggagataaccatggttcaaagcaccccctggcttcttctggaagaaactttgatgttcctcagccatgtgaggatgagcaatcgacgacatcagaagttgtcagcagtggccaaaattttaggcttcaaggacgccagacaacacaaagagattataggttacagcaatctgaaaatgatgtgcagtttgctacctctcttagctgttcagtcagcagtcccccgttcagtgggatgcccccaactaatggcagagatgataactctcaaatatctaatgaagattcaggggatctttgcaaagaagtacggtgcatagagaccaatgaaacagaggaaaacaaatgtttagagtcgtcagctgtgggaagcactagtctgcaagattcaaatgtagcttccagcatgcatgggaacaacaatacaaatcgatctgtgaattctagacagcatgatgagtctcctattaccctggagcaacatttggagaatgccaataattcgttagccaatcttgggatggatctgggatcctctacaggtaattcaccaagctcaaaagtaattgacagaagcaggagctgtaggtctctgatgggttctaccttgttggaagacttggagaaacaagattgcacccctccaagcagaagttttgtggactacccagggagacccgaaacatgtcaaagaagggtacctgcactgaactatgatgtagagagtgaaactttatccagaacaggatcaatgctatctgaaattattaccgcgagggacggactgaaggaaaacagctctattgctggtgatacagaatctgttgctggcataggtgaatttgttgcggagctaaaagaaatggtccaggcacagtatcagaagcaacgtggtaatcagggtgatgatggagaattggctgaagggaccataaggagcgtggggctagatcccattatggatgacttgcaatcaccatctcgctggccattggatttcgagaagaaacaacaagagatcattgacctgtggcatggatgcaacgtttccttggtccacaggacttactttttcctgctgttcaaaggggacccagccgacgccatttacatggaagtggagcttaggaggttatcatttctcaaaaatacatactccaacggaagcatggggcgtaatgtggtagcaggcagcgtgagcgcttctctggttttaagtgcaaagaaactgcaacgtgagagggagatgctctgtaggcagatgcagaagcggctggcgatccaggaacgggagagcttgtacaccaagtggggagtctcactgtcctccaagaggaggcggctgcaggtcgctcggcgcctttggacggagaccaaggatctggagcatgttagggagagcgcgtccctcgtggccagactgatcgtgctcctggagcctgggaaggcgctgagggagatgtttggtctgagcttcgcgccgcagcagttcacccggagatcgcacaatagttggcgatatggccgttcttctctagactgactgaactcgaaaaactaagctgagggggaaaaacgttccgtccttttgtttttgtgtaatagattgttgccctcttggaaatagaaatccctgattccgagtccgttgcaacgccgtaatgtgactaactatcagatggatatacatttgatcgatgtgtgatgatgtgtccagggcgcacaaatcggaaaacaaacagagcaattg

SEQ ID NO: 19807 - DNA, 9164 bp, Zea Mays
cgcgggcccatgtcaggagacggcttcaggtggttgaagaaacggacacaaaggaggaagaagctacagttcagaccacaagccggcgaaatagaaagccaaatcctcgcgtctcaggggccgagtgggtaaactgagtgggctgtgtccctatgattgggccgtgggcctcttaacaagatataagaacaattcagcgtaatggaaaagggggaagaaaatactaacaaaccattctcccagttctgactctctcgtctgctgtctctcttcgactcattcttcctctgcttcgtcttcctcgcctccgacaagtcaccggacgcccagtccgctgacaagtggtatcggatacaagttcgttcctatggcggcaccttcgtattatacccgtcgcgcgaagatggcgggcgcacccgatcccggcgtagcagcggcattggaagcacaatccaagtccattgatgtccagtcgcgaaccctagcagcacagtcgaaggttctccaacaactatgcgatcgcctcgaatcccaggaccagaggtggagcgaattggagcgaaccgtgaacaagaacgcagccaacgtcagcgtcattcaggagaaattgggcgagggcaggatggctgcggcgcatgaagaactcactcgagtattgggtgatagaatcaatgcccagatggtggaactgcgtgggtcgcagatgaatcgcatcgacgacctggccgcacaagctactacacgcgtagctgttctggaaaatgccacatcagtgctcgaatcgtggaggcccaaggtggagagttccatcgatgctgtgcgaacttcagttgatacgatgcggtcagaacttgctcgcctcacacaactgctggaaggaggggcttcaagcagtcaggatggccgaccaagcattctggggccatatgtgccagtggcggagcgcccacctgtggccgcagtcaacaccagcaagcccaacgggcaccacgacgcattgcatcatcgggagtatggagttgagaatggtcccattccaacccatctcccgaacaatgcacatgccagaggggctgggaggaaatatgcaagagccctattatgggaaaaatttggggagtttgccgaagcttaactttccatctttcgatggtgagaaccccaagttgtggatgactaggtgtgaagattattttctcatgtattcagtagacccaaggatgtggattaaggttgcatccatgcagttcataggcactgctgctcgctggcttcagtcggtagagtccaggattattcacatttcttggggggaatttgggcgcctagttcttgaacgctttggtaaggatcaacaccaattgttactccggcaattgttccatgttcggcaaactgggacagtggctgcatatgtggaggagttctcccaattgatagataaacttaatgcatatcagtccatgtctgaacctttgtactacactttaaaatttgtggatggtcttagagatgatgttaaagctgttgttatgcttcaacggccacaagatttggatactgctgcaattcttgctcagttgcaggaggaagcaggcacattattgaagaagaaggagtacagatggcaggaagctaccaaccctgccagggctgctgttcgacaagttgctggccatcagtggtatcctaaggaggtcaagcaaattggtacaggcaagatggaggaaaaaccttcaggcagcaggaacccttctactgatgatcgaattgcttcactatatgcctatcgtaaagcgaaatgcctatgctataaatgtggattaaaatactctcgagatcatcagtgtgctgatacagttcaattgcacgtggtcgaggagttgtggcaaatggttcaggcatccgaagatgaatcaggaacatgttcggacatggatgaagatggacctgaactgaatattatggtgttatcccaagctgcggcacgaggacatgaagctccgcgtacgatgaagtttgtgggacatattgaaggcatggacatattggctgcttgattcaggaagctctcacacgtttatcagcagtgaggtggcagctaacttgccaggactagttcctgtcgataagtctctgcaagtacaggttgccaatggatcacatctgtgctgcactcatcagatcttggatgcttcatggtccattagtggggtaacattttcttctacactcaaggtgctacaactgtcaacttatgaccttataattgggatggattggcttgagaaacatagcccgatgttgatccactggtctcaaaaatggcttagcattcctctcaaagactccactgtcaccctgcatggcgtcaggtcatcagttatacagacagcagtcatccaagtgtgtagcctccaggaattgtcagacaaggaacatgctatcttagccgatttacctgaagatatacaagctgtggtatttcagtttcctacggtttttgacatccctactggtatgcctccaataagagaatgtgaccatcaaattccacttgtagcaggtgcccgaccagtacagatgagaccatacagatatgctcctgctcttaaaaatgaaattgagcaacaagtaacagacatgttacaagctggcacaatacaacacagccacagtgagtttgcttcttcagtaatattggtaaagaagaaggacaatacttatcgcttctgtgtcgactataggcatttgaatgccttgacagtcaaaacaaaatatccagtacctattattgatgaattcttggatgaattgtatggggcagtatggttttctacattggatcttagagctggtttccatcagatccgaatgagcccacaggatcaacacaagactgcattccaaactcatcatggccacttcgaattcaaggttatgccatttggcctttcaggagctcctgcaacattccaaggtgccatgaattctacattggccccattactcaggaaatgtgtgctggtgttctttgatgacatattgatataaagcaagacatgggaagaacatttgcaacatttgacacaggtcttgcatattttacataaggaacaatggtatattaagctctccaagtgtgcttttgccaagcagcaaattgcttatttgggccatgttatttctgtaaatggagtggctacagacccaaacaaggtggaagctgtgtcgtcttggccaacacctgtgaattgcaaggaactccggggatttttgggcctagcaggatactacaggaagtttgtcaaaaattttggagttatagctcgccctctcactgatctgctgaaaaagggagtgatctttgtttggactcaggttcatataacagcatttgaaacattgaagcattctctagttacagctcctgtgctatccttacctaacttttctaggccctttgcaattgagactgatgcctctagcagaggaattggggcagtgctgttacaagataaccatcctttagcttatgtgagcaaggcattgggtgttaaaaaccaaggattgtcaacatatgagaaggagtaccttgctattttgatggctgtggacaaatggcgacagtatcttcagcatgctgaatttattatctattcagatcacagaagcttgtcccatttaacagaacaacgcttgacaactccttggcaacagcgtgtgttctccaaattaataggccttcagtacaaaatcatgtatcgaaagggtactgataatggggctgcagatgcactttcaagaaggccatcagctgagttgtacaacatttcttcggccacacctcagtggttgcttcaggtcatggatggttacaaaaatgatgatcaggcccagaaattgctagctgctttgtctgtcactcctgcgccactgggaccatatacactcaaggctggaattctgcggtataaagacagaatatggattggcaacaatttccctctccagaaccagattatgttgggtttacatgacagcccggtggggggccattcagggtttccggtgacttaccgaagggttaagcagctcttttcttggccatcgatgaagacctctgttaaagattatgtaaaatcatgtgctatttgtcaacagtccaaacccgatagaagcaagtatccaggcctcttgcagccattaccagtacctgatcaggcttgggatgtcatcagcatggacttcgtagagggccttccacgatcatctaatgctgacaccattttggtagtggttgacacattctcgaaatacagccattttattccattgctgcacccattttcagcactgaaggtcgcccaacttttcatggactccgtttacaagctccatggctttccactctccattgtgtcagaccgtgacatgatatttactagtcggttttggcaagaacttttcaagttggctgggactacgctgaaaatgagctcttcttatcacccacaaaccgatggccagacagaacgcgtgaatcagtgtcttgaaacatttcttcgcagctttgttcacgcctgtccaacaaagtggtcttcctggttatctctcgcagaatactggtataacaccagcttccactcatctctaggacgttctcctttcgaggtattgtatggccgtaccccacgacagttggggttaactctgggtgatgcctcatctttaatggaccttcaaacatggctgaatcaaagagagttgatggtgaaactcatccagcagcatttggctcgtgcacagcagaggatgaagtctcaagcggataaagggcgcactgaaagagaattcaatgtaggggatatggtctatctcaaacttcagccatatgtccaatcgtcagtggctactcgggcaaatcacaagctcagcttcaagttttttgggccatatttgattcttcaacgtgtgggcaaagtggcatataagttgcagttgccaccttcagctagcatccacccagttgttcatgtgtctcagctcaaactttcagtcggcaatagacaagtgagctctgcacttcctgatgctatgagccagatgcaggttcctgtgcagatattggatagacgcatagtaatgcgaggaggcaaagcggtacaacaggtgcttatcaaatggtctcaaggtgatgatactctttctagttgggaggatgaagaggcgttgcggtccaaatttccagaagcagccgcttggggtcaagcggagtttcaaggaggggacaatgtcaggagacggcttcaggtggttgaagaaacggacacaaaggaggaagaagctacagttcagaccacaagccggcggaatagaaagccaaatcctcgcgtctcaggggccgagtgagtaaactgagtgggctgtgtccctatgattgggccgtgggccttgtaacaagatataagaacaattcagcgtaatggaaaaggggggaagaaaatactaacaaacctgctgtctctcttcgactgctgtctctcttcgactcgttcttcctctgcttcgtcttcctcgcctccgacaagtcaccggacgcccagtccgctgacagcccacatctagcattgcaggttgctgtggggattgctgatttactagcttggtgccacagtgatggctagtgaggcgcgggtaaaattatgagcagtagggagactgtcctgccatagtgccatgtgatcctgctcctgttgcccgccgtcggtgggatcgtaaaatatggctctctcgcggcgtcctcggaaagcaggaatgtcaacattgccatgagtggttacgctgcgctgggccccgcaacgaacgccgcccgcctccttcgccacctagacctacacctactagagcaaccactcacttgctcgacagcgtggctagctagccccgctccacgtccagatgacccgagtaggccggatggcgtagagggggcagggaacagcgtagaggagggggagtaagaaaggagaggacacacacatacacagagagcgagagagcgagcgagagagagagatagatgggggcgattggaggtgacgagcaggtgcagttggacaatgtggatggggccgaggtggccaatgacggcggtgcaggtgctgcgggaaggctggagaagatactggtctctgtgaggctgagaccgctcagcgacaaggagattgcaaggagggacccggcggagtgggagtgcatcaacgacactaccatcatctcccggagcaccttcccggaccggcctactgctccgactacgtattcatttgatagggtatttcgttctgactgtaataccaaagaagtatatgaggaaggggccaaagcagttgctctctctgtagttagtggcattaactcaagtgtttttgcatatggtcaaacaagtagtggaaaaacatacaccatgactggaataacggaacatacagcagcagatatctatgattacattggcaagcatgaagagagagcatttgtattgaaattttcagcaattgaaatatataacgaagttgtaagggatcttcttagtgcagaaaacacatcacttagactttgggatgatgcagagaagggaacatatatagagaaccttacagaggtgatcttgagggatttggaccacctgaaagaacttatttctgtgtgtgaagctcaaaggaggaccggcgagacatacttaaatggaaacagctccagatcacaccaaatacttaaactggtttgcctactgcttggttgcatgtagaaaagaaaagggactggtagattaatgtaaaatagtcactgcctaacttcatcacttatgatttgataaatgattctttcagactattgaaagttctgctcgtgagttctcagaacttcgttgatttggctggaagtgaacgtgcatctcaggcattgtcagttggggctaggctgaaggaaggttgtcatattaatagaagtctacttaccctaggaactgtgatccggaaactaagcaaggtaagaaatgggcacataccataccgagattcaaagctcacacgcatattacagatttctctaggaggcaatgcaagaacagcaattatttgtacaatgagcccagcccgaagccatatggaacagtcaaggaataccttgttgtttgcaagttgtgcaaaggaagtggtgacaaatgcccaggttaatgtggttatgtctgataaagcattaattaagcaattacaaaaagaacttgcaaggttggaaagtgaattgcgatgcccagcttcatatcctggtcttgaagcattagtgaaggaaaaagataatcaaatcctggagatggagaaagaaattaaggaactgaagttacaacgtgatgtcgctgaatctagactgcaagatctgctcaaggttgttggagataaccatggttcaaagcaccccctggcttcttctggaagaaactttgatgttcctcagccatgtgaggatgagcaatcgacgacatcagaagttgtcagcagtggccaaaattttaggcttcaaggacgccagacaacacaaagagattataggttacagcaatctgaaaatgatgtgcagtttgctacctctcttagctgttcagtcagcagtcccccgttcagtgggatgcccccaactaatggcagagatgataactctcaaatatctaatgaagattcaggggatctttgcaaagaagtacggtgcatagagaccaatgaaacagaggaaaacaaatgtttagagtcgtcagctgtgggaagcactagtctgcaagattcaaatgtagcttccagcatgcatgggaacaacaatacaaatcgatctgtgaattctagacagcatgatgagtctcctattaccctggagcaacatttggagaatgccaataattcgttagccaatcttgggatggatctgggatcctctacaggtaattcaccaagctcaaaagtaattgacagaagcaggagctgtaggtctctgatgggttctaccttgttggaagacttggagaaacaagattgcacccctccaagcagaagttttgtggactacccagggagacccgaaacatgtcaaagaagggtacctgcactgaactatgatgtagagagtgaaactttatccagaacaggatcaatgctatctgaaattattaccgcgagggacggactgaaggaaaacagctctattgctggtgatacagaatctgttgctggcataggtgaatttgttgcggagctaaaagaaatggtccaggcacagtatcagaagcaacgtggtaatcagggtgatgatggagaattggctgaagggaccataaggagcgtggggctagatcccattatggatgacttgcaatcaccatctcgctggccattggatttcgagaagaaacaacaagagatcattgacctgtggcatggatgcaacgtttccttggtccacaggacttactttttcctgctgttcaaaggggacccagccgacgccatttacatggaagtggagcttaggaggttatcatttctcaaaaatacatactccaacggaagcatggggcgtaatgtggtagcaggcagcgtgagcgcttctctggttttaagatgcagaagcggctggcgatccaggaacgggagagcttgtacaccaagtggggagtctcactgtcctccaagaggaggcggctgcaggtcgctcggcgcctttggacggagaccaaggatctggagcatgttagggagagcgcgtccctcgtggccagactgatcgtgctcctggagcctgggaaggcgctgagggagatgtttggtctgagcttcgcgccgcagcagttcacccggagatcgcacaatagttggcgatatggccgttcttctctagactgactgaactcgaaaaactaagctgagggggaaaaacgttccgtccttttgtttttgtgtaatagattgttgccctcttggaaatagaaatccctgattccgagtccgttgcaacgccgtaatgtgactaactatcagatggatatacatttgatcgatgtgtgatgatgtgtccagggcgcacaaatcggaaaacaaacagagcaattg

SEQ ID NO: 19808 - DNA, 4230 bp, Zea Mays
aagaaacggacacaaaggaggaagaagctacagttcagaccacaagccggcgaaatagaaagccaaatcctcgcgtctcaggggccgagtgggtaaactgagtgggctgtgtccctatgattgggccgtgggcctcttaacaagatataagaacaattcagcgtaatggaaaagggggaagaaaatactaacaaaccattctcccagttctgactctctcgtctgctgtctctcttcgactcattcttcctctgcttcgtcttcctcgcctccgacaagtcaccggacgcccagtccgctgacaagtggtatcggatacaagttcgttcctatggcggcaccttcgtattatacccgtcgcgcgaagatggcgggcgcacccgatcccggcgtagcagcggcattggaagcacaatccaagtccattgatgtccagtcgcgaaccctagcagcacagtcgaaggttctccaacaactatgcgatcgcctcgaatcccaggaccagaggtggagcgaattggagcgaaccgtgaacaagaacgcagccaacgtcagcgtcattcaggagaaattgggcgagggcaggatggctgcggcgcatgaagaactcactcgagtattgggtgatagaatcaatgcccagatggtggaactgcgtgggtcgcagatgaatcgcatcgacgacctggccgcacaagctactacacgcgtagctgttctggaaaatgccacatcagtgctcgaatcgtggaggcccaaggtggagagttccatcgatgctgtgcgaacttcagttgatacgatgcggtcagaacttgctcgcctcacacaactgctggaaggaggggcttcaagcagtcaggatggccgaccaagcattctggggccatatgtgccagtggcggagcgcccacctgtggccgcagtcaacaccagcaagcccaacgggcaccacgacgcattgcatcatcgggagtatggagttgagaatggtcccattccaacccatctcccgaacaatgatggcgtagagggggcagggaacagcgtagaggagggggagtaagaaaggagaggacacacacatacacagagagcgagagagcgagcgagagagagagatagatgggggcgattggaggtgacgagcaggtgcagttggacaatgtggatggggccgaggtggccaatgacggcggtgcaggtgctgcgggaaggctggagaagatactggtctctgtgaggctgagaccgctcagcgacaaggagattgcaaggagggacccggcggagtgggagtgcatcaacgacactaccatcatctcccggagcaccttcccggaccggcctactgctccgactacgtattcatttgatagggtatttcgttctgactgtaataccaaagaagtatatgaggaaggggccaaagcagttgctctctctgtacaagtgtttttgcatatggtcaaacaagtagtggaaaaacatacaccatgactggaataacggaacatacagcagcagatatctatgattacattggcaagcatgaagagagagcatttgtattgaaattttcagcaattgaaatatataacgaagttgtaagggatcttcttagtgcagaaaacacatcacttagactttgggatgatgcagagaagggaacatatatagagaaccttacagaggtgatcttgagggatttggaccacctgaaagaacttatttctgtgtgtgaagctcaaaggaggaccggcgagacatacttaaatggaaacagctccagatcacaccaaatacttaaactgactattgaaagttctgctcgtgagttctcaggtaaggacaagtcaacaacacttgttgctagtgtgaacttcgttgatttggctggaagtgaacgtgcatctcaggcattgtcagttggggctaggctgaaggaaggttgtcatattaatagaagtctacttaccctaggaactgtgatccggaaactaagcaaggtaagaaatgggcacataccataccgagattcaaagctcacacgcatattacagatttctctaggaggcaatgcaagaacagcaattatttgtacaatgagcccagcccgaagccatatggaacagtcaaggaataccttgttgtttgcaagttgtgcaaaggaagtggtgacaaatgcccaggttaatgtggttatgtctgataaagcattaattaagcaattacaaaaagaacttgcaaggttggaaagtgaattgcgatgcccagcttcatatcctggtcttgaagcattagtgaaggaaaaagataatcaaatcctggagatggagaaagaaattaaggaactgaagttacaacgtgatgtcgctgaatctagactgcaagatctgctcaaggttgttggagataaccatggttcaaagcaccccctggcttcttctggaagaaactttgatgttcctcagccatgtgaggatgagcaatcgacgacatcagaagttgtcagcagtggccaaaattttaggcttcaaggacgccagacaacacaaagagattataggttacagcaatctgaaaatgatgtgcagtttgctacctctcttagctgttcagtcagcagtcccccgttcagtgggatgcccccaactaatggcagagatgataactctcaaatatctaatgaagattcaggggatctttgcaaagaagtacggtgcatagagaccaatgaaacagaggaaaacaaatgtttagagtcgtcagctgtgggaagcactagtctgcaagattcaaatgtagcttccagcatgcatgggaacaacaatacaaatcgatctgtgaattctagacagcatgatgagtctcctattaccctggagcaacatttggagaatgccaataattcgttagccaatcttgggatggatctgggatcctctacaggtaattcaccaagctcaaaagtaattgacagaagcaggagctgtaggtctctgatgggttctaccttgttggaagacttggagaaacaagattgcacccctccaagcagaagttttgtggactacccagggagacccgaaacatgtcaaagaagggtacctgcactgaactatgatgtagagagtgaaactttatccagaacaggatcaatgctatctgaaattattaccgcgagggacggactgaaggaaaacagctctattgctggtgatacagaatctgttgctggcataggtgaatttgttgcggagctaaaagaaatggtccaggcacagtatcagaagcaacgtggtaatcagggtgatgatggagaattggctgaagggaccataaggagcgtggggctagatcccattatggatgacttgcaatcaccatctcgctggccattggatttcgagaagaaacaacaagagatcattgacctgtggcatggatgcaacgtttccttggtccacaggacttactttttcctgctgttcaaaggggacccagccgacgccatttacatggaagtggagcttaggaggttatcatttctcaaaaatacatactccaacggaagcatggggcgtaatgtggtagcaggcagcgtgagcgcttctctggttttaaggtaagtcatcttcaattttttcacagttttgctgtggcgcgtcactcaaactcagtgacatgctgcgcagtgcaaagaaactgcaacgtgagagggagatgctctgtaggcagatgcagaagcggctggcgatccaggaacgggagagcttgtacaccaagtggggagtctcactgtcctccaagaggaggcggctgcaggtcgctcggcgcctttggacggagaccaaggatctggagcatgttagggagagcgcgtccctcgtggccagactgatcgtgctcctggagcctgggaaggcgctgagggagatgtttggtctgagcttcgcgccgcagcagttcacccggagatcgcacaatagttggcgatatggccgttcttctctagactgactgaactcgaaaaactaagctgagggggaaaaacgttccgtccttttgtttttgtgtaatagattgttgccctcttggaaatagaaatccctgattccgagtccgttgcaacgccgtaatgtgactaactatcagatggatatacatttgatcgatgtgtgatgatgtgtccagggcgcacaaatcggaaaacaaacagagcaattg

SEQ ID NO: 19809 - DNA, 7040 bp, Zea Mays
attggctgcttgattcaggaagctctcacacgtttatcagcagtgaggtggcagctaacttgccaggactagttcctgtcgataagtctctgcaagtacaggttgccaatggatcacatctgtgctgcactcatcagatcttggatgcttcatggtccattagtggggtaacattttcttctacactcaaggtgctacaactgtcaacttatgaccttataattgggatggattggcttgagaaacatagcccgatgttgatccactggtctcaaaaatggcttagcattcctctcaaagactccactgtcaccctgcatggcgtcaggtcatcagttatacagacagcagtcatccaagtgtgtagcctccaggaattgtcagacaaggaacatgctatcttagccgatttacctgaagatatacaagctgtggtatttcagtttcctacggtttttgacatccctactggtatgcctccaataagagaatgtgaccatcaaattccacttgtagcaggtgcccgaccagtacagatgagaccatacagatatgctcctgctcttaaaaatgaaattgagcaacaagtaacagacatgttacaagctggcacaatacaacacagccacagtgagtttgcttcttcagtaatattggtaaagaagaaggacaatacttatcgcttctgtgtcgactataggcatttgaatgccttgacagtcaaaacaaaatatccagtacctattattgatgaattcttggatgaattgtatggggcagtatggttttctacattggatcttagagctggtttccatcagatccgaatgagcccacaggatcaacacaagactgcattccaaactcatcatggccacttcgaattcaaggttatgccatttggcctttcaggagctcctgcaacattccaaggtgccatgaattctacattggccccattactcaggaaatgtgtgctggtgttctttgatgacatattgatataaagcaagacatgggaagaacatttgcaacatttgacacaggtcttgcatattttacataaggaacaatggtatattaagctctccaagtgtgcttttgccaagcagcaaattgcttatttgggccatgttatttctgtaaatggagtggctacagacccaaacaaggtggaagctgtgtcgtcttggccaacacctgtgaattgcaaggaactccggggatttttgggcctagcaggatactacaggaagtttgtcaaaaattttggagttatagctcgccctctcactgatctgctgaaaaagggagtgatctttgtttggactcaggttcatataacagcatttgaaacattgaagcattctctagttacagctcctgtgctatccttacctaacttttctaggccctttgcaattgagactgatgcctctagcagaggaattggggcagtgctgttacaagataaccatcctttagcttatgtgagcaaggcattgggtgttaaaaaccaaggattgtcaacatatgagaaggagtaccttgctattttgatggctgtggacaaatggcgacagtatcttcagcatgctgaatttattatctattcagatcacagaagcttgtcccatttaacagaacaacgcttgacaactccttggcaacagcgtgtgttctccaaattaataggccttcagtacaaaatcatgtatcgaaagggtactgataatggggctgcagatgcactttcaagaaggccatcagctgagttgtacaacatttcttcggccacacctcagtggttgcttcaggtcatggatggttacaaaaatgatgatcaggcccagaaattgctagctgctttgtctgtcactcctgcgccactgggaccatatacactcaaggctggaattctgcggtataaagacagaatatggattggcaacaatttccctctccagaaccagattatgttgggtttacatgacagcccggtggggggccattcagggtttccggtgacttaccgaagggttaagcagctcttttcttggccatcgatgaagacctctgttaaagattatgtaaaatcatgtgctatttgtcaacagtccaaacccgatagaagcaagtatccaggcctcttgcagccattaccagtacctgatcaggcttgggatgtcatcagcatggacttcgtagagggccttccacgatcatctaatgctgacaccattttggtagtggttgacacattctcgaaatacagccattttattccattgctgcacccattttcagcactgaaggtcgcccaacttttcatggactccgtttacaagctccatggctttccactctccattgtgtcagaccgtgacatgatatttactagtcggttttggcaagaacttttcaagttggctgggactacgctgaaaatgagctcttcttatcacccacaaaccgatggccagacagaacgcgtgaatcagtgtcttgaaacatttcttcgcagctttgttcacgcctgtccaacaaagtggtcttcctggttatctctcgcagaatactggtataacaccagcttccactcatctctaggacgttctcctttcgaggtattgtatggccgtaccccacgacagttggggttaactctgggtgatgcctcatctttaatggaccttcaaacatggctgaatcaaagagagttgatggtgaaactcatccagcagcatttggctcgtgcacagcagaggatgaagtctcaagcggataaagggcgcactgaaagagaattcaatgtaggggatatggtctatctcaaacttcagccatatgtccaatcgtcagtggctactcgggcaaatcacaagctcagcttcaagttttttgggccatatttgattcttcaacgtgtgggcaaagtggcatataagttgcagttgccaccttcagctagcatccacccagttgttcatgtgtctcagctcaaactttcagtcggcaatagacaagtgagctctgcacttcctgatgctatgagccagatgcaggttcctgtgcagatattggatagacgcatagtaatgcgaggaggcaaagcggtacaacaggtgcttatcaaatggtctcaaggtgatgatactctttctagttgggaggatgaagaggcgttgcggtccaaatttccagaagcagccgcttggggtcaagcggagtttcaaggaggggacaatgtcaggagacggcttcaggtggttgaagaaacggacacaaaggaggaagaagctacagttcagaccacaagccggcggaatagaaagccaaatcctcgcgtctcaggggccgagtgagtaaactgagtgggctgtgtccctatgattgggccgtgggccttgtaacaagatataagaacaattcagcgtaatggaaaaggggggaagaaaatactaacaaacctgctgtctctcttcgactgctgtctctcttcgactcgttcttcctctgcttcgtcttcctcgcctccgacaagtcaccggacgcccagtccgctgacagcccacatctagcattgcaggttgctgtggggattgctgatttactagcttggtgccacagtgatggctagtgaggcgcgggtaaaattatgagcagtagggagactgtcctgccatagtgccatgtgatcctgctcctgttgcccgccgtcggtgggatcgtaaaatatggctctctcgcggcgtcctcggaaagcaggaatgtcaacattgccatgagtggttacgctgcgctgggccccgcaacgaacgccgcccgcctccttcgccacctagacctacacctactagagcaaccactcacttgctcgacagcgtggctagctagccccgctccacgtccagatgacccgagtaggccggatggcgtagagggggcagggaacagcgtagaggagggggagtaagaaaggagaggacacacacatacacagagagcgagagagcgagcgagagagagagatagatgggggcgattggaggtgacgagcaggtgcagttggacaatgtggatggggccgaggtggccaatgacggcggtgcaggtgctgcgggaaggctggagaagatactggtctctgtgaggctgagaccgctcagcgacaaggagattgcaaggagggacccggcggagtgggagtgcatcaacgacactaccatcatctcccggagcaccttcccggaccggcctactgctccgactacgtattcatttgatagggtatttcgttctgactgtaataccaaagaagtatatgaggaaggggccaaagcagttgctctctctgtacaagtgtttttgcatatggtcaaacaagtagtggaaaaacatacaccatgactggaataacggaacatacagcagcagatatctatgattacattggcaagcatgaagagagagcatttgtattgaaattttcagcaattgaaatatataacgaagttgtaagggatcttcttagtgcagaaaacacatcacttagactttgggatgatgcagagaagggaacatatatagagaaccttacagaggtgatcttgagggatttggaccacctgaaagaacttatttctgtgtgtgaagctcaaaggaggaccggcgagacatacttaaatggaaacagctccagatcacaccaaatacttaaactgactattgaaagttctgctcgtgagttctcaggtaaggacaagtcaacaacacttgttgctagtgtgaacttcgttgatttggctggaagtgaacgtgcatctcaggcattgtcagttggggctaggctgaaggaaggttgtcatattaatagaagtctacttaccctaggaactgtgatccggaaactaagcaaggtaagaaatgggcacataccataccgagattcaaagctcacacgcatattacagatttctctaggaggcaatgcaagaacagcaattatttgtacaatgagcccagcccgaagccatatggaacagtcaaggaataccttgttgtttgcaagttgtgcaaaggaagtggtgacaaatgcccaggttaatgtggttatgtctgataaagcattaattaagcaattacaaaaagaacttgcaaggttggaaagtgaattgcgatgcccagcttcatatcctggtcttgaagcattagtgaaggaaaaagataatcaaatcctggagatggagaaagaaattaaggaactgaagttacaacgtgatgtcgctgaatctagactgcaagatctgctcaaggttgttggagataaccatggttcaaagcaccccctggcttcttctggaagaaactttgatgttcctcagccatgtgaggatgagcaatcgacgacatcagaagttgtcagcagtggccaaaattttaggcttcaaggacgccagacaacacaaagagattataggttacagcaatctgaaaatgatgtgcagtttgctacctctcttagctgttcagtcagcagtcccccgttcagtgggatgcccccaactaatggcagagatgataactctcaaatatctaatgaagattcaggggatctttgcaaagaagtacggtgcatagagaccaatgaaacagaggaaaacaaatgtttagagtcgtcagctgtgggaagcactagtctgcaagattcaaatgtagcttccagcatgcatgggaacaacaatacaaatcgatctgtgaattctagacagcatgatgagtctcctattaccctggagcaacatttggagaatgccaataattcgttagccaatcttgggatggatctgggatcctctacaggtaattcaccaagctcaaaagtaattgacagaagcaggagctgtaggtctctgatgggttctaccttgttggaagacttggagaaacaagattgcacccctccaagcagaagttttgtggactacccagggagacccgaaacatgtcaaagaagggtacctgcactgaactatgatgtagagagtgaaactttatccagaacaggatcaatgctatctgaaattattaccgcgagggacggactgaaggaaaacagctctattgctggtgatacagaatctgttgctggcataggtgaatttgttgcggagctaaaagaaatggtccagggtgatgatggagaattggctgaagggaccataaggagcgtggggctagatcccattatggatgacttgcaatcaccatctcgctggccattggatttcgagaagaaacaacaagagatcattgacctgtggcatggatgcaacgtttccttggtccacaggacttactttttcctgctgttcaaaggggacccagccgacgccatttacatggaagtggagcttaggaggttatcatttctcaaaaatacatactccaacggaagcatggggcgtaatgtggtagcaggcagcgtgagcgcttctctggttttaagtgcaaagaaactgcaacgtgagagggagatgctctgtaggcagatgcagaagcggctggcgatccaggaacgggagagcttgtacaccaagtggggagtctcactgtcctccaagaggaggcggctgcaggtcgctcggcgcctttggacggagaccaaggatctggagcatgttagggagagcgcgtccctcgtggccagactgatcgtgctcctggagcctgggaaggcgctgagggagatgtttggtctgagcttcgcgccgcagcagttcacccggagatcgcacaatagttggcgatatggccgttcttctctagactgactgaactcgaaaaactaagctgagggggaaaaacgttccgtccttttgtttttgtgtaatagattgttgccctcttggaaatagaaatccctgattccgagtccgttgcaacgccgtaatgtgactaactatcagatggatatacatttgatcgatgtgtgatgatgtgtccagggcgcacaaatcggaaaacaaacagagcaattg

SEQ ID NO: 19810 - DNA, 2235 bp, Zea Mays
caccaacagcgacgtattaacccaaaatcctccctgcagataaacaccccctctccttctctatctcctacagccaaatccccaactcttccaaccgctcctccgcttagcgtgcagatctaacgatcgctccgatcccaagcacaacaacttctccaattccaatcaccagccgatcagatttatgcagtcttactgccgcgagcgccagtcatgccgcgcggcagcagcttggaccagagcttgagcgacgacgagggctcggcaggtgttggggcggtttgggttcggcgtcgctggcaatgtccgggatgtccgactccgctgggggtgtgcgcgcgggcgcggagctgatggtgcagcagttccacctcaaggtgctccacgccgtcctcgccgtgcgcacgccgcgcccgcacgccttcgcggcgccagcggcggcgtcgttcaggcggagggacaggtggttccatctcccgctccacgacccgccgccgccgcccgaggcggctgaccgcctggacgagctggtccccggggagccgctggtggtggacgtcctcctgagccccgccggtagtgtgggagcccgaggggaggtggtggagaggtggactgtggcgtgcgagccctggccggacgccgcgggcggcgaggaggttgccgtgaaccgggcgtacaagcactgcttcacgctgctcaggtccgtctacgccgtgctccgcgtcctcccggcgtaccgcatcttccgcctcctctgcgccaatccctcctacaactacgagatgggccaccgcgtcgacaccttcgccgagcccttctcgcgcccccaggaggccgccatgcgttcccaacgctttgttcccgtcgaaacccagctcggccgcctcgtcgtttccgtccagtaccttcccagcctcgccgccttcaacctcgagatcacctccctttcgccctccaagataatcccagactacgtcggcagcccagccgctgagcccatgcgcgccttcccggcctcgcttacagaagccacgggctccggcttcccaccatctaatcagcagcagcgcccgcacagctgggcttcgcctgtgttctggtcgcacacgccggcacaccaggccaggtgagcgagaggaggagccctgcacaccgccagaatatgctaccaccaccttcgacgagaagaggagacatgagggcagcaggtgctctacagtctccatctgagagtggccggttgattgggaggatggaggaacttcggatagctgatccatatgtgacctcgtcacccagacataagggcaaggacactaaagatggatctggcagattctctgcactctcctcatgcgattcaccacggcaagatgatctggatgatgtggattaccatttcgacgttgatgatgttgatactccagtctcccaacctcggagaattgatgggaaggaaacaggtgatcaggttggttcatcatcccataaatctcaagacgcacaagtaggttctctagtcaacctgctgagaaatgccagcccgctgcgaaatcctagcaattcatcacagatatcaagggccgagtccagcgaagtagcctcagcaagctcggtcacgtcccgcaggacatctgacgcccttgaggagctccagtccttcaaggagataagggagcgactgctgttccggagcagcgcaaaacatcaagagccaccaggaaaaccataaggccattctttgttttgtttctcttaacgtgatcgctgatagactcccaaccgggaaaccatatgcacagcgaactatagttgctgtgttcatgtatatacgagtgctaaagttgatgcttttgattgaagagaaggcaccggcttccatttatttcagcggaacaatcactcgtcgttctcaagagtgatggagtgatgccgctgttgatactcttttgtatatgggaagcgaaaccgatacacgtaggtgggagcgagggagcctgtgaattgtgatggatgaaagcaggtctcattgtgtgcgtgtgtttgtaaattatgtaactgctggaaatcaaatgttcattagacgtcaacctttgaagagttgctcgcacttcgcaagactagttttatttgctcttgctatttgatctggtaatttgtggattggcgacctgcaggctgcagttgtaaaaataactgtcagttttaaattataagatgttttgacttttt

SEQ ID NO: 19811 - DNA, 1629 bp, Zea Mays
caccaacagcgacgtattaacccaaaatcctccctgcagataaacaccccctctccttctctatctcctacagccaaatccccaactcttccaaccgctcctccgcttagcgtgcagatctaacgatcgctccgatcccaagcacaacaacttctccaattccaatcaccagccgatcagatttatgcagtcttactgccgcgagcgccagtcatgccgcgcggcagcagcttggaccagagcttgagcgacgacgagggctcggcaggtgttggggcggtttgggttcggcgtcgctggcaatgtccgggatgtccgactccgctgggggtgtgcgcgcgggcgcggagctgatggtgcagcagttccacctcaaggtgctccacgccgtcctcgccgtgcgcacgccgcgcccgcacgccttcgcggcgccagcggcggcgtcgttcaggcggagggacaggtggttccatctcccgctccacgacccgccgccgccgcccgaggcggctgaccgcctggacgagctggtccccggggagccgctggtggtggacgtcctcctgagccccgccggtagtgtgggagcccgaggggaggtggtggagaggtggactgtggcgtgcgagccctggccggacgccgcgggcggcgaggaggttgccgtgaaccgggcgtacaagcactgcttcacgctgctcagggcaaggacactaaagatggatctggcagattctctgcactctcctcatgcgattcaccacggcaagatgatctggatgatgtggattaccatttcgacgttgatgatgttgatactccagtctcccaacctcggagaattgatgggaaggaaacaggtgatcaggttggttcatcatcccataaatctcaagacgcacaagtaggttctctagtcaacctgctgagaaatgccagcccgctgcgaaatcctagcaattcatcacagatatcaagggccgagtccagcgaagtagcctcagcaagctcggtcacgtcccgcaggacatctgacgcccttgaggagctccagtccttcaaggagataagggagcgactgctgttccggagcagcgcaaaacatcaagagccaccaggaaaaccataaggccattctttgttttgtttctcttaacgtgatcgctgatagactcccaaccgggaaaccatatgcacagcgaactatagttgctgtgttcatgtatatacgagtgctaaagttgatgcttttgattgaagagaaggcaccggcttccatttatttcagcggaacaatcactcgtcgttctcaagagtgatggagtgatgccgctgttgatactcttttgtatatgggaagcgaaaccgatacacgtaggtgggagcgagggagcctgtgaattgtgatggatgaaagcaggtctcattgtgtgcgtgtgtttgtaaattatgtaactgctggaaatcaaatgttcattagacgtcaacctttgaagagttgctcgcacttcgcaagactagttttatttgctcttgctatttgatctggtaatttgtggattggcgacctgcaggctgcagttgtaaaaataactgtcagttttaaattataagatgttttgacttttt

SEQ ID NO: 19812 - DNA, 2798 bp, Zea Mays
caccatcgcaccattggccgccgctcacgcgcataaaacccacagtccgctcgcgacagcctcacggcgcaggcgagaaggcgaggagagggagctcgccggcaaaggccaccaagagcgaaaaggaaccacagaggcagtctccatggccgccgaggcgcccgtgcgagcccccgccacggcgcggtcctcgcgccggccggccgccgccgtcgtctccgcctcgcgcctcctcctcggccaccgccccttccttgcgccgcgcttcgctgcggggcgcgccgcggtggcaggccccgcggccggactacgcccgcgcccgcgcaggccgcgcctctcggtcgtcgtcatggccagcagcgatcgccaagtgcctttacatgattaccgcaatattggtattatggcccatatagatgcaggaaagacaacaactactgagcgcattctgtattacactggaaggaactacaagattggtgaggttcatgagggaacagctacaatggattggatggaacaagaacaagagagaggaataaccattacatctgcagcaacgactgccttctggaacaaacacagaatcaacattattgatactcctggtcacgtcgacttcactcttgaggttgaacgtgctctcagggtgctggacggtgctatatgtctctttgacagtgttgctggggtagaaccacaatctgaaactgtgtggcgccaggcagataaatatggggttccaagaatatgtttcgtgaacaaaatggaccgccttggagctaacttctttagaactagagacatgatcgttgcaaatttgggtgccaaaccattggtgattcagttgccgattggttcggaggacaatttccaaggagttgttgatctagtaagaatgaaagctattgtatggacaggggaggagctgggtgcaaaatttgaatacaaagacatacctgctgatctccaagagatggctcaagactatcgtgttcaaatgctggaaactattattgaattggatgatgaagttatggagaaatatcttgaaggaactgaaccagacgaggaaactgttaagaaactaatcagaaagggagcaatttctgccagctttgtcccagttttatgtggttcggcattcaaaaacaagggtgtccaaccattgcttgatgctgttgtcgattacttgccatctccacttgatctaccttcaatgaagggtactgacccagaagaccctgaaataatatttgaaaggcaaccaagtgacgatgaaccattttctgggttagctttcaagatcatgactgatccattcgtggggtcactaacatttgttcgcatatactccgggaagctgatagctggttcctatgttctcaatgcaaataaagataagaaagaaagaattggaagacttcttgagatgcacgcaaacagtaaggaagatataccagttgctgtgacaggtgacatagtagcgcttgctggtctgaaagacacaattactggtgaaacactctgtgacccagacaagcctgtagtgcttgaacgtatggaatttcctgatcctgtcattaaggttgctattgaacccaagaccaaagctgatgccgacaaaatggctactgggttaatcaagcttgctcaagaagacccgtcattccacttctctagagacgaggaaaccaaccagactgttattgaaggaatgggagaactgcatcttgatatcattgtagacagactaaagagggagttcaaggttgaagcaaacgttggagctccacaagtcaactaccgtgaaagtatttccaaagttgcggaaatacaatatgtccacaaaaagcaatctggtggatctgggcagtttgcagacattattgtgcgttttgaacctttggaagctggaagtgggtatgagttcaagagtgaaatcaagggaggggcagtgcccaaagaatatgtaccaggggtgatgaaaggattggaagaaagcttacccaatggtgtcctagccggttacccagttgtggacttccgggctgtgctggttgatggctcatatcacgatgtcgattcaagtgtcttagcattccaaattgcagccagaggagcattccgtgagggaatgaggaaagctggtccaaggcttctagagcctataatgaaagttgaagtgataactcctgaagagcatctgggtgatgttattggtgatttgaactctagaagaggacaggtcaacagcttcggggataagcctggtggactcaaggtggttgattcttttgtgccacttgctgagatgttccaatacgtcagcaccctccggggcatgaccaaggggcgagcgtcctacacgatgcagctcgccaagtttgacgtcgtcccacagcacatccagaaccagatctccgtggcaaaaacagaggaagctgctgcttagttttggttttccgtagatatatccatacagcaacaggagagcaggttgataggaaggacatcaaggtgtatgtagctttgtagtgtaaatctcttaaggcttgttcggatgattggaggggattgatatggattgagagagattttaatttactatggattgaaacttcctcaattcatatggattggactagaaccgaacatggtctaagggagcattatttgccattgattttgcacctgataataatggcctttgttgagttttcacaatgacaggacagttgaattatatgtttttgggggaaaggcacgaattggaacatatcggatgggaaaaccca

SEQ ID NO: 19813 - DNA, 1842 bp, Zea Mays
ttttcttaagccgaagcctcggaatcttatccggtgcccactcacgcgacggacgcgtgtttccagccttccaggcgcctctgctgcctgcgcctgcgcgcgtcgtgaaggcgtgaacggcagctcggctcggcgcaggccccccgcccgcgccggcatcgcgtcgcggccgccgcgcgagccccatgctgcgttgctgccgcacgacacgtcacttcggctgcggcgtggttgtgtggactcctctcgctcctggccctcgccggcgctgcgtcggctgcggatggggcggagggtgagtgggagccgctgatacggatgccgacggcgaaggggagtgacgctgcttctgctccggctgctgaggatgatgaagtggggacgaggtgggccgtgctcgtcgccggatccttcggttatgggaactaccggcaccaggccgatgtgtgccatgcgtaccagatactgcagaagggaggagtgaagaaggagaacattgtggtgttcatgtatgatgatattgcccacaacattctgaaccctaggcctggagttatcattaaccatcctaaaggagcaaatgtttatgatggtgttccaaaggattacacaggtgatcaggtcactactgaaaacttctttgctgtcctcttgggcaatagaagtgctaccactggagggagtaagaaggtatgccgaacctgccatatctgtatgctggtgacttcatcaaggtcttgaaaaagaagcatgcttccaatagctactcaaaaatggttatatatgttgaagcatgtgaaagtggcagtatctttgaggggttaatgcctgaagatctaaatatttatgtcacaacagcctcaaatccagttgaaaatagttggggaacttactgccctgggatggaaccatcaccccctcctgagtacattacctgtttaggtgatttgtacagtgtttcttggatggaagacagtgaaacccacaatctaaagaaggaaaccatcaaggatcagtatgaagtggtgaaaacaagaacctcaaactcaaataagtacaaagagggttctcatgttatggagtatggcccaaagggtgcagtcaatcaaagagatgctgatcttctcttcatgtggaagaggtacgagcagttaaatggggggaccgaagagaagctgagggctctcatagagattaaagaaactgttcagcacaggaagcatcttgacagcagtatcgatttcgttgggaggctcgtcttcggatttgagaaagggccttcgatgcttgaggctgttagaacctctggtcaaccattagtcgatgactgggactgtttgaagaggatggtgcggattttcgagtcccagtgtggttcacttactcagtacggcatgaagtacatgagagcgtttgcaaacatctgcaacagtggtatatctgagatgaaaatgagggagtcgagcatcagcgcttgcagcagctacaactcggcgaggtggagcccgatggctcggggacacagtgcttgatggtaaagatcaaatagcaaagccccccgaggtctgctgccccatgtccctgtgagcgagctcgtatcatctggggactgtggacccatcgacggttgtacatatcatgcacttgtgctcgtgcctatgtaaagtagtaataccaactcaactctgatcttcatccaagtaccgaaatgattaaaagatcagatgtgaatgctgttgcgatgggtgatcgcaagtaggccataatcagtggaccgaaaatgatgacccaaatcaaggtagtgctcctctgatcgatagcccaaatctattgctaacaaaa

SEQ ID NO: 19814 - DNA, 1843 bp, Zea Mays
ttttcttaagccgaagcctcggaatcttatccggtgcccactcacgcgacggacgcgtgtttccagccttccaggcgcctctgctgcctgcgcctgcgcgcgtcgtgaaggcgtgaacggcagctcggctcggcgcaggccccccgcccgcgccggcatcgcgtcgcggccgccgcgcgagccccatgctgcgttgctgccgcacgacacgtcacttcggctgcggcgtggttgtgtggactcctctcgctcctggccctcgccggcgctgcgtcggctgcggatggggcggagggtgagtgggagccgctgatacggatgccgacggcgaaggggagtgacgctgcttctgctccggctgctgaggatgatgaagtggggacgaggtgggccgtgctcgtcgccggatccttcggttatgggaactaccggcaccaggccgatgtgtgccatgcgtaccagatactgcagaagggaggagtgaagaaggagaacattgtggtgttcatgtatgatgatattgcccacaacattctgaaccctaggcctggagttatcattaaccatcctaaaggagcaaatgtttatgatggtgttccaaaggattacacaggtgatcaggtcactactgaaaacttctttgctgtcctcttgggcaatagaagtgctaccactggagggagtaagaaggtatgccgaacctgccatatctgtatgctggtgacttcatcaaggtcttgaaaaagaagcatgcttccaatagctactcaaaaatggttatatatgttgaagcatgtgaaagtggcagtatctttgaggggttaatgcctgaagatctaaatatttatgtcacaacagcctcaaatccagttgaaaatagttggggaacttactgccctgggatggaaccatcaccccctcctgagtacattacctgtttaggtgatttgtacagtgtttcttggatggaagacagtgaaacccacaatctaaagaaggaaaccatcaaggatcagtatgaagtggtgaaaacaagaacctcaaactcaaataagtacaaagagggttctcatgttatggagtatgggcccaaagggtgcagtcaatcaaagagatgctgatcttctcttcatgtggaagaggtacgagcagttaaatggggggaccgaagagaagctgagggctctcatagagattaaagaaactgttcagcacaggaagcatcttgacagcagtatcgatttcgttgggaggctcgtcttcggatttgagaaagggccttcgatgcttgaggctgttagaacctctggtcaaccattagtcgatgactgggactgtttgaagaggatggtgcggattttcgagtcccagtgtggttcacttactcagtacggcatgaagtacatgagagcgtttgcaaacatctgcaacagtggtatatctgagatgaaaatgagggagtcgagcatcagcgcttgcagcagctacaactcggcgaggtggagcccgatggctcggggacacagtgcttgatggtaaagatcaaatagcaaagccccccgaggtctgctgccccatgtccctgtgagcgagctcgtatcatctggggactgtggacccatcgacggttgtacatatcatgcacttgtgctcgtgcctatgtaaagtagtaataccaactcaactctgatcttcatccaagtaccgaaatgattaaaagatcagatgtgaatgctgttgcgatgggtgatcgcaagtaggccataatcagtggaccgaaaatgatgacccaaatcaaggtagtgctcctctgatcgatagcccaaatctattgctaacaaaa

SEQ ID NO: 19815 - DNA, 1590 bp, Zea Mays
atcgctttcccctcctgcgcgtggctgccgatgtgtgccatgcgtaccagatactgcagaagggaggagtgaagaaggagaacattgtggtgttcatgtatgatgatattgcccacaacattctgaaccctaggcctggagttatcattaaccatcctaaaggagcaaatgtttatgatggtgttccaaaggattacacaggtgatcaggtcactactgaaaacttctttgctgtcctcttgggcaatagaagtgctaccactggagggagtaagaaggtgatagacagcaaacctaatgaccacatcttcatctattactcagatcatgggggtcctggagttcttggtatgccgaacctgccatatctgtatgctggtgacttcatcaaggtcttgaaaaagaagcatgcttccaatagctactcaaaaatggttatatatgttgaagcatgtgaaagtggcagtatctttgaggggttaatgcctgaagatctaaatatttatgtcacaacagcctcaaatccagttgaaaatagttggggaacttactgccctgggatggaaccatcaccccctcctgagtacattacctgtttaggtgatttgtacagtgtttcttggatggaagacagtgaaacccacaatctaaagaaggaaaccatcaaggatcagtatgaagtggtgaaaacaagaacctcaaactcaaataagtacaaagagggttctcatgttatggagtatggtgataagaccttcaaggatgagaagctttccttttatcaaggttttgatcctgctaatgccaacattgcaaacatgctgctttggccaggcccaaagggtgcagtcaatcaaagagatgctgatcttctcttcatgtggaagaggtacgagcagttaaatggggggaccgaagagaagctgagggctctcatagagattaaagaaactgttcagcacaggaagcatcttgacagcagtatcgatttcgttgggaggctcgtcttcggatttgagaaagggccttcgatgcttgaggctgttagaacctctggtcaaccattagtcgatgactgggactgtttgaagaggatggtgcggattttcgagtcccagtgtggttcacttactcagtacggcatgaagtacatgagagcgtttgcaaacatctgcaacagtggtatatctgagatgaaaatgagggagtcgagcatcagcgcttgcagcagctacaactcggcgaggtggagcccgatggctcggggacacagtgcttgatggtaaagatcaaatagcaaagccccccgaggtctgctgccccatgtccctgtgagcgagctcgtatcatctggggactgtggacccatcgacggttgtacatatcatgcacttgtgctcgtgcctatgtaaagtagtaataccaactcaactctgatcttcatccaagtaccgaaatgattaaaagatcagatgtgaatgctgttgcgatgggtgatcgcaagtaggccataatcagtggaccgaaaatgatgacccaaatcaaggtagtgctcctctgatcgatagcccaaatctattgctaacaaaa

SEQ ID NO: 19816 - DNA, 1616 bp, Zea Mays
cgagtttcgattcttcgaatttgtggagattcagaggcgatctgcacttccggccgatgtgtgccatgcgtaccagatactgcagaagggaggagtgaagaaggagaacattgtggtgttcatgtatgatgatattgcccacaacattctgaaccctaggcctggagttatcattaaccatcctaaaggagcaaatgtttatgatggtgttccaaaggattacacaggtgatcaggtcactactgaaaacttctttgctgtcctcttgggcaatagaagtgctaccactggagggagtaagaaggtgatagacagcaaacctaatgaccacatcttcatctattactcagatcatgggggtcctggagttcttggtatgccgaacctgccatatctgtatgctggtgacttcatcaaggtcttgaaaaagaagcatgcttccaatagctactcaaaaatggttatatatgttgaagcatgtgaaagtggcagtatctttgaggggttaatgcctgaagatctaaatatttatgtcacaacagcctcaaatccagttgaaaatagttggggaacttactgccctgggatggaaccatcaccccctcctgagtacattacctgtttaggtgatttgtacagtgtttcttggatggaagacagtgaaacccacaatctaaagaaggaaaccatcaaggatcagtatgaagtggtgaaaacaagaacctcaaactcaaataagtacaaagagggttctcatgttatggagtatggtgataagaccttcaaggatgagaagctttccttttatcaaggttttgatcctgctaatgccaacattgcaaacatgctgctttggccaggcccaaagggtgcagtcaatcaaagagatgctgatcttctcttcatgtggaagaggtacgagcagttaaatggggggaccgaagagaagctgagggctctcatagagattaaagaaactgttcagcacaggaagcatcttgacagcagtatcgatttcgttgggaggctcgtcttcggatttgagaaagggccttcgatgcttgaggctgttagaacctctggtcaaccattagtcgatgactgggactgtttgaagaggatggtgcggattttcgagtcccagtgtggttcacttactcagtacggcatgaagtacatgagagcgtttgcaaacatctgcaacagtggtatatctgagatgaaaatgagggagtcgagcatcagcgcttgcagcagctacaactcggcgaggtggagcccgatggctcggggacacagtgcttgatggtaaagatcaaatagcaaagccccccgaggtctgctgccccatgtccctgtgagcgagctcgtatcatctggggactgtggacccatcgacggttgtacatatcatgcacttgtgctcgtgcctatgtaaagtagtaataccaactcaactctgatcttcatccaagtaccgaaatgattaaaagatcagatgtgaatgctgttgcgatgggtgatcgcaagtaggccataatcagtggaccgaaaatgatgacccaaatcaaggtagtgctcctctgatcgatagcccaaatctattgctaacaaaa

SEQ ID NO: 19817 - DNA, 1612 bp, Zea Mays
ctgagtttaaaattgactgtgtagacatggtttgcccgtgagatttaggccgatgtgtgccatgcgtaccagatactgcagaagggaggagtgaagaaggagaacattgtggtgttcatgtatgatgatattgcccacaacattctgaaccctaggcctggagttatcattaaccatcctaaaggagcaaatgtttatgatggtgttccaaaggattacacaggtgatcaggtcactactgaaaacttctttgctgtcctcttgggcaatagaagtgctaccactggagggagtaagaaggtgatagacagcaaacctaatgaccacatcttcatctattactcagatcatgggggtcctggagttcttggtatgccgaacctgccatatctgtatgctggtgacttcatcaaggtcttgaaaaagaagcatgcttccaatagctactcaaaaatggttatatatgttgaagcatgtgaaagtggcagtatctttgaggggttaatgcctgaagatctaaatatttatgtcacaacagcctcaaatccagttgaaaatagttggggaacttactgccctgggatggaaccatcaccccctcctgagtacattacctgtttaggtgatttgtacagtgtttcttggatggaagacagtgaaacccacaatctaaagaaggaaaccatcaaggatcagtatgaagtggtgaaaacaagaacctcaaactcaaataagtacaaagagggttctcatgttatggagtatggtgataagaccttcaaggatgagaagctttccttttatcaaggttttgatcctgctaatgccaacattgcaaacatgctgctttggccaggcccaaagggtgcagtcaatcaaagagatgctgatcttctcttcatgtggaagaggtacgagcagttaaatggggggaccgaagagaagctgagggctctcatagagattaaagaaactgttcagcacaggaagcatcttgacagcagtatcgatttcgttgggaggctcgtcttcggatttgagaaagggccttcgatgcttgaggctgttagaacctctggtcaaccattagtcgatgactgggactgtttgaagaggatggtgcggattttcgagtcccagtgtggttcacttactcagtacggcatgaagtacatgagagcgtttgcaaacatctgcaacagtggtatatctgagatgaaaatgagggagtcgagcatcagcgcttgcagcagctacaactcggcgaggtggagcccgatggctcggggacacagtgcttgatggtaaagatcaaatagcaaagccccccgaggtctgctgccccatgtccctgtgagcgagctcgtatcatctggggactgtggacccatcgacggttgtacatatcatgcacttgtgctcgtgcctatgtaaagtagtaataccaactcaactctgatcttcatccaagtaccgaaatgattaaaagatcagatgtgaatgctgttgcgatgggtgatcgcaagtaggccataatcagtggaccgaaaatgatgacccaaatcaaggtagtgctcctctgatcgatagcccaaatctattgctaacaaaa

SEQ ID NO: 19818 - DNA, 602 bp, Zea Mays
tcaaatacaccaccatgaattccgatctgaatagcttccctggagatgtacaagatgaatccgcagcaaacacatctttggcgtcagctattgacctgaacagcttcccaatagataacgaagttttacctgatctaaatgaggtactccatccatttgaactcaatgagcattggggataccaggcgaagaataccacgaagcaacaacgggatgcaatatacagttcactgctagaaagaagccacaatggaaaattattcaagaactgtacccagttagtttctgttgcccataatgtgagtatcaggacagtgcagcgcatatgggatagttaacgtcgagaaagagtacgaagaatacaacccaagtaatctaagaagagtattcttgacacttcaagcatgcatgattgaggtgatgaaaaacaatggaggcagtcgatacaagctccgcacatgaacaagtctagattagaggctctaggcattctacctgataggctagatttagaacccgaattgtacgagcaggtgctaatgacattgagtacccaagaatagaagtatcaagtgaatgaaggagcatctttctgttgttca

SEQ ID NO: 19819 - DNA, 3001 bp, Zea Mays
cccaccttggcgcgcgataagattcgccagccggccccagtcccgccgcaccgtctcttcccccgctaaacctccccaagtccaccgtcgccaggcccaaaaaccaccgaggatttttcacacgcgaagcggcacagccatgcgcctcctctgctgcttggccgctctcgtcgtcctcgctctccaacaccaatgccacggcctactcctcccgctcaccaacacgatgctctcctcgctccgcggaaccaatggcaccaccacgcctgtgcatcacctcctccgcgcgtcgtccctccgctcggccgcgcgccacggccgccaccgcgcgcgcaggagcccgccatcgcctcccagtcccggacgccaccgccagctctcgctcccactctccccaggcagcgactacacgctgtccctgtccgtggggccggcgtccgccgcggcgccggtgtccctcttcctcgacaccggcagcgacctcgtctggttcccctgcgcccctttcacctgcatgctctgcgagggcaagcccacgccgggacgcttggggccgctgcctccgccgccggactcccgccgcatcccctgcgcgtcgccgctctgctccgcggcgcacgcctcggcgccgccgtcggatctctgcgccgtggcgcggtgcccgctggaggacatcgagacgggctcgtgcggcgcgtcccacgcgtgcccgccgctgtactacgcgtacggggacgggagcctcgtggcgcacctgaggcgcggccgcgtcgcgctgggcgctggcgcgcgcgcgtccgtggccgtggccgtcgacaacttcaccttcgcgtgcgcgcatacggccctgggcgagcctgtcggggtggcagggttcggcagggggccgctctcgctgccgggccagctctccccgcagctctccggcaggttctcgtactgcctcgtgtcccactccttccgcgccgaccggctcatccggcctagccccctcatcctgggccgcagcccagacgacgccgccgccgccgccgagacggacggcttcgtgtacacgccgctgctccacaacccgaagcacccgtacttctactcggtggcgctggaggctgtctcggtaggcgcagcaaggatccaggcccggccggagctagcgcgcgtggaccgcgccgggaacggcgggatggtggtggactcgggaacgactttcaccatgctgcccaacgagatgtacgcgcgggtggccgaggcgttcgcccgcgcgatggccgcggcagggttcgcgcgcgccgagcgcgcggaggaacagacggggctcacgccctgctaccgctacgccgcgtcggaccgaggcgtgccgccgctggcgctgcacttccggggcaatgccacggtggcgctgccccggaggaactacttcatggggttcaagagcgaggacgcaggggccgggacgaggaaggacgacgtggggtgcctcatgctgatgaacggcggagacgcgtccggtgaggagggtgatggacccgccggcacgctgggcaactttcagcagcagggtttcgaggtggtgtacgacgtcgacgccggccgcgtcgggttcgcccgccgccgctgcacggacctgtgggactcgctgtctcgccggtgatgcttccactctcctctccacctgtatcatgcattacctagaccgctagctagacgtagctttgcatgtcctgcttgtacttgtagtcttgtacagagccactgccacccgtgtgttgttcagtgccacgtagttgtatgtttagtgatacatctcgcttttttttttttgtagtttttgtatcttcttctgtctcaatttgtctgtcaagcgctatgggaacctgcgttcttgccaagatcgaaaaggactccacgggttgctagcaacagggagacagcagtaaacagacgcgaagctttggcacacttgttggtgaatcattgtcgtgctgatgctgttgcaggtccgtttccgaattccgagatctgcccgtccaacgccggagagcaatcgcattcgagccttgatgcaggtcttaaaaaaaacaccaccttgtcgattgctgctgcacctgcacaggaaagcaagtggattttctgaagctggagccataggtttcttttggataaaaaaaatagcacgacgagtacagtagcaggcagtttttgcaggcgagcaaggctgcaaaaccaatgataaaaaaaaaatgaatggatgatggatgcgcgtacggacaaccggtgtggcttcgcacgtgtggagtggtgagctgaacatgagctggcggcctttgtctcccgctggaaaggcaggacgaggttcaatgtgctgcagaatttgcgtggtccacgttcgtcagagtcagactgaggtcactggaagatagaaaggatgaactgtgaactcagcctcagaaacgttggagccagctgtccgagcctaatgactggtaattcgtggattcgttggctgtgattgagtgattgtggttagcctaatgaagtaatgattggtgtatggaccccgggtcagctttatgactttagctcatgctcaaaggctctcctcatctgcttcgtttgtgctggtgcagggctgcggcccacttgtgcagctaaatacgagcgagtacgatgccatagcaacttgcaatgccagtccgcaggtaaagaatgcaagagggctcgtggagcaatttggcaagcatgactgacctatgcgtttagttttctgactaaagtttagcttgtgttataccaaatattggaatatcagttggtggaaccaaacacccccttatcaaaataggaagccatataaatccaatgtactatatattacgcgatcgccctaatcaaaaagtaaaaacaccacaataatgatgggagagaagcggtagacaattccaacattggaccttgtaagtagtaaattcagagcaataaactgagaaaaatacagcaaatc

SEQ ID NO: 19820 - DNA, 1083 bp, Zea Mays
gtcgcacactgcttgcacttgacggccacgccaagcagcgatgatgtgctcgaacaactagtctaatcgtacgaggacaaagcaacacaaccaaacccacctccccagaccccaggccagtggagattttttatttaaaggtcgcctgatagcgctgcttccaagcaaatcaacacaagactaatcatcattcctgtggctgccaaatggaatgcggtgtgatatagccttccgacacaaggttccctggtactctattgagaatgagaatggcattcttcactttatcactcctttctgcattcgaccaatgcaacttgagctcatgagggttgaagggaggaggcagatcacatgcatcacggggaaacttcaccatggattccataagaaacttcttctcgaggccttcagcttggcaggccaaagactctgaacatacctcaacagcatcaggtggcttagtgggtttgaattttaggagcttggcatattcagttagaagatgaagcatgtagtcataaacatggtccatactgagctcgtcttgaatgaaattacttgcttgctttcctatgcgctgtgcctaagaaagctttggagtatgagaaaagtaattcatttttagaaaaacatatatttctcaccaaggtagaggaacaatactccctccgtcccaatatataagacgcaaccacctctggtttaaagactaagaaatatatttaattctctctatcaacactagtactactacatcaatatacgtatctctagatagaacacgccttatattatgggactagaataaaaagtggttacaccttatatactgggacgaggggagtattaagagactgcaacataaaggcatgctaaaaccctaaacagtgcaagtaaaaaaatgactgccacctgtccaatttagtagttgtttatagcattaacactcaccttgagtttttatttttctaagatatattgaattcataaaactatattaccagtgaagtacttttgatgatggtaatataaagttttgcttggcaaatctaaaccatttttattagcataatggtcttg

SEQ ID NO: 19821 - DNA, 640 bp, Zea Mays
ctcaacagagaagaggaactctttgatcaaagcttgggaagagaatgagaagacaaaagctgagaacaaggctgctaagaaagtatccgctattctttcatgggaaaacacaaagaaagcaaacatagaagctgaactgaagaagattgaggaacaactggaaaagaagaaggctgaatatgcagagaagatgaagaacaaggttgcaatgatacacaaggaagccgaagagaagcgagcgatggtggaggcaaaacgcggtgaggaggtcctgaaggccgaggagatggctgccaagtaccgggccaccggccacgctcctaagaagctcatcggttgcttcggagcctaagaaaccttccaagtcagaccgagcagaaagtgaaaaacgtcagccagtgattgcttggtcctctcgctctatcaagtgtgtagtgtgtcttcgaaagtttgtaaagcctactgctgctgctgtatatactgatatcgcttccaaggcaggcgtttggtggtgtacatgttgaatgcttgacgagaaacattcttgtgtgtagttaagaggtcacgctgttgttgttgttgttgacattcaagcagacattttgttttcttctggtttttaaatcataataagaaaaaa

SEQ ID NO: 19822 - DNA, 748 bp, Zea Mays
ggaaacatggcgctggcggactgaagttgcagatgaacctgctcccgagaagcctgcccctgcgaagcaagggggctccaatgacagggatctcgctcttgcaagggtggaaacagagaagaggaactctttgatcaaagcttgggaagagaatgagaagacaaaagctgagaacaaggctgctaagaaagtatccgctattctttcatgggaaaacacaaagaaagcaaacatagaagctgaactgaagaagattgaggaacaactggaaaagaagaaggctgaatatgcagagaagatgaagaacaaggttgcaatgatacacaaggaagccgaagagaagcgagcgatggtggaggcaaaacgcggtgaggaggtcctgaaggccgaggagatggctgccaagtaccgggccaccggccacgctcctaagaagctcatcggttgcttcggagcctaagaaaccttccaagtcagaccgagcagaaagtgaaaaacgtcagccagtgattgcttggtcctctcgctctatcaagtgtgtagtgtgtcttcgaaagtttgtaaagcctactgctgctgctgtatatactgatatcgcttccaaggcaggcgtttggtggtgtacatgttgaatgcttgacgagaaacattcttgtgtgtagttaagaggtcacgctgttgttgttgttgttgacattcaagcagacattttgttttcttctggtttttaaatcataataagaaaaaa

SEQ ID NO: 19823 - DNA, 758 bp, Zea Mays
gaaactttcctcctctctctaccctatgttttgaagttgcagatgaacctgctcccgagaagcctgcccctgcgaagcaagggggctccaatgacagggatctcgctcttgcaagggtggaaacagagaagaggaactctttgatcaaagcttgggaagagaatgagaagacaaaagctgagaacaaggctgctaagaaagtatccgctattctttcatgggaaaacacaaagaaagcaaacatagaagctgaactgaagaagattgaggaacaactggaaaagaagaaggctgaatatgcagagaagatgaagaacaaggttgcaatgatacacaaggaagccgaagagaagcgagcgatggtggaggcaaaacgcggtgaggaggtcctgaaggccgaggagatggctgccaagtaccgggccaccggccacgctcctaagaagctcatcggttgcttcggagcctaagaaaccttccaagtcagaccgagcagaaagtgaaaaacgtcagccagtgattgcttggtcctctcgctctatcaagtgtgtagtgtgtcttcgaaagtttgtaaagcctactgctgctgctgtatatactgatatcgcttccaaggcaggcgtttggtggtgtacatgttgaatgcttgacgagaaacattcttgtgtgtagttaagaggtcacgctgttgttgttgttgttgacattcaagcagacattttgttttcttctggtttttaaatcataataagaaaaaa

SEQ ID NO: 19824 - DNA, 755 bp, Zea Mays
ttagaagttggaacactatgtcatcatttgaagttgcagatgaacctgctcccgagaagcctgcccctgcgaagcaagggggctccaatgacagggatctcgctcttgcaagggtggaaacagagaagaggaactctttgatcaaagcttgggaagagaatgagaagacaaaagctgagaacaaggctgctaagaaagtatccgctattctttcatgggaaaacacaaagaaagcaaacatagaagctgaactgaagaagattgaggaacaactggaaaagaagaaggctgaatatgcagagaagatgaagaacaaggttgcaatgatacacaaggaagccgaagagaagcgagcgatggtggaggcaaaacgcggtgaggaggtcctgaaggccgaggagatggctgccaagtaccgggccaccggccacgctcctaagaagctcatcggttgcttcggagcctaagaaaccttccaagtcagaccgagcagaaagtgaaaaacgtcagccagtgattgcttggtcctctcgctctatcaagtgtgtagtgtgtcttcgaaagtttgtaaagcctactgctgctgctgtatatactgatatcgcttccaaggcaggcgtttggtggtgtacatgttgaatgcttgacgagaaacattcttgtgtgtagttaagaggtcacgctgttgttgttgttgttgacattcaagcagacattttgttttcttctggtttttaaatcataataagaaaaaa

SEQ ID NO: 19825 - DNA, 629 bp, Zea Mays
attctgctcagttcaaactaaaacaagaaaaagccataagggcaaacaggataacataggctgctaagaaagtatccgctattctttcatgggaaaacacaaagaaagcaaacatagaagctgaactgaagaagattgaggaacaactggaaaagaagaaggctgaatatgcagagaagatgaagaacaaggttgcaatgatacacaaggaagccgaagagaagcgagcgatggtggaggcaaaacgcggtgaggaggtcctgaaggccgaggagatggctgccaagtaccgggccaccggccacgctcctaagaagctcatcggttgcttcggagcctaagaaaccttccaagtcagaccgagcagaaagtgaaaaacgtcagccagtgattgcttggtcctctcgctctatcaagtgtgtagtgtgtcttcgaaagtttgtaaagcctactgctgctgctgtatatactgatatcgcttccaaggcaggcgtttggtggtgtacatgttgaatgcttgacgagaaacattcttgtgtgtagttaagaggtcacgctgttgttgttgttgttgacattcaagcagacattttgttttcttctggtttttaaatcataataagaaaaaa

SEQ ID NO: 19826 - DNA, 734 bp, Zea Mays
ttgcaatggcacacgcaacacgccgcctccatgtgggtggggaggcaaacgcgttcgtccatctctgaaactcaaacgccttgtattggagcatactacaggagtacttctgtacaaatataaatacccctggcgagttgggttgggtctatctcgcaatcgaggcgttttttttctgcttcgtaagttcgtggtcgatccagcgagcgagcgagcagaccggcggctaaccgcggagggagagatggcgcaggggacgctggaggtgcttctcgtcggagccaggggcctcgagaacaccgattacctgagcaacatggacccctacgcgcttctgcaatgtcgctcccacgagcagaagagcagcgtcgcatctggcaaaggctgtgaacctgagtggaacgagaccttcgtgttcaccgtctccgatggcgcagcagagctgttcatcaagctcctggacagtgacggtggcactgatgacgattttgttggtgaggcaacgattcctctggaagcagtttacacggaaggaaacatccctccgactgtttacaatgttgtgaaagacgaagaataccgcggagaaatcaaagttggcctcacgttcactccagaggttatctataggctttgtttgggagcaataataaggctatcttcagcggatctattatcatgtcttctatttaaaattttatttgtaaatagtgttaaacaatgttatatacaac

SEQ ID NO: 19827 - DNA, 1070 bp, Zea Mays
ttgcaatggcacacgcaacacgccgcctccatgtgggtggggaggcaaacgcgttcgtccatctctgaaactcaaacgccttgtattggagcatactacaggagtacttctgtacaaatataaatacccctggcgagttgggttgggtctatctcgcaatcgaggcgttttttttctgcttcgtaagttcgtggtcgatccagcgagcgagcgagcagaccggcggctaaccgcggagggagagatggcgcaggggacgctggaggtgcttctcgtcggagccaggggcctcgagaacaccgattacctgagcaacatggacccctacgcgcttctgcaatgtcgctcccacgagcagaagagcagcgtcgcatctggcaaaggctgtgaacctgagtggaacgagaccttcgtgttcaccgtctccgatggcgcagcagagctgttcatcaagctcctggacagtgacggtggcactgatgacgattttgttggattcctctggaagcagtttacacggaaggaaacatccctccgactgtttacaatgttgtgaaagacgaagaataccgcggagaaatcaaagttggcctcacgttcactccagaggaccagggcttctgaggaataacttggcgtgtggccgctggaactggaggcagcaggcagtcgtcttatgattcagaagcaaacgacggatcgattcccttgatgtactgcagtccagtgagcgtgcatctacaacttgtagaagaagcctgcaacatgatcacgggatcctgtactgcatcactctaaagcctagctaaaaccaccagctcctgtacttgatgccgggcgggcttgtcatgtactgaaacctacaataacggtcgccgaaccccactctttgatgttcagttaacttgtcgcggtttacaagaggccgtgtgactgctgcaagatatcgcttgtctgctctctatttcgcctgaaccctgaggctttgtttgggtaaggagggattggagtggattgtagtgttttaaagggattgagagaaaaattagttcatattacacttcaataca

SEQ ID NO: 19828 - DNA, 2647 bp, Zea Mays
aattcgcataggccgtgctactgtgctagcaagcaactgatcctagtcatacactgggcagcaggcagcgagcattccactccacgacgcaaccatccggcgccggtctccgttcgtcgtcccagtctccgcgccgtcccgtaacaatcacaacactgcaggtagtagctcagtttcagtggtcgccggcgagccactcgactcgagcgcacggccaaattgttggaccgaaatccggttcctccccaccgaacggctacgcatccgccatgctcgtcgccctcctctgcctcctcgcctgctgcgccggcgccggcgcagcaggcgccgccgcgccgaacgcgcgcccgtgcgcgtcgccctactcgaccagcgcctacccgttctgcgacgcgtcgctctccatcccggcccgcgcgcgcgcgctcgtctcgctgctcaccctggacgagaagatcgcgcagctgtccaacacggcgggcggcgtcccgcgcctgggcatcccgccctaccagtggtggtccgagtcgctccacggcctcgccgacaacgggcccggggtcaacttctcctcgggccccgtccgcgccgccaccgacttcccgcaggtcatcctgtccaccgccgccttcaaccgctcgctgtggcgcgcggtcgccgaggccgtcgccacggaggccctcggcatgcacaacgccggccaggccggcctcacgtattgggcgcctaacatcaacatcttccgagacccaaggtggggccgcggccaggagacgtccggggaggaccccgctgtcgctgccgcgtactccctcgagtatgtcaagggtttccagggagaggaaggagaggaaggcagaatcaggctctctgcgtgctgcaagcactatacagcgtatgacatggagaaatgggaaggcttctcgcggtacaccttcaatgccaaggtaaatgcacaagatttggaagacacgtaccagccgcctttcaagacctgcatccaggaggctcgtgctagctgcttgatgtgtgcatataaccaggtcaatggtgtgcctatgtgtgctcacaaagatcttctgcagaagaccagggatgaatggggcttccaggggtacattacatctgattgtgatgctgtggcaattattcatgaaaaccagacatacactaaatcaggcgaagattcaatagcaattgttcttaaggcaggaatggatatcaactgtggttctttcctagttcggcatactaagtcagcaattgagaagggaaaaattcaagaagaagatatcgaccgtgccctttttaatctattctcggttcagttgcgtcttggaatatttgataagcccagcaacaaccaatggttctctcaactagggcccaacagtgtgtgcacgaaagagcatagagagcttgcagcagaagctgtaaggcagggtgctgtccttctgaagaatgaccataattttttgcctctgaagagaagcgaagttagacatgttgccatcattggaccatctgcaaatgacgcgtatgcgatgggcggagactatacaggtgttccctgcaatcctacgaccttccttaagggcattcaagcatatgctacacaaacaagctttgcccctggatgcaaggatgcttcctgtaactcaacagatttgtttggcgaagctgttgaagcagctaaaagagccgatattgttgtcgtaattgctggcttgaacctgacagaagagcgtgaggacttcgacagagaggaaagctgcctataacttggtatcctgaatcctttactgctattcccatgactgatatgaacatgagagctgatccttcacgaggctaccctgggagaacatatcgattttacactggagatgtagtgtatggctttggatatggtttaagttactccaaatattcatatagcatctcctcggctccgaagaagatcaccgtgtcgcgttcatccgatttgggcattatcagcagaaagcctgcatacacaaggagggatggactaggctctgtgaaaactgaagatatcgcttcatgtgaagctctggttttctctgttcacgtcgctgtttcgaatcatggtagcatggatgggagtcatgctgttcttctgttcgcgagatcgaaatcaagcgtcccgggctttcctataaaacagctggttggctttgagagtgtccacacggcggctggcagtgcatccaatgtggagattactgttgacccctgcaagcaaatgagcgcagccaatcctgaaggcaaaagggtacttctgttgggtgcccatgttctaacggtgggtgatgaagagttcgaattatccattgaactctgacagggatgtgccaagtcctaccattttatggagttcaaagttgggaataatctgatgaaacttgtaaagaaacacgttgtaaagattcattattgagctggatgcgtgtacggtaaacatgctgtgacctgtgaagattcatcatttgagttgggtgctagtacaattgcagccattttgcggtataaactgccgaaaaatacatccagcacactactctgaatcgtatagatagatttaattaaaaggttggaacaaacagcacactactgccagaaataaaaa

SEQ ID NO: 19829 - DNA, 2078 bp, Zea Mays
aattcgcataggccgtgctactgtgctagcaagcaactgatcctagtcatacactgggcagcaggcagcgagcattccactccacgacgcaaccatccggcgccggtctccgttcgtcgtcccagtctccgcgccgtcccgtaacaatcacaacactgcaggtaaatgcacaagatttggaagacacgtaccagccgcctttcaagacctgcatccaggaggctcgtgctagctgcttgatgtgtgcatataaccaggtcaatggtgtgcctatgtgtgctcacaaagatcttctgcagaagaccagggatgaatggggcttccaggggtacattacatctgattgtgatgctgtggcaattattcatgaaaaccagacatacactaaatcaggcgaagattcaatagcaattgttcttaaggcaggaatggatatcaactgtggttctttcctagttcggcatactaagtcagcaattgagaagggaaaaattcaagaagaagatatcgaccgtgccctttttaatctattctcggttcagttgcgtcttggaatatttgataagcccagcaacaaccaatggttctctcaactagggcccaacagtgtgtgcacgaaagagcatagagagcttgcagcagaagctgtaaggcagggtgctgtccttctgaagaatgaccataattttttgcctctgaagagaagcgaagttagacatgttgccatcattggaccatctgcaaatgacgcgtatgcgatgggcggagactatacaggtgttccctgcaatcctacgaccttccttaagggcattcaagcatatgctacacaaacaagctttgcccctggatgcaaggatgcttcctgtaactcaacagatttgtttggcgaagctgttgaagcagctaaaagagccgatattgttgtcgtaattgctggcttgaacctgacagaagagcgtgaggacttcgacagagtgagccttctccttccaggcaagcagatgggcctcatacatgccattgctagtgtagcgaagaagccccttgtgttggttctcctgggtggtggtcctgttgatgtttcgtttgcaaagcaagatccacgaatcgcaagcattctttggctcggatatcctggcgaggttggtggacaagtccttccagaaattcttttcggagagtacaacccaggaggaaagctgcctataacttggtatcctgaatcctttactgctattcccatgactgatatgaacatgagagctgatccttcacgaggctaccctgggagaacatatcgattttacactggagatgtagtgtatggctttggatatggtttaagttactccaaatattcatatagcatctcctcggctccgaagaagatcaccgtgtcgcgttcatccgatttgggcattatcagcagaaagcctgcatacacaaggagggatggactaggctctgtgaaaactgaagatatcgcttcatgtgaagctctggttttctctgttcacgtcgctgtttcgaatcatggtagcatggatgggagtcatgctgttcttctgttcgcgagatcgaaatcaagcgtcccgggctttcctataaaacagctggttggctttgagagtgtccacacggcggctggcagtgcatccaatgtggagattactgttgacccctgcaagcaaatgagcgcagccaatcctgaaggcaaaagggtacttctgttgggtgcccatgttctaacggtgggtgatgaagagttcgaattatccattgaactctgacagggatgtgccaagtcctaccattttatggagttcaaagttgggaataatctgatgaaacttgtaaagaaacacgttgtaaagattcattattgagctggatgcgtgtacggtaaacatgctgtgacctgtgaagattcatcatttgagttgggtgctagtacaattgcagccattttgcggtataaactgccgaaaaatacatccagcacactactctgaatcgtatagatagatttaattaaaaggttggaacaaacagcacactactgccagaaataaaaa

SEQ ID NO: 19830 - DNA, 2832 bp, Zea Mays
aattcgcataggccgtgctactgtgctagcaagcaactgatcctagtcatacactgggcagcaggcagcgagcattccactccacgacgcaaccatccggcgccggtctccgttcgtcgtcccagtctccgcgccgtcccgtaacaatcacaacactgcaggtagtagctcagtttcagtggtcgccggcgagccactcgactcgagcgcacggccaaattgttggaccgaaatccggttcctccccaccgaacggctacgcatccgccatgctcgtcgccctcctctgcctcctcgcctgctgcgccggcgccggcgcagcaggcgccgccgcgccgaacgcgcgcccgtgcgcgtcgccctactcgaccagcgcctacccgttctgcgacgcgtcgctctccatcccggcccgcgcgcgcgcgctcgtctcgctgctcaccctggacgagaagatcgcgcagctgtccaacacggcgggcggcgtcccgcgcctgggcatcccgccctaccagtggtggtccgagtcgctccacggcctcgccgacaacgggcccggggtcaacttctcctcgggccccgtccgcgccgccaccgacttcccgcaggtcatcctgtccaccgccgccttcaaccgctcgctgtggcgcgcggtcgccgaggccgtcgccacggaggccctcggcatgcacaacgccggccaggccggcctcacgtattgggcgcctaacatcaacatcttccgagacccaaggtggggccgcggccaggagacgtccggggaggaccccgctgtcgctgccgcgtactccctcgagtatgtcaagggtttccagggagaggaaggagaggaaggcagaatcaggctctctgcgtgctgcaagcactatacagcgtatgacatggagaaatgggaaggcttctcgcggtacaccttcaatgccaaggtaaatgcacaagatttggaagacacgtaccagccgcctttcaagacctgcatccaggaggctcgtgctagctgcttgatgtgtgcatataaccaggtcaatggtgtgcctatgtgtgctcacaaagatcttctgcagaagaccagggatgaatggggcttccaggggtacattacatctgattgtgatgctgtggcaattattcatgaaaaccagacatacactaaatcaggcgaagattcaatagcaattgttcttaaggcaggaatggatatcaactgtggttctttcctagttcggcatactaagtcagcaattgagaagggaaaaattcaagaagaagatatcgaccgtgccctttttaatctattctcggttcagttgcgtcttggaatatttgataagcccagcaacaaccaatggttctctcaactagggcccaacagtgtgtgcacgaaagagcatagagagcttgcagcagaagctgtaaggcagggtgctgtccttctgaagaatgaccataattttttgcctctgaagagaagcgaagttagacatgttgccatcattggaccatctgcaaatgacgcgtatgcgatgggcggagactatacagggcattcaagcatatgctacacaaacaagctttgcccctggatgcaaggatgcttcctgtaactcaacagatttgtttggcgaagctgttgaagcagctaaaagagccgatattgttgtcgtaattgctggcttgaacctgacagaagagcgtgaggacttcgacagagtgagccttctccttccaggcaagcagatgggcctcatacatgccattgctagtgtagcgaagaagccccttgtgttggttctcctgggtggtggtcctgttgatgtttcgtttgcaaagcaagatccacgaatcgcaagcattctttggctcggatatcctggcgaggttggtggacaagtccttccagaaattcttttcggagagtacaacccaggaggaaagctgcctataacttggtatcctgaatcctttactgctattcccatgactgatatgaacatgagagctgatccttcacgaggctaccctgggagaacatatcgattttacactggagatgtagtgtatggctttggatatggtttaagttactccaaatattcatatagcatctcctcggctccgaagaagatcaccgtgtcgcgttcatccgatttgggcattatcagcagaaagcctgcatacacaaggagggatggactaggctctgtgaaaactgaagatatcgcttcatgtgaagctctggttttctctgttcacgtcgctgtttcgaatcatggtagcatggatgggagtcatgctgttcttctgttcgcgagatcgaaatcaagcgtcccgggctttcctataaaacagctggttggctttgagagtgtccacacggcggctggcagtgcatccaatgtggagattactgttgacccctgcaagcaaatgagcgcagccaatcctgaaggcaaaagggtacttctgttgggtgcccatgttctaacggtgggtgatgaagagttcgaattatccattgaactctgacagggatgtgccaagtcctaccattttatggagttcaaagttgggaataatctgatgaaacttgtaaagaaacacgttgtaaagattcattattgagctggatgcgtgtacggtaaacatgctgtgacctgtgaagattcatcatttgagttgggtgctagtacaattgcagccattttgcggtataaactgccgaaaaatacatccagcacactactctgaatcgtatagatagatttaattaaaaggttggaacaaacagcacactactgccagaaataaaaa

SEQ ID NO: 19831 - DNA, 665 bp, Zea Mays
cctcaatcacttttaatcctcttcaatccccagcaaaccgatcaagcccttagtcccagatgtgacaaagtcaacatggcaatcactcgtgatcgagagcgagcttcctgtcctggttgagttctcggcggcatggtgcgggccatgcaagatgatagaaccagttgttggcaagctctcgaaggactacgaggggaagctgaaatgctacaagctaaacacagatgagagcccggacatcgcaagccagtacggggtccggagcatccccaccacgatgatcttcaaggatggcgagaagaaggattcggttatcggggccgtgccagagagcacactggtcacatgcatcgagaaatttgtcgagaggtagaatgcgtagtggatctcttgagcggtttcctttaaatcaaaaggtcatttcgagaccacttgggccatacagaacaattctataactgcctctagatgatgggattatatgtatattatatactctgttattattgtttgaagaaagcggcatgaaatttgtgtccaccccagccttggttttgttttcttattctttagaggctctgaactgtgtaacgtggacgaccgagaacctcgttctattcttctcataatatataagaatgcacacatgaaacatcattccttat

SEQ ID NO: 19832 - DNA, 656 bp, Zea Mays
caattgtacattattgtgtttccttggaatgatcaagcacacggtcccagatgtgacaaagtcaacatggcaatcactcgtgatcgagagcgagcttcctgtcctggttgagttctcggcggcatggtgcgggccatgcaagatgatagaaccagttgttggcaagctctcgaaggactacgaggggaagctgaaatgctacaagctaaacacagatgagagcccggacatcgcaagccagtacggggtccggagcatccccaccacgatgatcttcaaggatggcgagaagaaggattcggttatcggggccgtgccagagagcacactggtcacatgcatcgagaaatttgtcgagaggtagaatgcgtagtggatctcttgagcggtttcctttaaatcaaaaggtcatttcgagaccacttgggccatacagaacaattctataactgcctctagatgatgggattatatgtatattatatactctgttattattgtttgaagaaagcggcatgaaatttgtgtccaccccagccttggttttgttttcttattctttagaggctctgaactgtgtaacgtggacgaccgagaacctcgttctattcttctcataatatataagaatgcacacatgaaacatcattccttat

SEQ ID NO: 19833 - DNA, 1255 bp, Zea Mays
ctggatgctcccacatgaatggggtctggtgaagggataaaccaagtactgtcataaccgaactaaaacagtttctgagaggaagcatcgcgattgccatggaagctgggagaatggatcagccatttatggctgctatcaatagccagcctttcgtggaggatattgagccagtgaagaaagccagtggggacatgcctgcgacaacaggaagcggatgcttcgaatgcaacatctgccttgattttgcatcagaaccagtggttactttctgtggtcatctctactgctggccttgtatctacgagtggctgcgccctggggtggagtcagctgccagcgacaacagcagttcggcaaggcggcaatgtcctgtatgcaaggcaacactctcaacggacacccttgtgccactatacggccgtggaggcaactcaaagaagtcacttgatggcatggccatcccgcgccgccccatggtacaccgggagactgttgaggagcaacagaatgcacagagcaatgtcaatgaccagcactaccaccagagcatggaagacaactctcagcgccagccattgctgcaagcgcaccaccatcccattcccactgggtttgacttcatctaccctccagcaccagtagggcgtggcttgatccactcaactgccggaggggtgctcggagggatggcagagattgtgcttcccttggcgctccgtggccagatgccagcgagcttgtactacacgaatccataccatgctgcgacgcagaacgtgaaccccaggctgaggcggcatcagatggaaatcgagaggtccctgcaccagatctggttcttcctctgtgtgtttgtggtgctgtgcctgctcttgttctgagacaagactattctatacacctctttgtagatattgaaagtgggagggggatactaatggatgatgcgtatagtaaacagggtaatggtctgtgtcgacaggcatgtgcttaagcatgctgatgtagagttgtaatatgatgagacacggaggtgaaatgcatatttcattcttctctatcactgtcggcctgttaggttgcctacctgacatcttcatgttaggtttagcatcatctgttgtgtattggttggtgtcactgccaagggccttttgatttgtatataaatagaaaatgatggtttgtctaccaatttctgctctgtatcctctttaatccctgttccaagattgacacagcaattttgtcc

SEQ ID NO: 19834 - DNA, 1829 bp, Zea Mays
gataaaccaaggcaagtctttccctgcaaacgagctgctaataacttagtgagacagttctcaccactgcactagacctgcccttctagtaggtgcaattatcactgggttattttactttttgttgataactaaatgtttaaatgatgatctttttagtgtgtttagttccatggaatataccaagtgttgtggctaccccacccttgctgcagtcctcatcagtacccccacctattgttgtttttcaatgatgctcctttggaagaagctccacaaccaccaaaatatcaacatgtgaccacaaacatatattggagattagggcgtacaccttgagcctatctcatactttcctttgttattcatatctgctcttttggtcttccccagccgtttgtctgaatataatttttttaaggatctgtggtaataactggtaatctgttcaggacctgccagcttgccgaatcccatgttttgcaagtttttttagaactcgaacagtattctattttcttcccgaggcaatttcgagctggcaataatagttctaaccttgaacaaggagccaagtcttggagtcaatattttatgctgccatgcacatttcatataagtactgtcataaccgaactaaaacagtttctgagaggaagcatcgcgattgccatggaagctgggagaatggatcagccatttatggctgctatcaatagccagcctttcgtggaggatattgagccagtgaagaaagccagtggggacatgcctgcgacaacaggaagcggatgcttcgaatgcaacatctgccttgattttgcatcagaaccagtggttactttctgtggtcatctctactgctggccttgtatctacgagtggctgcgccctggggtggagtcagctgccagcgacaacagcagttcggcaaggcggcaatgtcctgtatgcaaggcaacactctcaacggacacccttgtgccactatacggccgtggaggcaactcaaagaagtcacttgatggcatggccatcccgcgccgccccatggtacaccgggagactgttgaggagcaacagaatgcacagagcaatgtcaatgaccagcactaccaccagagcatggaagacaactctcagcgccagccattgctgcaagcgcaccaccatcccattcccactgggtttgacttcatctaccctccagcaccagtagggcgtggcttgatccactcaactgccggaggggtgctcggagggatggcagagattgtgcttcccttggcgctccgtggccagatgccagcgagcttgtactacacgaatccataccatgctgcgacgcagaacgtgaaccccaggctgaggcggcatcagatggaaatcgagaggtccctgcaccagatctggttcttcctctgtgtgtttgtggtgctgtgcctgctcttgttctgagacaagactattctatacacctctttgtagatattgaaagtgggagggggatactaatggatgatgcgtatagtaaacagggtaatggtctgtgtcgacaggcatgtgcttaagcatgctgatgtagagttgtaatatgatgagacacggaggtgaaatgcatatttcattcttctctatcactgtcggcctgttaggttgcctacctgacatcttcatgttaggtttagcatcatctgttgtgtattggttggtgtcactgccaagggccttttgatttgtatataaatagaaaatgatggtttgtctaccaatttctgctctgtatcctctttaatccctgttccaagattgacacagcaattttgtcc

SEQ ID NO: 19835 - DNA, 1612 bp, Zea Mays
tccgtgcagacgcgtctgctgctggagacaatggaggtcgcggagcagaagtgcgaggagcgctgggatcggatgatgaagatcctggagcgtttgggcgacaaggtggaggcgatggagattgggcagcaacgtcttcaacgtcaagcagaggcgatggaggcgggacaacagcgtcttcatcaccaagttgaggctgctgcaacatctgcgaggaaggcggaagaggaacgaaccattttagcgcgccaagtggatgaaaccaggaaggcagtgtcgcgccttcgtttggagtggatggcgaaggagatggaaggtatggaaactgagtctgagagggaagggcgtaaccaaaggcggtctgagggtggtgatcgggagtatggtgagcaggagtttcgtgtggatgatcagccggaaggaagtagagagcgtcggacatgtgttggcacaattacctcgaacactggatcgggcgatacttctggcgcagattcagtaggaagtggtggagatgaacaaggccaaatttcagaggaactatttaggtggcaaagtaatggtgaacacagtgaaaggagatcctagaggagtaactggccctactgatttggctaaggagaggcagctgagagagtttcggaggctaaacggtttatgttttggttgtggagagaagtacgagccaggacatcaagctaaatgccttaaaagaggtggagcacaattacataatctgactgtagaggatatggggttggtgttgtcagatgagacgttgcaacagctggatcaggaagataaggaagtggaggaagcatataagctgtctataaatgctatcagtggaactgaccgtgagaattgtatgagagttcgggcactgatccagaatcaagtgttggtgatgttggtagactctggcagctcctcaagttttgtcagtcagaggatggtagatcagttggctttatcaactgaagttgttttcaccggtaagagttaaggtggcaaatggtgagttcatgttgagttcaaaaagggtggcagcgctggagtggtgggcagaagggcacacttatgccagtaacatgagagtactggatttagaagcctatgatgctatattggggtatgattggctaaagagccatagtcctatggagtgtgattgggacaacaaggtgctgacattctgggataaaggggtcagagtgcagctgaagggggatggtgtaggaagtacagaggtattgcaagtgtcagcggttcagctgagcaggtggatgaagggaaatgaagtgtgggcttttgtgatgctcgaagcaatacaggaggaaggtgctgaaaaggaacaggagccgctgaggcagatacttaaggagtttgaagatgtgtttgctgtgcccactggactgcctccggttagaatgtatgaccatcatataccattgctcccagggtctattccggtgaattccaggccttataggtattcacctttccacaagatagaaattgaaaggcaagtgacagagttattaactgcagggctgatagtacccagtgccagtccatttgcatctcctgtattactggttcagaagaaaga

SEQ ID NO: 19836 - DNA, 2122 bp, Zea Mays
ccacttccgtgagtcccaggcggccaccaattgcggcaccgtcgcgagccgatctgtctctcacttccatctcgcctccgcggcgcgaaaccctaggttcgcgacgccatgccggcctctgggtcgccccgtgatggtcgaggcgccgaggaggatgaggcggcgcgcagcggcagcaagtcgctagacgctgaatgcaacgaccgctcaaaggggagccggaaccgggaccaccgcggcaagtccaagcggcgagaggaggaggagagcgagtcctccggagaggactccagcgagcgacggaaacggcgtagaaaggagaaagagcgccggcacaggcgccggcgccgcagcaacagtgagagctcgggctcgtcgtcagagtcggagtccgagtcgtcgtactcggggtccagcgtggagtctgagagcgagtcggagttggattcggaggaggagaggcggaggcggcggcgcaagaggaggaaggaaagggaggatgaggagagaaggcggaggaagaaggagaaggagaggagaaagaggaaggagaaggagaaggagagggagaggaggaagaagaggaaggaggggaagaagaatttggggaagaagggcgctgtgaccaactcgtgggggaaatatggcatcatccgtgagctcgatatgtggagcaagcggccagagttcactgcatggctatcagaagtcaagcaggttaatttggaggcattgtcaaattgggaagagaagcaaatgttcaaggaattcatggaggatcacaatacagccacgtttccatcaaaaaaatattataatttagatgcttaccatcacaaagcaatggagaaagagaaaaagaagggtttaaaaatgattgtgacagaacgcactgtatttaatgatgaggaacagcgacgactagaattgttgaaggagcgtgagcgccgaaaggaggaagaagtggaagctttaaaacgctctatgcaagctggactggttagattattttggtgtatcttttttcagttctgcttttatcttttaatcatcatttaaaattctagaatgctcatggattatgttttattcccttgctgaaaggtttttctattattagttttaagatattggcccagtattaagtagatataggctatatatgtagtttttctagtggcgtgcataaatttagccaaagagcatagctattcatcatgggaattgggaagtactatgcaatggacaaagaatgcaatgtgtttgaagtgatagatttttactggtcaggacataacagccctttctttaaatatgtatatgaagactttgtatttgacatatattatttgtgtgtgccaccaagtttgatttcactggtagctcaatccggcgtgtacaaacgtacatttttaagatcttctattgtatcatagtctcttatgtatttccattcctacctgaaataaatataggggcaagtagtgctttggaccttatgtggaatatacttgagtccatggtaccacaagtttattttctttttcatattaggtccttgtgttttttttgtaatactactaatacatgttctagtaaatataatgtgcattttttatctttctgtagattttcttagataatatccccatcatagtattttttgtgtatacattacggaaggaataagccatggcatggtaattgaaagcagaatatttttctttatgtcatctaatatgtgtctgtcttctgtgttctgctcattattaggctcaagacatgaaggagcaggcccgtctacgcgaagaaatgaactaccaatacaggttgggcaattttcaggctgcagctgcaatccagaaaagattggatcctgatgctcccttgcagtagccggttcgtggatagcccaattccctgcagttattccttggctttcctggacactgtaggacgacgagcataccttagcatattgaacggctgctagctactacgatgttttttttatatagtgtgccagatgctacttttgtattgtatcggcagaattttgaattccagttattcagactcagttgtttgtttcccatgttcgaactaccatcgtcattcatca

SEQ ID NO: 19837 - DNA, 731 bp, Zea Mays
cagaaatcttccattggatttgaatgcgtgaaacagtagccttatcactgcaatgagcaagcggccagagttcactgcatggctatcagaagtcaagcaggttaatttggaggcattgtcaaattgggaagagaagcaaatgttcaaggaattcatggaggatcacaatacagccacgtttccatcaaaaaaatattataatttagatgcttaccatcacaaagcaatggagaaagagaaaaagaagggtttaaaaatgattgtgacagaacgcactgtatttaatgatgaggaacagcgacgactagaattgttgaaggagcgtgagcgccgaaaggaggaagaagtggaagctttaaaacgctctatgcaagctggactggctcaagacatgaaggagcaggcccgtctacgcgaagaaatgaactaccaatacaggttgggcaattttcaggctgcagctgcaatccagaaaagattggatcctgatgctcccttgcagtagccggttcgtggatagcccaattccctgcagttattccttggctttcctggacactgtaggacgacgagcataccttagcatattgaacggctgctagctactacgatgttttttttatatagtgtgccagatgctacttttgtattgtatcggcagaattttgaattccagttattcagactcagttgtttgtttcccatgttcgaactaccatcgtcattcatca

SEQ ID NO: 19838 - DNA, 1967 bp, Zea Mays
acggaacaccattgttggaaataaaataaaagaacaccacatcgacatcctctcacctccctcgcactccattggatttgggggagctcggggggcgcgggccactgatgatccccggaacgagcaccgatccgtggcgaggaaactccaccgggtagccggcccgggagcgcggggcacggcgatggcgggcgccggggcagcggccaatggcggcaggaacaaatgttggcgtaatgagtggcgcgatcatctacatgcagaaagacctccacataaccgagtttcagcaagaaatcctagtaggctgtctgagcgtggtctcactcttgggaagcctatcaggggggcgaacatctgacgcaattggcagaaaatggacaatgggcctcggtgcaattgtgttccagataggcgcgaccatcatgacgtttgctccatcattcactgtgcttatgatagggaggctccttgctggggttggcattggctttggtgccatggtatctggagtgtacattgctgagatctcccccgcaggtgcccgagggacgctcacatcccttcctgagatctgcatcaattttgggatccttcttggctacgtttccaattatgccttctcaggcctttctgagcacatcaattggaggattatgcttggtgtcggtatcctcccatcagtcttcattggctttgcgcttttcgtgatcccggagtcccctaggtggttgatgatggagaagagagtttcagaagcaagggcagtgctgctgcagattagcgagtctgaagctgaagctgaagaacggctggctgagatcgaggaagccgcaggtctgatgaaatcaatgaaatctgaggacaaagaagtgtggagggaacttttgaacccgtctcccgccgtccgtcggatgctgtacgctggttgcggtattcagttgttccaacagatcacaggaattgatgctactgtctattacagcccaacaattttcaaagatgctggcatcaagtctgatcaggagcttctcgctgcaactgttgctgtgggtttcactaagacagtgttcatcttggttgcaattttcctaattgatagagttggacggaagccacttctttatgtgagcaccattggcatgaccatctgcttatttctcttgggggttgcacttacactgcaaaaccatgcggtggggcttatgtctccacgtgttggtatcgacctagcaattttcgcagtttgtggcaacgtggcattcttttcaattggcatgggaccaatatgttgggtcttgtcctcagaggtatttcctttaagattacgagctcaagggtcagcgcttggtcaagtaggtggtagagtgagcagtggtttggtttccatgtcattcctttctatggcccgtgctatatcagtggcaggaatgttcttcgtctttgctgcaatatccactatctctgtactgtttgtgtacttttgtgtgccagaaacaaaagggaaaacactggagcagatcgaaatgatgtttgaaagtggggacgaatggggaggaggtgaaattgagcttgaggatacacagcatttaataccgagtatcaagaagtctgtgcctcttggttgatatttgtagcatcaataaaattcttattagctccatgtttcaatgacgagccaaccaaaccagctggattctgaactttggtttcgagtgatctggccacactgagccacgaccgatctgataaaagataagcttgatagacataggtgcaacgtagaagattaattgtgatgttagttcaaaatgtcaatgattttactgggaggcggtctgtaatgtatgatcttacatctcttgtaccttcttacatctctcgtacctcccagcggaagaatatactcgcagaaaagttttctactgtgcatttttttataacactaaaatgagtattagatgcta

SEQ ID NO: 19839 - DNA, 1446 bp, Zea Mays
ctaacccgagaaacccgcggccagcccccgcaggcccggaccctggcccccggccctgttgtcatcctcctgcggctcccgcatctctagctctcacgtgcgcaccgcctgctcgacgcaattccccactcgcccaccaaccttcccgtccccgatggcgatcatggcggccaccgccactgccgtggcttccccctccagctccacctcgccaggtcccctccaacccagcccccgcttcctccctcccgtctccacgcccgctcgctgccatctcctccccaagccgcggcggtggtgcgcgcgcctccacatcgagcgtcgggtggccgtcggcagcgacgtgtcttcgtcccatgacgtggctgccgaggaggccgctgctgcgcccaaggtcgggaagcgcgtgcgcgtcacggtgcccgtccgcgtccaccacgttgccaaggcgcccggcctggacctgcgcggcatggagggcgtcgtcaagcagtacatcggcgtttggaaggggaagcgcatcacggccaatctcccattcaaggtagagttcgagctcaagctggacggccaggacaagccggtccggttcatcacccacctccgcgagcaagagttcgagatcctcggggaggaatagagctctggactagagaataacgcgctctcatcggcggctgtggcatctgtatactattgtgtctgcgctaaagaagaacgtggtcgagggtgcggggagaataggagattgcaactttgctaacagctcgctggtgggcacaggtgtttggatttcaaagcgtcaacaaatgggaataagttctgatcagcttctgctgctttcagagccatcattcctgcacaattggcaaatggtacttggacagttgaaaatcccaaaaacatcactaatcctttcattgagggctggcggaattctatggctgatatggaggacatatatagttctctatcattgagggatgtcaaaatgaagatggtgatatgagtgaaacaaattattcaacaatttagagctacaacggcctaagaacattctctgttagagctactggagcatcaacatgtaggaacagtgaccatcaggccggttcgcacaaggaggcctaaccagctagtccatggaccagagtggacccgttaagctgaaggtggggttttctttttgtgtgagtatttagttgtgagttggggaggagcaggcaaggaagaaggggatgaaccagtaggtggccggctgcgtccggaaaggctgagaggtgaaactcttgtaacctgttattctggatttgtcgtgggtaaatctcttcgtgagggggttcaccgccaggagcggtgctcagatcgtcgccggtttagtatcgttacatgctgtctcagttgtacatttcgcatcatcttttcactaaccttgtaggaacgtca

SEQ ID NO: 19840 - DNA, 1186 bp, Zea Mays
cccggccctgttgtcatcctcctgcggctcccgcatctctagctctcacgtgcgcaccgcctgctcgacgcaattccccactcgcccaccaaccttcccgtccccgatggcgatcatggcggccaccgccactgccgtggcttccccctccagctccacctcgccaggtcccctccaacccagcccccgcttcctccctcccgtctccacgcccgctcgctgccatctcctccccaagccgcggcggtggtgcgcgcgcctccacatcgagcgtcgggtggccgtcggcagcgacgtgtcttcgtcccatgacgtggctgccgaggaggccgctgctgcgcccaaggtcgggaagcgcgtgcgcgtcacggtgcccgtccgcgtccaccacgttgccaaggcgcccggcctggacctgcgcggcatggagggcgtcgtcaagcagtacatcggcgtttggaaggggaagcgcatcacggccaatctcccattcaaggtagagttcgagctcaagctggacggccaggacaagccggtccggttcatcacccacctccgcgagcaagagttcgagatcctcggggaggaatagagctctggactagagaataacgcgctctcatcggcggctgtggcatctgtatactattgtgtctgcgctaaagaagaacgtggtcgagggtgcggggagaataggagattgcaactttgctagagcatcaacatgtaggaacagtgaccatcaggactttctacaactggaagatactatttctccaggagtttctttcaagttgaaaacttacgcaaaatatgctaattggaagccttataagttactcataacttttcaagtcttttcccttacattgatttaagcatttgcctctagcagtatatattggagcactctcttatgaacacttgcttgcttacatgtaaaattccgctgactagtcatatctggagaatcgaaaaagttagttacctgttgcgaacctgagcagctttttagggtcttttccctttctcagtttaataatttgtgtttcgtcaatatgtctgtggagataatctggctgtgagaagaatctgtgtattgtggggattatgtgcggaggaagatgaagtggtccaaatggttcaggatctagaaagcgatggatttctactatcacgacgactc

SEQ ID NO: 19841 - DNA, 1299 bp, Zea Mays
cccggccctgttgtcatcctcctgcggctcccgcatctctagctctcacgtgcgcaccgcctgctcgacgcaattccccactcgcccaccaaccttcccgtccccgatggcgatcatggcggccaccgccactgccgtggcttccccctccagctccacctcgccaggtcccctccaacccagcccccgcttcctccctcccgtctccacgcccgctcgctgccatctcctccccaagccgcggcggtggtgcgcgcgcctccacatcgagcgtcgggtggccgtcggcagcgacgtgtcttcgtcccatgacgtggctgccgaggaggccgctgctgcgcccaaggtcgggaagcgcgtgcgcgtcacggtgcccgtccgcgtccaccacgttgccaaggcgcccggcctggacctgcgcggcatggagggcgtcgtcaagcagtacatcggcgtttggaaggggaagcgcatcacggccaatctcccattcaaggtagagttcgagctcaagctggacggccaggacaagccggtccggttcatcacccacctccgcgagcaagagttcgagatcctcggggaggaatagagctctggactagagaataacgcgctctcatcggcggctgtggcatctgtatactattgtgtctgcgctaaagaagaacgtggtcgagggtgcggggagaataggagattgcaactttgctaacagctcgctggtgggcacaggtgtttggatttcaaagcgtcaacaaatgggaataagttctgatcagcttctgctgctttcagagccatcattcctgcacaattggcaaatggagcatcaacatgtaggaacagtgaccatcaggactttctacaactggaagatactatttctccaggagtttctttcaagttgaaaacttacgcaaaatatgctaattggaagccttataagttactcataacttttcaagtcttttcccttacattgatttaagcatttgcctctagcagtatatattggagcactctcttatgaacacttgcttgcttacatgtaaaattccgctgactagtcatatctggagaatcgaaaaagttagttacctgttgcgaacctgagcagctttttagggtcttttccctttctcagtttaataatttgtgtttcgtcaatatgtctgtggagataatctggctgtgagaagaatctgtgtattgtggggattatgtgcggaggaagatgaagtggtccaaatggttcaggatctagaaagcgatggatttctactatcacgacgactc

SEQ ID NO: 19842 - DNA, 2196 bp, Zea Mays
cgacgaaacggcagaaaatttgaaattcctctcgctcctcgccgctgcacgcctgcaccatgccgcatctcctgtcatgttgtgtcatgtgtgcaccacgaagcgcaaaactccaatccacgcatccggaagctctacccctcaaacaccaccgccgcatcggttcgccgttagccggtcacctcgcctctctcctcccccaccgcgtccgaatcccatggggctctgtttcagcaagaagcagcaagcgaagcgccgagacgagcagccgtccagtgacgccaagaagagcagccgccggaaatccggcagcgacaccgtgcttgtggccgatgccaaaaaggcgcctcaggcaaaggcgccggcgccgcccaagaaggctgtagccaggccggaggagctggcagccgacaagaggacggtgttcgtcgtcaaggccgcggcggcggcggcggccgccgaggtcgcagccgccgcgaagggcgggtccgaggaggcggaggcgaagagggaggcgccggaggaggagccgatgcccgtcgccgtcgccgtggcccgggcgccggtgcggacgtcgagctgcaccaaggaggaggtggacgcgatcctgatccagtgcggccgcctcagccggacctcgtcggcgtcggggaatccgccatcgggcgagcacggcggcgggcgccgaaggtacgccggatccaagcggagctatgacttcgaccacggcacgaggggcggtggcggcgacgtcgacgagtgcgattggggcagggagggggccgcggtgaccaggccctccccgcgccggaggacgccggagcggaagcgctcatcgagccacgatggccgcactggcggcgggagcgggagcgggagccggagccggaggattagccggtcgccggggcggcgcgcggacgtcgtccccgccgcggggagctccgaaaccggcgagcgaggggcgaggcagcatcctggcaagatggtgtcggtcccggccagggagaaggggcgcgcgcagtcgcccgtgaaggctgcttcgtctggcaagagatacccatcgccaaggtcgaactcgcccgcgagggcagcggcctcggggaacgagaatgccggggtgcagtcgacgcacgggccgtcgctgagccgcaactcctcgaagaaggccgagcagtcgccattccgtcgcaaccccatggcggaactcgacgagaatgcgctcggcaacaaccaccatcacagcaacggcaagcctgtaaagactgcggagcgggcaaaggatcagatccccagctgccgaacaactgcgaaggagaaggaaattgtggaggaggccgtggcttcggacaccagagcagcgcccgcaaggatgaaggcgacccactcggtgagtattgtggctgagaacgtcaccaatccgaggccggggagccggtcgtcgaggcggtcctcgcgtgacttcgagcacaacgacaacacctacgcatccctgctactggaggacatccaaaactaccaccagcagagcgccagcgctgccaccgccactgccactccagcgccgaccttggcgctcccagcgtgcgtgtcgaatgccttctcgatccttgaagctgtcgccaacctcaactcctcgtcgcccgacaacaagagcttcgagctggagaggtcggtcaacgacaaggaatccttcgtcaacgggaggtacggcggcaatggtgcgagcaccaccctcgtggtggagtcggaggtcggcgtgaaggacgacctcatggagccgagcatgcacaagtacgtctccgtgcgtgacatccgtggggagaggagggagaccgagccgcaggagtctgcggggagcaacagctttgccagtgacgcctggacgtgctcgtgggagcccaagtccgttgactccacagaccggaccaggagtaggacggcctcgaagtcgtacaacggtgacaaggtggagcagtcgtggcagagcaagcagaagctgtcgtcatcccaggagcccagccaccgtggttctactagcaatgtttatgcttagcgtccagctaaatatcgagagtgtattgcttccaatcgtacttcgttttagttttgtttacggtgcaacagtttttgttgtcaactctttcttggaattccatcatcaaaactaatcaaaattgcgttcatagttcagtt

SEQ ID NO: 19843 - DNA, 2926 bp, Zea Mays
aatacgaaggagagtgtgtattttccattgcggggaataaatggccaggtcttacaacaacacgaactctctacaggacatcgctggagagggtatattatactaagataagaaacatgacaaccaaataataatttttcaaaaagaagatgaccaaataagctgctgtcctagtggtatggggtgtggtaggagtatgctctcccttgtgtggtcagagtctgctctcacggtctcacctattccgggtattatttcgggaattgttttgtattttgaggacctttcccctgttctcatgtgcagttcttctgcgtattccagaaaaaaagatgatcaaataattagcagtacacaatgtttatgttagagtggacgcactaacagtttaattcaaaagcttaagttaatgggagaagatagtcaatccacttatacacttcaacacctctactcacgtgccaagattcgaactcgagaccctggctttaataccatattagagtggacgtactaaccagtttaactcaaaagcttaagttaatgggagaaggtagtcaatccacttatacacttcaacacctctactcacgtgcagtcagagagaaaggcgtaaacgtggaaataaatgggtcgaggcacaaataaaagactatgccaagattcgaactcgagaccctgcctttaataccatattagagtggacgtactaaccagtttaactcaaaagcttaagttaatgagagaaggtagtcaatgcacttatacacttcaacacctctacttacgtgcagccacagagaaaggcgcaaacgtgaaaataaatgggtgagacacaaataaaacatctgctaggatttaaactcaagacatttggctttgatatctgttatagactcctatggtcagcagtaccaaaggcgcggaaaaggaaaggagcagcagcaaaaaggaatcaggagaggagatatgatttaggcacagaaaaaggaaaggagccgcagaaacaaaaggaatcaggagatatgatttagtttgttcctatactagcagattgcttaagaataaatgagagtgtttccctcaattaagagatatgatctagtttatttccctgttagtatatttccttaagtaaggtttccttaagagaaagaggtgctagctatataaagcaccatagtttgtaataggggacatcgaagaagaatagatctcccagagagggcgatctacttcgatcacctcgactggagatcgacctcctctggttccaccttccccatagtccattgagtccatttcactcgggttcagctctgtgtggtgtcgatttcctggttcgtcccccaatccacatcaaattgattccaccaggagcatcgcctgcccatggccggctctgtttccgatcctgcagccatgaacgcctccgagaagctcgatttcctgatcagggagatggccaacatgacagacttgggcactaagctgtctgcgcagatgactaccgtcaccaaccggatgaactcccatgacagccgtctcgcacggttggaaacagaggctcccgagggggaccagccagtccctcctcgccatccccaagccgctgatgcatccgccagcgccgtgcacgacgacacgcacgacccatcaggagggcgggccatccaagaggtcgaccgggagggacaccgcttccccgacgggtttggtggcggccacgtgcaggacaaccgtgcagggggcctttatggccgcgccgctggccgcatgaggggtccctacggccgcgttgacgacggcgacttctacggccgcggtcactgtgctggcggcggtcggaatggcttcgacggcggctttccccaccgcgaccgtcccaagctcaactttccctccttcgacggtacatcagaccctctcccgtggctgacaaagtgtgtggcctattttcgtggcatgcgtaccatggaggagaagaaggtttggatggcaatgatgcacctcgaaggcattgctgcagagtggtactacgctttggagcgggattatggcatcctcactggcctcgcttcgccgatttcgtcaacatgcggttcggaccgccgttgaggacaaacggtctcgctgagctgaaggatctgtgtcgcacgagcacagtggatgactacatacatcaattttccttggcattatgtcattgtgctgatctatctatgcagcaccaaggtaatttattcacagcaggtctgtgcgagcctttacgcacggacgtggagctgcaggccccatcccatctacaaacagccatgaacctggcccgggcctacaagcggcgcgacacggaggccaccaaggcgttgcggggtatgtatcgcgcaccaacaaccaagactggcgcatcgccagcccaacagcggccgacgatggtcaccagaccgcgcttcaagcgcctgactgctgaggagatggcagccaagcgcgccaacggcgagtgctaccactgcgccgaaaagtacactgctgaccacaagtgcaatgcccgcggggtattcttcatcgagctggacgacgacgcggaggccgacacacttgccgacgatttgggtgtgtgtaatactcaaattttataaaagtaatatatagaggttcccttattttatgtgcctcatttgcatcataaaaagagcatacataaaatttagagatgaattaaaacaaatgataaaaaaaattaataatatgcatcatgttggagttatatgtttgtgcattaaataaaaataaaaaggataataacaataagataatagatactagaagtggaattaaaaccctaaatttgaaattagggttttgaaaataaaaagaggagaaatgatataaaaatataaataatataattatatttccaaaaatt

SEQ ID NO: 19844 - DNA, 342 bp, Zea Mays
atgtccaggccggccgctcgggtcctgtgtgtgccgcagaagcggcagcgttgccccagggcacctcgtgagggatctcttcctcggcggagcaggcgcttggctggagcagatgttgaaaaggtaatggccccagcacgagtttcgaaaggaaaatggaggattgctaatgagctcgaccttcttggtggggatccatctgaatcgctgtccctggaggttctcgataattatgccaaggttttcggtgagcggttgactgatttgcaagttaaagctcttgcggctctcttcaactggactgtcccagaagacttgcagggtgcggtggtgcaggcctga

SEQ ID NO: 19845 - DNA, 1896 bp, Zea Mays
tgtagatacgtcagaaattaaagctattgtatgcgctcaaacagttcgtgaaaacaccagagaaaatcaaaccacggctcccaaatcaaaaaaaaggaaaaagaggaaaggaaacaaaagaaaaagcaattctattttactttcggttctatttcgcgtatcacgagcacaagacacgcaagtcacacgaacacagcggattcgagtgtcatagtcatagtccttagccatgtcgcatgttttttttgtaaaaaaaaatagagagagacaaaatcatggcttgtagccttaagcccttggctccagtggagcgtttggagctataccgctcgttcctttcgggcacgtatatgttaacaaagacaatggtcacgccttctcgctgaaaaaaaaaatatgataaaatgcaaaaactaaatttggaaacaatatctctaagaccccaactgctatggccaaagccaaaaaaaaccagtgggtgaagagcataaagttggcaggtaattaagagctagcatatccttgcgcgcagtgggggagatatagcacaattagcttagaaatcattgatgacacttgcaaaaatgctccttcgcccctgaaaaaagctgagcccacatcagtctagttctgctccttctctgaactgaagccatacgcgaaggcaagactagagggcgattttgggcacgaatagagagatggcaagctccactgcgattgcgactgcgcgcgcccatgatgctgctgtttatggcgcggcagggacccactccaatctgaggagttttcttgacagtgttacgccggttgtaaaggcgcacacggtccctatggcatcctaccttccattgtcaaacggatattatgaaaagattgcagatggggttagatgtttctaccttggagatctttggaattcattctatgagtggagcgcctgtggcgttggtacttcagtgtgcatcgctccgggtgagacagtggttcaatacttcgtgccatatctttcagcaattcagttgtacaccaacacgagaaatgctcctgtttcacaaagcatgatttatgatggaagattcgatcggaataaccattatagtgtcgggatgtacactcatggatatcaagcaccattacgcatgcccactattggagttgaagggaagggggagttgttcttcaagtattttgagcctgactccccttacgagaggatacctttcgcagacaaggtatatgagctttgctatagttgtccttccctatcatctttaagcagtgcagagctctcaccatcaagttggatgtccgttttttggtatccaacaagtcatgtccctatgaagaatagaaaagatctgaatacttgctttttgacctaccatagcctttcaacatgcaaagatagcatgcaagccttcaatcatatgtcacttgcgccgttcggccttgcaacatacaagttagatgccaaagtgtgggcaagtccaaactccggtgaccaagagcatatttcctctctcttcgatgcatcacaatcatggctaaaggagcataacatccaccactacgacttcaactactttgcccatagatgctcctccaaatgaataacatgaacatgaccgatcaacaagttcatagtctttggggactcaagtgtgttgtgtgttgtttttaacacatctctgcatgtcgtgaagggttgtagtagtttttccattgtctttttattaatgcttactttctatggttgtattatgtgaacccttggagcgtaatcattgcgatatcatacttgatacattatgtaactcttcgaaattctagatgattttactgttgtatagtgcttatacatctaagcgctatgcacataatgtcctatttttc

SEQ ID NO: 19846 - DNA, 2215 bp, Zea Mays
ctttgctttctgcctttctgcgcgacgcgagcccacgaaccagtctcccgcgtgccccgctcccccagcaacgccggcttccatccacccccgcgcaccgctccccctttccccctttccttgcgcgatgcgagcccacaaatcacgccaatccatggcagcccgcgtgccccgctcccccgcagcgcctggctcccctttccttgcgcgacgcgagatcggcgagattgccctcaacgcgctcgcgtcgcgccgcggatcccccaccctcctcccctctgcacgccgccatcaactcgcaccggccctcgcccgtgatccatcctctcccccgcggcaatgatatggcgtcccccctcaaccgaccattcccgcagcggatccgcaccaacccgttcgcgccggcctctggaagaagaatccaccgaaggcgaaaacgacgacggaggtccggctgactcgtctgggtctttgcaatagcggcaagcgggttggagctccgcttcgggcaggggagaaccacgtggagacctggagtcacgctgcctagactcgccgctgggtggattcgtcgcgatggaggtcggattgtgaacacgccgtccagttaggacgctgtcgtcttcagatccaggggatggggttgctcggcatggcggccaagggcccctcgcccacgcgtcgcctaatgccacagccgcacttggccgtctcctcgctggcggcctccgtggctctgatccactgcttcctcaacacccggagatggttgacgtcgccttcgtcgtctcctcgccagtggcctccaccagccccgcagtccaagacaaagccacgacatgagtcaacccaagtccggtcgcacctacaccgatggccgtacccaacaagttgagctttaagaggaacgtggtgtcattgtcatctgagctcaagggtgtgaggagcaagcttgcttcctaggagcagctgtttgtaagggaatctcaaactagaaagcttgcggagacaaaaacaaggagcatggaagaggaagtaatcaagctgcagaaatgcttacaggacaaggatgggcaactgtgttcatccacaagtagcacggaacagtaccatcatgagttggatgatcttagaacacatctgtcatttactcaagctacaggagaagcaggtgttgcatcagctaagttagctcggatgtagtgcatgtcattgctgaaagagctgaatgagaaggacaactcactcaaagaccatagacttcgagtgaacaatctaggtgagcagcttgatcttctccagaaggatgtacaagcaagggaggtcacacaaatgcaacttaaagatatagttataaggatcgagaccaacatcatggatgaagttgccaaagcttttgaaattgcgatgttgagaggggaaatcagaatattgtctactcactggacgaacaaaaccaagaaccttgaatcacagttaaaaaagcaccagagaactgatcaggagctgaagaagagggttctgaagcttgaattttgtctctggtcctgtcatccactggtgcgttcgccaccgcacctaccgctgttactagctcccttgctcttctcttgctgcgactgggatatagcatcgtggatcttgaacctaggccagaatttaggcaggtctagaaccaccatgatgcctggaacatactcctattttatccatgtatgagccttatgggaactctgcaattactatggatcctcttatacattatgttcgacatggagacaaggtatggtgcataaaaaagtaggaaccacaatgagattgtaatgctgcacatggcacatcaaggtgcgcaagatatgtaccgtagaaattatcgtaaagtgcacacagctgtatgtatagatgtttagaagtggtcgaagttaggcttgctcaaccggggcaatgatttacttagcctgctgaaatgtactataggtagcattcaagtttgtgaccatcatgcaagtacatgtgggtttgttgaaattgagtggtcatcggagaagtagcaaaatgttccctatcgagagctcgtgtactatatttgttttatgaacttaatttttattacaacataacatgtggtcatacatatgttattgctacaatattttttccgttgcaacgcacgggtatttacctagtacccaaaatatataaagtgatactatat

SEQ ID NO: 19847 - DNA, 1871 bp, Zea Mays
gtgccccgctcccccagcaacgccggcttccatccacccccgcgcaccgctccccctttccccctttccttgcgcgatgcgagcccacaaatcacgccaatccatggcagcccgcgtgccccgctcccccgcagcgcctggctcccctttccttgcgcgacgcgagatcggcgagattgccctcaacgcgctcgcgtcgcgccgcggatcccccaccctcctcccctctgcacgccgccatcaactcgcaccggccctcgcccgtgatccatcctctcccccgcggcaatgatatggcgtcccccctcaaccgaccattcccgcagcggatccgcaccaacccgttcgcgccggcctctggaagaagaatccaccgaaggcgaaaacgacgacggaggtccggctgactcgtctgggtctttgcaatagcggcaagcgggttggagctccgcttcgggcaggggagaaccacgtggagacctggagtcacgctgcctagactcgccgctgggtggattcgtcgcgatggaggtcggattgtgaacacgccgtccagttaggacgctgtcgtcttcagatccaggggatggggttgctcggcatggcggccaagggcccctcgcccacgcgtcgcctaatgccacagccgcacttggccgtctcctcgctggcggcctccgtggctctgatccactgcttcctcaacacccggagatggttgacgtcgccttcgtcgtctcctcgccagtggcctccaccagccccgcagtccaagacaaagccacgacatgagtcaacccaagtccggtcgcacctacaccgatggccgtacccaacaagttgagctttaagaggaacgtggtgtcattgtcatctgagctcaagggtgtgaggagcaagcttgcttcctaggagcagctgtttgtaagggaatctcaaactagaaaggttagtatgtaactggtaccttcgaggttgttggtggggtttgtgccgacaaggaaaaaaatttagcagcttgcggagacaaaaacaaggagcatggaagaggaagtaatcaagctgcagaaatgcttacaggacaaggatgggcaactgtgttcatccacaagtagcacggaacaggagaagcaggtgttgcatcagctaagttagctcggatgtagtgcatgtcattgctgaaagagctgaatgagaaggacaactcactcaaagaccatagacttcgagtgaacaatctaggtgagcagcttgatcttctccagaaggatgtacaagcaagggaggtcacacaaatgcaacttaaagatatagttataaggatcgagaccaacatcatggatgaagttgccaaagcttttgaaattgcgatgttgagaggggaaatcagaatattgtctactcactggacgaacaaaaccaagaaccttgaatcacaggtatggtgcataaaaaagtaggaaccacaatgagattgtaatgctgcacatggcacatcaaggtgcgcaagatatgtaccgtagaaattatcgtaaagtgcacacagctgtatgtatagatgtttagaagtggtcgaagttaggcttgctcaaccggggcaatgatttacttagcctgctgaaatgtactataggtagcattcaagtttgtgaccatcatgcaagtacatgtgggtttgttgaaattgagtggtcatcggagaagtagcaaaatgttccctatcgagagctcgtgtactatatttgttttatgaacttaatttttattacaacataacatgtggtcatacatatgttattgctacaatattttttccgttgcaacgcacgggtatttacctagtacccaaaatatataaagtgatactatat

SEQ ID NO: 19848 - DNA, 2096 bp, Zea Mays
ccagcaacgccggcttccatccacccccgcgcaccgctccccctttccccctttccttgcgcgatgcgagcccacaaatcacgccaatccatggcagcccgcgtgccccgctcccccgcagcgcctggctcccctttccttgcgcgacgcgagatcggcgagattgccctcaacgcgctcgcgtcgcgccgcggatcccccaccctcctcccctctgcacgccgccatcaactcgcaccggccctcgcccgtgatccatcctctcccccgcggcaatgatatggcgtcccccctcaaccgaccattcccgcagcggatccgcaccaacccgttcgcgccggcctctggaagaagaatccaccgaaggcgaaaacgacgacggaggtccggctgactcgtctgggtctttgcaatagcggcaagcgggttggagctccgcttcgggcaggggagaaccacgtggagacctggagtcacgctgcctagactcgccgctgggtggattcgtcgcgatggaggtcggattgtgaacacgccgtccagttaggacgctgtcgtcttcagatccaggggatggggttgctcggcatggcggccaagggcccctcgcccacgcgtcgcctaatgccacagccgcacttggccgtctcctcgctggcggcctccgtggctctgatccactgcttcctcaacacccggagatggttgacgtcgccttcgtcgtctcctcgccagtggcctccaccagccccgcagtccaagacaaagccacgacatgagtcaacccaagtccggtcgcacctacaccgatggccgtacccaacaagttgagctttaagaggaacgtggtgtcattgtcatctgagctcaagggtgtgaggagcaagcttgcttcctaggagcagctgtttgtaagggaatctcaaactagaaagcttgcggagacaaaaacaaggagcatggaagaggaagtaatcaagctgcagaaatgcttacaggacaaggatgggcaactgtgttcatccacaagtagcacggaacaggagaagcaggtgttgcatcagctaagttagctcggatgtagtgcatgtcattgctgaaagagctgaatgagaaggacaactcactcaaagaccatagacttcgagtgaacaatctaggtgagcagcttgatcttctccagaaggatgtacaagcaagggaggtcacacaaatgcaacttaaagatatagttataaggatcgagaccaacatcatggatgaagttgccaaagcttttgaaattgcgatgttgagaggggaaatcagaatattgtctactcactggacgaacaaaaccaagaaccttgaatcacagttaaaaaagcaccagagaactgatcaggagctgaagaagagggttctgaagcttgaattttgtctctggtcctgtcatccactggtgcgttcgccaccgcacctaccgctgttactagctcccttgctcttctcttgctgcgactgggatatagcatcgtggatcttgaacctaggccagaatttaggcaggtctagaaccaccatgatgcctggaacatactcctattttatccatgtatgagccttatgggaactctgcaattactatggatcctcttatacattatgttcgacatggagacaaggtatggtgcataaaaaagtaggaaccacaatgagattgtaatgctgcacatggcacatcaaggtgcgcaagatatgtaccgtagaaattatcgtaaagtgcacacagctgtatgtatagatgtttagaagtggtcgaagttaggcttgctcaaccggggcaatgatttacttagcctgctgaaatgtactataggtagcattcaagtttgtgaccatcatgcaagtacatgtgggtttgttgaaattgagtggtcatcggagaagtagcaaaatgttccctatcgagagctcgtgtactatatttgttttatgaacttaatttttattacaacataacatgtggtcatacatatgttattgctacaatattttttccgttgcaacgcacgggtatttacctagtacccaaaatatataaagtgatactatat

SEQ ID NO: 19849 - DNA, 2369 bp, Zea Mays
gcaacgccggcttccatccacccccgcgcaccgctccccctttccccctttccttgcgcgatgcgagcccacaaatcacgccaatccatggcagcccgcgtgccccgctcccccgcagcgcctggctcccctttccttgcgcgacgcgagatcggcgagattgccctcaacgcgctcgcgtcgcgccgcggatcccccaccctcctcccctctgcacgccgccatcaactcgcaccggccctcgcccgtgatccatcctctcccccgcggcaatgatatggcgtcccccctcaaccgaccattcccgcagcggatccgcaccaacccgttcgcgccggcctctggaagaagaatccaccgaaggcgaaaacgacgacggaggtccggctgactcgtctgggtctttgcaatagcggcaagcgggttggagctccgcttcgggcaggggagaaccacgtggagacctggagtcacgctgcctagactcgccgctgggtggattcgtcgcgatggaggtcggattgtgaacacgccgtccagttaggacgctgtcgtcttcagatccaggggatggggttgctcggcatggcggccaagggcccctcgcccacgcgtcgcctaatgccacagccgcacttggccgtctcctcgctggcggcctccgtggctctgatccactgcttcctcaacacccggagatggttgacgtcgccttcgtcgtctcctcgccagtggcctccaccagccccgcagtccaagacaaagccacgacatgagtcaacccaagtccggtcgcacctacaccgatggccgtacccaacaagttgagctttaagaggaacgtggtgtcattgtcatctgagctcaagggtgtgaggagcaagcttgcttcctaggagcagctgtttgtaagggaatctcaaactagaaagcttgcggagacaaaaacaaggagcatggaagaggaagtaatcaagctgcagaaatgcttacaggacaaggatgggcaactgtgttcatccacaagtagcacggaacaggagaagcaggtgttgcatcagctaagttagctcggatgtagtgcatgtcattgctgaaagagctgaatgagaaggacaactcactcaaagaccatagacttcgagtgaacaatctaggtgagcagcttgatcttctccagaaggatgtacaagcaagggaggtcacacaaatgcaacttaaagatatagttataaggatcgagaccaacatcatggatgaagttgccaaagcttttgaaattgcgatgttgagaggggaaatcagaatattgtctactcactggacgaacaaaaccaagaaccttgaatcacagttaaaaaagcaccagagaactgatcaggagctgaagaagagggttctgaagcttgaattttgtctctggtcctgtcatccactggtgcgttcgccaccgcacctaccgctgttactagctcccttgctcttctcttgctgcgactgggatatagcatcgtggatcttgaacctaggccagaatttaggcaggtctagaaccaccatgatgcctggaacatactcctattttatccatgtatgagccttatgggaactctgcaattactatggatcctcttatacattatgttcgacatggagacaaggtagtatattgagttggaccaataatccttcatatttatttatgtgaattatgttgtactggtgtcctgtccttttgtttgtgctttataatttgtaattcttagctattgatatggtatgatggatgggaggtggctgaaatcgttcagataagtgccaatttgttgttttcttttttaatgaatggttttctatttcagctgatgaaccttttatagttcttttattatatgctgccactgattgctaatagggtgcatgtcttctatttctaggtatggtgcataaaaaagtaggaaccacaatgagattgtaatgctgcacatggcacatcaaggtgcgcaagatatgtaccgtagaaattatcgtaaagtgcacacagctgtatgtatagatgtttagaagtggtcgaagttaggcttgctcaaccggggcaatgatttacttagcctgctgaaatgtactataggtagcattcaagtttgtgaccatcatgcaagtacatgtgggtttgttgaaattgagtggtcatcggagaagtagcaaaatgttccctatcgagagctcgtgtactatatttgttttatgaacttaatttttattacaacataacatgtggtcatacatatgttattgctacaatattttttccgttgcaacgcacgggtatttacctagtacccaaaatatataaagtgatactatat

SEQ ID NO: 19850 - DNA, 1981 bp, Zea Mays
cttccatccacccccgcgcaccgctccccctttccccctttccttgcgcgatgcgagcccacaaatcacgccaatccatggcagcccgcgtgccccgctcccccgcagcgcctggctcccctttccttgcgcgacgcgagatcggcgagattgccctcaacgcgctcgcgtcgcgccgcggatcccccaccctcctcccctctgcacgccgccatcaactcgcaccggccctcgcccgtgatccatcctctcccccgcggcaatgatatggcgtcccccctcaaccgaccattcccgcagcggatccgcaccaacccgttcgcgccggcctctggaagaagaatccaccgaaggcgaaaacgacgacggaggtccggctgactcgtctgggtctttgcaatagcggcaagcgggttggagctccgcttcgggcaggggagaaccacgtggagacctggagtcacgctgcctagactcgccgctgggtggattcgtcgcgatggaggtcggattgtgaacacgccgtccagttaggacgctgtcgtcttcagatccaggggatggggttgctcggcatggcggccaagggcccctcgcccacgcgtcgcctaatgccacagccgcacttggccgtctcctcgctggcggcctccgtggctctgatccactgcttcctcaacacccggagatggttgacgtcgccttcgtcgtctcctcgccagtggcctccaccagccccgcagtccaagacaaagccacgacatgagtcaacccaagtccggtcgcacctacaccgatggccgtacccaacttgagctttaagaggaacgtggtgtcattgtcatctgagctcaagggtgtgaggagcaagcttgcttcctaggagcagctgtttgtaagggaatctcaaactagaaaggttagtatgtaactggtaccttcgaggttgttggtggggtttgtgccgacaaggaaaaaaatttagcagcttgcggagacaaaaacaaggagcatggaagaggaagtaatcaagctgcagaaatgcttacaggacaaggatgggcaactgtgttcatccacaagtagcacggaacagtaccatcatgagttggatgatcttagaacacatctgtcatttactcaagctacaggagaagcaggtgttgcatcagctaagttagctcggatgtagtgcatgtcattgctgaaagagctgaatgagaaggacaactcactcaaagaccatagacttcgagtgaacaatctaggtgagcagcttgatcttctccagaaggatgtacaagcaagggaggtcacacaaatgcaacttaaagatatagttataaggatcgagaccaacatcatggatgaagttgccaaagcttttgaaattgcgatgttgagaggggaaatcagaatattgtctactcactggacgaacaaaaccaagaaccttgaatcacagttaaaaaagcaccagagaactgatcaggagctgaagaagagggttctgaagcttgaattttgtctctggtcctgtcatccactggtatggtgcataaaaaagtaggaaccacaatgagattgtaatgctgcacatggcacatcaaggtgcgcaagatatgtaccgtagaaattatcgtaaagtgcacacagctgtatgtatagatgtttagaagtggtcgaagttaggcttgctcaaccggggcaatgatttacttagcctgctgaaatgtactataggtagcattcaagtttgtgaccatcatgcaagtacatgtgggtttgttgaaattgagtggtcatcggagaagtagcaaaatgttccctatcgagagctcgtgtactatatttgttttatgaacttaatttttattacaacataacatgtggtcatacatatgttattgctacaatattttttccgttgcaacgcacgggtatttacctagtacccaaaatatataaagtgatactatat

SEQ ID NO: 19851 - DNA, 2411 bp, Zea Mays
cttccatccacccccgcgcaccgctccccctttccccctttccttgcgcgatgcgagcccacaaatcacgccaatccatggcagcccgcgtgccccgctcccccgcagcgcctggctcccctttccttgcgcgacgcgagatcggcgagattgccctcaacgcgctcgcgtcgcgccgcggatcccccaccctcctcccctctgcacgccgccatcaactcgcaccggccctcgcccgtgatccatcctctcccccgcggcaatgatatggcgtcccccctcaaccgaccattcccgcagcggatccgcaccaacccgttcgcgccggcctctggaagaagaatccaccgaaggcgaaaacgacgacggaggtccggctgactcgtctgggtctttgcaatagcggcaagcgggttggagctccgcttcgggcaggggagaaccacgtggagacctggagtcacgctgcctagactcgccgctgggtggattcgtcgcgatggaggtcggattgtgaacacgccgtccagttaggacgctgtcgtcttcagatccaggggatggggttgctcggcatggcggccaagggcccctcgcccacgcgtcgcctaatgccacagccgcacttggccgtctcctcgctggcggcctccgtggctctgatccactgcttcctcaacacccggagatggttgacgtcgccttcgtcgtctcctcgccagtggcctccaccagccccgcagtccaagacaaagccacgacatgagtcaacccaagtccggtcgcacctacaccgatggccgtacccaacttgagctttaagaggaacgtggtgtcattgtcatctgagctcaagggtgtgaggagcaagcttgcttcctaggagcagctgtttgtaagggaatctcaaactagaaagcttgcggagacaaaaacaaggagcatggaagaggaagtaatcaagctgcagaaatgcttacaggacaaggatgggcaactgtgttcatccacaagtagcacggaacagtaccatcatgagttggatgatcttagaacacatctgtcatttactcaagctacaggagaagcaggtgttgcatcagctaagttagctcggatgtagtgcatgtcattgctgaaagagctgaatgagaaggacaactcactcaaagaccatagacttcgagtgaacaatctaggtgagcagcttgatcttctccagaaggatgtacaagcaagggaggtcacacaaatgcaacttaaagatatagttataaggatcgagaccaacatcatggatgaagttgccaaagcttttgaaattgcgatgttgagaggggaaatcagaatattgtctactcactggacgaacaaaaccaagaaccttgaatcacagttaaaaaagcaccagagaactgatcaggagctgaagaagagggttctgaagcttgaattttgtctctggtcctgtcatccactggtgcgttcgccaccgcacctaccgctgttactagctcccttgctcttctcttgctgcgactgggatatagcatcgtggatcttgaacctaggccagaatttaggcaggtctagaaccaccatgatgcctggaacatactcctattttatccatgtatgagccttatgggaactctgcaattactatggatcctcttatacattatgttcgacatggagacaaggtagtatattgagttggaccaataatccttcatatttatttatgtgaattatgttgtactggtgtcctgtccttttgtttgtgctttataatttgtaattcttagctattgatatggtatgatggatgggaggtggctgaaatcgttcagataagtgccaatttgttgttttcttttttaatgaatggttttctatttcagctgatgaaccttttatagttcttttattatatgctgccactgattgctaatagggtgcatgtcttctatttctaggtatggtgcataaaaaagtaggaaccacaatgagattgtaatgctgcacatggcacatcaaggtgcgcaagatatgtaccgtagaaattatcgtaaagtgcacacagctgtatgtatagatgtttagaagtggtcgaagttaggcttgctcaaccggggcaatgatttacttagcctgctgaaatgtactataggtagcattcaagtttgtgaccatcatgcaagtacatgtgggtttgttgaaattgagtggtcatcggagaagtagcaaaatgttccctatcgagagctcgtgtactatatttgttttatgaacttaatttttattacaacataacatgtggtcatacatatgttattgctacaatattttttccgttgcaacgcacgggtatttacctagtacccaaaatatataaagtgatactatat

SEQ ID NO: 19852 - DNA, 2471 bp, Zea Mays
gcgcaccgctccccctttccccctttccttgcgcgatgcgagcccacaaatcacgccaatccatggcagcccgcgtgccccgctcccccgcagcgcctggctcccctttccttgcgcgacgcgagatcggcgagattgccctcaacgcgctcgcgtcgcgccgcggatcccccaccctcctcccctctgcacgccgccatcaactcgcaccggccctcgcccgtgatccatcctctcccccgcggcaatgatatggcgtcccccctcaaccgaccattcccgcagcggatccgcaccaacccgttcgcgccggcctctggaagaagaatccaccgaaggcgaaaacgacgacggaggtccggctgactcgtctgggtctttgcaatagcggcaagcgggttggagctccgcttcgggcaggggagaaccacgtggagacctggagtcacgctgcctagactcgccgctgggtggattcgtcgcgatggaggtcggattgtgaacacgccgtccagttaggacgctgtcgtcttcagatccaggggatggggttgctcggcatggcggccaagggcccctcgcccacgcgtcgcctaatgccacagccgcacttggccgtctcctcgctggcggcctccgtggctctgatccactgcttcctcaacacccggagatggttgacgtcgccttcgtcgtctcctcgccagtggcctccaccagccccgcagtccaagacaaagccacgacatgagtcaacccaagtccggtcgcacctacaccgatggccgtacccaacgtgagtcaagccaagtccattcccctcccttgcttcctcaacttgttgtcttgtggtctgctatttgtctcagagaaggtggtgccatcatcatcagttgtgattatgaattatattctaccgatagaagttgagctttaagaggaacgtggtgtcattgtcatctgagctcaagggtgtgaggagcaagcttgcttcctaggagcagctgtttgtaagggaatctcaaactagaaagcttgcggagacaaaaacaaggagcatggaagaggaagtaatcaagctgcagaaatgcttacaggacaaggatgggcaactgtgttcatccacaagtagcacggaacaggagaagcaggtgttgcatcagctaagttagctcggatgtagtgcatgtcattgctgaaagagctgaatgagaaggacaactcactcaaagaccatagacttcgagtgaacaatctaggtgagcagcttgatcttctccagaaggatgtacaagcaagggaggtcacacaaatgcaacttaaagatatagttataaggatcgagaccaacatcatggatgaagttgccaaagcttttgaaattgcgatgttgagaggggaaatcagaatattgtctactcactggacgaacaaaaccaagaaccttgaatcacagttaaaaaagcaccagagaactgatcaggagctgaagaagagggttctgaagcttgaattttgtctctggtcctgtcatccactggtgcgttcgccaccgcacctaccgctgttactagctcccttgctcttctcttgctgcgactgggatatagcatcgtggatcttgaacctaggccagaatttaggcaggtctagaaccaccatgatgcctggaacatactcctattttatccatgtatgagccttatgggaactctgcaattactatggatcctcttatacattatgttcgacatggagacaaggtagtatattgagttggaccaataatccttcatatttatttatgtgaattatgttgtactggtgtcctgtccttttgtttgtgctttataatttgtaattcttagctattgatatggtatgatggatgggaggtggctgaaatcgttcagataagtgccaatttgttgttttcttttttaatgaatggttttctatttcagctgatgaaccttttatagttcttttattatatgctgccactgattgctaatagggtgcatgtcttctatttctaggtatggtgcataaaaaagtaggaaccacaatgagattgtaatgctgcacatggcacatcaaggtgcgcaagatatgtaccgtagaaattatcgtaaagtgcacacagctgtatgtatagatgtttagaagtggtcgaagttaggcttgctcaaccggggcaatgatttacttagcctgctgaaatgtactataggtagcattcaagtttgtgaccatcatgcaagtacatgtgggtttgttgaaattgagtggtcatcggagaagtagcaaaatgttccctatcgagagctcgtgtactatatttgttttatgaacttaatttttattacaacataacatgtggtcatacatatgttattgctacaatattttttccgttgcaacgcacgggtatttacctagtacccaaaatatataaagtgatactatat

SEQ ID NO: 19853 - DNA, 1943 bp, Zea Mays
cctttccttgcgcgatgcgagcccacaaatcacgccaatccatggcagcccgcgtgccccgctcccccgcagcgcctggctcccctttccttgcgcgacgcgagatcggcgagattgccctcaacgcgctcgcgtcgcgccgcggatcccccaccctcctcccctctgcacgccgccatcaactcgcaccggccctcgcccgtgatccatcctctcccccgcggcaatgatatggcgtcccccctcaaccgaccattcccgcagcggatccgcaccaacccgttcgcgccggcctctggaagaagaatccaccgaaggcgaaaacgacgacggaggtccggctgactcgtctgggtctttgcaatagcggcaagcgggttggagctccgcttcgggcaggggagaaccacgtggagacctggagtcacgctgcctagactcgccgctgggtggattcgtcgcgatggaggtcggattgtgaacacgccgtccagttaggacgctgtcgtcttcagatccaggggatggggttgctcggcatggcggccaagggcccctcgcccacgcgtcgcctaatgccacagccgcacttggccgtctcctcgctggcggcctccgtggctctgatccactgcttcctcaacacccggagatggttgacgtcgccttcgtcgtctcctcgccagtggcctccaccagccccgcagtccaagacaaagccacgacatgagtcaacccaagtccggtcgcacctacaccgatggccgtacccaacaagttgagctttaagaggaacgtggtgtcattgtcatctgagctcaagggtgtgaggagcaagcttgcttcctaggagcagctgtttgtaagggaatctcaaactagaaagcttgcggagacaaaaacaaggagcatggaagaggaagtaatcaagctgcagaaatgcttacaggacaaggatgggcaactgtgttcatccacaagtagcacggaacaggagaagcaggtgttgcatcagctaagttagctcggatgtagtgcatgtcattgctgaaagagctgaatgagaaggacaactcactcaaagaccatagacttcgagtgaacaatctaggtgagcagcttgatcttctccagaaggatgtacaagcaagggaggtcacacaaatgcaacttaaagatatagttataaggatcgagaccaacatcatggatgaagttgccaaagcttttgaaattgcgatgttgagaggggaaatcagaatattgtctactcactggacgaacaaaaccaagaaccttgaatcacaggtatgctacatttcttttatttgttcataagaggccccaataacttggttacaaatgctttgtttcctataacgttgaactgaagtatatttacatgagatttattgatatttgatcagttaaaaaagcaccagagaactgatcaggagctgaagaagagggttctgaagcttgaattttgtctctggtcctgtcatccactggtatggtgcataaaaaagtaggaaccacaatgagattgtaatgctgcacatggcacatcaaggtgcgcaagatatgtaccgtagaaattatcgtaaagtgcacacagctgtatgtatagatgtttagaagtggtcgaagttaggcttgctcaaccggggcaatgatttacttagcctgctgaaatgtactataggtagcattcaagtttgtgaccatcatgcaagtacatgtgggtttgttgaaattgagtggtcatcggagaagtagcaaaatgttccctatcgagagctcgtgtactatatttgttttatgaacttaatttttattacaacataacatgtggtcatacatatgttattgctacaatattttttccgttgcaacgcacgggtatttacctagtacccaaaatatataaagtgatactatat

SEQ ID NO: 19854 - DNA, 2796 bp, Zea Mays
cttggccttgctggcctgctcccctcccattattcctctattctcatgaagttaaaggcaactggtaataataggataagtatcaacagccctgtcaatcaagaaactcacaacttaagcaatggttgtcagctcacatgaagttaaaggcaactggtaataaagttaacactacattttttcaaagcaaacatccatgaacagcattgacatatcacgatataatgatgatgtgcctaccctataaatgaccaagctcaacactccatctattgtcctattagttgtcgtttaggacaatgacacggtctccaaaatataactttgaccaatatttttttgttaaaatacaaataaactcttaacacatttatatttttataaaaagtactttttaagacaaatcggtgcatataaatattaggtttcaaaactaaataacaaaatagttatttgtagccaaaattttataagtttgacccgaaccttgtccaaaacaacaactaataggacaccggagggagtagttatcaaccactatagattttgaaactatcaaagaacctttctagttttcaacaagaaaataaagaatggtccacacaaataaattgtttgaaatgaacaagagttagcactgaaaggtagacccgagaaattatatctagtaggggcattccattagttgcttcaaaaattgcaggtcgtcaaaacaaattcatcgcacgaagtcagtagttaactttactatacatggtccatattagaggtaaagaggagagtctggcattaggatacctaaatggttcatcccatctcagttacgtcaatacttgttgtgctccatcaaagtagcacattgaggatatgatacagtacagcatgtttactgatatcctaaggctccccaactcacctaattattaccaaaataaccaccttaagactcatatatcgatcagctagagctaatcaaaagcctagtagatcaaataacatgtaaccacactcaacataaaacaaaataagcatcctatcaagaagaactagcagggaaggagacatgaaaccatgtgtcaccgtaagatgcaatgcaagtgttaggctaacaccaatactagccttagaataggtatcaaaatccctgataacccagtaacccacaactgaaattgtgatcagttcagttaaaattaaaggcaacaggtaacaatgttaactgcattttgaagcaaacgaccgatgagcagcattgacatatcaaggtataatgatgatgtgtctaccttgcatatgaccaagcagaaaatgtttaccaaatggcaaaaattctgacactatcaaagcaacatatcaggtttctgacaagtatgatctacagcatttaattgtctgaaacaaacagcttactgatcttttcagttaatcaagtacaacaactagagttctcaccatgctaaagactgtaaataaaatgtgtgggcataacagatcctgtgcatgcgatagatagatgtccatcatcataaccaggaacaccatccacccagtcccacttgccactgctccccgtctcatcttcctcccacattgcaagcttcccgcgcactcgcttaccagcgaaccacacctttccatcgcctccgaaaaccttgaccttattgttacccccgccagcggtggcaggcatggcgttgccctgtgaagcagcctcgcagaggccagtgaagcagcggtacatattgggcggcatgcgcccagcttcgtcccactccatggtggctagatctagacggagtatgagaacggtggagcacggcgcgtccatggcgaacgaggatctgagcccgccgaccataagaacccggcggccgccggcaccggcaaggagccgaggacgcttgagaacctcgaagacgtctccccacgctgctcgctccacgggcgcccagcccccggtgagcctgtccagcgggcaggagaagagcttccactggctgcggatccgagctggggcaggaggcggtacgttccggcgaaggggttgcagacggcgagcgatttgagcgggtgcgcgggcgaggcggcggaggaagacgtagtggtggactggagggctaggggcgaggtggaggaggaggtctcgacccagaggtagaggagggacgtggatgaggcgacgggggagaaggactggtaggggaggaagtgagcgaaggggaggcggagccaggtgcggcgcgcggggtcgaaggcgtggaggcagccgccgccgtcggggcgcgggtggcggaggaggaggaggcgcagggtgggcagcagcgcgaggagctgcggcgagagggtctcgtggaagaggcgcgagacgaggcggcacacgacggcgtcgcgcagctgcagccggagcagcacgttgtggagcgcgtccggcggcaggtggtggatcggcggcgggagctgcgcttccgcggccgggtcggggcaggagccgccgggcatggcggattggggggtggggttaggtggggaacacacggatgagaccatagcgggggccggcgaggagaagaagaggaggtcggggaaggcgggggacagggtgtcagtttcgcctacgatgctgtgggttccgtttccgtagaatagaacgacctgcccactgtttttcctctacccatgtgggtgctgcgggagacccggatgtcagtgagaaggaggccaagggtagacattacgccttggtgagcggcgcttccgtttccgttcctcatcaaaactagacagaaactaaaaaag

SEQ ID NO: 19855 - DNA, 406 bp, Zea Mays
atttctgcaaacccccgtgagatatgcaggtacttggggtgaagaaaagagaagtgtctataggctcgggttctaaatcgagggaaaaggttgtgctggtacaagatgcgactcttgaaggtgtctacgatgctctgaagaagtcttgtaattgtgcatgagcttgcaaacacaagttagaaaatgaagtgagacgaggctgaattgttcgttcttgctctaagctgtcagaataataatgcatatatgtcaatgcgatgatggtatagggaatgcagatgcaccagacattactgaaccttggtttgtatggctatctgcattgcacccgtggagacacgtacgtgctgacacgttgctcgagtgcaaactcatccgaaccgaacgtgcctacagcacttgcgta

SEQ ID NO: 19856 - DNA, 1326 bp, Zea Mays
gtgcggctgggtcgagggcccaactaagcccataacaccgcgcgagcacacgagctcggaaggcggctccgtccttcggcagagagaaactgcaaagcgagacttcccatccattccactccgcagtggcggcggcggcggcggcgaggtctctacgactttcagatctctccgaagagggcggaggggagggagatgtcgtaatgctgccggagggctgctgacgaagatgcggaagctggtgaagggcctcgccaggcccgagcccaggtggctcagggccatggaagaggcagcaccagtgacatttcctcgcatgatgggaagattaaggggtgtttgtttgggattataatctgtccagattatatagtccaacaacttgaacaccccctaagaagatcgagtttctgatgatgtgtatgttaggaagctaaacaaaaagaacatccggattcgctatgccatgatgcaatcaatggatttgatccaccaccagcacgagcttttgcttggcggtcctggagttgaaagaacaaggagtcagtgaagatgatgtgatggctgtagcagattagcaactggccatggtctcatattgctcctggcctatcatttggaaattcttgatttacaaccgaggaaaaggtttctcagcaagctgatcaagatgtattttgcttgcttcagaatattttgcttacagcttgcattgtgacatgttggcaggatgtcagtttcccttcaacttagctcttgtatgcatcctatgtgcttgtcgtatatccatccctaacttggctcttgtatgcttcctatgtgcttgtcgtatatccatccctaacttggctcttgtatgcttcctatgtgattgtcgtatatccatccctgtgatgaacattttagtaatctgagtgctcattcagttggtgctccctcctcatcactttgatgggaggttgaaggaaccaatatctgtgagtacactgttgagacctggcgttctgagggatatgtcatattggttgctcttaacattcaagacatttttcctttttttctttgctacaagaattttgtttttggggcgggggtgtctatttttggcaaaattttcttgcgttgcttaaggccccgtttggtttgagggactaaagattagtcccttcattttagtctcatttaatccctaaattgccaaaaggtgggactaaaatagagactaaaactgttttagtctctagtccctcaaggggtggctaaataggactaaactatataaattccgtcttttgcccctcctttatttcagttgtactaattgcg

SEQ ID NO: 19857 - DNA, 1305 bp, Zea Mays
ggcccaactaagcccataacaccgcgcgagcacacgagctcggaaggcggctccgtccttcggcagagagaaactgcaaagcgagacttcccatccattccactccgcagtggcggcggcggcggcggcgaggtctctacgactttcagatctctccgaagagggcggaggggagggagatgtcgtaatgctgccggagggctgctgacgaagatgcggaagctggtgaagggcctcgccaggcccgagcccaggtggctcagggccatggaagacaccagtgacatttcctcgcatgatgggaagattaaggggtgtttgtttgggattataatctgtccagattatatagtccaacaacttgaacaccccctaagaagatcgagtttctgatgatgtgtatgttaggaagctaaacaaaaagaacatccggattcgctatgccatgatgcaatcaatggatttgatccaccaccagcacgagcttttgcttggcggtcctggagttgaaagaacaaggagtcagtgaagatgatgtgatggctgtagcagattagcaactggccatggtctcatattgctcctggcctatcatttggaaattcttgatttacaaccgaggaaaaggtttctcagcaagctgatcaagatgtattttgcttgcttcagaatattttgcttacagcttgcattgtgacatgttggcaggatgtcagtttcccttcaacttagctcttgtatgcatcctatgtgcttgtcgtatatccatccctaacttggctcttgtatgcttcctatgtgcttgtcgtatatccatccctaacttggctcttgtatgcttcctatgtgattgtcgtatatccatccctgtgatgaacattttagtaatctgagtgctcattcagttggtgctccctcctcatcactttgatgggaggttgaaggaaccaatatctgtgagtacactgttgagacctggcgttctgagggatatgtcatattggttgctcttaacattcaagacatttttcctttttttctttgctacaagaattttgtttttggggcgggggtgtctatttttggcaaaattttcttgcgttgcttaaggccccgtttggtttgagggactaaagattagtcccttcattttagtctcatttaatccctaaattgccaaaaggtgggactaaaatagagactaaaactgttttagtctctagtccctcaaggggtggctaaataggactaaactatataaattccgtcttttgcccctcctttatttcagttgtactaattgcg

SEQ ID NO: 19858 - DNA, 3511 bp, Zea Mays
ggagattcctctccctccccgtgcgccagcctacagcctaaacgcaccgcaccagacaagaaacaaggggagggagaaccgagagcggcggcgaccggcgagagagagggagggagggacgagatagattcataggtactagcggaggaagcgagtcaagggaaagatgcggactcccgcgatgcgcgttgcctaaaagttccatttcattccttccggcggaggccgggcaatacgctatctctggcgagagagatgccggcgacaggagaaatccacggcctttattagagagaagagatcctattcctacggttctcctcgcatcctgttgcttctgcgtgcggccagacgcgggcacgatatgcaggccgccgccgccgccgccccgtggacgacgaagaccctgccggtgtttgggaaccacctcggcaaccccacgcgcttcacaggcgcctcctcgtccttccacagtacgcccgcctccttcgccaagtggaggaacaaatgggactgccacaagtcattgtcaggggacaaaatttctcctttttgagggcagttctacgcatataatttacattctgacagatttcctgctgccaaaacattgtgcagagcgaaaaaggagcacgaaaggcatccaggaattatgagaggtatgtggttcggcaaaaacgagcagaaggaaagaaggccctaaaggattatcttctctatggaaagtcattgcctcatttacaggatggaagcacaggtagctttgctaactcacatgcaattccgaggttcaaaacgtttaggaaaggacctcaaactcactggtcatcgaattcatggcaaggcgtacacaatcacagaaagaataaaaaggacaaggaaaggttctgcaacttcttccatgatgaccatcatgtgcaccctgatgacatctttgaagctgtcttcggggcacattatggttttacttggtctcaaatatcgtgggaagggtttcacttcagggacaaatcgttcagatttagatggagcggccgtgaatcacgcagagagaaaattccatgtgacagcgaagatgaagaaagcgcggatgagagcagagaaacagccagcgttggttcacatgctcacagggtcatccttggattacaaccatgtggtccactaactctagaagatgttaaaactgcgactcacctgaattacttacggcctgtggatgtggcatgcagtttccgggcatctgcgctgcggtggcaccctgacaggcacccggggtcatcacaggccatggctgaggagaagtttaagctgtgcgtgaatgcgtacaattcactctgcagtgtcctcaaggctgcttaggttgtgtttgctgtcactggaggatgttagcttgttatggtatatcagttttgaagggctcaggggctgaacaatttggcggggaaaccactggcgaccatggatgcagtgcagtgggttgttttgtttcactttttatttcgattgagatagtaaggggaaacttaaatccccggacccctgcctttaaaggctagtttgggagccacaaaaccagagggggttggagggactaaaatctacttcttattcaaaattgaataagaaagtgattttatcccctccaatcccctccgggttttgaactcccaaactagccctaaaccctttgggatctctgccttttctcggggtgaggaagcagtccatcggggtaccatttgaattagacatttatttccttatgtgaggttttcctccctgtatttggcctcccttgctttcaaactagtcccaaaagggataggagcgccactgtttgttgttgtactaacttgtacactagtgtgaattgtaacatttgattcataaaagtggaacaaataaaaatacaaaggggcatgtgaggcatgagaatccttcaaatgggattgctcgctgtggacttgtggtactgttggctattttattttgcagcccctgtctgaaactttgtggctgatccatctgagattctgatgtgccgttctgggtacaggtttgtggagtgtgatgatttggccggggtaaagcgaggctggccggtgtggtcgccatctcgcagctttagtccaaagtacctgtactgatatgtactacaatcgcagcaaatcaaatgaaaacaaatctgctaatgcaacacagtgactgaaagaatgaatgaatgaatgaaaagactgatactcatggtaggctggtagcaggggcaggcaaaagcatcattccgacacaattaggagaggagaatcttgacctctcttttcatttcatagctagtgcagctcctagaagtgctacttataataaagaaaagaaacgatgagagatggatccaggatctcctagacagatcgatccaaaaactagaagcagcagccatagaagggtactagaagcagaggattgcgacggaggcggcgacgcagaatgcgaatgtggtgatgaggaaggcaaagtggatggcccagctccgcctgaacttggcgaggtacgcctcgggcggctcctggtacggcacctcgacgtctgcggccgggacgacatcggccgcggacttgagcatcctgagcctgtcggcggcgagcgcgagcgtgagcttgtggcatcggcgctggtagcggaagccgttgaggcagcggaggtggtgcgcgacggcggcgtagaaggcgaggtgcgcgagcgagagcaggcccgcgggcgcccagaggtggcggcactggaggcgcgcgggcggggaggcggcgacgcccgacaggaccagcgccagcaggaagaagaaggccaggaagaggcgccacagctcctgcttctgcgcgtcggcggcgcgcttcttctccaccgtcttgtcgaagtgcagctgcaccaccgtgcccagcgcctgcgctgccgactcgcgagtcacaacgtctaccacggtggagggtccggcgccgacgccggcgcccgcggtggcgatgtaggccgcctcgcccaccgccatggcctccccgacccgggcgccgtagtgcagatccatggattagcttgccgcgcgcggcagccgacagatgcgcggcacgggaggaagaggatggacggtgtggcctgtgggcgggcgtggacactggacactgagatgcaggcaggaggcagccctgccgttggcacgcaccagctcatcgccatccaccaagggatcttggtctcttctggacagtgcctgtcgctcatgctcatgcttagagatgtcaaggagacctgatcctcgattccccgcgagaagtttcttcattagggaatgatcctaacgaggattgggaagaaactttccctaattcattcctcaacggggatatggacggggaagtactccttatccccgttccctgcggggacctgttaaacttatacgtgacgatgtttttgtgtagtagtttatgataaaaataaataattaccttgtcaagagacc

SEQ ID NO: 19859 - DNA, 1926 bp, Zea Mays
cagcctacagcctaaacgcaccgcaccagacaagaaacaaggggagggagaaccgagagcggcggcgaccggcgagagagagggagggagggacgagatagattcataggtactagcggaggaagcgagtcaagggaaagatgcggactcccgcgatgcgcgttgcctaaaagttccatttcattccttccggcggaggccgggcaatacgctatctctggcgagagagatgccggcgacaggagaaatccacggcctttattagagagaagagatcctattcctacggttctcctcgcatcctgttgcttctgcgtgcggccagacgcgggcacgatatgcaggccgccgccgccgccgccccgtggacgacgaagaccctgccggtgtttgggaaccacctcggcaaccccacgcgcttcacaggcgcctcctcgtccttccacagtacgcccgcctccttcgccaagtggaggaacaaatgggactgccacaagagcgaaaaaggagcacgaaaggcatccagggaaaggcagccttgccagccgaggcgagccggattggctctcttggccaagcaagaacaaaccttgaaagcccagaataacgaggcaatcaataaaggaatcaaacactcagaagtttgctcagccaggcaaaaattatgagaggtatgtggttcggcaaaaacgagcagaaggaaagaaggccctaaaggattatcttctctatggaaagtcattgcctcatttacaggatggaagcacaggtagctttgctaactcacatgcaattccgaggttcaaaacgtttaggaaaggacctcaaactcactggtcatcgaattcatggcaaggcgtacacaatcacagaaagaataaaaaggacaaggaaaggttctgcaacttcttccatgatgaccatcatgtgcaccctgatgacatctttgaagctgtcttcggggcacattatggttttacttggtctcaaatatcgtgggaagggtttcacttcagggacaaatcgttcagatttagatggagcggccgtgaatcacgcagagagaaaattccatgtgacagcgaagatgaagaaagcgcggatgagagcagagaaacagccagcgttggttcacatgctcacagggtcatccttggattacaaccatgtggtccactaactctagaagatgttaaaactgctttccgggcatctgcgctgcggtggcaccctgacaggcacccggggtcatcacaggccatggctgaggagaagtttaagctgtgcgtgaatgcgtacaattcactctgcagtgtcctcaaggctgcttaggttgtgtttgctgtcactggaggatgttagcttgttatggtatatcagttttgaagggctcaggggctgaacaatttggcggggaaaccactggcgaccatggatgcagtgcagtgggttgttttgtttcactttttatttcgattgagatagtaaggggaaacttaaatccccggacccctgcctttaaaggctagtttgggagccacaaaaccagagggggttggagggactaaaatctacttcttattcaaaattgaataagaaagtgattttatcccctccaatcccctccgggttttgaactcccaaactagccctaaaccctttgggatctctgccttttctcggggtgaggaagcagtccatcggggtaccatttgaattagacatttatttccttatgtgaggttttcctccctgtatttggcctcccttgctttcaaactagtcccaaaagggataggagcgccactgtttgttgttgtactaacttgtacactagtgtgaattgtaacatttgattcataaaagtggaacaaataaaaatacaaaggggcatgtgaggcatgagaatccttcaaatgggattgc

SEQ ID NO: 19860 - DNA, 1888 bp, Zea Mays
cagcctacagcctaaacgcaccgcaccagacaagaaacaaggggagggagaaccgagagcggcggcgaccggcgagagagagggagggagggacgagatagattcataggtactagcggaggaagcgagtcaagggaaagatgcggactcccgcgatgcgcgttgcctaaaagttccatttcattccttccggcggaggccgggcaatacgctatctctggcgagagagatgccggcgacaggagaaatccacggcctttattagagagaagagatcctattcctacggttctcctcgcatcctgttgcttctgcgtgcggccagacgcgggcacgatatgcaggccgccgccgccgccgccccgtggacgacgaagaccctgccggtgtttgggaaccacctcggcaaccccacgcgcttcacaggcgcctcctcgtccttccacagtacgcccgcctccttcgccaagtggaggaacaaatgggactgccacaagtcattgtcaggggacaaaatttctcctttttgagggcagttctacgcatataatttacattctgacagatttcctgctgccaaaacattgtgcagagcgaaaaaggagcacgaaaggcatccaggaattatgagaggtatgtggttcggcaaaaacgagcagaaggaaagaaggccctaaaggattatcttctctatggaaagtcattgcctcatttacaggatggaagcacaggtagctttgctaactcacatgcaattccgaggttcaaaacgtttaggaaaggacctcaaactcactggtcatcgaattcatggcaaggcgtacacaatcacagaaagaataaaaaggacaaggaaaggttctgcaacttcttccatgatgaccatcatgtgcaccctgatgacatctttgaagctgtcttcggggcacattatggttttacttggtctcaaatatcgtgggaagggtttcacttcagggacaaatcgttcagatttagatggagcggccgtgaatcacgcagagagaaaattccatgtgacagcgaagatgaagaaagcgcggatgagagcagagaaacagccagcgttggttcacatgctcacagggtcatccttggattacaaccatgtggtccactaactctagaagatgttaaaactgctttccgggcatctgcgctgcggtggcaccctgacaggcacccggggtcatcacaggccatggctgaggagaagtttaagctgtgcgtgaatgcgtacaattcactctgcagtgtcctcaaggctgcttaggttgtgtttgctgtcactggaggatgttagcttgttatggtatatcagttttgaagggctcaggggctgaacaatttggcggggaaaccactggcgaccatggatgcagtgcagtgggttgttttgtttcactttttatttcgattgagatagtaaggggaaacttaaatccccggacccctgcctttaaaggctagtttgggagccacaaaaccagagggggttggagggactaaaatctacttcttattcaaaattgaataagaaagtgattttatcccctccaatcccctccgggttttgaactcccaaactagccctaaaccctttgggatctctgccttttctcggggtgaggaagcagtccatcggggtaccatttgaattagacatttatttccttatgtgaggttttcctccctgtatttggcctcccttgctttcaaactagtcccaaaagggataggagcgccactgtttgttgttgtactaacttgtacactagtgtgaattgtaacatttgattcataaaagtggaacaaataaaaatacaaaggggcatgtgaggcatgagaatccttcaaatgggattgc

SEQ ID NO: 19861 - DNA, 1374 bp, Zea Mays
cagcctacagcctaaacgcaccgcaccagacaagaaacaaggggagggagaaccgagagcggcggcgaccggcgagagagagggagggagggacgagatagattcataggtactagcggaggaagcgagtcaagggaaagatgcggactcccgcgatgcgcgttgcctaaaagttccatttcattccttccggcggaggccgggcaatacgctatctctggcgagagagatgccggcgacaggagaaatccacggcctttattagagagaagagatcctattcctacggttctcctcgcatcctgttgcttctgcgtgcggccagacgcgggcacgatatgcaggccgccgccgccgccgccccgtggacgacgaagaccctgccggtgtttgggaaccacctcggcaaccccacgcgcttcacaggcgcctcctcgtccttccacagtacgcccgcctccttcgccaagtggaggaacaaatgggactgccacaagagcgaaaaaggagcacgaaaggcatccaggaattatgagaggtatgtggttcggcaaaaacgagcagaaggaaagaaggccctaaaggattatcttctctatggaaagtcattgcctcatttacaggatggaagcacaggtagctttgctaactcacatgcaattccgaggttcaaaacgtttaggaaaggacctcaaactcactggtcatcgaattcatggcaaggcgtacacaatcacagaaagaataaaaaggacaaggaaaggttctgcaacttcttccatgatgaccatcatgtgcaccctgatgacatctttgaagctgtcttcggggcacattatggttttacttggtctcaaatatcgtgggaagggtttcacttcagggacaaatcgttcagatttagatggagcggccgtgaatcacgcagagagaaaattccatgtgacagcgaagatgaagaaagcgcggatgagagcagagaaacagccagcgttggttcacatgctcacagggtcatccttggattacaaccatgtggtccactaactctagaagatgttaaaactgctttccgggcatctgcgctgcggtggcaccctgacaggcacccggggtcatcacaggtttgtggagtgtgatgatttggccggggtaaagcgaggctggccggtgtggtcgccatctcgcagctttagtccaaagtacctgtactgatatgtactacaatcgcagcaaatcaaatgaaaacaaatctgctaatgcaacacagtgactgaaagaatgaatgaatgaatgaaaagactgatactcatggtaggctggtagcaggggcaggcaaaagcatcattccgacacaattaggagaggagaatc

SEQ ID NO: 19862 - DNA, 3379 bp, Zea Mays
cagcctacagcctaaacgcaccgcaccagacaagaaacaaggggagggagaaccgagagcggcggcgaccggcgagagagagggagggagggacgagatagattcataggtactagcggaggaagcgagtcaagggaaagatgcggactcccgcgatgcgcgttgcctaaaagttccatttcattccttccggcggaggccgggcaatacgctatctctggcgagagagatgccggcgacaggagaaatccacggcctttattagagagaagagatcctattcctacggttctcctcgcatcctgttgcttctgcgtgcggccagacgcgggcacgatatgcaggccgccgccgccgccgccccgtggacgacgaagaccctgccggtgtttgggaaccacctcggcaaccccacgcgcttcacaggcgcctcctcgtccttccacagtacgcccgcctccttcgccaagtggaggaacaaatgggactgccacaagagcgaaaaaggagcacgaaaggcatccaggaattatgagaggtatgtggttcggcaaaaacgagcagaaggaaagaaggccctaaaggattatcttctctatggaaagtcattgcctcatttacaggatggaagcacaggtagctttgctaactcacatgcaattccgaggttcaaaacgtttaggaaaggacctcaaactcactggtcatcgaattcatggcaaggcgtacacaatcacagaaagaataaaaaggacaaggaaaggttctgcaacttcttccatgatgaccatcatgtgcaccctgatgacatctttgaagctgtcttcggggcacattatggttttacttggtctcaaatatcgtgggaagggtttcacttcagggacaaatcgttcagatttagatggagcggccgtgaatcacgcagagagaaaattccatgtgacagcgaagatgaagaaagcgcggatgagagcagagaaacagccagcgttggttcacatgctcacagggtcatccttggattacaaccatgtggtccactaactctagaagatgttaaaactgctttccgggcatctgcgctgcggtggcaccctgacaggcacccggggtcatcacaggccatggctgaggagaagtttaagctgtgcgtgaatgcgtacaattcactctgcagtgtcctcaaggctgcttaggttgtgtttgctgtcactggaggatgttagcttgttatggtatatcagttttgaagggctcaggggctgaacaatttggcggggaaaccactggcgaccatggatgcagtgcagtgggttgttttgtttcactttttatttcgattgagatagtaaggggaaacttaaatccccggacccctgcctttaaaggctagtttgggagccacaaaaccagagggggttggagggactaaaatctacttcttattcaaaattgaataagaaagtgattttatcccctccaatcccctccgggttttgaactcccaaactagccctaaaccctttgggatctctgccttttctcggggtgaggaagcagtccatcggggtaccatttgaattagacatttatttccttatgtgaggttttcctccctgtatttggcctcccttgctttcaaactagtcccaaaagggataggagcgccactgtttgttgttgtactaacttgtacactagtgtgaattgtaacatttgattcataaaagtggaacaaataaaaatacaaaggggcatgtgaggcatgagaatccttcaaatgggattgctcgctgtggacttgtggtactgttggctattttattttgcagcccctgtctgaaactttgtggctgatccatctgagattctgatgtgccgttctgggtacaggtttgtggagtgtgatgatttggccggggtaaagcgaggctggccggtgtggtcgccatctcgcagctttagtccaaagtacctgtactgatatgtactacaatcgcagcaaatcaaatgaaaacaaatctgctaatgcaacacagtgactgaaagaatgaatgaatgaatgaaaagactgatactcatggtaggctggtagcaggggcaggcaaaagcatcattccgacacaattaggagaggagaatcttgacctctcttttcatttcatagctagtgcagctcctagaagtgctacttataataaagaaaagaaacgatgagagatggatccaggatctcctagacagatcgatccaaaaactagaagcagcagccatagaagggtactagaagcagaggattgcgacggaggcggcgacgcagaatgcgaatgtggtgatgaggaaggcaaagtggatggcccagctccgcctgaacttggcgaggtacgcctcgggcggctcctggtacggcacctcgacgtctgcggccgggacgacatcggccgcggacttgagcatcctgagcctgtcggcggcgagcgcgagcgtgagcttgtggcatcggcgctggtagcggaagccgttgaggcagcggaggtggtgcgcgacggcggcgtagaaggcgaggtgcgcgagcgagagcaggcccgcgggcgcccagaggtggcggcactggaggcgcgcgggcggggaggcggcgacgcccgacaggaccagcgccagcaggaagaagaaggccaggaagaggcgccacagctcctgcttctgcgcgtcggcggcgcgcttcttctccaccgtcttgtcgaagtgcagctgcaccaccgtgcccagcgcctgcgctgccgactcgcgagtcacaacgtctaccacggtggagggtccggcgccgacgccggcgcccgcggtggcgatgtaggccgcctcgcccaccgccatggcctccccgacccgggcgccgtagtgcagatccatggattagcttgccgcgcgcggcagccgacagatgcgcggcacgggaggaagaggatggacggtgtggcctgtgggcgggcgtggacactggacactgagatgcaggcaggaggcagccctgccgttgggtgagtgatgacgttttgggctttttggcagcacgcaccagctcatcgccatccaccaagggatcttggtctcttctggacagtgcctgtcgctcatgctcatgcttagagatgtcaaggagacctgatcctcgattccccgcgagaagtttcttcattagggaatgatcctaacgaggattgggaagaaactttccctaattcattcctcaacggggatatggacggggaagtactccttatccccgttccctgcggggacctgttaaacttatacgtgacgatgtttttgtgtagtagtttatgataaaaataaataattaccttgtcaagagacc

SEQ ID NO: 19863 - DNA, 625 bp, Zea Mays
ccaaacacacccttaatgcctcgtgcaagaaatttactagcatttacaattatgagaggtatgtggttcggcaaaaacgagcagaaggaaagaaggccctaaaggattatcttctctatggaaagtcattgcctcatttacaggatggaagcacaggtagctttgctaactcacatgcaattccgaggttcaaaacgtttaggaaaggacctcaaactcactggtcatcgaattcatggcaaggcgtacacaatcacagaaagaataaaaaggacaaggaaaggttctgcaacttcttccatgatgaccatcatgtgcaccctgatgacatctttgaagctgtcttcggggcacattatggttttacttggtctcaaatatcgtgggaagggtttcacttcagggacaaatcgttcagatttagatggagcggccgtgaatcacgcagagagaaaattccatgtgacagcgaagatgaagaaagcgcggatgagagcagagaaacagccagcgttggttcacatgctcacagggtcatccttggattacaaccatgtggtccactaactctagaagatgttaaaactgcgactcacctgaattacttacggcctgtggatgtggc

SEQ ID NO: 19864 - DNA, 606 bp, Zea Mays
gtatcttttgccagatttccagttacataattatgagaggtatgtggttcggcaaaaacgagcagaaggaaagaaggccctaaaggattatcttctctatggaaagtcattgcctcatttacaggatggaagcacaggtagctttgctaactcacatgcaattccgaggttcaaaacgtttaggaaaggacctcaaactcactggtcatcgaattcatggcaaggcgtacacaatcacagaaagaataaaaaggacaaggaaaggttctgcaacttcttccatgatgaccatcatgtgcaccctgatgacatctttgaagctgtcttcggggcacattatggttttacttggtctcaaatatcgtgggaagggtttcacttcagggacaaatcgttcagatttagatggagcggccgtgaatcacgcagagagaaaattccatgtgacagcgaagatgaagaaagcgcggatgagagcagagaaacagccagcgttggttcacatgctcacagggtcatccttggattacaaccatgtggtccactaactctagaagatgttaaaactgcgactcacctgaattacttacggcctgtggatgtggc

SEQ ID NO: 19865 - DNA, 1572 bp, Zea Mays
aggcggtggagtatgccaccaacttcaactggaaactcgtaagaggaaaaaaaaacacacccgccccgccgtccacctctccgcctcctccggtgccggcgctggagcggccgacccacgcaatctatgggcaacatgacccgctcaaactcgcccgtctcccgccgcatcgtcctctccttcctcgacttccttaactccgtcgaattagctcctggtgttgatcctgaagctctggaagttgctaaggattgtctggagtccatttttagtgttaactcaacagccactggtgacgcaatacaaccaggactgttgtttgagctatttgcttctctcgaagcaaatgaaagagaccaggcaagagctgctttgctgtcacaatctgtttcaaacaagccatctcaaactgcgggtacatcaaatgtcgaagaagactcaaacaaatgcacaacatcaaatagcgacagccaggtggaggatacatttgaactaggagatgaactatttgcaaaattttatgctgcacttgatgaaatcaatttctttaagacatcacctgctggagctgaagatcctggtctactttcaaaagcaacacaatactttgatgatgcattactggcgatgcagaagttgggaaagaaaagggcaagcttagtagacattgcagagtcctttaaatcaagagggaatgaattcatgagatcaaaccaacaccttaaagcggtagagctgtacacctgtgccattgcattgaaccaacaaaatgccatttactattgcaacagggctgctgcatatacccttcttaatatgaacaacaaagctattgaggactgcctgaagtcaattgaaattgaccctcactacagcaaagcatatagccgactcggatctgcttattttgctatggggaattatcacgatgctctgtacaagggatacttgaaagccgccgagcttgatcccagtaatgaaaatgtcaggcagaatattgaggtcacaaaaaagaaactggctgaacaacgagtcccaccagaagagcagaacacacatgcaggccaagctcaaggaccacatccaatatttacaagtggtggtgttcctttcaatctgtttccaccaggtagttctccagttcaagaattcttcgctggctggtcgtccgatgttggtgcaccaccaccaggacattcgataagtataaatttgaatgatatttttggccaagcaaatgtcaatgctagcggtcaaggatcaagtcaaacagggaattcaaataaccatactccatctgcttctttctcaactggtgctgctgttcctcctccctttgccttctcgggctcaggaaatgaaggaacgcaggcacgccaagcttctaatggacttgaaggggaacatggtgaaccaggcatacacagggatgatgacgtccatataaatttggctggacccgagcaggctgcggaggctttgagagctgtgatgcagatgcttgggccacagatgggtcaacatgagggtgcacctagagtaggtgtcatcactggtcccaataaaaggaag

SEQ ID NO: 19866 - DNA, 2212 bp, Zea Mays
aggcggtggagtatgccaccaacttcaactggaaactcgtaagaggaaaaaaaaacacacccgccccgccgtccacctctccgcctcctccggtgccggcgctggagcggccgacccacgcaatctatgggcaacatgacccgctcaaactcgcccgtctcccgccgcatcgtcctctccttcctcgacttccttaactccgtcgaattagctcctggtgttgatcctgaagctctggaagttgctaaggattgtctggagtccatttttagtgttaactcaacagccactggtgacgcaatacaaccaggactgttgtttgagctatttgcttctctcgaagcaaatgaaagagaccaggcaagagctgctttgctgtcacaatctgtttcaaacaagccatctcaaactgcgggtacatcaaatgtcgaagaagactcaaacaaatgcacaacatcaaatagcgacagccaggtggaggatacatttgaactagatcattcaggagatgaactatttgcaaaattttatgctgcacttgatgaaatcaatttctttaagacatcacctgctggagctgaagatcctggtctactttcaaaagcaacacaatactttgatgatgcattactgaagttgggaaagaaaagggcaagcttagtagacattgcagagtcctttaaatcaagagggaatgaattcatgagatcaaaccaacaccttaaagcggtagagctgtacacctgtgccattgcattgaaccaacaaaatgccatttactattgcaacagggctgctgcatatacccttcttaatatgaacaacaaagctattgaggactgcctgaagtcaattgaaattgaccctcactacagcaaagcatatagccgactcggatctgcttattttgctatggggaattatcacgatgctctgtacaagggatacttgaaagccgccgagcttgatcccagtaatgaaaatgtcaggcagaatattgaggtcacaaaaaagaaactggctgaacaacgagtcccaccagaagagcagaacacacatgcaggccaagctcaaggaccacatccaatatttacaagtggtggtgttcctttcaatctgtttccaccaggtagttctccagttcaagaattcttcgctggctggtcgtccgatgttggtgcaccaccaccaggacattcgataagtataaatttgaatgatatttttggccaagcaaatgtcaatgctagcggtcaaggatcaagtcaaacagggaattcaaataaccatactccatctgcttctttctcaactggtgctgctgttcctcctccctttgccttctcgggctcaggaaatgaaggaacgcaggcacgccaagcttctaatggacttgaaggggaacatggtgaaccaggcatacacagggatgatgacgtccatataaatttggctggacccgagcaggctgcggaggctttgagagctgtgatgcagatgcttgggccacagatgggtcaacatgagggtgcacctagaggaccaggttaagcgtgggaggtaggaaaatgtgttacgtggcgtattgtggtctgcaggagtcttatacgggacattattttgtcttctccatcctgacgaagaatggagattctcgtgcgccttattattatagcagcttatctgtgtgctacaacaattccaccgtaatggttaccggcgttcaacttatctgccctgttcatattggcgtaggtgtgtcattagctgtgctggggcctgggtcttgttttgttgagacttgtctcgtaatggctgtcggtccatcatgtgatcttaaattaaagcctttttgcccccctcccctgcttttccgctgcttgtcggttcccagttgatacttggaaaatatttgcaaggttggtgaaaaaaaactgtcactggaatgaagttcatcatcgttattggctggctggcttgctggataaatcataaatgttggaattggtaaatcatatcctcttggactggagggaagttattattacgttactaagctgggtatatctaagatgtttggttcacatgtttataatgtgatgtttataatgtgatgggtaactgataacggtaaatcatgtttgtttaaatccaacgtaatgagataccatgctaagaaatgatgttggtttattcaaatttgttaccgctg

SEQ ID NO: 19867 - DNA, 1987 bp, Zea Mays
aggcggtggagtatgccaccaacttcaactggaaactcgtaagaggaaaaaaaaacacacccgccccgccgtccacctctccgcctcctccggtgccggcgctggagcggccgacccacgcaatctatgggcaacatgacccgctcaaactcgcccgtctcccgccgcatcgtcctctccttcctcgacttccttaactccgtcgaattagctcctggtgttgatcctgaagctctggaagttgctaaggattgtctggagtccatttttagtgttaactcaacagccactggtgacgcaatacaaccaggactgttgtttgagctatttgcttctctcgaagcaaatgaaagagaccaggcaagagctgctttgctgtcacaatctgtttcaaacaagccatctcaaactgcgggtacatcaaatgtcgaagaagactcaaacaaatgcacaacatcaaatagcgacagccaggtggaggatacatttgaactaggagatgaactatttgcaaaattttatgctgcacttgatgaaatcaatttctttaagacatcacctgctggagctgaagatcctggtctactttcaaaagcaacacaatactttgatgatgcattactggcgatgcagaagttgggaaagaaaagggcaagcttagtagacattgcagagtcctttaaatcaagagggaatgaattcatgagatcaaaccaacaccttaaagcggtagagctgtacacctgtgccattgcattgaaccaacaaaatgccatttactattgcaacagggctgctgcatatacccttcttaatatgaacaacaaagctattgaggactgcctgaagtcaattgaaattgaccctcactacagcaaagcatatagccgactcggatctgcttattttgctatggggaattatcacgatgctctgtacaagggatacttgaaagccgccgagcttgatcccagtaatgaaaatgtcaggcagaatattgaggtcacaaaaaagaaactggctgaacaacgagtcccaccagaagagcagaacacacatgcaggccaagctcaaggaccacatccaatatttacaagtggtggtgttcctttcaatctgtttccaccaggaaatgaaggaacgcaggcacgccaagcttctaatggacttgaaggggaacatggtgaaccaggcatacacagggatgatgacgtccatataaatttggctggacccgagcaggctgcggaggctttgagagctgtgatgcagatgcttgggccacagatgggtcaacatgagggtgcacctagaggaccaggttaagcgtgggaggtaggaaaatgtgttacgtggcgtattgtggtctgcaggagtcttatacgggacattattttgtcttctccatcctgacgaagaatggagattctcgtgcgccttattattatagcagcttatctgtgtgctacaacaattccaccgtaatggttaccggcgttcaacttatctgccctgttcatattggcgtaggtgtgtcattagctgtgctggggcctgggtcttgttttgttgagacttgtctcgtaatggctgtcggtccatcatgtgatcttaaattaaagcctttttgcccccctcccctgcttttccgctgcttgtcggttcccagttgatacttggaaaatatttgcaaggttggtgaaaaaaaactgtcactggaatgaagttcatcatcgttattggctggctggcttgctggataaatcataaatgttggaattggtaaatcatatcctcttggactggagggaagttattattacgttactaagctgggtatatctaagatgtttggttcacatgtttataatgtgatgtttataatgtgatgggtaactgataacggtaaatcatgtttgtttaaatccaacgtaatgagataccatgctaagaaatgatgttggtttattcaaatttgttaccgctg

SEQ ID NO: 19868 - DNA, 2057 bp, Zea Mays
aggcggtggagtatgccaccaacttcaactggaaactcgtaagaggaaaaaaaaacacacccgccccgccgtccacctctccgcctcctccggtgccggcgctggagcggccgacccacgcaatctatgggcaacatgacccgctcaaactcgcccgtctcccgccgcatcgtcctctccttcctcgacttccttaactccgtcgaattagctcctggtgttgatcctgaagctctggaagttgctaaggattgtctggagtccatttttagtgttaactcaacagccactggtgacgcaatacaaccaggactgttgtttgagctatttgcttctctcgaagcaaatgaaagagaccaggcaagagctgctttgctgtcacaatctgtttcaaacaagccatctcaaactgcgggtacatcaaatgtcgaagaagactcaaacaaatgcacaacatcaaatagcgacagccaggtggaggatacatttgaactagatcattcaggagatgaactatttgcaaaattttatgctgcacttgatgaaatcaatttctttaagacatcacctgctggagctgaagatcctggtctactttcaaaagcaacacaatactttgatgatgcattactggcgatgcagaagttgggaaagaaaagggcaagcttagtagacattgcagagtcctttaaatcaagagggaatgaattcatgagatcaaaccaacaccttaaagcggtagagctgtacacctgtgccattgcattgaaccaacaaaatgccatttactattgcaacagggctgctgcatatacccttcttaatatgaacaacaaagctattgaggactgcctgaagtcaattgaaattgaccctcactacagcaaagcatatagccgactcggatctgcttattttgctatggggaattatcacgatgctctgtacaagggatacttgaaagccgccgagcttgatcccagtaatgaaaatgtcaggcagaatattgaggtcacaaaaaagaaactggctgaacaacgagtcccaccagaagagcagaacacacatgcaggccaagctcaaggaccacatccaatatttacaagtggtggtgttcctttcaatctgtttccaccaggtagttctccagttcaagaattcttcgctggctggtcgtccgatgttggtgcaccaccaccaggacattcgataagtataaatttgaatgatatttttggccaagcaaatgtcaatgctagcggtcaaggatcaagtcaaacagggaattcaaataaccatactccatctgcttctttctcaactggtgctgctgttcctcctccctttgccttctcgggctcaggaaatgaaggaacgcaggcacgccaagcttctaatggacttgaaggggaacatggtgaaccaggcatacacagggatgatgacgtccatataaatttggctggacccgagcaggctgcggaggctttgagagctgtgatgcagatgcttgggccacagatgggtcaacatgagggtgcacctagaggaccaggttaagcgtgggaggtaggaaaatgtgttacgtggcgtattgtggtctgcaggagtcttatacgggacattattttgtcttctccatcctgacgaagaatggagattctcgtgcgccttattattatagcagcttatctgtgtgctacaacaattccaccgtaatggttaccggcgttcaacttatctgccctgttcatattggcgtaggttggtgaaaaaaaactgtcactggaatgaagttcatcatcgttattggctggctggcttgctggataaatcataaatgttggaattggtaaatcatatcctcttggactggagggaagttattattacgttactaagctgggtatatctaagatgtttggttcacatgtttataatgtgatgtttataatgtgatgggtaactgataacggtaaatcatgtttgtttaaatccaacgtaatgagataccatgctaagaaatgatgttggtttattcaaatttgttaccgctg

SEQ ID NO: 19869 - DNA, 2123 bp, Zea Mays
aggcggtggagtatgccaccaacttcaactggaaactcgtaagaggaaaaaaaaacacacccgccccgccgtccacctctccgcctcctccggtgccggcgctggagcggccgacccacgcaatctatgggcaacatgacccgctcaaactcgcccgtctcccgccgcatcgtcctctccttcctcgacttccttaactccgtcgaattagctcctggtgttgatcctgaagctctggaagttgctaaggattgtctggagtccatttttagtgttaactcaacagccactggtgacgcaatacaaccaggactgttgtttgagctatttgcttctctcgaagcaaatgaaagagaccaggcaagagctgctttgctgtcacaatctgtttcaaacaagccatctcaaactgcgggtacatcaaatgtcgaagaagactcaaacaaatgcacaacatcaaatagcgacagccaggtggaggatacatttgaactaggagatgaactatttgcaaaattttatgctgcacttgatgaaatcaatttctttaagacatcacctgctggagctgaagatcctggtctactttcaaaagcaacacaatactttgatgatgcattactggcgatgcagaagttgggaaagaaaagggcaagcttagtagacattgcagagtcctttaaatcaagagggaatgaattcatgagatcaaaccaacaccttaaagcggtagagctgtacacctgtgccattgcattgaaccaacaaaatgccatttactattgcaacagggctgctgcatatacccttcttaatatgaacaacaaagctattgaggactgcctgaagtcaattgaaattgaccctcactacagcaaagcatatagccgactcggatctgcttattttgctatggggaattatcacgatgctctgtacaagggatacttgaaagccgccgagcttgatcccagtaatgaaaatgtcaggcagaatattgaggtcacaaaaaagaaactggctgaacaacgagtcccaccagaagagcagaacacacatgcaggccaagctcaaggaccacatccaatatttacaagtggtggtgttcctttcaatctgtttccaccaggtagttctccagttcaagaattcttcgctggctggtcgtccgatgttggtgcaccaccaccaggacattcgataagtataaatttgaatgatatttttggccaagcaaatgtcaatgctagcggtcaaggatcaagtcaaacagggaattcaaataaccatactccatctgcttctttctcaactggtgctgctgttcctcctccctttgccttctcgggctcaggaaatgaaggaacgcaggcacgccaagcttctaatggacttgaaggggaacatggtgaaccaggcatacacagggatgatgacgtccatataaatttggctggacccgagcaggctgcggaggctttgagagctgtgatgcagatgcttgggccacagatgggtcaacatgagggtgcacctagaggaccaggttaagcgtgggaggtaggaaaatgtgttacgtggcgtattgtggtctgcaggagtcttatacgggacattattttgtcttctccatcctgacgaagaatggagattctcgtgcgccttattattatagcagcttatctgtgtgctacaacaattccaccgtaatggttaccggcgttcaacttatctgccctgttcatattggcgtaggtgtgtcattagctgtgctggggcctgggtcttgttttgttgagacttgtctcgtaatggctgtcggtccatcatgtgatcttaaattaaagcctttttgcccccctcccctgcttttccgctgcttgtcggttcccagttgatacttggaaaatatttgcaaggttggtgaaaaaaaactgtcactggaatgaagttcatcatcgttattggctggctggcttgctggataaatcataaatgttggaattgtttgggatgacattcgttccggagtgaaagtttggactttggattgtgccagaaagaagggaggaacgaggaacgggtgggtctaggtgagctcactttattttggcggtttgttt

SEQ ID NO: 19870 - DNA, 569 bp, Zea Mays
cagcaacccccctccaatggagctggcgaccgagccctcccaagctcctctctcaccttggcaagctctcccatggcgtctccccctcctctacggcagtaaggtgtaggaccgagagatgatgatcgagccagtgatgtggtggtaacaacaaggtgcagttggtggacgtactgaaggatgatggacttaaccagtggatgctcgccgagcaagtacctcccccaacaaacactatctaagtgttaaattaaaggcaagccccggttttatgcataaccgttatatatgctattttactgcacttaatgtttgtaggcttgtaccgtgcacttaagtgtaggagttgaatgaaaccctagttgcatgaactcaggattccctttgagatggatactagtatgctaggtcgagtagctgctttgctaattagggatctcggtagaagtcgagtgatttttctagcactcgcgcgaggtcaggaattggttgtatccatttttatatcataatgatgttggtctgtggacaacggtccatggggatgcgttgtctacgagacggaaatt

SEQ ID NO: 19871 - DNA, 1767 bp, Zea Mays
tgcccttgttcgaggctaggctcgggcgaggcacgatcgagtcgctcgtacggactgatccctgacttaatcgcacccatcaggcctttgcagctttatgctgatgggggttaccagctgagaattaggcgtcttgagggtacccctaattatggtccccgacacactcgatgttcagtggggtggccgacggtctcaacctgaggtattacctcccctctgtccaactggtagtactagaggtgtggttgtctcacctattggtgagggcaatcctaggttgagcagcacaatcaacctagctgtcgtgctcaacccgatgctggaccacgccctgaacgagctgagtagggcttgtgctgagattgccgagctgcgggctgaccacgtggagcgccatcatcaggaagttggctctcccgcccccgtcgggactcggcacccatatcgctcgcctcacgtgcacaccatgcctacaacaaccctgactgcaggacccagataaacttggaaccatagatcgctagcattggaatttgtttcaaatgattaagttagtagtcttagtcttagttagtcaggatatgtcggtgtttggactaagggtcctaaacaactagtaaataatgtcgcgtggataaagtctagatggtgtgcgagttgacacaagcgatttatcctggttcaggcaatgcaaagccctacttccagtagagggggtgatgcttatattactcgcaccaaggttcctgcagtagggattacaagaacggtggaagaggggaagtccccaagtccctagaactgtttgatgcaagtgccaatatcgaagactaggtggagaactaagtgttcgtctatgtgtcctgcttctctgtccccctggaagaactctactgccctatttatacacgaaggggatgtccgtagtgaagcttggtgtcattgtattcaaaggagagatgtcttggtgccctgcaagccaatgtgaccgtgcactacattattgacttatgcccgctggtttcctgctgagagccgaggcagaggtcgaggggttgtccgtacgcccgagcccctaggggaggggttgtccatactcggggtatgggctaaaggcctgcttacggggtgcgtcagcgtccttgcgtgggatgacgtcgtgattccctgctacgtttatcgaggtcagagacctgctcgggcgaggcggaagtcttctcgaggtgttggacaagccatcccttgacatgtgccattgtcggcggagtgctcgcccgcgggattcgcagcggagcagctggccggggccaagctcgggcaacgcgaagatttcatccgaggccgaactcagcgtcgggcgaggcggagaaatcgcctgatggtcggtctgctctgcctgtcgtattatatgtcatatcgggggatgttaggcggcatgcgcgtactatagcggagacgtaatcatgttgttgcgcctggatgtgattgatgtcttgttagccactgtgcttctgctgccgcggcgtggggtaggtatgcgcattaaatgtgagtgttccctttctgtcttctggcacttttgttttatttgacggggatcagctcgggcgagacagatggagcgatggtgacctcgggcgaggcagagttccgctcgaggtgggagactctcagggagaagcctcggtttaagaggtacctcaattgtttcccctcgagtgtttcaaccttacttctctcagtgcgttctttagaggaataatt

SEQ ID NO: 19872 - DNA, 1503 bp, Zea Mays
cacccatcgggtgtagccctcgaggccccgaaggagtagttgactccttcgtgggcttttgttcttaataggtccagtttgatctttagttgatatgttggaacctttagcgcggggtgcgaggacagccccgggactttgcgtggggcaagtggtcgatcgagggatgtctcgacttttggttcatctgcctgtgacaccccaggtgtctatttcgcgttatgtcgggagatttatcctaatctcggatgctcagtgaaaatttctatctctttatcacatctatcttcattcatcaagttactcatgaatgtttcaccaaatttggaattattcgatctcaagaacaaccaaatttggagcctgttaaaacttttatttctcggagcaaatgcaaattcgaaagtcaatattgtctcataactcttgtccagactcatttatttggactcttaacagttgtgatattatccgatctatgtccgaatccactttctcgatagtcggtctacgtccaaatacttaattcgaatccgcattcttcagcgaaatctctatagtgtcaacctctaattatttattatgcaattcagcttgttatatttatgtcatcatccatctctatctatcaagcgtattctaaagatttcttaaagtttgaaccaaatattcgtgtgaaattataaatcctacgcttacctgagactgctcgattaagtaaaagcaaatttagaaattcaaacaagttatggcaactttcccaaaacactctaaatcaactctacaacaaaagttattaagggttcatgtagagaaaatgccaaggaaatgccgagaaaataccctgattgccttaaaaatatagtttgaagcattataatgatgctaccttgaccaaagtgaaacttttatttatattcaagatatgaggtttgacctttaataaaatttgtagaacatgtgttatacaacaaatattttatttaaaccaaaccttgattcaatctctaagtatctcaaacagtgccatcaagacagaataaaaatcagatttcagaattcgaattcttctaagtctgaaatcagcatcgttcgggtcgacgtctcgcgttcccaaatttttgttgaacaactcaagttttcccaaatataaaagttgttaataactaataggggcacaacatattaaaaggtggcattcatccgattccgtttgacatgctttgacattcagtttttgcgagtttccactgttttctgacacactgacaaaccagttttcgtgggtctataactttctaaccactgcccgaataacctcaatctctataaacgagttgtagattatacataaaggaagatatttcgtgcagtggccaagatccgattccaagaggaagatgccaaaactggacgtccaaagtcatcctgccatcacctgccagcagactgtcctgctctgagctctgcagcaatgccgcccacgccaccaatggttgaagc

SEQ ID NO: 19873 - DNA, 12064 bp, Zea Mays
cacaattcggccttgctaagagtctaatcatgctgaggtaaaaatatcaaagttgtagaacactttttaagctttccagaaaatcctagtttgataattttgaactaatatttgaagagttatgattaaaacaaaaactactgtgctgctgtcctaaatgtgttagaagtgattgattgctctactctattgtgtttgacttgagtgattgcttgcttgttttggttttaagtgaatatgagtaacaatgatagtaactaatataatcaggttatatataagtaaatagtacacatctcactaagttagtgaactaaattggttaaggtctaatacgtagcttagcttaatcaacacttagcaatgcagttatatgttcgaagaaacaaaatgataatgtcttgtctttgcctttctattaatactactaagtaaccaatgtcattaaagtagtacaatttgtaattgtgaataaactatctcctcatgtgtgttctctggggtgtatgcttgcagtagaaggttgtgaatgattgtaaaacccgattaagcaactattcctttttaactaagtctgtctatgtgtaagtcatcgtaaaatttatgcgtacttaactagtttaataataagtaaccaatgaatgataaaagtgaacgtggcgaatgcttgtacttatgatgtcgtgtttgcaatagataattataggaagtgtttgtggttttccagtgatgattgactacgtatgcccgatgacgtatagataactagtgcttgcgtacaattgtcgcagtgtcttacaatttaatgtttagttcgctaccatccattttgggattatcttgtgatatatttcatcatattcatacatatgcatcttgcatctcatttaggaccgagacaggatgatcgtgcaagtgatgtggtgccaaccacaagatgcagtcggtggacgacccaagaaaggatggacttaaccagtggatgctcgccaagcgagcacctcccccaacaaacactacctaagtgttaaattaaaggcaagccccggttatatgcataaccgtttatatatgctattttactacacttaatgtttgtaggcttgtaccgtgcacttaagtgtaggagttgcttgaaaccctagttgcatgaactcaggattccttttgagatggatactagtatgctaggtcgagtagttgctatgctaaatcaggatctcggtagaagtcgagtgatttttctagcactcgcgcgaggtcaggaattggttgtatccattttgataacagaatgatgatggtctgttgacacggatccatggggatgcatggtcaatgagacgaaattggaataaggattaacgtgcggatacctgtgtcaagcttttgaacgtactaagcacatgtcgggaaaaatggtaaccgataaacctagtacctgagtgaagccgggcgcggactttatccctcatgcgacctgagactgggtctcccattctagatatggtgggtacaagtgcggccactgcacggtggcagccagggtcagtggagcattgtatgccaaggcggtgaggcctggacgcgaacggggaatcgatggggacggttgacatgtgtggggacggagtgccctgacatgtcgtgtgtttaggtttaccttgcaaggataaaactcgattcgaatcgtctgcttctcgcagctaatgagactgcttgatccattgtactgcattgagtaataagtggaaatgagatactggcaaaagatgttgattgatataatgtttgatatcatgtatgaatagataggttctcatctagtctaagttattattctagaacttgaaaagctaaaacttgatgttagactcagctagtgcttttggcaaaccaaacccctcagccaaacagctgcatgtctagaggtagaggagtagactcctcacaccgggtaagtctagctgagtattagtatactcagccttgcttgtggcataatttttgcaggtacctccttgatttggttgatggtgtgacttagccttcatccctgccaccgggatagacggttgagtgggttactgtttccgcaggagaggaccaggaggagtagcgtggccaggcttcgccatgatactcggttttctccgttagttatttccgctgcactaaaaactattgttactgcttttgaaactccgataatgtaatcactattaatacttcttaaatttgtggtattatgctttattgtatttctctgtgcctcaccttcgagtgagctagtggtattcgatcctggataagtggctttatcggactagatccgagggactgacgggttattccaatttaagtgcgtcgttgcccctaagacgagatttgggcactcacgctggaataattcgggcggttccgccacactgcccctttgtcgcctctccgcgaggaggaaggggggatgcgtcatgctaccctcgatgggtgacgagcaggacatttccattgagctgttatcaggtaatcccagcggggtccaagctcctttcgattagagtcggctagtggtctaaagacacaccccaaaagatacctgcgggtgatttgcctggtcctaaacccgtttgatggggtctgagggctcgatgcctccctatgatgcgataccattacgaatcgctcccgagggtctcgtatatgtcttaaggtacctcgggtcgcaacccaaactagggccagagccttggcgtactaaggcagttttttcgaaccctgccaagggtcgaaccttcgaccctctaaacaatattctttcttgcccttttccttccaaggtgagtttcctgaggcagaagacaccttcttctggtttgttgcttcctttccgaggtgagttgcctgaggcagatgacgccttcctccgttaactgatgagaggataaaggacgaagcgacagagggtagagggcgtaccttttaatgtgggatacgaaacagcagtttagcgtgttttttaggagggacacgaccatttaatgcgacgagatgtcctgtcggtcagccgaccgtttgaagcgcgcgtgcgcgcgggattcaaaacgatcgctatccagccgttacaactcgcgcctcggtggcttcgcccattcccatataaagtcgactgagacggaggtttcggactgttacctttgccgctttagccttcctactttcatatgtcattttcacctcctgtaaaagagcctttcgtcttcccccgccttcttcctctgttccgatggctgagaagatctgtgttcttcctcctcacgactcgtggctcatatcctccgtcaccaacgaggatttggaggcgctagttgaggtccgtctgctccgcccccgctcctttggcttgtagcctgagtggtttgcgccgagcgatgagcagatgccggacccgcccgcgggctacatagtgagcttcacctcgttccatgaacgggggtttggaattgtggcgagccgcttcatgcgggctctactgcactactatggggtggagctgtaaaacttcaaccccaactccatcgcttaggcggccatcttcaccaccgtctgtgaggggtatctaggattgagccccattgggacctgtggctccgcctcttccgtgtggttcccttctctctacccagcgaggtgaggagggtgcgccacgccattcgggctggcggctgcaagcttcaactatgctcgggccaggcacaattgtacatccctgccaccctcacctcgtcgaataagggatggtagagtcggtggttctacctccgcaacgatgatgggcagctaccagcgttcacgcaccatgtcgtccttggagcgaaagagcgatggaggtggggcctgcctcgggagatccagacccacctgaagtcgctgctggaggccctacggaagctttgggaccatggtctcaccgcggctggagttgtcgcggccttccatcggtggcgggttctgccgctggccggccgtcggctccgcctagacgagatgatgcctgaggcctccgtggaaagcttccatattgcctcagccatcctccccactgacgaacttctccggtgggtgaagggaacgatagggaaggcagattactccgtcgtggtgtcgatgcgccccgagcagggttacgtgtccctggtgagtcccctatttttgtctatgtttttcgggtttttttcctcttctcgtattaccttctcatctgctctataggggttgcgtggcttccggaccgcccgatcctcggcaccagaggaagcggctaccaaggaggtgcgtcggctggcggccgaggcaaagaagaagaagaaggacgaggagaagaagcacgtctgcaagaagatgttgacccgcgatttgctggaaaagcaccgcagagtgcaggagagggaggggcttcctctcgaggcctctcccagcactaaggaggaggaggacgacaacgatgatgagtggatggaggtccgcatgggcttctgccccaaggctgggcctgggtccgctggcctcggtgcgcccctctggtggcacggtcccatccgtgtagtggccgacagtgtccctgtctagggcgcgggcctcagccgagcctgccctcgtccttgcctccatggaagaggcaggggccatggagggggaagttgcccctctccctgaagaagtcgtgggggcgcctacgggtgcgcaggccggaacccctccgcagcctaccgctgcggggaacacggaggaggggctcatcacccccctcatgcagtcattccggaagtggtcccgacaatcgtttcgcccccgatccctgcactggagcttgtagaagagagggccaccaccctgttgcctacgtctgtagagaggcagcaagggctggggagctggaggctgaggccttccgccatgcccgtctccgggcgagttgtcgaaataagagaacgtcttgcgtgtaagacctttctctggctatcgttttgtccttagctccaaatgtcaagccaacacgtcgatctttactgccactaaggcagtgaagcgcagtgctaggacatatgcgggggcctcgccccgccccgccccccgtatgcccaagagacacctcaggagggcgctgaggtggctgtgcctactcctggggcgccagttgagcccgacaccgccacgaccgaggtggctccctcacaccccgcgtcaccgacggaggccatcatcgtctcctctaaggatgaggcgggggcgggtggtgctgcgccggcgtcgcccacggtctccgacctcttacgcgccattctcgacgcccacaaagttgtgctgagctcgggggcagggtgcaccgaggaggccagttccttggagccgcccaggatggtactcgatgggggactgctcggtgacgagatcatcatcgagccccctctctcagagggtagcggtgaccttgttcgcgtcgtgccagacccctcgatatggggagggccgaccctggcgtggatgtccaccgagggtggcccatacttcatcctcgacgacctcgaggagcgggagttctgggatgagttgagggcggtgacccaggagctgatgatgaggtcaatgttcaaatccatcttcgttcgccgcgaacgggatgtctgggccacgttgcagcgccatcgagccatgcttctttgctccaacgagcagctaacatggaggagcgccgaagtgacggacctgacgtctcagtgcgaggagttgaaggaagagggagcggccaaccgcaaggaggtatgtcggctaagggatgaagtccacgacctgaaggtgaaccgtcacgaggaggagctgcggcaggtgaaggagagccttcaggtggtgacggtggagcaggacaaggcttccctccacgtcgactccctctccaagtccctggaggatgaacggtccaagggcctggccttgaacgcccggataggagccctcgagaaggatctggaggctatagcctagacatatcggaccctatcctggaccgtggagcagaaggggaaggagctgagagagttgtccgacacggtggcggacctctttcgggatcttgatgtggtggacgtccctcagattggaccccgcgaccccccatgcaagccctgagtggctacgtacaaggtgagctccgcgacgcgcgtccacctcggggtgaagcgggccctcgccgtggtcgcctcccactatgagatctatatcgagctggtgtgcgagggctatgttctccccgacgagcccgagcttgtcgtcgccgagatgcggaggctaaacgacactgtcgaggggtcggggacattgttggcccgccacttcgaggtcgaggaggatcctcctccccctcaccaatcactatcgtgccccctgccagacctccttcgaccgcatgaacctagtcatcgccctacggggaatttctgaaatatatgctaagaacttagttgactctggatatcaagttttcgttgtttgttgtgtgggtttttcgctgtttggtgcatgttgctttagtcctactacggtgtccccgtcggacgtaagttaccctttagggagggaatagtgagtgaggaaactgtatccctgaggcgtaggtgttcctgtggcttggctatttttccttagtcgggacgtcctccgttcctaagggttttcgcgttacgactagggtgaggctatgaatcgtgttcgtttttcaaaattgtgagaaaaaagacaacacagaggaggggttccccttgctagcccccgagggaggctcggttttgaaagtaaggccgagcctctcttgagagctattctttattaaacatagagaacatagtacaaatacgtttgtatgcctagggataaaaacgacgtagttgttctatattccacgcattatcatagacttctccttcctcgttacagagcttgtatgtttctggcttcagcaccttggcgatgctgaaggatccttcccaaggaggagtgagcttgtggcgccctcggttgtattgctgtaactgaagcaccaggtcgccttcttggaatccttggggtcggacatgcctctcatggtagcgctgaagggactgttggtattttaccgaatgaacgagtgctacgtcccgagcttcctccagctggtcaagcgaatcttcatggctgacttggttgttgcgtttgctatatgcctgtagcctcgggtgtaaggaaaatggaccctgggccatttagctcaataggttttggtgtttgatgatcaacataacctgtggactaatgtatttccaagtgcttgtgtgttgtagttcacaggatgcgaagtggattggactgaggctctgaggatgcaacaccttaaagaagacattataagacccatagaagacattaaaaaagtcatatttaagacactttatacgtgctaagagtccaacacatcaagaagtagaagtgagatacaaagctacaaaacaaaagtgaagttgacaaagttgagaggaagggctgactgaattggaagtgtttcacaaaacaaaagtgaagttggcaaagttgagaggaagagcaaaggcaaggtgctcacaagtgtgaagacttgggatgactcttctagcgaagaagaagccccaaggacgcacagccaccggtcttcatcacgttcatcacggtcatcacacaaatgccttatggcaagaggtaaaatgagtattccatcctctagtgatgatagcagtagtgataatgaaggtgagagaaatccctccatagatgagcttgtgtaagtcgttaaatttttccaggatgtttgcactaagtaaaaggctcaacttaaaactttgaaaaataagttgattagctctcaaaatgattataaaggtttgctagaaaattttgaaacatttgaaaatttgaattgtgagctatcaactaaaattgagcaattagagtctagtgcttcatccacagctaccaatgatggccttattaaaaagaatgaaaacttaaggctaagttatctagctctcaagaagctattgaaatttgctagggaaaatggaaattcttagcatacacaataatgagctaactactaagatagaaaacattggtagcaccctaggagcatctttagttgaaattcttgaaattattaagaaagatgcttctacttcttgttttgatttaattgatgattctaatccctgcaaccaagttctttgagaatattgctgtagaaacatgttcaaatgaggttgcaatggagaattagcaattaaagcaagaggtggctctccttgggaaggctttgtacaacataaaaggcaaagccaaacaaatccgaccttcacaggataacaccactgtgggagtgaacaagcatgtggagggaaaaatcgtgatttgtaggctatgccacaaggaaggccacaagtctttctaatgcaaggcgcagaccgggggtgaacaaaagcaaaagctcaagcaaaagccaacaagcaaaatccccaacacctacatcaacaaggtggacaaaaaggctgctacaccatatttgatcaagaagaaaaagaatagaaaggtgatagaaatcaaggccaataagcgagccaacaaagtaaaaaaggccaaacgcatctgggtgccaaaggaaataatttcaaccatgaaaagcaccaagaaggtttggatcctgaaagggaagtgaggagtccgaaggatgtcgaggaatttggagacttggcaaatttgggatgtatatcatgggatgcatcatagtgaatcaagtattgccaagtgggttagtgtatagtttggacccaaattccccacccatgactaaggtaacttgatttatagtatttcctgtttttagatatgcgtatctattctcttatatctagttgtacctttcatacctagtattacaattggtatttacttttgattagaaatgcatgcatactaagcaaatcatatggtaggattgctcactttcaattcatactcttaagcaaacctacatggtttaaaatgaaaagcacggtacatagcttatttaacattacaaagtaaatgatacatcaattgatattttgaaatactataagtggtataatgcttcaattatgcttcaattggtatcatttaacttatatgcgccaaagcttggattatagataatttgcccctcttgatatcatatcaaagtgcatatctcctacaagtattcaaaacttgtatgcacactttcgggaggatgttactctataatctaagtccttgatactaataccgctttcaagtctattatttgtagtagtctcattgaaaggaaaatggagtccccggagatagacaacaagcttccactgcaaatctacaagaattcttatgtctcacaagcctgccattggtcttcaattggtctgccattgactttcaattggtatatttgagactacatttagtatcatttacatgtcttctccaatatttgattagactatatttcatatctcatacttcccatgttgctataaatgcatatattgttgactcatgttttgttacctatgcataaggtaagttagtctattcaaatcatgtcttgcacctccatttctcacatgctttttcctaagtagaagatcactgtcagggggagtatttcttcgtttctaaagggggagaaaattctttctaaaggagaacactcatttagggggagtaacaatattgtgcttcaattggtattaattgtcaaatcctttatgagggcaagtcttatttgcttcctacatgctttttaatgtcttcctttttggtggttgatgccaaagggggagaaattgtagggaccaaagcaataaaatgttatcaaacaccaaacaccaccaatttaaaactttaattcttcaagtggttttggttctttggtataaaacaggaagtaagtgaattatggagttaggggaggcttaagtccataatctcactctatggggacaatcatccatcctagcaagtaggttgcatattttcattcaaatgtttgttatatttgcttgctttggttgtgttgtcatcaatcgccaaaaagggggagattgtaaggaaaatataccccgagccatttagctcaataggttttggtgtttgatgatcaacataacatgtggactaatgtatttcccaagtgtttgtgtgttgtagttcacaagatgtgaagtggattggactgagagtctgaggatgcaacaccttaaagaagacattataagaaccatagaagacattacaaagtcatattgaagacaatttatacatgctaagagtccaacacatcaagaagtagaagtgagatacaaagctacaaaacaaaagtgaagttgacaaagttgagaggaagggctgactgaattggaagtgtttcacaaaattaaatctactcaaactgacatggttcaactcttagatgtagataattttataagctttccaaaaagtccaagatcatcaaaattggagttcggagctaaatgttatgcccacaatacaaagtcggaattgctgaaaaaaactgcagcagcatatgagatgtccggtgggccaaatttgctcaaactgatcgaagctaactgcatggggcagttgaggcatccaaaattggtagagttgatcgtatattgctgcgaagatgaccatcggaaggtggcggtcttctgctgctgctggtttttaaggtccataacagccatccacctcgcgtgctctgcactttgtgcctatccgttcattgaagccctgtgggtgtcggccaaggagcttctcggcatcaagtctgacgacgatgaggagcagccctcggcgatgacgaagggccccacccccatccaccagttgtctcgcactagctgtgcaacaaacctctacccatctagcgagtgggagcagatgcggaaggacaactacaagacggtcaacgtggaggagagcctccacaagaagtgcttcagcgagcactttcaggacgaggaggtggtcgccgccttctgtgccgttgtcaacgcgaagcagttatctttgtcctcaacagggcctagatcggaaagcacgatgacccgatgaccaggcaatgtgcttccgcaaccgccgctgccatccacacctacctctagagcaacggaggactgctatcgatgtttgaggcgaagcgggacacggccagggacgagcagatcgtgtccatacgcatctcccagagagaaagcaggagataaatgtgtggtccgagttccaaaatcccatgagtgacatcgtctcccgtgcgacgttcaggagcagcttcaatgaagggagaaggatcgtccagttgcaaaacagagcagacacaaaacactgtaaatacgacaaacatgatgcatatcctagtctacagatcaataaagtgcaagacacactttccactaacggtagcagacacctaaaaatactggagaatttgaaagatgacaatggatccgatagtggcattaattttgattataatgatccagacatgccaaacaacatagatgttgatccagacgtttcaacatatcctgatgagattattgctgcaactcccaaaagtactcatggcacacatgatggcatagatacacatgaaagcctcgatgatgacttttgttggttacatctggtaccgagttatcgagcaaccactgtggaggctgcaagcctttggtaaggaaggaaagttgacttgttggaagcctatgaaaaagtggacgcatgggcacctgcaacttgtgttatctaggattatctggtgttcccatacttgaccagatcaattagatactttagggtgacggtgatccctgctgataagctctactactattatgtgagcactgtaggcgtccacttcgcgcggtgcacgttctgccgctccgctcacgcccgtggccgaacgctcccccgcaccttccat

SEQ ID NO: 19874 - DNA, 6970 bp, Zea Mays
atggagggggaagttgcccctctccctgaagaagtcgtgggggcgcctacggagacacctcaggagggcgctgaggtggctgtgcctactcctggggcgccagttgagcccgacaccgccacgaccgaggtggctccctcacaccccgcgtcaccgacggaggccatcatcgtctcctctaaggatgaggcgggggcgggtggtgctgcgccggcgtcgcccacggtctccgacctcttacgcgccattctcgacgcccacaaagttgtgctgagctcgggggcagggtgcaccgaggaggccagttccttggagccgcccaggatggtactcgatgggggactgctcggtgacgagatcatcatcgagccccctctctcagagggtagcggtgaccttgttcgcgtcgtgccagacccctcgatatggggagggccgaccctggcgtggatgtccaccgagggtggcccatacttcatcctcgacgacctcgaggagcgggagttctgggatgagttgagggcggtgacccaggagctgatgatgaggtcaatgttcaaatccatcttcgttcgccgcgaacgggatgtctgggccacgttgcagcgccatcgagccatgcttctttgctccaacgagcagctaacatggaggagcgccgaagtgacggacctgacgtctcagtgcgaggagttgaaggaagagggagcggccaaccgcaaggaggtatgtcggctaagggatgaagtccacgacctgaaggtgaaccgtcacgaggaggagctgcggcaggtgaaggagagccttcaggtggtgacggtggagcaggacaaggcttccctccacgtcgactccctctccaagtccctggaggatgaacggtccaagggcctggccttgaacgcccggataggagccctcgagaaggatctggaggctatagcctagacatatcggaccctatcctggaccgtggagcagaaggggaaggagctgagagagttgtccgacacggtggcggacctctttcgggatcttgatgtggtggacgtccctcagattggaccccgcgaccccccatgcaagccctgagtggctacgtacaaggtgagctccgcgacgcgcgtccacctcggggtgaagcgggccctcgccgtggtcgcctcccactatgagatctatatcgagctggtgtgcgagggctatgttctccccgacgagcccgagcttgtcgtcgccgagatgcggaggctaaacgacactgtcgaggggtcggggacattgttggcccgccacttcgaggtcgaggaggatcctcctccccctcaccaatcactatcgtgccccctgccagacctccttcgaccgcatgaacctagtcatcgccctacggggaatttctgaaatatatgctaagaacttagttgactctggatatcaagttttcgttgtttgttgtgtgggtttttcgctgtttggtgcatgttgctttagtcctactacggtgtccccgtcggacgtaagttaccctttagggagggaatagtgagtgaggaaactgtatccctgaggcgtaggtgttcctgtggcttggctatttttccttagtcgggacgtcctccgttcctaagggttttcgcgttacgactagggtgaggctatgaatcgtgttcgtttttcaaaattgtgagaaaaaagacaacacagaggaggggttccccttgctagcccccgagggaggctcggttttgaaagtaaggccgagcctctcttgagagctattctttattaaacatagagaacatagtacaaatacgtttgtatgcctagggataaaaacgacgtagttgttctatattccacgcattatcatagacttctccttcctcgttacagagcttgtatgtttctggcttcagcaccttggcgatgctgaaggatccttcccaaggaggagtgagcttgtggcgccctcggttgtattgctgtaactgaagcaccaggtcgccttcttggaatccttggggtcggacatgcctctcatggtagcgctgaagggactgttggtattttaccgaatgaacgagtgctacgtcccgagcttcctccagctggtcaagcgaatcttcatggctgacttggttgttgcgtttgctatatgcctgtagcctcgggtgtaaggaaaatggaccctgggccatttagctcaataggttttggtgtttgatgatcaacataacctgtggactaatgtatttccaagtgcttgtgtgttgtagttcacaggatgcgaagtggattggactgaggctctgaggatgcaacaccttaaagaagacattataagacccatagaagacattaaaaaagtcatatttaagacactttatacgtgctaagagtccaacacatcaagaagtagaagtgagatacaaagctacaaaacaaaagtgaagttgacaaagttgagaggaagggctgactgaattggaagtgtttcacaaaacaaaagtgaagttggcaaagttgagaggaagagcaaaggcaaggtgctcacaagtgtgaagacttgggatgactcttctagcgaagaagaagccccaaggacgcacagccaccggtcttcatcacgttcatcacggtcatcacacaaatgccttatggcaagaggtaaaatgagtattccatcctctagtgatgatagcagtagtgataatgaaggtgagagaaatccctccatagatgagcttgtgtaagtcgttaaatttttccaggatgtttgcactaagtaaaaggctcaacttaaaactttgaaaaataagttgattagctctcaaaatgattataaaggtttgctagaaaattttgaaacatttgaaaatttgaattgtgagctatcaactaaaattgagcaattagagtctagtgcttcatccacagctaccaatgatggccttattaaaaagaatgaaaacttaaggctaagttatctagctctcaagaagctattgaaatttgctagggaaaatggaaattcttagcatacacaataatgagctaactactaagatagaaaacattggtagcaccctaggagcatctttagttgaaattcttgaaattattaagaaagatgcttctacttcttgttttgatttaattgatgattctaatccctgcaaccaagttctttgagaatattgctgtagaaacatgttcaaatgaggttgcaatggagaattagcaattaaagcaagaggtggctctccttgggaaggctttgtacaacataaaaggcaaagccaaacaaatccgaccttcacaggataacaccactgtgggagtgaacaagcatgtggagggaaaaatcgtgatttgtaggctatgccacaaggaaggccacaagtctttctaatgcaaggcgcagaccgggggtgaacaaaagcaaaagctcaagcaaaagccaacaagcaaaatccccaacacctacatcaacaaggtggacaaaaaggctgctacaccatatttgatcaagaagaaaaagaatagaaaggtgatagaaatcaaggccaataagcgagccaacaaagtaaaaaaggccaaacgcatctgggtgccaaaggaaataatttcaaccatgaaaagcaccaagaaggtttggatcctgaaagggaagtgaggagtccgaaggatgtcgaggaatttggagacttggcaaatttgggatgtatatcatgggatgcatcatagtgaatcaagtattgccaagtgggttagtgtatagtttggacccaaattccccacccatgactaaggtaacttgatttatagtatttcctgtttttagatatgcgtatctattctcttatatctagttgtacctttcatacctagtattacaattggtatttacttttgattagaaatgcatgcatactaagcaaatcatatggtaggattgctcactttcaattcatactcttaagcaaacctacatggtttaaaatgaaaagcacggtacatagcttatttaacattacaaagtaaatgatacatcaattgatattttgaaatactataagtggtataatgcttcaattatgcttcaattggtatcatttaacttatatgcgccaaagcttggattatagataatttgcccctcttgatatcatatcaaagtgcatatctcctacaagtattcaaaacttgtatgcacactttcgggaggatgttactctataatctaagtccttgatactaataccgctttcaagtctattatttgtagtagtctcattgaaaggaaaatggagtccccggagatagacaacaagcttccactgcaaatctacaagaattcttatgtctcacaagcctgccattggtcttcaattggtctgccattgactttcaattggtatatttgagactacatttagtatcatttacatgtcttctccaatatttgattagactatatttcatatctcatacttcccatgttgctataaatgcatatattgttgactcatgttttgttacctatgcataaggtaagttagtctattcaaatcatgtcttgcacctccatttctcacatgctttttcctaagtagaagatcactgtcagggggagtatttcttcgtttctaaagggggagaaaattctttctaaaggagaacactcatttagggggagtaacaatattgtgcttcaattggtattaattgtcaaatcctttatgagggcaagtcttatttgcttcctacatgctttttaatgtcttcctttttggtggttgatgccaaagggggagaaattgtagggaccaaagcaataaaatgttatcaaacaccaaacaccaccaatttaaaactttaattcttcaagtggttttggttctttggtataaaacaggaagtaagtgaattatggagttaggggaggcttaagtccataatctcactctatggggacaatcatccatcctagcaagtaggttgcatattttcattcaaatgtttgttatatttgcttgctttggttgtgttgtcatcaatcgccaaaaagggggagattgtaaggaaaatataccccgagccatttagctcaataggttttggtgtttgatgatcaacataacatgtggactaatgtatttcccaagtgtttgtgtgttgtagttcacaagatgtgaagtggattggactgagagtctgaggatgcaacaccttaaagaagacattataagaaccatagaagacattacaaagtcatattgaagacaatttatacatgctaagagtccaacacatcaagaagtagaagtgagatacaaagctacaaaacaaaagtgaagttgacaaagttgagaggaagggctgactgaattggaagtgtttcacaaaattaaatctactcaaactgacatggttcaactcttagatgtagataattttataagctttccaaaaagtccaagatcatcaaaattggagttcggagctaaatgttatgcccacaatacaaagtcggaattgctgaaaaaaactgcagcagcatatgagatgtccggtgggccaaatttgctcaaactgatcgaagctaactgcatggggcagttgaggcatccaaaattggtagagttgatcgtatattgctgcgaagatgaccatcggaaggtggcggtcttctgctgctgctggtttttaaggtccataacagccatccacctcgcgtgctctgcactttgtgcctatccgttcattgaagccctgtgggtgtcggccaaggagcttctcggcatcaagtctgacgacgatgaggagcagccctcggcgatgacgaagggccccacccccatccaccagttgtctcgcactagctgtgcaacaaacctctacccatctagcgagtgggagcagatgcggaaggacaactacaagacggtcaacgtggaggagagcctccacaagaagtgcttcagcgagcactttcaggacgaggaggtggtcgccgccttctgtgccgttgtcaacgcgaagcagttatctttgtcctcaacagggcctagatcggaaagcacgatgacccgatgaccaggcaatgtgcttccgcaaccgccgctgccatccacacctacctctagagcaacggaggactgctatcgatgtttgaggcgaagcgggacacggccagggacgagcagatcgtgtccatacgcatctcccagagagaaagcaggagataaatgtgtggtccgagttccaaaatcccatgagtgacatcgtctcccgtgcgacgttcaggagcagcttcaatgaagggagaaggatcgtccagttgcaaaacagagcagacacaaaacactgtaaatacgacaaacatgatgcatatcctagtctacagatcaataaagtgcaagacacactttccactaacggtagcagacacctaaaaatactggagaatttgaaagatgacaatggatccgatagtggcattaattttgattataatgatccagacatgccaaacaacatagatgttgatccagacgtttcaacatatcctgatgagattattgctgcaactcccaaaagtactcatggcacacatgatggcatagatacacatgaaagcctcgatgatgacttttgttggttacatctggtaccgagttatcgagcaaccactgtggaggctgcaagcctttggtaaggaaggaaagttgacttgttggaagcctatgaaaaagtggacgcatgggcacctgcaacttgtgttatctaggattatctggtgttcccatacttgaccagatcaattagatactttagggtgacggtgatccctgctgataagctctactactattatgtgagcactgtaggcgtccacttcgcgcggtgcacgttctgccgctccgctcacgcccgtggccgaacgctcccccgcaccttccat

SEQ ID NO: 19875 - DNA, 780 bp, Zea Mays
gcttctgcctgccatttacatataccatcatttacttacagcaaatgtctcaaaatagagaggctcgggacagctaggcctcacggcaccacgtacaaatacactaatcccacgtgtgccattgttggctctttcgtaccaagatgctaaaaccaacagaagacatgttttcctggtcctgtagtgcaagagacgtgtcataaacaagttacgcatctacctgacaggcagtggcctggcgtcttgtaagagtggcagacaatgatcggcaggttctttgcgacacgggctgctctattttgtttacagtatacaatacagttgattttgcaaactgagggaggtgctgggggagcaaaattttctcagtttggcgctgatttatcaaggttctagcactgttggttcaaggacatgacacaacaatctggtgaaatggaaatggagcacaggctgcgcatgagtctctcaaaaggagctcacacaacactatcatttgaatttggagaagaaaattccaatgtgtttgcagatttgaaagatgacaatggatccgatagtggcattaattttgattataatgatccagacatgccaaacaacatagatgttgatccagacgtttcaacatatcctgatgagattattgctgcaactcccaaaagtactcatggcacacatgatggcatagatacacatgaaagcctcgatgatgacttttgttggttacatctgctgtttcagacacctataggatacaaaatgcaaaagtatagttag

SEQ ID NO: 19876 - DNA, 5133 bp, Zea Mays
tgccgcagagaagaacaacgaaccttgtgttggaatgatgcaagcatatggagcaaggtcattggatgacagttttgcttcattggatgattctgatgtccctgaggctgattggaccaatgatagatcttatagcacacgtgtttgtgacacaaagtcaaaacatggggaaaggaattctgtgacgaggttgcttaaagatgaagaggtcagcgaaaatggtgaactgttgaagagaaagctgaatcgagccccctcccgacttagagtgaagggaaaagcaggtgacagcttgccagaatgtgaaatgacacctttatcgccaacctctggattgagaataggaggtcaggctacaagagacaggaatgtggcgagggttgatgatccaaaggaggcaactgatgtgaacaatagattgtttaacaccatttccaaagaagaatacgaagatcgattcagggattgcattattggcttgaaggatatatctgacatcgttttgaaggcagtgagagccgctgaggctgaggccagatctgcaaatgcacctgatgaagctgtgaaagcagcaggtgacgctgctgccgagcttgtgaaatttgctgctttggaggtttggaaaagcgaaaataacagtgatgcggttgtagtagtggcggagaaagctgcatctgctgttgttgaggctgcattgtcaattagtgtctcacgaagtgcaaatcaagttggtgaagagcgtgcaatggaagaagctgtccaaaccagcgaagaccaggatttggaaaattttgttatcagtgacaaagcacagctattacaacttagagaaaattatagcatccagtgtctacagattttaggagagtatgttgaagctttgggtcctgtactccatgaaaaaggtgttgatgtttgcctcacattattgcaaaggagcatgaaaaaccaggagggatgtgaccactttgctcaactccttgatgtccttaaattggtttgtgcactggctgcccatcgaaaatttgctgcactctttgttgatcgtggtggtattcagaaaatcgtctctatgcctagagttacccagacatatatgggtctttctgcctgcttattcacttttgggtctcttcagtctaccattgaacgtgtttgtgcgctttcctcagacacacttgacagtgttgttgaattagcacttctacttcttgagtgcccacaagatttagctagaaaaaatgtggccatctttttcgctgctgcttttgtgttcaaagctgttctggatctatttgatgcccggaatgggatgcaaaagcttctcgatatcctttgtggatgcgcgtctggaaggtctggtagtaattctggaggagcaggatcctccaatgtaaatcaagggaatgatcggtcgcctgctgaagttttgactgcatcagagaagcaagttgcataccatacatgtgttgctctacggcaatactttagagctcatctccttcagcttgttgattccattcggccaagcaaaagtatccgtagtattgcccggaacacttctagtgcaagagctggctgcaaaccttttgacatcagcaatgaagctatggatgccatcttttgtcagatccaacgggacagaaagttaggccttgctcttgtgagagcttgctggcttgcgttggataaatttgttgcctcaaatggtcacatgactatgctggagttgtgtaagtttcaggcacatggtgatcggtatttgcgtgacttaactcaatatgcaattggagttcttcacatcataacacttatgccacagccacatgtccgcaaatcaatagtgcaggggacattaagcaacaatcgtgctggcatggctgtcttattagacacggtgaaaagtctcgactatattgatcatgaggtgatctgtccagcactgaatgtcctcgtcaatcttgtatgcccacctccttctatcagcaacaaaccattgtcaagttccaatcagcaacctgcagctgcacaagcgcttgcttcagaaagcagagaaaagaactttgaaaaaactatttcagataggaatctacttacaaacctgggtgaatctcgtgaaagatctggtgatggcaaccctgctgaaaagaacaataccttgcatcaaggaactcctagcacacctgttgtgccatctggagtagtcggtgatcgaagaataatgttaggagttggaggtggtggtcctggtcttgctgctcaattggaacaagggtaccgccaagctcgagaagttgtaagagccaataatggcataaagattcttttgcagcttcttggttctcggatggttacacatcctgtggctatagattctattcgagcccttgcctgccgtgttcttcttggcctggctagagacgatacaattgcacatatactgacaaagctccaggtggggaagaaattatcagaactgatccgtgatatcagtgctcagacatctgggggcgatagtggaagatggcaaactgagctgacccaagtggcaattgaactaattggggtattgacgaattctggaaaagaaacaacactagcggcaactgatgctgctgccccagcattgaggcgcattgagcgagctgggatagctgctgctgctcctatctcttaccattcgagggaactgatgcagttgatacatgaacatctccttgggtctggttttgctgccaccgctgctatgctccagaaggaggctggccttgcacctttaccattgacagcagcggtgcttcctgcccatcaagttgctgccctggaagcatcatctgttcagcaacagtggccctctggacatgttcagggatttctctcagataaaataaacacgtcgacatatcaatctgcccagagatcagatcctaagctgccttcatctaagaaaaaggcactggccttctcatccagtttctcacgaagagctcggtctccgcatccaagcaacatccttaaaagtcctgtacctattgcggctgatactggagatgcagaaatgttgaataaagcaccactgtcgctgccacttaagcggaactttgtggatgtgaaggatattagttttgcatcagcatcgaagcgccttgcaataactgatcaaatataccaatcctctgcattccaaactcctgctcctactcgcaaaggtctgtcggtatcagttgattctcctacttcatctcattgcggttggacaaacttcaacaatgcttttactgaaaacttggacaattctcaaggcacaccaggagcattgaccaccacagcacttcctggtgtaaatgaccaacaatcaggaaatttggagcgtatgacacttgactcactggttgtacaatacctgaaacatcaacaccgccaatgtcctgccccagttacaactttgccaccactttctcttttgcaccctcatgtttgccctgagcctagtcgcagccttagtgcaccggcaaacatagctgctcgagtgggaagccgtgagataagtaggcaatttagtgggatccagatacctcgtagggatcgtcattttatatacagtaggttcaagcagtgtcgtgtttgccgtgatgaggcatcactattgacttgcttgacatttcttggagatgcagctcgagttgtggctggtaaccacacaggtgaattaaggatatttgactgcaacacggcaaatctccttgagactcaaacgtgccaccaacatcttgttacaatgatggaatcgacatacactggtggaattgagatgattctcacatccagcctaaatgaggttaagatctgggatgccttctcggtatctgcagggcctttgcacacatttgacgactgcaaatctgctaggtttaaccactatggaacttcatttgctgccctttctactgatacagctcaacgggaggttcagttgtatgatgtacagacgtatactcttgctacacggcttcctgataacactagcagttcaggttcaggccgtggttatgtacaacccattatacatttcagtccttcagatacaatgttgctttggaatggagtcctgtgggatacaaggcaaccaaatcctgttcatcagtttgaccagttcacagattactgtggtggtggattccatccagcaggaaatgaggtgatcctgaattcggaggtgtgggatctgaggaagttcaagcttttgaggagtgtcccttccctggaccagacagtaataaagtttaacggaactggtgatgttatctatgccaccctgaggcgtaatcttgatgacgtgacatcatgcatcaatgctcgtagggtcaggcatcctcttttccctgcattcagcacgattgatgcgatgttcgtggcgtgggcgtggcagaagctgacgccgcaggccgcgcaccagctgctggaacaaattattaaaggatacaccggaaaaaagcacaaaggcctgaagaacgtaccgaaatagataaacacctcatttttcaaaaggactcttccacccctggtaaattttcgagtacactctcccacctcgactaacgtacgtgtgttggtttgcggtttgcacgttcattgtaaaatagcaagcaagatcacaagaggtcaaaaccagacaagaccgttcttttaggacgtatgcaatgcaatacaatagtagtgacgagcgcgagaagatagattaatgaagaatatagctagggcaaagagattcggtccctagtaccgtcgtcaaaaagtatatatgttgcaggaaagtttcagtctatagtagtctacacctggccaaatgagcccggccggtctagcttgtttcgagcagctcccaacaatactcggtcgacatgatcaaatttctctctataaaaaacagtgtagtttcgtatatcccctatttttgacactcatcatactactcatgcatgggcttctatctttcattgttttagattagaaaaaggcttttgttagttgttgtacatatatctattgcttaagagagaaactcctatgtctttgaaaatgcaaatgctagcgcgttctaaagcatgggtcgcctggcaggcaacaacgaac

SEQ ID NO: 19877 - DNA, 6211 bp, Zea Mays
ccgaatcctactccactggtactctgtggagcccatgtcgagcgaagaaggttgtcgagagcaggttgcttgcgccttgcgggctgcgcgccgcctttgccctcccggccttcccttccatcgcgacttgggttgcggactctctttccatcttcttcttcgcttccccccaaaagctcctcctctccatcgattccattccattcgaattagcgatcgcccactacccgcaacctcctaccttaggcagcgccaaaccctaaccttactcgggtacgccaccaatggctgagtcggaggacgccaccgccgccgagcccgggtccgggccgccccacgaggacgaggatgcgctgctcgcccgcgcccacaccgtcatctccaggatcatcgaccgcgagctcgaccccaacccccgcctcctccacaccctcgccaccatgtgcgagctccacgaagccagatatcttgagttacgttcagctgacacaatgttcaatagcacgaacacaaggactgcatttacaattgggaagctggccaatttgctccgggacaatgacgagttttacgagttggtgttttgtaaattcttgtctgacacctcctactctgttgctgtacgagctgccactgctaggttgctcttgagctgtcaccctgcctggacgcctccgtatcctcatgtctttgaagactctatcatagataatattaagaagtgggtaacggaggatcctgaagcgtctaatgaatgcaaatggaagtatctaggaaacaataaacccacagatgctgagatgctgagaacatatgggattggtttgcttgctatggcgttgtgcagcagtgggcaattgatagaggatgtcttgactttgggggtatcagcgaagctcatgcgctatttgcgcataagagtccttggggatgcctcatcttctcagagagatgctaatcatccacaggacaccaagcatccttggggcggagacgacagtaggggtaaatcacgtctgtcccaagatggttctcgattggacggaacaagggttgggtatggaatgttaaccaacccgacagcagagaagaacaacgaaccttgtgttggaatgatgcaagcatatggagcaaggtcattggatgacagttttgcttcattggatgattctgatgtccctgaggctgattggaccaatgatagatcttatagcacacgtgtttgtgacacaaagtcaaaacatggggaaaggaattctgtgacgaggttgcttaaagatgaagaggtcagcgaaaatggtgaactgttgaagagaaagctgaatcgagccccctcccgacttagagtgaagggaaaagcaggtgacagcttgccagaatgtgaaatgacacctttatcgccaacctctggattgagaataggaggtcaggctacaagagacaggaatgtggcgagggttgatgatccaaaggaggcaactgatgtgaacaatagattgtttaacaccatttccaaagaagaatacgaagatcgattcagggattgcattattggcttgaaggatatatctgacatcgttttgaaggcagtgagagccgctgaggctgaggccagatctgcaaatgcacctgatgaagctgtgaaagcagcaggtgacgctgctgccgagcttgtgaaatttgctgctttggaggtttggaaaagcgaaaataacagtgatgcggttgtagtagtggcggagaaagctgcatctgctgttgttgaggctgcattgtcaattagtgtctcacgaagtgcaaatcaagttggtgaagagcgtgcaatggaagaagctgtccaaaccagcgaagaccaggatttggaaaattttgttatcagtgacaaagcacagctattacaacttagagaaaattatagcatccagtgtctacagattttaggagagtatgttgaagctttgggtcctgtactccatgaaaaaggtgttgatgtttgcctcacattattgcaaaggagcatgaaaaaccaggagggatgtgaccactttgctcaactccttgatgtccttaaattggtttgtgcactggctgcccatcgaaaatttgctgcactctttgttgatcgtggtggtattcagaaaatcgtctctatgcctagagttacccagacatatatgggtctttctgcctgcttattcacttttgggtctcttcagtctaccattgaacgtgtttgtgcgctttcctcagacacacttgacagtgttgttgaattagcacttctacttcttgagtgcccacaagatttagctagaaaaaatgtggccatctttttcgctgctgcttttgtgttcaaagctgttctggatctatttgatgcccggaatgggatgcaaaagcttctcgatatcctttgtggatgcgcgtctggaaggtctggtagtaattctggaggagcaggatcctccaatgtaaatcaagggaatgatcggtcgcctgctgaagttttgactgcatcagagaagcaagttgcataccatacatgtgttgctctacggcaatactttagagctcatctccttcagcttgttgattccattcggccaagcaaaagtatccgtagtattgcccggaacacttctagtgcaagagctggctgcaaaccttttgacatcagcaatgaagctatggatgccatcttttgtcagatccaacgggacagaaagttaggccttgctcttgtgagagcttgctggcttgcgttggataaatttgttgcctcaaatggtcacatgactatgctggagttgtgtaagtttcaggcacatggtgatcggtatttgcgtgacttaactcaatatgcaattggagttcttcacatcataacacttatgccacagccacatgtccgcaaatcaatagtgcaggggacattaagcaacaatcgtgctggcatggctgtcttattagacacggtgaaaagtctcgactatattgatcatgaggtgatctgtccagcactgaatgtcctcgtcaatcttgtatgcccacctccttctatcagcaacaaaccattgtcaagttccaatcagcaacctgcagctgcacaagcgcttgcttcagaaagcagagaaaagaactttgaaaaaactatttcagataggaatctacttacaaacctgggtgaatctcgtgaaagatctggtgatggcaaccctgctgaaaagaacaataccttgcatcaaggaactcctagcacacctgttgtgccatctggagtagtcggtgatcgaagaataatgttaggagttggaggtggtggtcctggtcttgctgctcaattggaacaagggtaccgccaagctcgagaagttgtaagagccaataatggcataaagattcttttgcagcttcttggttctcggatggttacacatcctgtggctatagattctattcgagcccttgcctgccgtgttcttcttggcctggctagagacgatacaattgcacatatactgacaaagctccaggtggggaagaaattatcagaactgatccgtgatatcagtgctcagacatctgggggcgatagtggaagatggcaaactgagctgacccaagtggcaattgaactaattggggtattgacgaattctggaaaagaaacaacactagcggcaactgatgctgctgccccagcattgaggcgcattgagcgagctgggatagctgctgctgctcctatctcttaccattcgagggaactgatgcagttgatacatgaacatctccttgggtctggttttgctgccaccgctgctatgctccagaaggaggctggccttgcacctttaccattgacagcagcggtgcttcctgcccatcaagttgctgccctggaagcatcatctgttcagcaacagtggccctctggacatgttcagggatttctctcagataaaataaacacgtcgacatatcaatctgcccagagatcagatcctaagctgccttcatctaagaaaaaggcactggccttctcatccagtttctcacgaagagctcggtctccgcatccaagcaacatccttaaaagtcctgtacctattgcggctgatactggagatgcagaaatgttgaataaagcaccactgtcgctgccacttaagcggaactttgtggatgtgaaggatattagttttgcatcagcatcgaagcgccttgcaataactgatcaaatataccaatcctctgcattccaaactcctgctcctactcgcaaaggtctgtcggtatcagttgattctcctacttcatctcattgcggttggacaaacttcaacaatgcttttactgaaaacttggacaattctcaaggcacaccaggagcattgaccaccacagcacttcctggtgtaaatgaccaacaatcaggaaatttggagcgtatgacacttgactcactggttgtacaatacctgaaacatcaacaccgccaatgtcctgccccagttacaactttgccaccactttctcttttgcaccctcatgtttgccctgagcctagtcgcagccttagtgcaccggcaaacatagctgctcgagtgggaagccgtgagataagtaggcaatttagtgggatccagatacctcgtagggatcgtcattttatatacagtaggttcaagcagtgtcgtgtttgccgtgatgaggcatcactattgacttgcttgacatttcttggagatgcagctcgagttgtggctggtaaccacacaggtgaattaaggatatttgactgcaacacggcaaatctccttgagactcaaacgtgccaccaacatcttgttacaatgatggaatcgacatacactggtggaattgagatgattctcacatccagcctaaatgaggttaagatctgggatgccttctcggtatctgcagggcctttgcacacatttgacgactgcaaatctgctaggtttaaccactatggaacttcatttgctgccctttctactgatacagctcaacgggaggttcagttgtatgatgtacagacgtatactcttgctacacggcttcctgataacactagcagttcaggttcaggccgtggttatgtacaacccattatacatttcagtccttcagatacaatgttgctttggaatggagtcctgtgggatacaaggcaaccaaatcctgttcatcagtttgaccagttcacagattactgtggtggtggattccatccagcaggaaatgaggtgatcctgaattcggaggtgtgggatctgaggaagttcaagcttttgaggagtgtcccttccctggaccagacagtaataaagtttaacggaactggtgatgttatctatgccaccctgaggcgtaatcttgatgacgtgacatcatgcatcaatgctcgtagggtcaggcatcctcttttccctgcattcagcacgattgatgcgatgttcgtggcgtgggcgtggcagaagctgacgccgcaggccgcgcaccagctgctggaacaaattattaaaggatacaccggaaaaaagcacaaaggcctgaagaacgtaccgaaatagataaacacctcatttttcaaaaggactcttccacccctggtaaattttcgagtacactctcccacctcgactaacgtacgtgtgttggtttgcggtttgcacgttcattgtaaaatagcaagcaagatcacaagaggtcaaaaccagacaagaccgttcttttaggacgtatgcaatgcaatacaatagtagtgacgagcgcgagaagatagattaatgaagaatatagctagggcaaagagattcggtccctagtaccgtcgtcaaaaagtatatatgttgcaggaaagtttcagtctatagtagtctacacctggccaaatgagcccggccggtctagcttgtttcgagcagctcccaacaatactcggtcgacatgatcaaatttctctctataaaaaacagtgtagtttcgtatatcccctatttttgacactcatcatactactcatgcatgggcttctatctttcattgttttagattagaaaaaggcttttgttagttgttgtacatatatctattgcttaagagagaaactcctatgtctttgaaaatgcaaatgctagcgcgttctaaagcatgggtcgcctggcaggcaacaacgaac

SEQ ID NO: 19878 - DNA, 6532 bp, Zea Mays
caggttgcttgcgccttgcgggctgcgcgccgcctttgccctcccggccttcccttccatcgcgacttgggttgcggactctctttccatcttcttcttcgcttccccccaaaagctcctcctctccatcgattccattccattcgaattagcgatcgcccactacccgcaacctcctaccttaggcagcgccaaaccctaaccttactcgggtacgccaccaatggctgagtcggaggacgccaccgccgccgagcccgggtccgggccgccccacgaggacgaggatgcgctgctcgcccgcgcccacaccgtcatctccaggatcatcgaccgcgagctcgaccccaacccccgcctcctccacaccctcgccaccatgtgcgagctccacgaagccagatatcttgagttacgttcagctgacacaatgttcaatagcacgaacacaaggactgcatttacaattgggaagctggccaatttgctccgggacaatgacgagttttacgagttggtgttttgtaaattcttgtctgacacctcctactctgttgctgtacgagctgccactgctaggttgctcttgagctgtcaccctgcctggacgcctccgtatcctcatgtctttgaagactctatcatagataatattaagaagtgggtaacggaggatcctgaagcgtctaatgaatgcaaatggaagtatctaggaaacaataaacccacagatgctgagatgctgagaacatatgggattggtttgcttgctatggcgttgtgcagcagtgggcaattgatagaggatgtcttgactttgggggtatcagcgaagctcatgcgctatttgcgcataagagtccttggggatgcctcatcttctcagagagatgctaatcatccacaggacaccaagcatccttggggcggagacgacagtaggggtaaatcacgtctgtcccaagatggttctcgattggacggaacaagggttgggtatggaatgttaaccaacccgacagcagagaagaacaacgaaccttgtgttggaatgatgcaagcatatggagcaaggtcattggatgacagttttgcttcattggatgattctgatgtccctgaggctgattggaccaatgatagatcttatagcacacgtgtttgtgacacaaagtcaaaacatggggaaaggaattctgtgacgaggttgcttaaagatgaagaggtcagcgaaaatggtgaactgttgaagagaaagctgaatcgagccccctcccgacttagagtgaagggaaaagcaggtgacagcttgccagaatgtgaaatgacacctttatcgccaacctctggattgagaataggaggtcaggctacaagagacaggaatgtggcgagggttgatgatccaaaggaggcaactgatgtgaacaatagattgtttaacaccatttccaaagaagaatacgaagatcgattcagggattgcattattggcttgaaggatatatctgacatcgttttgaaggcagtgagagccgctgaggctgaggccagatctgcaaatgcacctgatgaagctgtgaaagcagcaggtgacgctgctgccgagcttgtgaaatttgctgctttggaggtttggaaaagcgaaaataacagtgatgcggttgtagtagtggcggagaaagctgcatctgctgttgttgaggctgcattgtcaattagtgtctcacgaagtgcaaatcaagttggtgaagagcgtgcaatggaagaagctgtccaaaccagcgaagaccaggatttggaaaattttgttatcagtgacaaagcacagctattacaacttagagaaaattatagcatccagtgtctacagattttaggagagtatgttgaagctttgggtcctgtactccatgaaaaaggtgttgatgtttgcctcacattattgcaaaggagcatgaaaaaccaggagggatgtgaccactttgctcaactccttgatgtccttaaattggtttgtgcactggctgcccatcgaaaatttgctgcactctttgttgatcgtggtggtattcagaaaatcgtctctatgcctagagttacccagacatatatgggtctttctgcctgcttattcacttttgggtctcttcagtctaccattgaacgtgtttgtgcgctttcctcagacacacttgacagtgttgttgaattagcacttctacttcttgagtgcccacaagatttagctagaaaaaatgtggccatctttttcgctgctgcttttgtgttcaaagctgttctggatctatttgatgcccggaatgggatgcaaaagcttctcgatatcctttgtggatgcgcgtctggaaggtctggtagtaattctggaggagcaggatcctccaatgtaaatcaagggaatgatcggtcgcctgctgaagttttgactgcatcagagaagcaagttgcataccatacatgtgttgctctacggcaatactttagagctcatctccttcagcttgttgattccattcggccaagcaaaagtatccgtagtattgcccggaacacttctagtgcaagagctggctgcaaaccttttgacatcagcaatgaagctatggatgccatcttttgtcagatccaacgggacagaaagttaggccttgctcttgtgagagcttgctggcttgcgttggataaatttgttgcctcaaatggtcacatgactatgctggagttgtgtaagtttcaggcacatggtgatcggtatttgcgtgacttaactcaatatgcaattggagttcttcacatcataacacttatgccacagccacatgtccgcaaatcaatagtgcaggggacattaagcaacaatcgtgctggcatggctgtcttattagacacggtgaaaagtctcgactatattgatcatgaggtgatctgtccagcactgaatgtcctcgtcaatcttgtatgcccacctccttctatcagcaacaaaccattgtcaagttccaatcagcaacctgcagctgcacaagcgcttgcttcagaaagcagagaaaagaactttgaaaaaactatttcagataggaatctacttacaaacctgggtgaatctcgtgaaagatctggtgatggcaaccctgctgaaaagaacaataccttgcatcaaggaactcctagcacacctgttgtgccatctggagtagtcggtgatcgaagaataatgttaggagttggaggtggtggtcctggtcttgctgctcaattggaacaagggtaccgccaagctcgagaagttgtaagagccaataatggcataaagattcttttgcagcttcttggttctcggatggttacacatcctgtggctatagattctattcgagcccttgcctgccgtgttcttcttggcctggctagagacgatacaattgcacatatactgacaaagctccaggtggggaagaaattatcagaactgatccgtgatatcagtgctcagacatctgggggcgatagtggaagatggcaaactgagctgacccaagtggcaattgaactaattggggtattgacgaattctggaaaagaaacaacactagcggcaactgatgctgctgccccagcattgaggcgcattgagcgagctgggatagctgctgctgctcctatctcttaccattcgagggaactgatgcagttgatacatgaacatctccttgggtctggttttgctgccaccgctgctatgctccagaaggaggctggccttgcacctttaccattgacagcagcggtgcttcctgcccatcaagttgctgccctggaagcatcatctgttcagcaacagtggccctctggacatgttcagggatttctctcagataaaataaacacgtcgacatatcaatctgcccagagatcagatcctaagctgccttcatctaagaaaaaggcactggccttctcatccagtttctcacgaagagctcggtctccgcatccaagcaacatccttaaaagtcctgtacctattgcggctgatactggagatgcagaaatgttgaataaagcaccactgtcgctgccacttaagcggaactttgtggatgtgaaggatattagttttgcatcagcatcgaagcgccttgcaataactgatcaaatataccaatcctctgcattccaaactcctgctcctactcgcaaaggtctgtcggtatcagttgattctcctacttcatctcattgcggttggacaaacttcaacaatgcttttactgaaaacttggacaattctcaaggcacaccaggagcattgaccaccacagcacttcctggtgtaaatgaccaacaatcaggaaatttggagcgtatgacacttgactcactggttgtacaatacctgaaacatcaacaccgccaatgtcctgccccagttacaactttgccaccactttctcttttgcaccctcatgtttgccctgagcctagtcgcagccttagtgcaccggcaaacatagctgctcgagtgggaagccgtgagataagtaggcaatttagtgggatccagatacctcgtagggatcgtcattttatatacagtaggttcaagcagtgtcgtgtttgccgtgatgaggcatcactattgacttgcttgacatttcttggagatgcagctcgagttgtggctggtaaccacacaggtgaattaaggatatttgactgcaacacggcaaatctccttgagactcaaacgtgccaccaacatcttgttacaatgatggaatcgacatacactggtggaattgagatgattctcacatccagcctaaatgaggttaagatctgggatgccttctcggtatctgcagggcctttgcacacatttgacgactgcaaatctgctaggtttaaccactatggaacttcatttgctgccctttctactgatacagctcaacgggaggttcagttgtatgatgtacagacgtatactcttgctacacggcttcctgataacactagcagttcaggttcaggccgtggttatgtacaacccattatacatttcagtccttcagatacaatgttgctttggaatggagtcctgtgggatacaaggcaaccaaatcctgttcatcagtttgaccagttcacagattactgtggtggtggattccatccagcaggaaatgaggtgatcctgaattcggaggtgtgggatctgaggaagttcaagcttttgaggagtgtcccttccctggaccagacagtaataaagtttaacggaactggtgatgttatctatgccaccctgaggcgtaatcttgatgacgtgacatcatgcatcaatgctcgtagggtcaggcatcctcttttccctgcattcagcacgattgatgcggtgacttactcggatattgcaaccgtccaaatggaccgctgtttggcaggaagcgaataactgatgatgattccgatccagaggacgcaggtgaaactgatgatgactccgatgacgacgacgacgactccgatgacggtgttcttgcgccggtgctggaagggggtacagattctgaagatatcagtagcagcagcagcgatgacggtgatgaagatggtggtgacgatgatatacccagttcggatggcattgaagatgaccggttcattgatgagagacgacgggagttcatgatggatctttttggtgacggttgggacgacgatgaggcttatatgatgggatcctttagcagtggcgacgaggagggttggatcatatgttcgtggcgtgggcgtggcagaagctgacgccgcaggccgcgcaccagctgctggaacaaattattaaaggatacaccggaaaaaagcacaaaggcctgaagaacgtaccgaaatagataaacacctcatttttcaaaaggactcttccacccctggtaaattttcgagtacactctcccacctcgactaacgtacgtgtgttggtttgcggtttgcacgttcattgtaaaatagcaagcaagatcacaagaggtcaaaaccagacaagaccgttcttttaggacgtatgcaatgcaatacaatagtagtgacgagcgcgagaagatagattaatgaagaatatagctagggcaaagagattcggtccctagtaccgtcgtcaaaaagtatatatgttgcaggaaagtttcagtctatagtagtctacacctggccaaatgagcccggccggtctagcttgtttcgagcagctcccaacaatactcggtcgacatgatcaaatttctctctataaaaaacagtgtagtttcgtatatcccctatttttgacactcatcatactactcatgcatgggcttctatctttcattgttttagattagaaaaaggcttttgttagttgttgtacatatatctattgcttaagagagaaactcctatgtctttgaaaatgcaaatgctagcgcgttctaaagcatgggtcgcctggcaggcaacaacgaac

SEQ ID NO: 19879 - DNA, 6669 bp, Zea Mays
cccggccttcccttccatcgcgacttgggttgcggactctctttccatcttcttcttcgcttccccccaaaagctcctcctctccatcgattccattccattcgaattagcgatcgcccactacccgcaacctcctaccttaggcagcgccaaaccctaaccttactcgggtacgccaccaatggctgagtcggaggacgccaccgccgccgagcccgggtccgggccgccccacgaggacgaggatgcgctgctcgcccgcgcccacaccgtcatctccaggatcatcgaccgcgagctcgaccccaacccccgcctcctccacaccctcgccaccatgtgcgagctccacgaagccagatatcttgagttacgttcagctgacacaatgttcaatagcacgaacacaaggactgcatttacaattgggaagctggccaatttgctccgggacaatgacgagttttacgagttggtgttttgtaaattcttgtctgacacctcctactctgttgctgtacgagctgccactgctaggttgctcttgagctgtcaccctgcctggacgcctccgtatcctcatgtctttgaagactctatcatagataatattaagaagtgggtaacggaggatcctgaagcgtctaatgaatgcaaatggaagtatctaggaaacaataaacccacagatgctgagatgctgagaacatatgggattggtttgcttgctatggcgttgtgcagcagtgggcaattgatagaggatgtcttgactttgggggtatcagcgaagctcatgcgctatttgcgcataagagtccttggggatgcctcatcttctcagagagatgctaatcatccacaggacaccaagcatccttggggcggagacgacagtaggggtaaatcacgtctgtcccaagatggttctcgattggacggaacaagggttgggtatggaatgttaaccaacccgacagcagagaagaacaacgaaccttgtgttggaatgatgcaagcatatggagcaaggtcattggatgacagttttgcttcattggatgattctgatgtccctgaggctgattggaccaatgatagatcttatagcacacgtgtttgtgacacaaagtcaaaacatggggaaaggaattctgtgacgaggttgcttaaagatgaagaggtcagcgaaaatggtgaactgttgaagagaaagctgaatcgagccccctcccgacttagagtgaagggaaaagcaggtgacagcttgccagaatgtgaaatgacacctttatcgccaacctctggattgagaataggaggtcaggctacaagagacaggaatgtggcgagggttgatgatccaaaggaggcaactgatgtgaacaatagattgtttaacaccatttccaaagaagaatacgaagatcgattcagggattgcattattggcttgaaggatatatctgacatcgttttgaaggcagtgagagccgctgaggctgaggccagatctgcaaatgcacctgatgaagctgtgaaagcagcaggtgacgctgctgccgagcttgtgaaatttgctgctttggaggtttggaaaagcgaaaataacagtgatgcggttgtagtagtggcggagaaagctgcatctgctgttgttgaggctgcattgtcaattagtgtctcacgaagtgcaaatcaagttggtgaagagcgtgcaatggaagaagctgtccaaaccagcgaagaccaggatttggaaaattttgttatcagtgacaaagcacagctattacaacttagagaaaattatagcatccagtgtctacagattttaggagagtatgttgaagctttgggtcctgtactccatgaaaaaggtgttgatgtttgcctcacattattgcaaaggagcatgaaaaaccaggagggatgtgaccactttgctcaactccttgatgtccttaaattggtttgtgcactggctgcccatcgaaaatttgctgcactctttgttgatcgtggtggtattcagaaaatcgtctctatgcctagagttacccagacatatatgggtctttctgcctgcttattcacttttgggtctcttcagtctaccattgaacgtgtttgtgcgctttcctcagacacacttgacagtgttgttgaattagcacttctacttcttgagtgcccacaagatttagctagaaaaaatgtggccatctttttcgctgctgcttttgtgttcaaagctgttctggatctatttgatgcccggaatgggatgcaaaagcttctcgatatcctttgtggatgcgcgtctggaaggtctggtagtaattctggaggagcaggatcctccaatgtaaatcaagggaatgatcggtcgcctgctgaagttttgactgcatcagagaagcaagttgcataccatacatgtgttgctctacggcaatactttagagctcatctccttcagcttgttgattccattcggccaagcaaaagtatccgtagtattgcccggaacacttctagtgcaagagctggctgcaaaccttttgacatcagcaatgaagctatggatgccatcttttgtcagatccaacgggacagaaagttaggccttgctcttgtgagagcttgctggcttgcgttggataaatttgttgcctcaaatggtcacatgactatgctggagttgtgtaagtttcaggcacatggtgatcggtatttgcgtgacttaactcaatatgcaattggagttcttcacatcataacacttatgccacagccacatgtccgcaaatcaatagtgcaggggacattaagcaacaatcgtgctggcatggctgtcttattagacacggtgaaaagtctcgactatattgatcatgaggtgatctgtccagcactgaatgtcctcgtcaatcttgtatgcccacctccttctatcagcaacaaaccattgtcaagttccaatcagcaacctgcagctgcacaagcgcttgcttcagaaagcagagaaaagaactttgaaaaaactatttcagataggaatctacttacaaacctgggtgaatctcgtgaaagatctggtgatggcaaccctgctgaaaagaacaataccttgcatcaaggaactcctagcacacctgttgtgccatctggagtagtcggtgatcgaagaataatgttaggagttggaggtggtggtcctggtcttgctgctcaattggaacaagggtaccgccaagctcgagaagttgtaagagccaataatggcataaagattcttttgcagcttcttggttctcggatggttacacatcctgtggctatagattctattcgagcccttgcctgccgtgttcttcttggcctggctagagacgatacaattgcacatatactgacaaagctccaggtggggaagaaattatcagaactgatccgtgatatcagtgctcagacatctgggggcgatagtggaagatggcaaactgagctgacccaagtggcaattgaactaattggggtattgacgaattctggaaaagaaacaacactagcggcaactgatgctgctgccccagcattgaggcgcattgagcgagctgggatagctgctgctgctcctatctcttaccattcgagggaactgatgcagttgatacatgaacatctccttgggtctggttttgctgccaccgctgctatgctccagaaggaggctggccttgcacctttaccattgacagcagcggtgcttcctgcccatcaagttgctgccctggaagcatcatctgttcagcaacagtggccctctggacatgttcagggatttctctcagataaaataaacacgtcgacatatcaatctgcccagagatcagatcctaagctgccttcatctaagaaaaaggcactggccttctcatccagtttctcacgaagagctcggtctccgcatccaagcaacatccttaaaagtcctgtacctattgcggctgatactggagatgcagaaatgttgaataaagcaccactgtcgctgccacttaagcggaactttgtggatgtgaaggatattagttttgcatcagcatcgaagcgccttgcaataactgatcaaatataccaatcctctgcattccaaactcctgctcctactcgcaaaggtctgtcggtatcagttgattctcctacttcatctcattgcggttggacaaacttcaacaatgcttttactgaaaacttggacaattctcaaggcacaccaggagcattgaccaccacagcacttcctggtgtaaatgaccaacaatcaggaaatttggagcgtatgacacttgactcactggttgtacaatacctgaaacatcaacaccgccaatgtcctgccccagttacaactttgccaccactttctcttttgcaccctcatgtttgccctgagcctagtcgcagccttagtgcaccggcaaacatagctgctcgagtgggaagccgtgagataagtaggcaatttagtgggatccagatacctcgtagggatcgtcattttatatacagtaggttcaagcagtgtcgtgtttgccgtgatgaggcatcactattgacttgcttgacatttcttggagatgcagctcgagttgtggctggtaaccacacaggtgaattaaggatatttgactgcaacacggcaaatctccttgagactcaaacgtgccaccaacatcttgttacaatgatggaatcgacatacactggtggaattgagatgattctcacatccagcctaaatgaggttaagatctgggatgccttctcggtatctgcagggcctttgcacacatttgacgactgcaaatctgctaggtttaaccactatggaacttcatttgctgccctttctactgatacagctcaacgggaggttcagttgtatgatgtacagacgtatactcttgctacacggcttcctgataacactagcagttcaggttcaggccgtggttatgtacaacccattatacatttcagtccttcagatacaatgttgctttggaatggagtcctgtgggatacaaggcaaccaaatcctgttcatcagtttgaccagttcacagattactgtggtggtggattccatccagcaggaaatgaggtgatcctgaattcggaggtgtgggatctgaggaagttcaagcttttgaggagtgtcccttccctggaccagacagtaataaagtttaacggaactggtgatgttatctatgccaccctgaggcgtaatcttgatgacgtgacatcatgcatcaatgctcgtagggtcaggcatcctcttttccctgcattcagcacgattgatgcggtgacttactcggatattgcaaccgtccaaatggaccgctgtgtacttgatcttgccactgagtccaatgattctcttattggggtggttgctatggacgatcaccaggagcttttctcttctgctcgcttgttcgaagttggcaggaagcgaataactgatgatgattccgatccagaggacgcaggtgaaactgatgatgactccgatgacgacgacgacgactccgatgacggtgttcttgcgccggtgctggaagggggtacagattctgaagatatcagtagcagcagcagcgatgacggtgatgaagatggtggtgacgatgatatacccagttcggatggcattgaagatgaccggttcattgatgagagacgacgggagttcatgatggatctttttggtgacggttgggacgacgatgaggcttatatgatgggatcctttagcagtggcgacgaggagggttggatcatatgttcgtggcgtgggcgtggcagaagctgacgccgcaggccgcgcaccagctgctggaacaagtactcgtggaaccgcccggcctggcagatgcgctccagcagcttcccgcctgccgccgcctactccatcaggatcgccaagattattaaaggatacaccggaaaaaagcacaaaggcctgaagaacgtaccgaaatagataaacacctcatttttcaaaaggactcttccacccctggtaaattttcgagtacactctcccacctcgactaacgtacgtgtgttggtttgcggtttgcacgttcattgtaaaatagcaagcaagatcacaagaggtcaaaaccagacaagaccgttcttttaggacgtatgcaatgcaatacaatagtagtgacgagcgcgagaagatagattaatgaagaatatagctagggcaaagagattcggtccctagtaccgtcgtcaaaaagtatatatgttgcaggaaagtttcagtctatagtagtctacacctggccaaatgagcccggccggtctagcttgtttcgagcagctcccaacaatactcggtcgacatgatcaaatttctctctataaaaaacagtgtagtttcgtatatcccctatttttgacactcatcatactactcatgcatgggcttctatctttcattgttttagattagaaaaaggcttttgttagttgttgtacatatatctattgcttaagagagaaactcctatgtctttgaaaatgcaaatgctagcgcgttctaaagcatgggtcgcctggcaggcaacaacgaac

SEQ ID NO: 19880 - DNA, 6634 bp, Zea Mays
cccggccttcccttccatcgcgacttgggttgcggactctctttccatcttcttcttcgcttccccccaaaagctcctcctctccatcgattccattccattcgaattagcgatcgcccactacccgcaacctcctaccttaggcagcgccaaaccctaaccttactcgggtacgccaccaatggctgagtcggaggacgccaccgccgccgagcccgggtccgggccgccccacgaggacgaggatgcgctgctcgcccgcgcccacaccgtcatctccaggatcatcgaccgcgagctcgaccccaacccccgcctcctccacaccctcgccaccatgtgcgagctccacgaagccagatatcttgagttacgttcagctgacacaatgttcaatagcacgaacacaaggactgcatttacaattgggaagctggccaatttgctccgggacaatgacgagttttacgagttggtgttttgtaaattcttgtctgacacctcctactctgttgctgtacgagctgccactgctaggttgctcttgagctgtcaccctgcctggacgcctccgtatcctcatgtctttgaagactctatcatagataatattaagaagtgggtaacggaggatcctgaagcgtctaatgaatgcaaatggaagtatctaggaaacaataaacccacagatgctgagatgctgagaacatatgggattggtttgcttgctatggcgttgtgcagcagtgggcaattgatagaggatgtcttgactttgggggtatcagcgaagctcatgcgctatttgcgcataagagtccttggggatgcctcatcttctcagagagatgctaatcatccacaggacaccaagcatccttggggcggagacgacagtaggggtaaatcacgtctgtcccaagatggttctcgattggacggaacaagggttgggtatggaatgttaaccaacccgacagcagagaagaacaacgaaccttgtgttggaatgatgcaagcatatggagcaaggtcattggatgacagttttgcttcattggatgattctgatgtccctgaggctgattggaccaatgatagatcttatagcacacgtgtttgtgacacaaagtcaaaacatggggaaaggaattctgtgacgaggttgcttaaagatgaagaggtcagcgaaaatggtgaactgttgaagagaaagctgaatcgagccccctcccgacttagagtgaagggaaaagcaggtgacagcttgccagaatgtgaaatgacacctttatcgccaacctctggattgagaataggaggtcaggctacaagagacaggaatgtggcgagggttgatgatccaaaggaggcaactgatgtgaacaatagattgtttaacaccatttccaaagaagaatacgaagatcgattcagggattgcattattggcttgaaggatatatctgacatcgttttgaaggcagtgagagccgctgaggctgaggccagatctgcaaatgcacctgatgaagctgtgaaagcagcaggtgacgctgctgccgagcttgtgaaatttgctgctttggaggtttggaaaagcgaaaataacagtgatgcggttgtagtagtggcggagaaagctgcatctgctgttgttgaggctgcattgtcaattagtgtctcacgaagtgcaaatcaagttggtgaagagcgtgcaatggaagaagctgtccaaaccagcgaagaccaggatttggaaaattttgttatcagtgacaaagcacagctattacaacttagagaaaattatagcatccagtgtctacagattttaggagagtatgttgaagctttgggtcctgtactccatgaaaaaggtgttgatgtttgcctcacattattgcaaaggagcatgaaaaaccaggagggatgtgaccactttgctcaactccttgatgtccttaaattggtttgtgcactggctgcccatcgaaaatttgctgcactctttgttgatcgtggtggtattcagaaaatcgtctctatgcctagagttacccagacatatatgggtctttctgcctgcttattcacttttgggtctcttcagtctaccattgaacgtgtttgtgcgctttcctcagacacacttgacagtgttgttgaattagcacttctacttcttgagtgcccacaagatttagctagaaaaaatgtggccatctttttcgctgctgcttttgtgttcaaagctgttctggatctatttgatgcccggaatgggatgcaaaagcttctcgatatcctttgtggatgcgcgtctggaaggtctggtagtaattctggaggagcaggatcctccaatgtaaatcaagggaatgatcggtcgcctgctgaagttttgactgcatcagagaagcaagttgcataccatacatgtgttgctctacggcaatactttagagctcatctccttcagcttgttgattccattcggccaagcaaaagtatccgtagtattgcccggaacacttctagtgcaagagctggctgcaaaccttttgacatcagcaatgaagctatggatgccatcttttgtcagatccaacgggacagaaagttaggccttgctcttgtgagagcttgctggcttgcgttggataaatttgttgcctcaaatggtcacatgactatgctggagttgtgtaagtttcaggcacatggtgatcggtatttgcgtgacttaactcaatatgcaattggagttcttcacatcataacacttatgccacagccacatgtccgcaaatcaatagtgcaggggacattaagcaacaatcgtgctggcatggctgtcttattagacacggtgaaaagtctcgactatattgatcatgaggtgatctgtccagcactgaatgtcctcgtcaatcttgtatgcccacctccttctatcagcaacaaaccattgtcaagttccaatcagcaacctgcagctgcacaagcgcttgcttcagaaagcagagaaaagaactttgaaaaaactatttcagataggaatctacttacaaacctgggtgaatctcgtgaaagatctggtgatggcaaccctgctgaaaagaacaataccttgcatcaaggaactcctagcacacctgttgtgccatctggagtagtcggtgatcgaagaataatgttaggagttggaggtggtggtcctggtcttgctgctcaattggaacaagggtaccgccaagctcgagaagttgtaagagccaataatggcataaagattcttttgcagcttcttggttctcggatggttacacatcctgtggctatagattctattcgagcccttgcctgccgtgttcttcttggcctggctagagacgatacaattgcacatatactgacaaagctccaggtggggaagaaattatcagaactgatccgtgatatcagtgctcagacatctgggggcgatagtggaagatggcaaactgagctgacccaagtggcaattgaactaattggggtattgacgaattctggaaaagaaacaacactagcggcaactgatgctgctgccccagcattgaggcgcattgagcgagctgggatagctgctgctgctcctatctcttaccattcgagggaactgatgcagttgatacatgaacatctccttgggtctggttttgctgccaccgctgctatgctccagaaggaggctggccttgcacctttaccattgacagcagcggtgcttcctgcccatcaagttgctgccctggaagcatcatctgttcagcaacagtggccctctggacatgttcagggatttctctcagataaaataaacacgtcgacatatcaatctgcccagagatcagatcctaagctgccttcatctaagaaaaaggcactggccttctcatccagtttctcacgaagagctcggtctccgcatccaagcaacatccttaaaagtcctgtacctattgcggctgatactggagatgcagaaatgttgaataaagcaccactgtcgctgccacttaagcggaactttgtggatgtgaaggatattagttttgcatcagcatcgaagcgccttgcaataactgatcaaatataccaatcctctgcattccaaactcctgctcctactcgcaaaggtctgtcggtatcagttgattctcctacttcatctcattgcggttggacaaacttcaacaatgcttttactgaaaacttggacaattctcaaggcacaccaggagcattgaccaccacagcacttcctggtgtaaatgaccaacaatcaggaaatttggagcgtatgacacttgactcactggttgtacaatacctgaaacatcaacaccgccaatgtcctgccccagttacaactttgccaccactttctcttttgcaccctcatgtttgccctgagcctagtcgcagccttagtgcaccggcaaacatagctgctcgagtgggaagccgtgagataagtaggcaatttagtgggatccagatacctcgtagggatcgtcattttatatacagtaggttcaagcagtgtcgtgtttgccgtgatgaggcatcactattgacttgcttgacatttcttggagatgcagctcgagttgtggctggtaaccacacaggtgaattaaggatatttgactgcaacacggcaaatctccttgagactcaaacgtgccaccaacatcttgttacaatgatggaatcgacatacactggtggaattgagatgattctcacatccagcctaaatgaggttaagatctgggatgccttctcggtatctgcagggcctttgcacacatttgacgactgcaaatctgctaggtttaaccactatggaacttcatttgctgccctttctactgatacagctcaacgggaggttcagttgtatgatgtacagacgtatactcttgctacacggcttcctgataacactagcagttcaggttcaggccgtggttatgtacaacccattatacatttcagtccttcagatacaatgttgctttggaatggagtcctgtgggatacaaggcaaccaaatcctgttcatcagtttgaccagttcacagattactgtggtggtggattccatccagcaggaaatgaggtgatcctgaattcggaggtgtgggatctgaggaagttcaagcttttgaggagtgtcccttccctggaccagacagtaataaagtttaacggaactggtgatgttatctatgccaccctgaggcgtaatcttgatgacgtgacatcatgcatcaatgctcgtagggtcaggcatcctcttttccctgcattcagcacgattgatgcggtgacttactcggatattgcaaccgtccaaatggaccgctgtgtacttgatcttgccactgagtccaatgattctcttattggggtggttgctatggacgatcaccaggagcttttctcttctgctcgcttgttcgaagttggcaggaagcgaataactgatgatgattccgatccagaggacgcaggtgaaactgatgatgactccgatgacgacgacgacgactccgatgacggtgttcttgcgccggtgctggaagggggtacagattctgaagatatcagtagcagcagcagcgatgacggtgatgaagatggtggtgacgatgatatacccagttcggatggcattgaagatgaccggttcattgatgagagacgacgggagttcatgatggatctttttggtgacggttgggacgacgatgaggcttatatgatgggatcctttagcagtggcgacgaggagggttggatcatgtaggttttgtgctgctggcctgctgaagaacatgaagcattgccgtatgttcgtggcgtgggcgtggcagaagctgacgccgcaggccgcgcaccagctgctggaacaaattattaaaggatacaccggaaaaaagcacaaaggcctgaagaacgtaccgaaatagataaacacctcatttttcaaaaggactcttccacccctggtaaattttcgagtacactctcccacctcgactaacgtacgtgtgttggtttgcggtttgcacgttcattgtaaaatagcaagcaagatcacaagaggtcaaaaccagacaagaccgttcttttaggacgtatgcaatgcaatacaatagtagtgacgagcgcgagaagatagattaatgaagaatatagctagggcaaagagattcggtccctagtaccgtcgtcaaaaagtatatatgttgcaggaaagtttcagtctatagtagtctacacctggccaaatgagcccggccggtctagcttgtttcgagcagctcccaacaatactcggtcgacatgatcaaatttctctctataaaaaacagtgtagtttcgtatatcccctatttttgacactcatcatactactcatgcatgggcttctatctttcattgttttagattagaaaaaggcttttgttagttgttgtacatatatctattgcttaagagagaaactcctatgtctttgaaaatgcaaatgctagcgcgttctaaagcatgggtcgcctggcaggcaacaacgaac

SEQ ID NO: 19881 - DNA, 7304 bp, Zea Mays
gccttcccttccatcgcgacttgggttgcggactctctttccatcttcttcttcgcttccccccaaaagctcctcctctccatcgattccattccattcgaattagcgatcgcccactacccgcaacctcctaccttaggcagcgccaaaccctaaccttactcgggtacgccaccaatggctgagtcggaggacgccaccgccgccgagcccgggtccgggccgccccacgaggacgaggatgcgctgctcgcccgcgcccacaccgtcatctccaggatcatcgaccgcgagctcgaccccaacccccgcctcctccacaccctcgccaccatgtgcgagctccacgaagccagatatcttgagttacgttcagctgacacaatgttcaatagcacgaacacaaggactgcatttacaattgggaagctggccaatttgctccgggacaatgacgagttttacgagttggtgttttgtaaattcttgtctgacacctcctactctgttgctgtacgagctgccactgctaggttgctcttgagctgtcaccctgcctggacgcctccgtatcctcatgtctttgaagactctatcatagataatattaagaagtgggtaacggaggatcctgaagcgtctaatgaatgcaaatggaagtatctaggaaacaataaacccacagatgctgagatgctgagaacatatgggattggtttgcttgctatggcgttgtgcagtgggcaattgatagaggatgtcttgactttgggggtatcagcgaagctcatgcgctatttgcgcataagagtccttggggatgcctcatcttctcagagagatgctaatcatccacaggacaccaagcatccttggggcggagacgacagtaggggtaaatcacgtctgtcccaagatggttctcgattggacggaacaagggttgggtatggaatgttaaccaacccgacagcagagaagaacaacgaaccttgtgttggaatgatgcaagcatatggagcaaggtcattggatgacagttttgcttcattggatgattctgatgtccctgaggctgattggaccaatgatagatcttatagcacacgtgtttgtgacacaaagtcaaaacatggggaaaggaattctgtgacgaggttgcttaaagatgaagaggtcagcgaaaatggtgaactgttgaagagaaagctgaatcgagccccctcccgacttagagtgaagggaaaagcaggtgacagcttgccagaatgtgaaatgacacctttatcgccaacctctggattgagaataggaggtcaggctacaagagacaggaatgtggcgagggttgatgatccaaaggaggcaactgatgtgaacaatagattgtttaacaccatttccaaagaagaatacgaagatcgattcagggattgcattattggcttgaaggatatatctgacatcgttttgaaggcagtgagagccgctgaggctgaggccagatctgcaaatgcacctgatgaagctgtgaaagcagcaggtgacgctgctgccgagcttgtgaaatttgctgctttggaggtttggaaaagcgaaaataacagtgatgcggttgtagtagtggcggagaaagctgcatctgctgttgttgaggctgcattgtcaattagtgtctcacgaagtgcaaatcaagttggtgaagagcgtgcaatggaagaagctgtccaaaccagcgaagaccaggatttggaaaattttgttatcagtgacaaagcacagctattacaacttagagaaaattatagcatccagtgtctacagattttaggagagtatgttgaagctttgggtcctgtactccatgaaaaaggtgttgatgtttgcctcacattattgcaaaggagcatgaaaaaccaggagggatgtgaccactttgctcaactccttgatgtccttaaattggtttgtgcactggctgcccatcgaaaatttgctgcactctttgttgatcgtggtggtattcagaaaatcgtctctatgcctagagttacccagacatatatgggtctttctgcctgcttattcacttttgggtctcttcagtctaccattgaacgtgtttgtgcgctttcctcagacacacttgacagtgttgttgaattagcacttctacttcttgagtgcccacaagatttagctagaaaaaatgtggccatctttttcgctgctgcttttgtgttcaaagctgttctggatctatttgatgcccggaatgggatgcaaaagcttctcgatatcctttgtggatgcgcgtctggaaggtctggtagtaattctggaggagcaggatcctccaatgtaaatcaagggaatgatcggtcgcctgctgaagttttgactgcatcagagaagcaagttgcataccatacatgtgttgctctacggcaatactttagagctcatctccttcagcttgttgattccattcggccaagcaaaagtatccgtagtattgcccggaacacttctagtgcaagagctggctgcaaaccttttgacatcagcaatgaagctatggatgccatcttttgtcagatccaacgggacagaaagttaggccttgctcttgtgagagcttgctggcttgcgttggataaatttgttgcctcaaatggtcacatgactatgctggagttgtgtaaggtaaaacacacagcacacatgcattgttggaatgtgtggggcttgttaatgacctgattcgattcacagtttcaggcacatggtgatcggtatttgcgtgacttaactcaatatgcaattggagttcttcacatcataacacttatgccacagccacatgtccgcaaatcaatagtgcaggggacattaagcaacaatcgtgctggcatggctgtcttattagacacggtgaaaagtctcgactatattgatcatgagttttgtgagaagactactcaagtaatggtgatctgtccagcactgaatgtcctcgtcaatcttgtatgcccacctccttctatcagcaacaaaccattgtcaagttccaatcagcaacctgcagctgcacaagcgcttgcttcagaaagcagagaaaagaactttgaaaaaactatttcagataggaatctacttacaaacctgggtgaatctcgtgaaagatctggtgatggcaaccctgctgaaaagaacaataccttgcatcaaggaactcctagcacacctgttgtgccatctggagtagtcggtgatcgaagaataatgttaggagttggaggtggtggtcctggtcttgctgctcaattggaacaagggtaccgccaagctcgagaagttgtaagagccaataatggcataaagattcttttgcagcttcttggttctcggatggttacacatcctgtggctatagattctattcgagcccttgcctgccgtgttcttcttggcctggctagagacgatacaattgcacatatactgacaaagctccaggtggggaagaaattatcagaactgatccgtgatatcagtgctcagacatctgggggcgatagtggaagatggcaaactgagctgacccaagtggcaattgaactaattggggtattgacgaattctggaaaagaaacaacactagcggcaactgatgctgctgccccagcattgaggcgcattgagcgagctgggatagctgctgctgctcctatctcttaccattcgagggaactgatgcagttgatacatgaacatctccttgggtctggttttgctgccaccgctgctatgctccagaaggaggctggccttgcacctttaccattgacagcagcggtgcttcctgcccatcaagttgctgccctggaagcatcatctgttcagcaacagtggccctctggacatgttcagggatttctctcagataaaataaacacgtcgacatatcaatctgcccagagatcagatcctaagctgccttcatctaagaaaaaggcactggccttctcatccagtttctcacgaagagctcggtctccgcatccaagcaacatccttaaaagtcctgtacctattgcggctgatactggagatgcagaaatgttgaataaagcaccactgtcgctgccacttaagcggaactttgtggatgtgaaggatattagttttgcatcagcatcgaagcgccttgcaataactgatcaaatataccaatcctctgcattccaaactcctgctcctactcgcaaaggtctgtcggtatcagttgattctcctacttcatctcattgcggttggacaaacttcaacaatgcttttactgaaaacttggacaattctcaaggcacaccaggagcattgaccaccacagcacttcctggtgtaaatgaccaacaatcaggaaatttggagcgtatgacacttgactcactggttgtacaatacctgaaacatcaacaccgccaatgtcctgccccagttacaactttgccaccactttctcttttgcaccctcatgtttgccctgagcctagtcgcagccttagtgcaccggcaaacatagctgctcgagtgggaagccgtgagataagtaggcaatttagtgggatccagatacctcgtagggatcgtcattttatatacagtaggttcaagcagtgtcgtgtttgccgtgatgaggcatcactattgacttgcttgacatttcttggagatgcagctcgagttgtggctggtaaccacacaggtgaattaaggatatttgactgcaacacggcaaatctccttgagactcaaacgtgccaccaacatcttgttacaatgatggaatcgacatacactggtggaattgagatgattctcacatccagcctaaatgaggttaagatctgggatgccttctcggtatctgcagggcctttgcacacatttgacgactgcaaatctgctaggtttaaccactatggaacttcatttgctgccctttctactgatacagctcaacgggaggttcagttgtatgatgtacagacgtatactcttgctacacggcttcctgataacactagcagttcaggttcaggccgtggttatgtacaacccattatacatttcagtccttcagatacaatgttgctttggaatggagtcctgtgggatacaaggcaaccaaatcctgttcatcagtttgaccagttcacagattactgtggtggtggattccatccagcaggaaatgaggtgttcttttcccttgaaccatgctaattaatcttgtttacttgtttatgttttgaaccgtaatgtcttactatgcatctcatagcatgttattgtgtgtttatggcattctaataacttaacttatcacttttctctcatgactgcgttagtaggattgttcgatgtatcttgtacatcattttttaggacttgtcatctagtttagtagcatatccatctaatgtcattatatctcaaccttgtcccactttttattcagtaaaagattttctgggattcaaaataatcttatctttcatgtccaaataaagtatctcagtaaacaatgcacaataacatttttttagtagaacgaggagtgcatggagtagcaaaacaagagccttaaaaaatctgttggctatttaaaataatagtgcatttgccacctaattttataagtgaggtggagatttatcatagtacatggatattgatcatgatgaacaatgtcctgaaagaataatttatccactggctttgctaccagaattatttgtcgtgcatgccattattttaagaaagaggaatttgtttctattgtgtttgtatccactggctttgcatgtcattaaatattgcacaggtgatcctgaattcggaggtgtgggatctgaggaagttcaagcttttgaggagtgtcccttccctggaccagacagtaataaagtttaacggaactggtgatgttatctatgccaccctgaggcgtaatcttgatgacgtgacatcatgcatcaatgctcgtagggtcaggcatcctcttttccctgcattcagcacgattgatgcggtgacttactcggatattgcaaccgtccaaatggaccgctgtgtacttgatcttgccactgagtccaatgattctcttattggggtggttgctatggacgatcaccaggagcttttctcttctgctcgcttgttcgaagttggcaggaagcgaataactgatgatgattccgatccagaggacgcaggtgaaactgatgatgactccgatgacgacgacgacgactccgatgacggtgttcttgcgccggtgctggaagggggtacagattctgaagatatcagtagcagcagcagcgatgacggtgatgaagatggtggtgacgatgatatacccagttcggatggcattgaagatgaccggttcattgatgagagacgacgggagttcatgatggatctttttggtgacggttgggacgacgatgaggcttatatgatgggatcctttagcagtggcgacgaggagggttggatcatatgttcgtggcgtgggcgtggcagaagctgacgccgcaggccgcgcaccagctgctggaacaaattattaaaggatacaccggaaaaaagcacaaaggcctgaagaacgtaccgaaatagataaacacctcatttttcaaaaggactcttccacccctggtaaattttcgagtacactctcccacctcgactaacgtacgtgtgttggtttgcggtttgcacgttcattgtaaaatagcaagcaagatcacaagaggtcaaaaccagacaagaccgttcttttaggacgtatgcaatgcaatacaatagtagtgacgagcgcgagaagatagattaatgaagaatatagctagggcaaagagattcggtccctagtaccgtcgtcaaaaagtatatatgttgcaggaaagtttcagtctatagtagtctacacctggccaaatgagcccggccggtctagcttgtttcgagcagctcccaacaatactcggtcgacatgatcaaatttctctctataaaaaacagtgtagtttcgtatatcccctatttttgacactcatcatactactcatgcatgggcttctatctttcattgttttagattagaaaaaggcttttgttagttgttgtacatatatctattgcttaagagagaaactcctatgtctttgaaaatgcaaatgctagcgcgttctaaagcatgggtcgcctggcaggcaacaacgaac

SEQ ID NO: 19882 - DNA, 6591 bp, Zea Mays
cttcccttccatcgcgacttgggttgcggactctctttccatcttcttcttcgcttccccccaaaagctcctcctctccatcgattccattccattcgaattagcgatcgcccactacccgcaacctcctaccttaggcagcgccaaaccctaaccttactcgggtacgccaccaatggctgagtcggaggacgccaccgccgccgagcccgggtccgggccgccccacgaggacgaggatgcgctgctcgcccgcgcccacaccgtcatctccaggatcatcgaccgcgagctcgaccccaacccccgcctcctccacaccctcgccaccatgtgcgagctccacgaagccagatatcttgagttacgttcagctgacacaatgttcaatagcacgaacacaaggactgcatttacaattgggaagctggccaatttgctccgggacaatgacgagttttacgagttggtgttttgtaaattcttgtctgacacctcctactctgttgctgtacgagctgccactgctaggttgctcttgagctgtcaccctgcctggacgcctccgtatcctcatgtctttgaagactctatcatagataatattaagaagtgggtaacggaggatcctgaagcgtctaatgaatgcaaatggaagtatctaggaaacaataaacccacagatgctgagatgctgagaacatatgggattggtttgcttgctatggcgttgtgcagtgggcaattgatagaggatgtcttgactttgggggtatcagcgaagctcatgcgctatttgcgcataagagtccttggggatgcctcatcttctcagagagatgctaatcatccacaggacaccaagcatccttggggcggagacgacagtaggggtaaatcacgtctgtcccaagatggttctcgattggacggaacaagggttgggtatggaatgttaaccaacccgacagcagagaagaacaacgaaccttgtgttggaatgatgcaagcatatggagcaaggtcattggatgacagttttgcttcattggatgattctgatgtccctgaggctgattggaccaatgatagatcttatagcacacgtgtttgtgacacaaagtcaaaacatggggaaaggaattctgtgacgaggttgcttaaagatgaagaggtcagcgaaaatggtgaactgttgaagagaaagctgaatcgagccccctcccgacttagagtgaagggaaaagcaggtgacagcttgccagaatgtgaaatgacacctttatcgccaacctctggattgagaataggaggtcaggctacaagagacaggaatgtggcgagggttgatgatccaaaggaggcaactgatgtgaacaatagattgtttaacaccatttccaaagaagaatacgaagatcgattcagggattgcattattggcttgaaggatatatctgacatcgttttgaaggcagtgagagccgctgaggctgaggccagatctgcaaatgcacctgatgaagctgtgaaagcagcaggtgacgctgctgccgagcttgtgaaatttgctgctttggaggtttggaaaagcgaaaataacagtgatgcggttgtagtagtggcggagaaagctgcatctgctgttgttgaggctgcattgtcaattagtgtctcacgtttggtgttacagaagtgcaaatcaagttggtgaagagcgtgcaatggaagaagctgtccaaaccagcgaagaccaggatttggaaaattttgttatcagtgacaaagcacagctattacaacttagagaaaattatagcatccagtgtctacagattttaggagagtatgttgaagctttgggtcctgtactccatgaaaaaggtgttgatgtttgcctcacattattgcaaaggagcatgaaaaaccaggagggatgtgaccactttgctcaactccttgatgtccttaaattggtttgtgcactggctgcccatcgaaaatttgctgcactctttgttgatcgtggtggtattcagaaaatcgtctctatgcctagagttacccagacatatatgggtctttctgcctgcttattcacttttgggtctcttcagtctaccattgaacgtgtttgtgcgctttcctcagacacacttgacagtgttgttgaattagcacttctacttcttgagtgcccacaagatttagctagaaaaaatgtggccatctttttcgctgctgcttttgtgttcaaagctgttctggatctatttgatgcccggaatgggatgcaaaagcttctcgatatcctttgtggatgcgcgtctggaaggtctggtagtaattctggaggagcaggatcctccaatgtaaatcaagggaatgatcggtcgcctgctgaagttttgactgcatcagagaagcaagttgcataccatacatgtgttgctctacggcaatactttagagctcatctccttcagcttgttgattccattcggccaagcaaaagtatccgtagtattgcccggaacacttctagtgcaagagctggctgcaaaccttttgacatcagcaatgaagctatggatgccatcttttgtcagatccaacgggacagaaagttaggccttgctcttgtgagagcttgctggcttgcgttggataaatttgttgcctcaaatggtcacatgactatgctggagttgtgtaagtttcaggcacatggtgatcggtatttgcgtgacttaactcaatatgcaattggagttcttcacatcataacacttatgccacagccacatgtccgcaaatcaatagtgcaggggacattaagcaacaatcgtgctggcatggctgtcttattagacacggtgaaaagtctcgactatattgatcatgaggtgatctgtccagcactgaatgtcctcgtcaatcttgtatgcccacctccttctatcagcaacaaaccattgtcaagttccaatcagcaacctgcagctgcacaagcgcttgcttcagaaagcagagaaaagaactttgaaaaaactatttcagataggaatctacttacaaacctgggtgaatctcgtgaaagatctggtgatggcaaccctgctgaaaagaacaataccttgcatcaaggaactcctagcacacctgttgtgccatctggagtagtcggtgatcgaagaataatgttaggagttggaggtggtggtcctggtcttgctgctcaattggaacaagggtaccgccaagctcgagaagttgtaagagccaataatggcataaagattcttttgcagcttcttggttctcggatggttacacatcctgtggctatagattctattcgagcccttgcctgccgtgttcttcttggcctggctagagacgatacaattgcacatatactgacaaagctccaggtggggaagaaattatcagaactgatccgtgatatcagtgctcagacatctgggggcgatagtggaagatggcaaactgagctgacccaagtggcaattgaactaattggggtattgacgaattctggaaaagaaacaacactagcggcaactgatgctgctgccccagcattgaggcgcattgagcgagctgggatagctgctgctgctcctatctcttaccattcgagggaactgatgcagttgatacatgaacatctccttgggtctggttttgctgccaccgctgctatgctccagaaggaggctggccttgcacctttaccattgacagcagcggtgcttcctgcccatcaagttgctgccctggaagcatcatctgttcagcaacagtggccctctggacatgttcagggatttctctcagataaaataaacacgtcgacatatcaatctgcccagagatcagatcctaagctgccttcatctaagaaaaaggcactggccttctcatccagtttctcacgaagagctcggtctccgcatccaagcaacatccttaaaagtcctgtacctattgcggctgatactggagatgcagaaatgttgaataaagcaccactgtcgctgccacttaagcggaactttgtggatgtgaaggatattagttttgcatcagcatcgaagcgccttgcaataactgatcaaatataccaatcctctgcattccaaactcctgctcctactcgcaaaggtctgtcggtatcagttgattctcctacttcatctcattgcggttggacaaacttcaacaatgcttttactgaaaacttggacaattctcaaggcacaccaggagcattgaccaccacagcacttcctggtgtaaatgaccaacaatcaggaaatttggagcgtatgacacttgactcactggttgtacaatacctgaaacatcaacaccgccaatgtcctgccccagttacaactttgccaccactttctcttttgcaccctcatgtttgccctgagcctagtcgcagccttagtgcaccggcaaacatagctgctcgagtgggaagccgtgagataagtaggcaatttagtgggatccagatacctcgtagggatcgtcattttatatacagtaggttcaagcagtgtcgtgtttgccgtgatgaggcatcactattgacttgcttgacatttcttggagatgcagctcgagttgtggctggtaaccacacaggtgaattaaggatatttgactgcaacacggcaaatctccttgagactcaaacgtgccaccaacatcttgttacaatgatggaatcgacatacactggtggaattgagatgattctcacatccagcctaaatgaggttaagatctgggatgccttctcggtatctgcagggcctttgcacacatttgacgactgcaaatctgctaggtttaaccactatggaacttcatttgctgccctttctactgatacagctcaacgggaggttcagttgtatgatgtacagacgtatactcttgctacacggcttcctgataacactagcagttcaggttcaggccgtggttatgtacaacccattatacatttcagtccttcagatacaatgttgctttggaatggagtcctgtgggatacaaggcaaccaaatcctgttcatcagtttgaccagttcacagattactgtggtggtggattccatccagcaggaaatgaggtgatcctgaattcggaggtgtgggatctgaggaagttcaagcttttgaggagtgtcccttccctggaccagacagtaataaagtttaacggaactggtgatgttatctatgccaccctgaggcgtaatcttgatgacgtgacatcatgcatcaatgctcgtagggtcaggcatcctcttttccctgcattcagcacgattgatgcggtgacttactcggatattgcaaccgtccaaatggaccgctgtgtacttgatcttgccactgagtccaatgattctcttattggggtggttgctatggacgatcaccaggagcttttctcttctgctcgcttgttcgaagttggcaggaagcgaataactgatgatgattccgatccagaggacgcaggtgaaactgatgatgactccgatgacgacgacgacgactccgatgacggtgttcttgcgccggtgctggaagggggtacagattctgaagatatcagtagcagcagcagcgatgacggtgatgaagatggtggtgacgatgatatacccagttcggatggcattgaagatgaccggttcattgatgagagacgacgggagttcatgatggatctttttggtgacggttgggacgacgatgaggcttatatgatgggatcctttagcagtggcgacgaggagggttggatcatatgttcgtggcgtgggcgtggcagaagctgacgccgcaggccgcgcaccagctgctggaacaaattattaaaggatacaccggaaaaaagcacaaaggcctgaagaacgtaccgaaatagataaacacctcatttttcaaaaggactcttccacccctggtaaattttcgagtacactctcccacctcgactaacgtacgtgtgttggtttgcggtttgcacgttcattgtaaaatagcaagcaagatcacaagaggtcaaaaccagacaagaccgttcttttaggacgtatgcaatgcaatacaatagtagtgacgagcgcgagaagatagattaatgaagaatatagctagggcaaagagattcggtccctagtaccgtcgtcaaaaagtatatatgttgcaggaaagtttcagtctatagtagtctacacctggccaaatgagcccggccggtctagcttgtttcgagcagctcccaacaatactcggtcgacatgatcaaatttctctctataaaaaacagtgtagtttcgtatatcccctatttttgacactcatcatactactcatgcatgggcttctatctttcattgttttagattagaaaaaggcttttgttagttgttgtacatatatctattgcttaagagagaaactcctatgtctttgaaaatgcaaatgctagcgcgttctaaagcatgggtcgcctggcaggcaacaacgaac

SEQ ID NO: 19883 - DNA, 6698 bp, Zea Mays
ctctttccatcttcttcttcgcttccccccaaaagctcctcctctccatcgattccattccattcgaattagcgatcgcccactacccgcaacctcctaccttaggcagcgccaaaccctaaccttactcgggtacgccaccaatggctgagtcggaggacgccaccgccgccgagcccgggtccgggccgccccacgaggacgaggatgcgctgctcgcccgcgcccacaccgtcatctccaggatcatcgaccgcgagctcgaccccaacccccgcctcctccacaccctcgccaccatgtgcgagctccacgaagccagatatcttgagttacgttcagctgacacaatgttcaatagcacgaacacaaggactgcatttacaattgggaagctggccaatttgctccgggacaatgacgagttttacgagttggtgttttgtaaattcttgtctgacacctcctactctgttgctgtacgagctgccactgctaggttgctcttgagctgtcaccctgcctggacgcctccgtatcctcatgtctttgaagactctatcatagataatattaagaagtgggtaacggaggatcctgaagcgtctaatgaatgcaaatggaagtatctaggaaacaataaacccacagatgctgagatgctgagaacatatgggattggtttgcttgctatggcgttgtgcagcagtgggcaattgatagaggatgtcttgactttgggggtatcagcgaagctcatgcgctatttgcgcataagagtccttggggatgcctcatcttctcagagagatgctaatcatccacaggacaccaagcatccttggggcggagacgacagtaggggtaaatcacgtctgtcccaagatggttctcgattggacggaacaagggttgggtatggaatgttaaccaacccgacagcagagaagaacaacgaaccttgtgttggaatgatgcaagcatatggagcaaggtcattggatgacagttttgcttcattggatgattctgatgtccctgaggctgattggaccaatgatagatcttatagcacacgtgtttgtgacacaaagtcaaaacatggggaaaggaattctgtgacgaggttgcttaaagatgaagaggtcagcgaaaatggtgaactgttgaagagaaagctgaatcgagccccctcccgacttagagtgaagggaaaagcaggtgacagcttgccagaatgtgaaatgacacctttatcgccaacctctggattgagaataggaggtcaggctacaagagacaggaatgtggcgagggttgatgatccaaaggaggcaactgatgtgaacaatagattgtttaacaccatttccaaagaagaatacgaagatcgattcagggattgcattattggcttgaaggatatatctgacatcgttttgaaggcagtgagagccgctgaggctgaggccagatctgcaaatgcacctgatgaagctgtgaaagcagcaggtgacgctgctgccgagcttgtgaaatttgctgctttggaggtttggaaaagcgaaaataacagtgatgcggttgtagtagtggcggagaaagctgcatctgctgttgttgaggctgcattgtcaattagtgtctcacgaagtgcaaatcaagttggtgaagagcgtgcaatggaagaagctgtccaaaccagcgaagaccaggatttggaaaattttgttatcagtgacaaagcacagctattacaacttagagaaaattatagcatccagtgtctacagattttaggagagtatgttgaagctttgggtcctgtactccatgaaaaaggtgttgatgtttgcctcacattattgcaaaggagcatgaaaaaccaggagggatgtgaccactttgctcaactccttgatgtccttaaattggtttgtgcactggctgcccatcgaaaatttgctgcactctttgttgatcgtggtggtattcagaaaatcgtctctatgcctagagttacccagacatatatgggtctttctgcctgcttattcacttttgggtctcttcagtctaccattgaacgtgtttgtgcgctttcctcagacacacttgacagtgttgttgaattagcacttctacttcttgagtgcccacaagatttagctagaaaaaatgtggccatctttttcgctgctgcttttgtgttcaaagctgttctggatctatttgatgcccggaatgggatgcaaaagcttctcgatatcctttgtggatgcgcgtctggaaggtctggtagtaattctggaggagcaggatcctccaatgtaaatcaagggaatgatcggtcgcctgctgaagttttgactgcatcagagaagcaagttgcataccatacatgtgttgctctacggcaatactttagagctcatctccttcagcttgttgattccattcggccaagcaaaagtatccgtagtattgcccggaacacttctagtgcaagagctggctgcaaaccttttgacatcagcaatgaagctatggatgccatcttttgtcagatccaacgggacagaaagttaggccttgctcttgtgagagcttgctggcttgcgttggataaatttgttgcctcaaatggtcacatgactatgctggagttgtgtaagtttcaggcacatggtgatcggtatttgcgtgacttaactcaatatgcaattggagttcttcacatcataacacttatgccacagccacatgtccgcaaatcaatagtgcaggggacattaagcaacaatcgtgctggcatggctgtcttattagacacggtgaaaagtctcgactatattgatcatgaggtgatctgtccagcactgaatgtcctcgtcaatcttgtatgcccacctccttctatcagcaacaaaccattgtcaagttccaatcagcaacctgcagctgcacaagcgcttgcttcagaaagcagagaaaagaactttgaaaaaactatttcagataggaatctacttacaaacctgggtgaatctcgtgaaagatctggtgatggcaaccctgctgaaaagaacaataccttgcatcaaggaactcctagcacacctgttgtgccatctggagtagtcggtgatcgaagaataatgttaggagttggaggtggtggtcctggtcttgctgctcaattggaacaagggtaccgccaagctcgagaagttgtaagagccaataatggcataaagattcttttgcagcttcttggttctcggatggttacacatcctgtggctatagattctattcgagcccttgcctgccgtgttcttcttggcctggctagagacgatacaattgcacatatactgacaaagctccaggtggggaagaaattatcagaactgatccgtgatatcagtgctcagacatctgggggcgatagtggaagatggcaaactgagctgacccaagtggcaattgaactaattggggtattgacgaattctggaaaagaaacaacactagcggcaactgatgctgctgccccagcattgaggcgcattgagcgagctgggatagctgctgctgctcctatctcttaccattcgagggaactgatgcagttgatacatgaacatctccttgggtctggttttgctgccaccgctgctatgctccagaaggaggctggccttgcacctttaccattgacagcagcggtgcttcctgcccatcaagttgctgccctggaagcatcatctgttcagcaacagtggccctctggacatgttcagggatttctctcagataaaataaacacgtcgacatatcaatctgcccagagatcagatcctaagctgccttcatctaagaaaaaggcactggccttctcatccagtttctcacgaagagctcggtctccgcatccaagcaacatccttaaaagtcctgtacctattgcggctgatactggagatgcagaaatgttgaataaagcaccactgtcgctgccacttaagcggaactttgtggatgtgaaggatattagttttgcatcagcatcgaagcgccttgcaataactgatcaaatataccaatcctctgcattccaaactcctgctcctactcgcaaaggtctgtcggtatcagttgattctcctacttcatctcattgcggttggacaaacttcaacaatgcttttactgaaaacttggacaattctcaaggcacaccaggagcattgaccaccacagcacttcctggtgtaaatgaccaacaatcaggaaatttggagcgtatgacacttgactcactggttgtacaatacctgaaacatcaacaccgccaatgtcctgccccagttacaactttgccaccactttctcttttgcaccctcatgtttgccctgagcctagtcgcagccttagtgcaccggcaaacatagctgctcgagtgggaagccgtgagataagtaggcaatttagtgggatccagatacctcgtagggatcgtcattttatatacagtaggttcaagcagtgtcgtgtttgccgtgatgaggcatcactattgacttgcttgacatttcttggagatgcagctcgagttgtggctggtaaccacacaggtgaattaaggatatttgactgcaacacggcaaatctccttgagactcaaacgtgccaccaacatcttgttacaatgatggaatcgacatacactggtggaattgagatgattctcacatccagcctaaatgaggttaagatctgggatgccttctcggtatctgcagggcctttgcacacatttgacgactgcaaatctgctaggtttaaccactatggaacttcatttgctgccctttctactgatacagctcaacgggaggttcagttgtatgatgtacagacgtatactcttgctacacggcttcctgataacactagcagttcaggttcaggccgtggttatgtacaacccattatacatttcagtccttcagatacaatgttgctttggaatggagtcctgtgggatacaaggcaaccaaatcctgttcatcagtttgaccagttcacagattactgtggtggtggattccatccagcaggaaatgaggtgttcttttcccttgaaccatgctaattaatcttgtttacttgtttatgttttgaaccgtaatgtcttactatgcatctcatagcatgttattgtgtgtttatggcattctaataacttaacttatcacttttctctcatgactgcgttagtaggattgttcgatgtatcttgtacatcattttttaggacttgtcatctagtttagtagcatatccatctaatgtcattatatctcaaccttgtcccactttttattcagtaaaagattttctgggattcaaaataatcttatctttcatgtccaaataaagtatctcagtaaacaatgcacaataacatttttttagtagaacgaggagtgcatggagtagcaaaacaagagccttaaaaaatctgttggctatttaaaataatagtgcatttgccacctaattttataagtgaggtggagatttatcatagtacatggatattgatcatgatgaacaatgtcctgaaagaataatttatccactggctttgctaccagaattatttgtcgtgcatgccattattttaagaaagaggaatttgtttctattgtgtttgtatccactggctttgcatgtcattaaatattgcacaggtgatcctgaattcggaggtgtgggatctgaggaagttcaagcttttgaggagtgtcccttccctggaccagacagtaataaagtttaacggaactggtgatgttatctatgccaccctgaggcgtaatcttgatgacgtgacatcatgcatcaatgctcgtagggtcaggcatcctcttttccctgcattcagcacgattgatgcgatgttcgtggcgtgggcgtggcagaagctgacgccgcaggccgcgcaccagctgctggaacaaattattaaaggatacaccggaaaaaagcacaaaggcctgaagaacgtaccgaaatagataaacacctcatttttcaaaaggactcttccacccctggtaaattttcgagtacactctcccacctcgactaacgtacgtgtgttggtttgcggtttgcacgttcattgtaaaatagcaagcaagatcacaagaggtcaaaaccagacaagaccgttcttttaggacgtatgcaatgcaatacaatagtagtgacgagcgcgagaagatagattaatgaagaatatagctagggcaaagagattcggtccctagtaccgtcgtcaaaaagtatatatgttgcaggaaagtttcagtctatagtagtctacacctggccaaatgagcccggccggtctagcttgtttcgagcagctcccaacaatactcggtcgacatgatcaaatttctctctataaaaaacagtgtagtttcgtatatcccctatttttgacactcatcatactactcatgcatgggcttctatctttcattgttttagattagaaaaaggcttttgttagttgttgtacatatatctattgcttaagagagaaactcctatgtctttgaaaatgcaaatgctagcgcgttctaaagcatgggtcgcctggcaggcaacaacgaac

SEQ ID NO: 19884 - DNA, 6482 bp, Zea Mays
atggctgagtcggaggacgccaccgccgccgagcccgggtccgggccgccccacgaggacgaggatgcgctgctcgcccgcgcccacaccgtcatctccaggatcatcgaccgcgagctcgaccccaacccccgcctcctccacaccctcgccaccatgtgcgagctccacgaagccagatatcttgagttacgttcagctgacacaatgttcaatagcacgaacacaaggactgcatttacaattgggaagctggccaatttgctccgggacaatgacgagttttacgagttggtgttttgtaaattcttgtctgacacctcctactctgttgctgtacgagctgccactgctaggttgctcttgagctgtcaccctgcctggacgcctccgtatcctcatgtctttgaagactctatcatagataatattaagaagtgggtaacggaggatcctgaagcgtctaatgaatgcaaatggaagtatctaggaaacaataaacccacagatgctgagatgctgagaacatatgggattggtttgcttgctatggcgttgtgcagcagtgggcaattgatagaggatgtcttgactttgggggtatcagcgaagctcatgcgctatttgcgcataagagtccttggggatgcctcatcttctcagagagatgctaatcatccacaggacaccaagcatccttggggcggagacgacagtaggggtaaatcacgtctgtcccaagatggttctcgattggacggaacaagggttgggtatggaatgttaaccaacccgacagcagagaagaacaacgaaccttgtgttggaatgatgcaagcatatggagcaaggtcattggatgacagttttgcttcattggatgattctgatgtccctgaggctgattggaccaatgatagatcttatagcacacgtgtttgtgacacaaagtcaaaacatggggaaaggaattctgtgacgaggttgcttaaagatgaagaggtcagcgaaaatggtgaactgttgaagagaaagctgaatcgagccccctcccgacttagagtgaagggaaaagcaggtgacagcttgccagaatgtgaaatgacacctttatcgccaacctctggattgagaataggaggtcaggctacaagagacaggaatgtggcgagggttgatgatccaaaggaggcaactgatgtgaacaatagattgtttaacaccatttccaaagaagaatacgaagatcgattcagggattgcattattggcttgaaggatatatctgacatcgttttgaaggcagtgagagccgctgaggctgaggccagatctgcaaatgcacctgatgaagctgtgaaagcagcaggtgacgctgctgccgagcttgtgaaatttgctgctttggaggtttggaaaagcgaaaataacagtgatgcggttgtagtagtggcggagaaagctgcatctgctgttgttgaggctgcattgtcaattagtgtctcacgaagtgcaaatcaagttggtgaagagcgtgcaatggaagaagctgtccaaaccagcgaagaccaggatttggaaaattttgttatcagtgacaaagcacagctattacaacttagagaaaattatagcatccagtgtctacagattttaggagagtatgttgaagctttgggtcctgtactccatgaaaaaggtgttgatgtttgcctcacattattgcaaaggagcatgaaaaaccaggagggatgtgaccactttgctcaactccttgatgtccttaaattggtttgtgcactggctgcccatcgaaaatttgctgcactctttgttgatcgtggtggtattcagaaaatcgtctctatgcctagagttacccagacatatatgggtctttctgcctgcttattcacttttgggtctcttcagtctaccattgaacgtgtttgtgcgctttcctcagacacacttgacagtgttgttgaattagcacttctacttcttgagtgcccacaagatttagctagaaaaaatgtggccatctttttcgctgctgcttttgtgttcaaagctgttctggatctatttgatgcccggaatgggatgcaaaagcttctcgatatcctttgtggatgcgcgtctggaaggtctggtagtaattctggaggagcaggatcctccaatgtaaatcaagggaatgatcggtcgcctgctgaagttttgactgcatcagagaagcaagttgcataccatacatgtgttgctctacggcaatactttagagctcatctccttcagcttgttgattccattcggccaagcaaaagtatccgtagtattgcccggaacacttctagtgcaagagctggctgcaaaccttttgacatcagcaatgaagctatggatgccatcttttgtcagatccaacgggacagaaagttaggccttgctcttgtgagagcttgctggcttgcgttggataaatttgttgcctcaaatggtcacatgactatgctggagttgtgtaaggcacatggtgatcggtatttgcgtgacttaactcaatatgcaattggagttcttcacatcataacacttatgccacagccacatgtccgcaaatcaatagtgcaggggacattaagcaacaatcgtgctggcatggctgtcttattagacacggtgaaaagtctcgactatattgatcatgaggtgatctgtccagcactgaatgtcctcgtcaatcttgtatgcccacctccttctatcagcaacaaaccattgtcaagttccaatcagcaacctgcagctgcacaagcgcttgcttcagaaagcagagaaaagaactttgaaaaaactatttcagataggaatctacttacaaacctgggtgaatctcgtgaaagatctggtgatggcaaccctgctgaaaagaacaataccttgcatcaaggaactcctagcacacctgttgtgccatctggagtagtcggtgatcgaagaataatgttaggagttggaggtggtggtcctggtcttgctgctcaattggaacaagggtaccgccaagctcgagaagttgtaagagccaataatggcataaagattcttttgcagcttcttggttctcggatggttacacatcctgtggctatagattctattcgagcccttgcctgccgtgttcttcttggcctggctagagacgatacaattgcacatatactgacaaagctccaggtggggaagaaattatcagaactgatccgtgatatcagtgctcagacatctgggggcgatagtggaagatggcaaactgagctgacccaagtggcaattgaactaattggggtattgacgaattctggaaaagaaacaacactagcggcaactgatgctgctgccccagcattgaggcgcattgagcgagctgggatagctgctgctgctcctatctcttaccattcgagggaactgatgcagttgatacatgaacatctccttgggtctggttttgctgccaccgctgctatgctccagaaggaggctggccttgcacctttaccattgacagcagcggtgcttcctgcccatcaagttgctgccctggaagcatcatctgttcagcaacagtggccctctggacatgttcagggatttctctcagataaaataaacacgtcgacatatcaatctgcccagagatcagatcctaagctgccttcatctaagaaaaaggcactggccttctcatccagtttctcacgaagagctcggtctccgcatccaagcaacatccttaaaagtcctgtacctattgcggctgatactggagatgcagaaatgttgaataaagcaccactgtcgctgccacttaagcggaactttgtggatgtgaaggatattagttttgcatcagcatcgaagcgccttgcaataactgatcaaatataccaatcctctgcattccaaactcctgctcctactcgcaaaggtctgtcggtatcagttgattctcctacttcatctcattgcggttggacaaacttcaacaatgcttttactgaaaacttggacaattctcaaggcacaccaggagcattgaccaccacagcacttcctggtgtaaatgaccaacaatcaggaaatttggagcgtatgacacttgactcactggttgtacaatacctgaaacatcaacaccgccaatgtcctgccccagttacaactttgccaccactttctcttttgcaccctcatgtttgccctgagcctagtcgcagccttagtgcaccggcaaacatagctgctcgagtgggaagccgtgagataagtaggcaatttagtgggatccagatacctcgtagggatcgtcattttatatacagtaggttcaagcagtgtcgtgtttgccgtgatgaggcatcactattgacttgcttgacatttcttggagatgcagctcgagttgtggctggtaaccacacaggtgaattaaggatatttgactgcaacacggcaaatctccttgagactcaaacgtgccaccaacatcttgttacaatgatggaatcgacatacactggtggaattgagatgattctcacatccagcctaaatgaggttaagatctgggatgccttctcggtatctgcagggcctttgcacacatttgacgactgcaaatctgctaggtttaaccactatggaacttcatttgctgccctttctactgatacagctcaacgggaggttcagttgtatgatgtacagacgtatactcttgctacacggcttcctgataacactagcagttcaggttcaggccgtggttatgtacaacccattatacatttcagtccttcagatacaatgttgctttggaatggagtcctgtgggatacaaggcaaccaaatcctgttcatcagtttgaccagttcacagattactgtggtggtggattccatccagcaggaaatgaggtgatcctgaattcggaggtgtgggatctgaggaagttcaagcttttgaggagtgtcccttccctggaccagacagtaataaagtttaacggaactggtgatgttatctatgccaccctgaggcgtaatcttgatgacgtgacatcatgcatcaatgctcgtagggtcaggcatcctcttttccctgcattcagcacgattgatgcggtgacttactcggatattgcaaccgtccaaatggaccgctgtgtacttgatcttgccactgagtccaatgattctcttattggggtggttgctatggacgatcaccaggagcttttctcttctgctcgcttgttcgaagttggcaggaagcgaataactgatgatgattccgatccagaggacgcaggtgaaactgatgatgactccgatgacgacgacgacgactccgatgacggtgttcttgcgccggtgctggaagggggtacagattctgaagatatcagtagcagcagcagcgatgacggtgatgaagatggtggtgacgatgatatacccagttcggatggcattgaagatgaccggttcattgatgagagacgacgggagttcatgatggatctttttggtgacggttgggacgacgatgaggcttatatgatgggatcctttagcagtggcgacgaggagggttggatcatatgttcgtggcgtgggcgtggcagaagctgacgccgcaggccgcgcaccagctgctggaacaagtactcgtggaaccgcccggcctggcagatgcgctccagcagcttcccgcctgccgccgcctactccatcaggatcgccaagattattaaaggatacaccggaaaaaagcacaaaggcctgaagaacgtaccgaaatagataaacacctcatttttcaaaaggactcttccacccctggtaaattttcgagtacactctcccacctcgactaacgtacgtgtgttggtttgcggtttgcacgttcattgtaaaatagcaagcaagatcacaagaggtcaaaaccagacaagaccgttcttttaggacgtatgcaatgcaatacaatagtagtgacgagcgcgagaagatagattaatgaagaatatagctagggcaaagagattcggtccctagtaccgtcgtcaaaaagtatatatgttgcaggaaagtttcagtctatagtagtctacacctggccaaatgagcccggccggtctagcttgtttcgagcagctcccaacaatactcggtcgacatgatcaaatttctctctataaaaaacagtgtagtttcgtatatcccctatttttgacactcatcatactactcatgcatgggcttctatctttcattgttttagattagaaaaaggcttttgttagttgttgtacatatatctattgcttaagagagaaactcctatgtctttgaaaatgcaaatgctagcgcgttctaaagcatgggtcgcctggcaggcaacaacgaac

SEQ ID NO: 19885 - DNA, 6400 bp, Zea Mays
atggctgagtcggaggacgccaccgccgccgagcccgggtccgggccgccccacgaggacgaggatgcgctgctcgcccgcgcccacaccgtcatctccaggatcatcgaccgcgagctcgaccccaacccccgcctcctccacaccctcgccaccatgtgcgagctccacgaagccagatatcttgagttacgttcagctgacacaatgttcaatagcacgaacacaaggactgcatttacaattgggaagctggccaatttgctccgggacaatgacgagttttacgagttggtgttttgtaaattcttgtctgacacctcctactctgttgctgtacgagctgccactgctaggttgctcttgagctgtcaccctgcctggacgcctccgtatcctcatgtctttgaagactctatcatagataatattaagaagtgggtaacggaggatcctgaagcgtctaatgaatgcaaatggaagtatctaggaaacaataaacccacagatgctgagatgctgagaacatatgggattggtttgcttgctatggcgttgtgcagcagtgggcaattgatagaggatgtcttgactttgggggtatcagcgaagctcatgcgctatttgcgcataagagtccttggggatgcctcatcttctcagagagatgctaatcatccacaggacaccaagcatccttggggcggagacgacagtaggggtaaatcacgtctgtcccaagatggttctcgattggacggaacaagggttgggtatggaatgttaaccaacccgacagcagagaagaacaacgaaccttgtgttggaatgatgcaagcatatggagcaaggtcattggatgacagttttgcttcattggatgattctgatgtccctgaggctgattggaccaatgatagatcttatagcacacgtgtttgtgacacaaagtcaaaacatggggaaaggaattctgtgacgaggttgcttaaagatgaagaggtcagcgaaaatggtgaactgttgaagagaaagctgaatcgagccccctcccgacttagagtgaagggaaaagcaggtgacagcttgccagaatgtgaaatgacacctttatcgccaacctctggattgagaataggaggtcaggctacaagagacaggaatgtggcgagggttgatgatccaaaggaggcaactgatgtgaacaatagattgtttaacaccatttccaaagaagaatacgaagatcgattcagggattgcattattggcttgaaggatatatctgacatcgttttgaaggcagtgagagccgctgaggctgaggccagatctgcaaatgcacctgatgaagctgtgaaagcagcaggtgacgctgctgccgagcttgtgaaatttgctgctttggaggtttggaaaagcgaaaataacagtgatgcggttgtagtagtggcggagaaagctgcatctgctgttgttgaggctgcattgtcaattagtgtctcacgaagtgcaaatcaagttggtgaagagcgtgcaatggaagaagctgtccaaaccagcgaagaccaggatttggaaaattttgttatcagtgacaaagcacagctattacaacttagagaaaattatagcatccagtgtctacagattttaggagagtatgttgaagctttgggtcctgtactccatgaaaaaggtgttgatgtttgcctcacattattgcaaaggagcatgaaaaaccaggagggatgtgaccactttgctcaactccttgatgtccttaaattggtttgtgcactggctgcccatcgaaaatttgctgcactctttgttgatcgtggtggtattcagaaaatcgtctctatgcctagagttacccagacatatatgggtctttctgcctgcttattcacttttgggtctcttcagtctaccattgaacgtgtttgtgcgctttcctcagacacacttgacagtgttgttgaattagcacttctacttcttgagtgcccacaagatttagctagaaaaaatgtggccatctttttcgctgctgcttttgtgttcaaagctgttctggatctatttgatgcccggaatgggatgcaaaagcttctcgatatcctttgtggatgcgcgtctggaaggtctggtagtaattctggaggagcaggatcctccaatgtaaatcaagggaatgatcggtcgcctgctgaagttttgactgcatcagagaagcaagttgcataccatacatgtgttgctctacggcaatactttagagctcatctccttcagcttgttgattccattcggccaagcaaaagtatccgtagtattgcccggaacacttctagtgcaagagctggctgcaaaccttttgacatcagcaatgaagctatggatgccatcttttgtcagatccaacgggacagaaagttaggccttgctcttgtgagagcttgctggcttgcgttggataaatttgttgcctcaaatggtcacatgactatgctggagttgtgtaaggcacatggtgatcggtatttgcgtgacttaactcaatatgcaattggagttcttcacatcataacacttatgccacagccacatgtccgcaaatcaatagtgcaggggacattaagcaacaatcgtgctggcatggctgtcttattagacacggtgaaaagtctcgactatattgatcatgaggtgatctgtccagcactgaatgtcctcgtcaatcttgtatgcccacctccttctatcagcaacaaaccattgtcaagttccaatcagcaacctgcagctgcacaagcgcttgcttcagaaagcagagaaaagaactttgaaaaaactatttcagataggaatctacttacaaacctgggtgaatctcgtgaaagatctggtgatggcaaccctgctgaaaagaacaataccttgcatcaaggaactcctagcacacctgttgtgccatctggagtagtcggtgatcgaagaataatgttaggagttggaggtggtggtcctggtcttgctgctcaattggaacaagggtaccgccaagctcgagaagttgtaagagccaataatggcataaagattcttttgcagcttcttggttctcggatggttacacatcctgtggctatagattctattcgagcccttgcctgccgtgttcttcttggcctggctagagacgatacaattgcacatatactgacaaagctccaggtggggaagaaattatcagaactgatccgtgatatcagtgctcagacatctgggggcgatagtggaagatggcaaactgagctgacccaagtggcaattgaactaattggggtattgacgaattctggaaaagaaacaacactagcggcaactgatgctgctgccccagcattgaggcgcattgagcgagctgggatagctgctgctgctcctatctcttaccattcgagggaactgatgcagttgatacatgaacatctccttgggtctggttttgctgccaccgctgctatgctccagaaggaggctggccttgcacctttaccattgacagcagcggtgcttcctgcccatcaagttgctgccctggaagcatcatctgttcagcaacagtggccctctggacatgttcagggatttctctcagataaaataaacacgtcgacatatcaatctgcccagagatcagatcctaagctgccttcatctaagaaaaaggcactggccttctcatccagtttctcacgaagagctcggtctccgcatccaagcaacatccttaaaagtcctgtacctattgcggctgatactggagatgcagaaatgttgaataaagcaccactgtcgctgccacttaagcggaactttgtggatgtgaaggatattagttttgcatcagcatcgaagcgccttgcaataactgatcaaatataccaatcctctgcattccaaactcctgctcctactcgcaaaggtctgtcggtatcagttgattctcctacttcatctcattgcggttggacaaacttcaacaatgcttttactgaaaacttggacaattctcaaggcacaccaggagcattgaccaccacagcacttcctggtgtaaatgaccaacaatcaggaaatttggagcgtatgacacttgactcactggttgtacaatacctgaaacatcaacaccgccaatgtcctgccccagttacaactttgccaccactttctcttttgcaccctcatgtttgccctgagcctagtcgcagccttagtgcaccggcaaacatagctgctcgagtgggaagccgtgagataagtaggcaatttagtgggatccagatacctcgtagggatcgtcattttatatacagtaggttcaagcagtgtcgtgtttgccgtgatgaggcatcactattgacttgcttgacatttcttggagatgcagctcgagttgtggctggtaaccacacaggtgaattaaggatatttgactgcaacacggcaaatctccttgagactcaaacgtgccaccaacatcttgttacaatgatggaatcgacatacactggtggaattgagatgattctcacatccagcctaaatgaggttaagatctgggatgccttctcggtatctgcagggcctttgcacacatttgacgactgcaaatctgctaggtttaaccactatggaacttcatttgctgccctttctactgatacagctcaacgggaggttcagttgtatgatgtacagacgtatactcttgctacacggcttcctgataacactagcagttcaggttcaggccgtggttatgtacaacccattatacatttcagtccttcagatacaatgttgctttggaatggagtcctgtgggatacaaggcaaccaaatcctgttcatcagtttgaccagttcacagattactgtggtggtggattccatccagcaggaaatgaggtgatcctgaattcggaggtgtgggatctgaggaagttcaagcttttgaggagtgtcccttccctggaccagacagtaataaagtttaacggaactggtgatgttatctatgccaccctgaggcgtaatcttgatgacgtgacatcatgcatcaatgctcgtagggtcaggcatcctcttttccctgcattcagcacgattgatgcggtgacttactcggatattgcaaccgtccaaatggaccgctgtgtacttgatcttgccactgagtccaatgattctcttattggggtggttgctatggacgatcaccaggagcttttctcttctgctcgcttgttcgaagttggcaggaagcgaataactgatgatgattccgatccagaggacgcaggtgaaactgatgatgactccgatgacgacgacgacgactccgatgacggtgttcttgcgccggtgctggaagggggtacagattctgaagatatcagtagcagcagcagcgatgacggtgatgaagatggtggtgacgatgatatacccagttcggatggcattgaagatgaccggttcattgatgagagacgacgggagttcatgatggatctttttggtgacggttgggacgacgatgaggcttatatgatgggatcctttagcagtggcgacgaggagggttggatcatatgttcgtggcgtgggcgtggcagaagctgacgccgcaggccgcgcaccagctgctggaacaaattattaaaggatacaccggaaaaaagcacaaaggcctgaagaacgtaccgaaatagataaacacctcatttttcaaaaggactcttccacccctggtaaattttcgagtacactctcccacctcgactaacgtacgtgtgttggtttgcggtttgcacgttcattgtaaaatagcaagcaagatcacaagaggtcaaaaccagacaagaccgttcttttaggacgtatgcaatgcaatacaatagtagtgacgagcgcgagaagatagattaatgaagaatatagctagggcaaagagattcggtccctagtaccgtcgtcaaaaagtatatatgttgcaggaaagtttcagtctatagtagtctacacctggccaaatgagcccggccggtctagcttgtttcgagcagctcccaacaatactcggtcgacatgatcaaatttctctctataaaaaacagtgtagtttcgtatatcccctatttttgacactcatcatactactcatgcatgggcttctatctttcattgttttagattagaaaaaggcttttgttagttgttgtacatatatctattgcttaagagagaaactcctatgtctttgaaaatgcaaatgctagcgcgttctaaagcatgggtcgcctggcaggcaacaacgaac

SEQ ID NO: 19886 - DNA, 7163 bp, Zea Mays
atggctgagtcggaggacgccaccgccgccgagcccgggtccgggccgccccacgaggacgaggatgcgctgctcgcccgcgcccacaccgtcatctccaggatcatcgaccgcgagctcgaccccaacccccgcctcctccacaccctcgccaccatgtgcgagctccacgaagccagatatcttgagttacgttcagctgacacaatgttcaatagcacgaacacaaggactgcatttacaattgggaagctggccaatttgctccgggacaatgacgagttttacgagttggtgttttgtaaattcttgtctgacacctcctactctgttgctgtacgagctgccactgctaggttgctcttgagctgtcaccctgcctggacgcctccgtatcctcatgtctttgaagactctatcatagataatattaagaagtgggtaacggaggatcctgaagcgtctaatgaatgcaaatggaagtatctaggaaacaataaacccacagatgctgagatgctgagaacatatgggattggtttgcttgctatggcgttgtgcagcagtgggcaattgatagaggatgtcttgactttgggggtatcagcgaagctcatgcgctatttgcgcataagagtccttggggatgcctcatcttctcagagagatgctaatcatccacaggacaccaagcatccttggggcggagacgacagtaggggtaaatcacgtctgtcccaagatggttctcgattggacggaacaagggttgggtatggaatgttaaccaacccgacagcagagaagaacaacgaaccttgtgttggaatgatgcaagcatatggagcaaggtcattggatgacagttttgcttcattggatgattctgatgtccctgaggctgattggaccaatgatagatcttatagcacacgtgtttgtgacacaaagtcaaaacatggggaaaggaattctgtgacgaggttgcttaaagatgaagaggtcagcgaaaatggtgaactgttgaagagaaagctgaatcgagccccctcccgacttagagtgaagggaaaagcaggtgacagcttgccagaatgtgaaatgacacctttatcgccaacctctggattgagaataggaggtcaggctacaagagacaggaatgtggcgagggttgatgatccaaaggaggcaactgatgtgaacaatagattgtttaacaccatttccaaagaagaatacgaagatcgattcagggattgcattattggcttgaaggatatatctgacatcgttttgaaggcagtgagagccgctgaggctgaggccagatctgcaaatgcacctgatgaagctgtgaaagcagcaggtgacgctgctgccgagcttgtgaaatttgctgctttggaggtttggaaaagcgaaaataacagtgatgcggttgtagtagtggcggagaaagctgcatctgctgttgttgaggctgcattgtcaattagtgtctcacgaagtgcaaatcaagttggtgaagagcgtgcaatggaagaagctgtccaaaccagcgaagaccaggatttggaaaattttgttatcagtgacaaagcacagctattacaacttagagaaaattatagcatccagtgtctacagattttaggagagtatgttgaagctttgggtcctgtactccatgaaaaaggtgttgatgtttgcctcacattattgcaaaggagcatgaaaaaccaggagggatgtgaccactttgctcaactccttgatgtccttaaattggtttgtgcactggctgcccatcgaaaatttgctgcactctttgttgatcgtggtggtattcagaaaatcgtctctatgcctagagttacccagacatatatgggtctttctgcctgcttattcacttttgggtctcttcagtctaccattgaacgtgtttgtgcgctttcctcagacacacttgacagtgttgttgaattagcacttctacttcttgagtgcccacaagatttagctagaaaaaatgtggccatctttttcgctgctgcttttgtgttcaaagctgttctggatctatttgatgcccggaatgggatgcaaaagcttctcgatatcctttgtggatgcgcgtctggaaggtctggtagtaattctggaggagcaggatcctccaatgtaaatcaagggaatgatcggtcgcctgctgaagttttgactgcatcagagaagcaagttgcataccatacatgtgttgctctacggcaatactttagagctcatctccttcagcttgttgattccattcggccaagcaaaagtatccgtagtattgcccggaacacttctagtgcaagagctggctgcaaaccttttgacatcagcaatgaagctatggatgccatcttttgtcagatccaacgggacagaaagttaggccttgctcttgtgagagcttgctggcttgcgttggataaatttgttgcctcaaatggtcacatgactatgctggagttgtgtaagtttcaggcacatggtgatcggtatttgcgtgacttaactcaatatgcaattggagttcttcacatcataacacttatgccacagccacatgtccgcaaatcaatagtgcaggggacattaagcaacaatcgtgctggcatggctgtcttattagacacggtgaaaagtctcgactatattgatcatgaggtgatctgtccagcactgaatgtcctcgtcaatcttgtatgcccacctccttctatcagcaacaaaccattgtcaagttccaatcagcaacctgcagctgcacaagcgcttgcttcagaaagcagagaaaagaactttgaaaaaactatttcagataggaatctacttacaaacctgggtgaatctcgtgaaagatctggtgatggcaaccctgctgaaaagaacaataccttgcatcaaggaactcctagcacacctgttgtgccatctggagtagtcggtgatcgaagaataatgttaggagttggaggtggtggtcctggtcttgctgctcaattggaacaagggtaccgccaagctcgagaagttgtaagagccaataatggcataaagattcttttgcagcttcttggttctcggatggttacacatcctgtggctatagattctattcgagcccttgcctgccgtgttcttcttggcctggctagagacgatacaattgcacatatactgacaaagctccaggtggggaagaaattatcagaactgatccgtgatatcagtgctcagacatctgggggcgatagtggaagatggcaaactgagctgacccaagtggcaattgaactaattggggtattgacgaattctggaaaagaaacaacactagcggcaactgatgctgctgccccagcattgaggcgcattgagcgagctgggatagctgctgctgctcctatctcttaccattcgagggaactgatgcagttgatacatgaacatctccttgggtctggttttgctgccaccgctgctatgctccagaaggaggctggccttgcacctttaccattgacagcagcggtgcttcctgcccatcaagttgctgccctggaagcatcatctgttcagcaacagtggccctctggacatgttcagggatttctctcagataaaataaacacgtcgacatatcaatctgcccagagatcagatcctaagctgccttcatctaagaaaaaggcactggccttctcatccagtttctcacgaagagctcggtctccgcatccaagcaacatccttaaaagtcctgtacctattgcggctgatactggagatgcagaaatgttgaataaagcaccactgtcgctgccacttaagcggaactttgtggatgtgaaggatattagttttgcatcagcatcgaagcgccttgcaataactgatcaaatataccaatcctctgcattccaaactcctgctcctactcgcaaaggtctgtcggtatcagttgattctcctacttcatctcattgcggttggacaaacttcaacaatgcttttactgaaaacttggacaattctcaaggcacaccaggagcattgaccaccacagcacttcctggtgtaaatgaccaacaatcaggaaatttggagcgtatgacacttgactcactggttgtacaatacctgaaacatcaacaccgccaatgtcctgccccagttacaactttgccaccactttctcttttgcaccctcatgtttgccctgagcctagtcgcagccttagtgcaccggcaaacatagctgctcgagtgggaagccgtgagataagtaggcaatttagtgggatccagatacctcgtagggatcgtcattttatatacagtaggttcaagcagtgtcgtgtttgccgtgatgaggcatcactattgacttgcttgacatttcttggagatgcagctcgagttgtggctggtaaccacacaggtgaattaaggatatttgactgcaacacggcaaatctccttgagactcaaacgtgccaccaacatcttgttacaatgatggaatcgacatacactggtggaattgagatgattctcacatccagcctaaatgaggttaagatctgggatgccttctcggtatctgcagggcctttgcacacatttgacgactgcaaatctgctaggtttaaccactatggaacttcatttgctgccctttctactgatacagctcaacgggaggttcagttgtatgatgtacagacgtatactcttgctacacggcttcctgataacactagcagttcaggttcaggccgtggttatgtacaacccattatacatttcagtccttcagatacaatgttgctttggaatggagtcctgtgggatacaaggcaaccaaatcctgttcatcagtttgaccagttcacagattactgtggtggtggattccatccagcaggaaatgaggtgttcttttcccttgaaccatgctaattaatcttgtttacttgtttatgttttgaaccgtaatgtcttactatgcatctcatagcatgttattgtgtgtttatggcattctaataacttaacttatcacttttctctcatgactgcgttagtaggattgttcgatgtatcttgtacatcattttttaggacttgtcatctagtttagtagcatatccatctaatgtcattatatctcaaccttgtcccactttttattcagtaaaagattttctgggattcaaaataatcttatctttcatgtccaaataaagtatctcagtaaacaatgcacaataacatttttttagtagaacgaggagtgcatggagtagcaaaacaagagccttaaaaaatctgttggctatttaaaataatagtgcatttgccacctaattttataagtgaggtggagatttatcatagtacatggatattgatcatgatgaacaatgtcctgaaagaataatttatccactggctttgctaccagaattatttgtcgtgcatgccattattttaagaaagaggaatttgtttctattgtgtttgtatccactggctttgcatgtcattaaatattgcacaggtgatcctgaattcggaggtgtgggatctgaggaagttcaagcttttgaggagtgtcccttccctggaccagacagtaataaagtttaacggaactggtgatgttatctatgccaccctgaggcgtaatcttgatgacgtgacatcatgcatcaatgctcgtagggtcaggcatcctcttttccctgcattcagcacgattgatgcggtgacttactcggatattgcaaccgtccaaatggaccgctgtgtacttgatcttgccactgagtccaatgattctcttattggggtggttgctatggacgatcaccaggagcttttctcttctgctcgcttgttcgaagttggcaggaagcgaataactgatgatgattccgatccagaggacgcaggtgaaactgatgatgactccgatgacgacgacgacgactccgatgacggtgttcttgcgccggtgctggaagggggtacagattctgaagatatcagtagcagcagcagcgatgacggtgatgaagatggtggtgacgatgatatacccagttcggatggcattgaagatgaccggttcattgatgagagacgacgggagttcatgatggatctttttggtgacggttgggacgacgatgaggcttatatgatgggatcctttagcagtggcgacgaggagggttggatcatgtaggttttgtgctgctggcctgctgaagaacatgaagcattgccgtatgttcgtggcgtgggcgtggcagaagctgacgccgcaggccgcgcaccagctgctggaacaagtactcgtggaaccgcccggcctggcagatgcgctccagcagcttcccgcctgccgccgcctactccatcaggatcgccaagattattaaaggatacaccggaaaaaagcacaaaggcctgaagaacgtaccgaaatagataaacacctcatttttcaaaaggactcttccacccctggtaaattttcgagtacactctcccacctcgactaacgtacgtgtgttggtttgcggtttgcacgttcattgtaaaatagcaagcaagatcacaagaggtcaaaaccagacaagaccgttcttttaggacgtatgcaatgcaatacaatagtagtgacgagcgcgagaagatagattaatgaagaatatagctagggcaaagagattcggtccctagtaccgtcgtcaaaaagtatatatgttgcaggaaagtttcagtctatagtagtctacacctggccaaatgagcccggccggtctagcttgtttcgagcagctcccaacaatactcggtcgacatgatcaaatttctctctataaaaaacagtgtagtttcgtatatcccctatttttgacactcatcatactactcatgcatgggcttctatctttcattgttttagattagaaaaaggcttttgttagttgttgtacatatatctattgcttaagagagaaactcctatgtctttgaaaatgcaaatgctagcgcgttctaaagcatgggtcgcctggcaggcaacaacgaac

SEQ ID NO: 19887 - DNA, 302 bp, Zea Mays
caacacatgatcaagacgtctttgtttctctcctgacgagaaaccttgcaatggatttgaagaagcttttggacaatgcagggaacttgatcaacaccctttgcaccgatgtgaagcaaagtggtggacaataccacgtcctgttgataattgcagatgggaaggacgccatggcagccttgccctgctcccccaacagcgcccacctgcccctttccttgcgcgacgcgagatggatcggcgaatccatggcagcttggcagggtggtctatctcaaagattttcgaaagttgtttcttat

SEQ ID NO: 19888 - DNA, 3395 bp, Zea Mays
aaacaggacctttagtcctttactcatcctcgttagtcttgactcttgcgcgtccacccctgcgcttttcactagtttggattcggacttcctgcgctccgccaattgcttcctactccacctcctcttctccctccccaagccgccgccgccgccgccgcctcatctcatccccatcacccactcccggcggatcgtcgatggcggcgccggcgatatggcagccacaggagcaggggctccacgagatctgcaccctcctggaggcgcacatctcccccaactccgaccaggcccgcatctggcagcagctccagcactacagccagttccccgacttcaataattacctaaccttcatcctggcccgcggagaggggaaatcaattgaagttagacaggcagctggtctactactgaaaaacaatctgcgaacgactttcatctctatgcaaccttcgtcccagcattatgttaagtctgagctgttaccatgtataggggcaaccaatagggctattagatccacagttggaacagtgatcagtgtacttttccaaattgtacgagtcgctggatggattgagttgtttcaggcactccataagtgtttggagagtaatgacctggatcacatggaaggtgctatggatgcgatatacaagatctgtgaggatgtccctgaagagctcgatgttgatgttcctggtttgtctgaacgaccgatcaatgtgtttatgccaaaaatactgcagttcttccagtcaccacatgcaagtttgagaaaactatcgttgggttgtataaatcagtacatagtagtgatgccatcggcactctacatgtctatggatcagtatattcagggattattcaaccttgcaaaggacccttcagcagatgttcggaaactggtttgttcagcctgggttcagctcattgaagttcgcccatctattttggagtcacatcttaaaaatgttactgaattgattctgcaagctaataaagatccagatgatgaagtcgctctggaagcttgcgagttctggtctgcatactgtgatgtgagcatgcctcctgaaggtttacgggagttcttgccacgcttaatcccgactttgttgtcgaacatggtatatgctgatgatgatgagtcccttgatgatgctgaggaagatgaatcctttccggacagggaccaggatttgaagccccgctttcatgcctctcgattgcatggatcacaaactggagatgatgatgatgatgatgatgctgtaaatgtctggaacctgcggaagtgtagtgctgctgggttggatgttctctctaatgtgtttggtgacagcatccttccaactttaatgccattgattgagatgacaattcttggaaggagagggaaactgctgttttgtgtctaggcgctatagcagaggggtgcattggtggtctatacccacaccttcctcagattgttgccttcctaatcccacttcttgatgataaatttcctcttatacggagtattacgtgttggacgctctctcgatatagcaaattcattgttcagagccttgatcatccaaatggacgtgaacaatttgataagattctcatgggattgctaagaaggatattggatactaacaaaagagtgcaagaggctgcttgttcagcgtttgcaactcttgaagaggaagcttctgaagaattagtaccccacttggaagtaattttgcagcacctcatgtgtgcctatggaaaataccagagacgaaatcttcggatactctatgatgcccttggtaccctggctgatgctgttggagcagaattaaatcaggcaaaatatctagatatatttatgccgcctttgatcacgaagtggcagcaactttccaattctgacaaagatctatttccactccttgaatgctttacatctattgcacaggcattgggaccaggatttgctcagtttgcggaaccagtgtttcaaaggtgcatcaatcttatccaatcgcaacagttggcaaagattgatcctactgcagctggtgcggtgtatgatagagaattcattgtttgttcgttggacctactgtctggacttgcagaaggtcttggcgctggtattgaaagtcttgttgcacagagcagtttgagagatctgcttttgcaatgctgcatggatgaagcagctgatgttcgacaaagtgcccttgcccttcttggagacctttctagggtttgcccaatacatttgcatccacgtcttcaagaatttcttactgttgcagcaaagcaactgaaccctcagtctgtgaaggatgcggtatcagtagctaacaatgcctgttgggctattggagaattagcaatcaagattggcaaagaaatagcacctgtggtgatcaccgttgtttcgtgcttgattaccatcctaaaatccccagagggtttgaacaagtcacttgttgaaaatagtgcgatcactcttgggaggcttagctgggtctgtccagacatcgtggcccctcatatggagcatttcatgcaagcatggtgcagtgccttgtgcacgatcagagatgattttgagaaagaggacgcgtttcatggactgtgtgcaatggtggcagcaaaccctacaggagccgctggttcattagcttacatctgccaggcctgtgcaagttggactgagataaaaagcgaaggtcttcacaatgaggtgtgccagattctgaatggctacaagcagctgcttggaaacaacggtgggtgggaacaatgcatggccgccctgaaaccagacgttgtgcagaaattagctagatacggagtatgatgagaagcaagctcgtgtggtttattcacctcatacaccgaccatcatctttatggcggagacaagagaggagcagaaaggggtgggggtcgtcgagagtgtctctgctgctgatgcatcatctttacatgtgtggcacttgagagtcgattcggttcgttggtacgccattgtccgttcgttcattgttatactggttggtgcacagcatttccagagcgagagtaggatgtcttggtaaaccccccatgtgtattggttggttgggccagtggacttggttttggtttttttgtcattcctactggcaaacacaacaaggccaccaccctcttgctcgccccaccccggcaacattgagaaaacagaaaggttttgtagcgtgtaattctctctcttttcttggtttcttattattattaggtgtaggattgttttcgagtcttgtttggcaggaagggtttgtacgagaaatcaattgattgctcactcaccacaaaataataaaaaagatcgatcgatggggcttgtatctcct

SEQ ID NO: 19889 - DNA, 3303 bp, Zea Mays
aaacaggacctttagtcctttactcatcctcgttagtcttgactcttgcgcgtccacccctgcgcttttcactagtttggattcggacttcctgcgctccgccaattgcttcctactccacctcctcttctccctccccaagccgccgccgccgccgccgcctcatctcatccccatcacccactcccggcggatcgtcgatggcggcgccggcgatatggcagccacaggagcaggggctccacgagatctgcaccctcctggaggcgcacatctcccccaactccgaccaggcccgcatctggcagcagctccagcactacagccagttccccgacttcaataattacctaaccttcatcctggcccgcggagaggggaaatcaattgaagttagacaggcagctggtctactactgaaaaacaatctgcgaacgactttcatctctatgcaaccttcgtcccagcattatgttaagtctgagctgttaccatgtataggggcaaccaatagggctattagatccacagttggaacagtgatcagtgtacttttccaaattgtacgagtcgctggatggattgagttgtttcaggcactccataagtgtttggagagtaatgacctggatcacatggaaggtgctatggatgcgatatacaagatctgtgaggatgtccctgaagagctcgatgttgatgttcctggtttgtctgaacgaccgatcaatgtgtttatgccaaaaatactgcagttcttccagtcaccacatgcaagtttgagaaaactatcgttgggttgtataaatcagtacatagtagtgatgccatcggcactctacatgtctatggatcagtatattcagggattattcaaccttgcaaaggacccttcagcagatgttcggaaactggtttgttcagcctgggttcagctcattgaagttcgcccatctattttggagtcacatcttaaaaatgttactgaattgattctgcaagctaataaagatccagatgatgaagtcgctctggaagcttgcgagttctggtctgcatactgtgatgtgagcatgcctcctgaaggtttacgggagttcttgccacgcttaatcccgactttgttgtcgaacatggtatatgctgatgatgatgagtcccttgatgatgctgaggaagatgaatcctttccggacagggaccaggatttgaagccccgctttcatgcctctcgattgcatggatcacaaactggagatgatgatgatgatgatgatgctgtaaatgtctggaacctgcggaagtgtagtgctgctgggttggatgttctctctaatgtgtttggtgacagcatccttccaactttaatgccattgattgagcaaaacttggctcgaacagatgacaattcttggaaggagagggaaactgctgttttgtgtctaggcgctatagcagaggggtgcattggtggtctatacccacaccttcctcagattgttgccttcctaatcccacttcttgatgataaatttcctcttatacggagtattacgtgttggacgctctctcgatatagcaaattcattgttcagagccttgatcatccaaatggacgtgaacaatttgataagattctcatgggattgctaagaaggatattggatactaacaaaagagtgcaagaggctgcttgttcagcgtttgcaactcttgaagaggaagcttctgaagaattagtaccccacttggaagtaattttgcagcacctcatgtgtgcctatggaaaataccagagacgaaatcttcggatactctatgatgcccttggtaccctggctgatgctgttggagcagaattaaatcaggcattgggaccaggatttgctcagtttgcggaaccagtgtttcaaaggtgcatcaatcttatccaatcgcaacagttggcaaagattgatcctactgcagctggtgcggtgtatgatagagaattcattgtttgttcgttggacctactgtctggacttgcagaaggtcttggcgctggtattgaaagtcttgttgcacagagcagtttgagagatctgcttttgcaatgctgcatggatgaagcagctgatgttcgacaaagtgcccttgcccttcttggagacctttctagggtttgcccaatacatttgcatccacgtcttcaagaatttcttactgttgcagcaaagcaactgaaccctcagtctgtgaaggatgcggtatcagtagctaacaatgcctgttgggctattggagaattagcaatcaagattggcaaagaaatagcacctgtggtgatcaccgttgtttcgtgcttgattaccatcctaaaatccccagagggtttgaacaagtcacttgttgaaaatagtgcgatcactcttgggaggcttagctgggtctgtccagacatcgtggcccctcatatggagcatttcatgcaagcatggtgcagtgccttgtgcacgatcagagatgattttgagaaagaggacgcgtttcatggactgtgtgcaatggtggcagcaaaccctacaggagccgctggttcattagcttacatctgccaggcctgtgcaagttggactgagataaaaagcgaaggtcttcacaatgaggtgtgccagattctgaatggctacaagcagctgcttggaaacaacggtgggtgggaacaatgcatggccgccctgaaaccagacgttgtgcagaaattagctagatacggagtatgatgagaagcaagctcgtgtggtttattcacctcatacaccgaccatcatctttatggcggagacaagagaggagcagaaaggggtgggggtcgtcgagagtgtctctgctgctgatgcatcatctttacatgtgtggcacttgagagtcgattcggttcgttggtacgccattgtccgttcgttcattgttatactggttggtgcacagcatttccagagcgagagtaggatgtcttggtaaaccccccatgtgtattggttggttgggccagtggacttggttttggtttttttgtcattcctactggcaaacacaacaaggccaccaccctcttgctcgccccaccccggcaacattgagaaaacagaaaggttttgtagcgtgtaattctctctcttttcttggtttcttattattattaggtgtaggattgttttcgagtcttgtttggcaggaagggtttgtacgagaaatcaattgattgctcactcaccacaaaataataaaaaagatcgatcgatggggcttgtatctcct

SEQ ID NO: 19890 - DNA, 3408 bp, Zea Mays
aaacaggacctttagtcctttactcatcctcgttagtcttgactcttgcgcgtccacccctgcgcttttcactagtttggattcggacttcctgcgctccgccaattgcttcctactccacctcctcttctccctccccaagccgccgccgccgccgccgcctcatctcatccccatcacccactcccggcggatcgtcgatggcggcgccggcgatatggcagccacaggagcaggggctccacgagatctgcaccctcctggaggcgcacatctcccccaactccgaccaggcccgcatctggcagcagctccagcactacagccagttccccgacttcaataattacctaaccttcatcctggcccgcggagaggggaaatcaattgaagttagacaggcagctggtctactactgaaaaacaatctgcgaacgactttcatctctatgcaaccttcgtcccagcattatgttaagtctgagctgttaccatgtataggggcaaccaatagggctattagatccacagttggaacagtgatcagtgtacttttccaaattgtacgagtcgctggatggattgagttgtttcaggcactccataagtgtttggagagtaatgacctggatcacatggaaggtgctatggatgcgatatacaagatctgtgaggatgtccctgaagagctcgatgttgatgttcctggtttgtctgaacgaccgatcaatgtgtttatgccaaaaatactgcagttcttccagtcaccacatgcaagtttgagaaaactatcgttgggttgtataaatcagtacatagtagtgatgccatcggcactctacatgtctatggatcagtatattcagggattattcaaccttgcaaaggacccttcagcagatgttcggaaactggtttgttcagcctgggttcagctcattgaagttcgcccatctattttggagtcacatcttaaaaatgttactgaattgattctgcaagctaataaagatccagatgatgaagtcgctctggaagcttgcgagttctggtctgcatactgtgatgtgagcatgcctcctgaaggtttacgggagttcttgccacgcttaatcccgactttgttgtcgaacatggtatatgctgatgatgatgagtcccttgatgatgctgaggaagatgaatcctttccggacagggaccaggatttgaagccccgctttcatgcctctcgattgcatggatcacaaactggagatgatgatgatgatgatgatgctgtaaatgtctggaacctgcggaagtgtagtgctgctgggttggatgttctctctaatgtgtttggtgacagcatccttccaactttaatgccattgattgagcaaaacttggctcgaacagatgacaattcttggaaggagagggaaactgctgttttgtgtctaggcgctatagcagaggggtgcattggtggtctatacccacaccttcctcagattgttgccttcctaatcccacttcttgatgataaatttcctcttatacggagtattacgtgttggacgctctctcgatatagcaaattcattgttcagagccttgatcatccaaatggacgtgaacaatttgataagattctcatgggattgctaagaaggatattggatactaacaaaagagtgcaagaggctgcttgttcagcgtttgcaactcttgaagaggaagcttctgaagaattagtaccccacttggaagtaattttgcagcacctcatgtgtgcctatggaaaataccagagacgaaatcttcggatactctatgatgcccttggtaccctggctgatgctgttggagcagaattaaatcaggcaaaatatctagatatatttatgccgcctttgatcacgaagtggcagcaactttccaattctgacaaagatctatttccactccttgaatgctttacatctattgcacaggcattgggaccaggatttgctcagtttgcggaaccagtgtttcaaaggtgcatcaatcttatccaatcgcaacagttggcaaagattgatcctactgcagctggtgcggtgtatgatagagaattcattgtttgttcgttggacctactgtctggacttgcagaaggtcttggcgctggtattgaaagtcttgttgcacagagcagtttgagagatctgcttttgcaatgctgcatggatgaagcagctgatgttcgacaaagtgcccttgcccttcttggagacctttctagggtttgcccaatacatttgcatccacgtcttcaagaatttcttactgttgcagcaaagcaactgaaccctcagtctgtgaaggatgcggtatcagtagctaacaatgcctgttgggctattggagaattagcaatcaagattggcaaagaaatagcacctgtggtgatcaccgttgtttcgtgcttgattaccatcctaaaatccccagagggtttgaacaagtcacttgttgaaaatagtgcgatcactcttgggaggcttagctgggtctgtccagacatcgtggcccctcatatggagcatttcatgcaagcatggtgcagtgccttgtgcacagatgattttgagaaagaggacgcgtttcatggactgtgtgcaatggtggcagcaaaccctacaggagccgctggttcattagcttacatctgccaggcctgtgcaagttggactgagataaaaagcgaaggtcttcacaatgaggtgtgccagattctgaatggctacaagcagctgcttggaaacaacggtgggtgggaacaatgcatggccgccctgaaaccagacgttgtgcagaaattagctagatacggagtatgatgagaagcaagctcgtgtggtttattcacctcatacaccgaccatcatctttatggcggagacaagagaggagcagaaaggggtgggggtcgtcgagagtgtctctgctgctgatgcatcatctttacatgtgtggcacttgagagtcgattcggttcgttggtacgccattgtccgttcgttcattgttatactggttggtgcacagcatttccagagcgagagtaggatgtcttggtaaaccccccatgtgtattggttggttgggccagtggacttggttttggtttttttgtcattcctactggcaaacacaacaaggccaccaccctcttgctcgccccaccccggcaacattgagaaaacagaaaggttttgtagcgtgtaattctctctcttttcttggtttcttattattattaggtgtaggattgttttcgagtcttgtttggcaggaagggtttgtacgagaaatcaattgattgctcactcaccacaaaataataaaaaagatcgatcgatggggcttgtatctcct

SEQ ID NO: 19891 - DNA, 2241 bp, Zea Mays
gaattgtaaagcacatagcatattgaagattggatttgaagccccgctttcatgcctctcgattgcatggatcacaaactggagatgatgatgatgatgatgatgctgtaaatgtctggaacctgcggaagtgtagtgctgctgggttggatgttctctctaatgtgtttggtgacagcatccttccaactttaatgccattgattgagcaaaacttggctcgaacagatgacaattcttggaaggagagggaaactgctgttttgtgtctaggcgctatagcagaggggtgcattggtggtctatacccacaccttcctcagattgttgccttcctaatcccacttcttgatgataaatttcctcttatacggagtattacgtgttggacgctctctcgatatagcaaattcattgttcagagccttgatcatccaaatggacgtgaacaatttgataagattctcatgggattgctaagaaggatattggatactaacaaaagagtgcaagaggctgcttgttcagcgtttgcaactcttgaagaggaagcttctgaagaattagtaccccacttggaagtaattttgcagcacctcatgtgtgcctatggaaaataccagagacgaaatcttcggatactctatgatgcccttggtaccctggctgatgctgttggagcagaattaaatcaggcaaaatatctagatatatttatgccgcctttgatcacgaagtggcagcaactttccaattctgacaaagatctatttccactccttgaatgctttacatctattgcacaggcattgggaccaggatttgctcagtttgcggaaccagtgtttcaaaggtgcatcaatcttatccaatcgcaacagttggcaaagattgatcctactgcagctggtgcggtgtatgatagagaattcattgtttgttcgttggacctactgtctggacttgcagaaggtcttggcgctggtattgaaagtcttgttgcacagagcagtttgagagatctgcttttgcaatgctgcatggatgaagcagctgatgttcgacaaagtgcccttgcccttcttggagacctttctagggtttgcccaatacatttgcatccacgtcttcaagaatttcttactgttgcagcaaagcaactgaaccctcagtctgtgaaggatgcggtatcagtagctaacaatgcctgttgggctattggagaattagcaatcaagattggcaaagaaatagcacctgtggtgatcaccgttgtttcgtgcttgattaccatcctaaaatccccagagggtttgaacaagtcacttgttgaaaatagtgcgatcactcttgggaggcttagctgggtctgtccagacatcgtggcccctcatatggagcatttcatgcaagcatggtgcagtgccttgtgcacgatcagagatgattttgagaaagaggacgcgtttcatggactgtgtgcaatggtggcagcaaaccctacaggagccgctggttcattagcttacatctgccaggcctgtgcaagttggactgagataaaaagcgaaggtcttcacaatgaggtgtgccagattctgaatggctacaagcagctgcttggaaacaacggtgggtgggaacaatgcatggccgccctgaaaccagacgttgtgcagaaattagctagatacggagtatgatgagaagcaagctcgtgtggtttattcacctcatacaccgaccatcatctttatggcggagacaagagaggagcagaaaggggtgggggtcgtcgagagtgtctctgctgctgatgcatcatctttacatgtgtggcacttgagagtcgattcggttcgttggtacgccattgtccgttcgttcattgttatactggttggtgcacagcatttccagagcgagagtaggatgtcttggtaaaccccccatgtgtattggttggttgggccagtggacttggttttggtttttttgtcattcctactggcaaacacaacaaggccaccaccctcttgctcgccccaccccggcaacattgagaaaacagaaaggttttgtagcgtgtaattctctctcttttcttggtttcttattattattaggtgtaggattgttttcgagtcttgtttggcaggaagggtttgtacgagaaatcaattgattgctcactcaccacaaaataataaaaaagatcgatcgatggggcttgtatctcct

SEQ ID NO: 19892 - DNA, 1703 bp, Zea Mays
gacatatatagaagcttctgaagaattagtaccccacttggaagtaattttgcagcacctcatgtgtgcctatggaaaataccagagacgaaatcttcggatactctatgatgcccttggtaccctggctgatgctgttggagcagaattaaatcaggcaaaatatctagatatatttatgccgcctttgatcacgaagtggcagcaactttccaattctgacaaagatctatttccactccttgaatgctttacatctattgcacaggcattgggaccaggatttgctcagtttgcggaaccagtgtttcaaaggtgcatcaatcttatccaatcgcaacagttggcaaagattgatcctactgcagctggtgcggtgtatgatagagaattcattgtttgttcgttggacctactgtctggacttgcagaaggtcttggcgctggtattgaaagtcttgttgcacagagcagtttgagagatctgcttttgcaatgctgcatggatgaagcagctgatgttcgacaaagtgcccttgcccttcttggagacctttctagggtttgcccaatacatttgcatccacgtcttcaagaatttcttactgttgcagcaaagcaactgaaccctcagtctgtgaaggatgcggtatcagtagctaacaatgcctgttgggctattggagaattagcaatcaagattggcaaagaaatagcacctgtggtgatcaccgttgtttcgtgcttgattaccatcctaaaatccccagagggtttgaacaagtcacttgttgaaaatagtgcgatcactcttgggaggcttagctgggtctgtccagacatcgtggcccctcatatggagcatttcatgcaagcatggtgcagtgccttgtgcacgatcagagatgattttgagaaagaggacgcgtttcatggactgtgtgcaatggtggcagcaaaccctacaggagccgctggttcattagcttacatctgccaggcctgtgcaagttggactgagataaaaagcgaaggtcttcacaatgaggtgtgccagattctgaatggctacaagcagctgcttggaaacaacggtgggtgggaacaatgcatggccgccctgaaaccagacgttgtgcagaaattagctagatacggagtatgatgagaagcaagctcgtgtggtttattcacctcatacaccgaccatcatctttatggcggagacaagagaggagcagaaaggggtgggggtcgtcgagagtgtctctgctgctgatgcatcatctttacatgtgtggcacttgagagtcgattcggttcgttggtacgccattgtccgttcgttcattgttatactggttggtgcacagcatttccagagcgagagtaggatgtcttggtaaaccccccatgtgtattggttggttgggccagtggacttggttttggtttttttgtcattcctactggcaaacacaacaaggccaccaccctcttgctcgccccaccccggcaacattgagaaaacagaaaggttttgtagcgtgtaattctctctcttttcttggtttcttattattattaggtgtaggattgttttcgagtcttgtttggcaggaagggtttgtacgagaaatcaattgattgctcactcaccacaaaataataaaaaagatcgatcgatggggcttgtatctcct

SEQ ID NO: 19893 - DNA, 2783 bp, Zea Mays
aaccaatcaaacttgttgaactgaatattcccttcctgcttcgacgattctatgtttatcacgcccaacaaagtagtgtagtttttcgacgccggcggatccctcgagccctagctaggaaagtagggttttcgatggattctctgagccggagggagcgggcacaccgcgccgtcgacgccatgaagcctctgggcttctcgaagaaggaggtcttcgccgtcctcaagaacctcctccagctgttcgataactcctgggagcccattgaggacgagtgctaccgcgccctcgccgatgctatcctcgaagcccgcgaccggccccagatgcattgcagcaacagtacaagaggggttcggcttccgccggagggggagggctgccggccccggccttctacttcccgtgacatccacgacggtctggatggtgggaccgaggcccttcgcatcaagaggacgaggatcagcgctagttgctctatcgatccccagtctcccgtctccgctgcggaagcccttgatgaacctataggcgtttcgtctgagctaagccatccacaaatggggacctcaacccaatgtcagcggcccactgcatatggtggcgtgccttcacatgggaatactgcacacaagaagagggcaatacaaatgatggatgaagatttccaacataccgtcttcttgagggagcctaaacctgaacctgatactgatgatctacaatgcagtgcccctgcatccagctgtcagaatgcccaacttggccgcattgcttcccacccgctcaatgccagcaccttagatgctctacctgttcaggctccgttaaagatttcaggagctaatggcaggacagtccagcattatagaagtacagcgccttcttcctttgttgaacctataaatagcaagacgaagcaacctcaaagtctggaaaatgggttggaccatgcaactatgatgcacaatgctgggacaggatctgcagctggaaaaacacaggaagcaccttgtttacacactcttgtagcttcatccactatgggtgaggtcgagatgtcgatcaaatgctgcatagacccatcaaaattccacatgcctgatttagaagctgttttcaagatggttgaggaaaaatgccttcgctcacacaagagcctcccacctgatttttccatagccggtctcatcaagcagatatgccagtgtgtcgcacgactaggcagtgatcatgctgcagaacataataaacaatcagatgcttttggcaagatcagaagctcacaggataagccaacaacgagtagtgctccatccttggaaccaattgattgcatgaacagcagaagcggggaatataaagctgtagaagaatcattgattgtggaagcttcagagaatggcccaccaaattcaactacccatcagcaggcccatttggtacttcctcccaatgggtgtacccatgatttatctgacatatcaaagggaaaagaaaggactcctatgttaactctgttgaaacaattggcgacaaggactgttgttctgattgctctggcaactgcttgtatgcctctgaaccatgtgcctgtgcaagaaaaactggtggtgaatttgcctatacacgagacggattggttaggacaaagttccttgatgagtgcatctctatgaaccggtttccagaaaaacataatatgttcttctgtaaatcttgcccacttgagagtatcaggaacgagccttcaccagagctttgcaggggccatattattaggaattttatcaaggaatgcgggagtaaatgtggctgtaacgcgcaatgtggtaaccgtgtagttcaacgtggtataacttgcaatctgcaggtgttttcgacacgggaagggaaggggtgggggctacgcacacttgatgaacttccaaaaggagcttttgtctgtgaatatgttggagagttgctaacaaatacgaagctacatgaaatgactactcaaaacatgcacaatgctaggtactcagtgctcttagatgctggttggggtcctgatggggtgctgaaggatgaagaagctttattcctggatgcgacattttgtgggaatgttgggagattcatcaaccacagatgctatgatgcaaatttagttgagatccccgttgaaaaggagacgccagatcatcactattatcattttgcatttttcacaaccaagaaggtggaagcatttgaggagctcacatgggattatggtattgattttgatggtgataagcatcctgtcaaatcatttgaatgcctgtgcggaagcagatactgccgtggtagaaagcattcgaggacgcgaggcaaagctgcttcgaagtgaagtgttgactgaaagcagcggtgcatggttggtttgggaaagcgaacggactaatcagttttagaatgctttgttaacctaggtagctatgcattcataaagtgcccgctgtgcttgactgcagaacgtgaaattcaattagacagactgaaatgcaatgtacgtacgctactcctaaaccctaagccatctggccatgatctactgatgatgaggtgaatttgattactgttctgtgcatcattgacagacaaaaacagcacataatcatgcatgtgtcgttaacgaccagtttagcacatttgtttgccaagtagtagtaggggtgtagtgggatacggacggatattctatattgttttcatattttctcttcggattcgaatcgggtatgaatattatt

SEQ ID NO: 19894 - DNA, 2938 bp, Zea Mays
cgacgattctatgtttatcacgcccaacaaagtagtgtagtttttcgacgccggcggatccctcgagccctagctaggaaagtagggttttcgatggattctctgagccggagggagcgggcacaccgcgccgtcgacgccatgaagcctctgggcttctcgaagaaggaggtcttcgccgtcctcaagaacctcctccagctgttcgataactcctgggagcccattgaggacgagtgctaccgcgccctcgccgatgctatcctcgaagcccgcgaccggccccagcaacagtacaagaggggttcggcttccgccggagggggagggctgccggccccggccttctacttcccgtgacatccacgacggtctggatggtgggaccgaggcccttcgcatcaagaggacgaggatcagcgctagttgctctatcgatccccagtctcccgtctccgctgcggaagcccttgatgaacctataggcgtttcgtctgagctaagccatccacaaatggggacctcaacccaatgtcagcggcccactgcatatggtggcgtgccttcacatgggaatactgcacacaagaagagggcaatacaaatgatggatgaagatttccaacataccgtcttcttgagggagcctaaacctgaacctgatactgatgatctacaatgcagtgcccctgcatccagctgtcagaatgcccaacttggccgcattgcttcccacccgctcaatgccagcaccttagatgctctacctgttcaggctccgttaaagatttcaggagctaatggcaggacagtccagcattatagaagtacagcgccttcttcctttgttgaacctataaatagcaagacgaagcaacctcaaagtctggaaaatgggttggaccatgcaactatgatgcacaatgctgggacaggatctgcagctggaaaaacacaggaagcaccttgtttacacactcttgtagcttcatccactatgggtgaggtcgagatgtcgatcaaatgctgcatagacccatcaaaattccacatgcctgatttagaagctgttttcaagatggttgaggaaaaatgccttcgctcacacaagagcctcccacctgatttttccatagccggtctcatcaagcagatatgccagtgtgtcgcacgactaggcagtgatcatgctgcagaacataataaacaatcagatgcttttggcaagatcagaagctcacaggataagccaacaacgagtagtgctccatccttggaaccaattgattgcatgaacagcagaagcggggaatataaagctgtagaagaatcattgattgtggaagcttcagagaatggcccaccaaattcaactacccatcagcaggcccatttggtacttcctcccaatgggtgtacccatgatttatctgacatatcaaagggaaaagaaaggttaagtatatcagcagtaaacgaatttggtagcgagaattgtttaccttccttttattatataccaagaaatcttgtttcccaggactcctatgttaactctgttgaaacaattggcgacaaggactgttgttctgattgctctggcaactgcttgtatgcctctgaaccatgtgcctgtgcaagaaaaactggtggtgaatttgcctatacacgagacggattggttaggacaaagttccttgatgagtgcatctctatgaaccggtttccagaaaaacataatatgttcttctgtaaatcttgcccacttgagagtatcaggaacgagccttcaccagagctttgcaggggccatattattaggaattttatcaaggaatgcgggagtaaatgtggctgtaacgcgcaatgtggtaaccgtgtagttcaacgtggtataacttgcaatctgcaggtgttttcgacacgggaagggaaggggtgggggctacgcacacttgatgaacttccaaaaggagcttttgtctgtgaatatgttggagagttgctaacaaatacgaagctacatgaaatgactactcaaaacatgcacaatgctaggtactcagtgctcttagatgctggttggggtcctgatggggtgctgaaggatgaagaagctttattcctggatgcgacattttgtgggaatgttgggagattcatcaaccacaggtgttgtctgcttattctcaacctgctcattgtgatgttattttaaatgtaataaatgatggaaaatacgagccattgacctctctcatttttctttctggttgtaacactactttacctagatgctatgatgcaaatttagttgagatccccgttgaaaaggagacgccagatcatcactattatcattttgcatttttcacaaccaagaaggtggaagcatttgaggagctcacatgggattatggtattgattttgatggtgataagcatcctgtcaaatcatttgaatgcctgtgcggaagcagatactgccgtggtagaaagcattcgaggacgcgaggcaaagctgcttcgaagtgaagtgttgactgaaagcagcggtgcatggttggtttgggaaagcgaacggactaatcagttttagaatgctttgttaacctaggtagctatgcattcataaagtgcccgctgtgcttgactgcagaacgtgaaattcaattagacagactgaaatgcaatgtacgtacgctactcctaaaccctaagccatctggccatgatctactgatgatgaggtgaatttgattactgttctgtgcatcattgacagacaaaaacagcacataatcatgcatgtgtcgttaacgaccagtttagcacatttgtttgccaagtagtagtaggggtgtagtgggatacggacggatattctatattgttttcatattttctcttcggattcgaatcgggtatgaatattatt

SEQ ID NO: 19895 - DNA, 2815 bp, Zea Mays
gaaaaccctaatctccagcaccccagcggccgccagcgctcccgctccttgctcgcctccacccgcggccaccaccgccctgcggcccccgccgcttgctagcctccaccgcgccgcgagtcacgccgttcatgcaccggctggtcctggagcacgggaggacgagcatgtcctggttcggccccagccccaaggtgaccatcgtcgacccggacctggccaaggacgtgctgtccaacaagttcggccacttcgagaagctcaaggtcccggcgctgtccaagatgctgggctccggcgtggccagccacgagggcgagaagtgggtcaagcaccggaggatcctcaaccatgcgttccatcttgagaagctcaagcgcatgctgccggcgttttctacgtgctgcgaggagctggtgagcaggtgggcggcggagtcccttggctccgacggctcgtgcgagctggacgtctggccggagctgcagaacctgacgggagacatcatttctcgcaccgtgttcagcagcagctacagcgaagggagaaggatcttccagctacaggtcgagcaagcttcgcttgtcatgaccaacattcggaagatcatgatccccggctacatgtacttgcctaccgcgaacaacaggaagatgcgcaggaacaacagggaggtggagtcaatcctgcgagagataatcgggaagaggatccaggcgatggaacaaggcgagggcaccaaagacgacctggtgggtctactgctggagacaaacatgagagacgacatggggatgacgatcgaagacgtgatcgaggagtgcaaggtgttctacttcgtcgggatggagaccacgttggtgctgctcatgtggacgatggtggtgctcagcatgcacccggagtggcaggaccgcgcgagggaggaggtgacggctctgttcggcagggacgacaagcccgagtatgacggcctaagccgcctcaaagtcgtgaccatggtgctctacgaggtgctccgactgtacccgccggccacctccgtcgtccgacaaacgtacaaggagatggaggtcggaggcgtcacctaccccgccggcgtgatcctggagctgcccgtgctgctcatccaccacgacccggacatctggggaggcgacgcgcgcgagtttaggcccgataggttctccgagggcgtgtccagggcctccaaggaccccggcgcgttcctcccgttcggttggagcccgcgcatctgcatcggccagaacttcgcgctgctggaggccaagatggcgctctgcatgatcctccagcggtttgagttcgggctcgcgccatcctatgctcatgcgccgcataccatgataaccttgcatcctatgcacggtgcgcagcttaagctcagagcaatatgatctcgacacgatgggtgtcccatcgttgatgccattgttatgtataaccttacaattcagataggcattcggccctgttaatgtctgaaataagtatcttcgcgttggcattttgtaatgtgcttttcacgtaccattggtgctttattgccttttgtatataaacatgtggatatatgtaactcatacattacacaaacaaacacaaacacaccagagccagagctatagggtggagctataaactgtggctctacttttgtacacaaaactggctccacatgttcttccaatcctgcaactgcgtttttcgcatccccgtttgattgcaaaaacgggactgctaagcaagctaagatttcaatggcatattccttcatacataggccattgagcgacgaggcacgccgcgtcagcactcccttggtggtcacttgcaatgaccagagacgggaggtctccgttgcccagaacatcgctaacaaggaaattgaccgcaccgttgcattcgacaaggtgctaggtccaaagtctcaacagcaggacgtcttcaaccatgctgttgtgccacttgtcagcgaggttttggacggttataattgcacaatatttgcatatggccagactggaactggcaaaacatacataatggaaggaggagggggcaaagcactgaatgctgacctcccgactgatgctagtgtcattccaagtgctgttaagcgcatatttgacatcctcgaggcacagagtgcagagtacagcatgaaggtttcttttcttgagctgtacaatgtggagctcactgatcttctagctctacaatgagattgcaagaacgggactgctaagcaagctaagatttcaatggcctattccttcatacataggccattgaaccggaagattttgtcggtattcggtaactataggatcatgtggttgttggtcgagttggaccaattatgctggctcatttgttggatgttttgacaagtcgattctagcttccttatgatctatgttagatttgatgattgcaataagatatcatgaggcgcgccgaggagaacaggggcctcctctccgcctcctccttcgacaggcagctgctgcggtacgaccatcaggcgtttcatctgttgtacaatatgtgaatcaatcttccattggtatgaactgtgatctgattctttgtctcgaccggtgcaggaaggaggtggtgaggagggtcaaggccgcggtggcgggacgtgagtgaagtgagctttgtcgagcctatatgtggaggtcagtcatgaagctgggactaggacaagggcgagctgaaggctagaagctgtaaatgcacccttcaagagtcttcataggccaagtctctacgctcggttatagga

SEQ ID NO: 19896 - DNA, 3122 bp, Zea Mays
gaaaaccctaatctccagcaccccagcggccgccagcgctcccgctccttgctcgcctccacccgcggccaccaccgccctgcggcccccgccgcttgctagcctccaccgcgccgcgagtcacgccgttcatgcaccggctggtcctggagcacgggaggacgagcatgtcctggttcggccccagccccaaggtgaccatcgtcgacccggacctggccaaggacgtgctgtccaacaagttcggccacttcgagaagctcaaggtcccggcgctgtccaagatgctgggctccggcgtggccagccacgagggcgagaagtgggtcaagcaccggaggatcctcaaccatgcgttccatcttgagaagctcaagcgcatgctgccggcgttttctacgtgctgcgaggagctggtgagcaggtgggcggcggagtcccttggctccgacggctcgtgcgagctggacgtctggccggagctgcagaacctgacgggagacatcatttctcgcaccgtgttcagcagcagctacagcgaagggagaaggatcttccagctacaggtcgagcaagcttcgcttgtcatgaccaacattcggaagatcatgatccccggctacatgtacttgcctaccgcgaacaacaggaagatgcgcaggaacaacagggaggtggagtcaatcctgcgagagataatcgggaagaggatccaggcgatggaacaaggcgagggcaccaaagacgacctggtgggtctactgctggagacaaacatgagagacgacatggggatgacgatcgaagacgtgatcgaggagtgcaaggtgttctacttcgtcgggatggagaccacgttggtgctgctcatgtggacgatggtggtgctcagcatgcacccggagtggcaggaccgcgcgagggaggaggtgacggctctgttcggcagggacgacaagcccgagtatgacggcctaagccgcctcaaagtcgtgaccatggtgctctacgaggtgctccgactgtacccgccggccacctccgtcgtccgacaaacgtacaaggagatggaggtcggaggcgtcacctaccccgccggcgtgatcctggagctgcccgtgctgctcatccaccacgacccggacatctggggaggcgacgcgcgcgagtttaggcccgataggttctccgagggcgtgtccagggcctccaaggaccccggcgcgttcctcccgttcggttggagcccgcgcatctgcatcggccagaacttcgcgctgctggaggccaagatggcgctctgcatgatcctccagcggtttgagttcgggctcgcgccatcctatgctcatgcgccgcataccatgataaccttgcatcctatgcacggtgcgcagcttaagctcagagcaatatgatctcgacacgatgggtgtcccatcgttgatgccattgttatgtataaccttacaattcagataggcattcggccctgttaatgtctgaaataagtatcttcgcgttggcattttgtaatgtgcttttcacgtaccattggtgctttattgccttttgtatataaacatgtggatatatgtaactcatacattacacaaacaaacacaaacacaccagagccagagctatagggtggagctataaactgtggctctacttttgtacacaaaactggctccacatgttcttccaatcctgcaactgcgtttttcgcatccccgtttgattgcaaaaacgggactgctaagcaagctaagatttcaatggcatattccttcatacataggccattgagcgacgaggcacgccgcgtcagcactcccttggtggtcacttgcaatgaccagagacgggaggtctccgttgcccagaacatcgctaacaaggaaattgaccgcaccgttgcattcgacaaggtgctaggtccaaagtctcaacagcaggacgtcttcaaccatgctgttgtgccacttgtcagcgaggttttggacggttataattgcacaatatttgcatatggccagactggaactggcaaaacatacataatggaaggaggagggggcaaagcactgaatgctgacctcccgactgatgctagtgtcattccaagtgctgttaagcgcatatttgacatcctcgaggcacagagtgcagagtacagcatgaaggtttcttttcttgagctgtacaatgtggagctcactgatcttctagctctacaatgagattgcaagaacgggactgctaagcaagctaagatttcaatggcctattccttcatacataggccattgaaccggaagattttgtcggtattcggtaactataggatcatgtggttgttggtcgagttggaccaattatgctggctcatttgttggatgttttgacaagtcgattctagcttccttatgatctatgttagatttgatgattgcaataagatatcatgaggcgcgccgaggagaacaggggcctcctctccgcctcctccttcgacaggcagctgctgcggtacgaccatcaggcgtttcatctgttgtacaatatgtgaatcaatcttccattggtatgaactgtgatctgattctttgtctcgaccggtgcaggaaggaggtggtgaggagggtcaaggccgcggtggcgggacgtgagtgaagtgagctttgtcgagcctatatgtggaggtcagtcatgaagctgggactaggacaagggcgagctgaaggctagaagctgtaaatgcacccttcaagagtcttcataggccaagtctctactgtgcaggctcggttataggaattttataaagcaaatgacaaatatacatgtacgaacttcaaatatttcctgtggaaggaaacagtgggcgatgaaagcagggaatttgggaggtacatgcgacagagagaagagcaagagaagcaggaagcatagttgttcactcgggctcctgtaaccaaacatgataagcagatcgagaagcgcataaggatacaacttcatggcttgtcttaatatccaacgtacaccaccatctggtatctgatcccgacaataggctaggaggcttaactgatggttttggccttgggatgaac

SEQ ID NO: 19897 - DNA, 2295 bp, Zea Mays
ctaatctccagcaccccagcggccgccagcgctcccgctccttgctcgcctccacccgcggccaccaccgccctgcggcccccgccgcttgctagcctccaccgcgccgcgagtcacgccgttcatgcaccggctggtcctggagcacgggaggacgagcatgtcctggttcggccccagccccaaggtgaccatcgtcgacccggacctggccaaggacgtgctgtccaacaagttcggccacttcgagaagctcaaggtcccggcgctgtccaagatgctgggctccggcgtggccagccacgagggcgagaagtgggtcaagcaccggaggatcctcaaccatgcgttccatcttgagaagctcaagcgcatgctgccggcgttttctacgtgctgcgaggagctggtgagcaggtgggcggcggagtcccttggctccgacggctcgtgcgagctggacgtctggccggagctgcagaacctgacgggagacatcatttctcgcaccgtgttcagcagcagctacagcgaagggagaaggatcttccagctacaggtcgagcaagcttcgcttgtcatgaccaacattcggaagatcatgatccccggctacatgtacttgcctaccgcgaacaacaggaagatgcgcaggaacaacagggaggtggagtcaatcctgcgagagataatcgggaagaggatccaggcgatggaacaaggcgagggcaccaaagacgacctggtgggtctactgctggagacaaacatgagagacgacatggggatgacgatcgaagacgtgatcgaggagtgcaaggtgttctacttcgtcgggatggagaccacgttggtgctgctcatgtggacgatggtggtgctcagcatgcacccggagtggcaggaccgcgcgagggaggaggtgacggctctgttcggcagggacgacaagcccgagtatgacggcctaagccgcctcaaagtcgtgaccatggtgctctacgaggtgctccgactgtacccgccggccacctccgtcgtccgacaaacgtacaaggagatggaggtcggaggcgtcacctaccccgccggcgtgatcctggagctgcccgtgctgctcatccaccacgacccggacatctggggaggcgacgcgcgcgagtttaggcccgataggttctccgagggcgtgtccagggcctccaaggaccccggcgcgttcctcccgttcggttggagcccgcgcatctgcatcggccagaacttcgcgctgctggaggccaagatggcgctctgcatgatcctccagcggtttgagttcgggctcgcgccatcctatgctcatgcgccgcataccatgataaccttgcatcctatgcacggtgcgcagcttaagctcagagcaatatgatctcgacacgatgggtgtcccatcgttgatgccattgttatgtataaccttacaattcagataggcattcggccctgttaatgtctgaaataagtatcttcgcgttggcattttgtaatgtgcttttcacgtaccattggtgctttattgccttttgtatataaacatgtggatatatgtaactcatacattacacaaacaaacacaaacacaccagagccagagctatagggtggagctataaactgtggctctacttttgtacacaaaactggctccacatgttcttccaatcctgcaactgcgtttttcgcatccccgtttgattgcaaaaacgggactgctaagcaagctaagatttcaatggcatattccttcatacataggccattgaaccggaagattttgtcggtattcggtaactataggatcatgtggttgttggtcgagttggaccaattatgctggctcatttgttggatgttttgacaagtcgattctagcttccttatgatctatgttagatttggtaatgcataccagttagtaaagcatttatgatgtacattgttatacatagagctttacatcacaaaaattatcagtttccctcagttacgatatgcatttagtatttatcgtattttgaaaattaataacctattatactatgataggcttgacttcatgtttatctaaataacttagtgcgatgatgcttgaaaacttatcttccattttgccagatcaatgaataaaaggattattcatatcaatgtccatgcaccttctcagaaaatccttttgtgatgttggtgttggtttcctggacctgtactgatgattgcaataagatatcatgaggcgcgccgaggagaacaggg

SEQ ID NO: 19898 - DNA, 2223 bp, Zea Mays
cagcgctcccgctccttgctcgcctccacccgcggccaccaccgccctgcggcccccgccgcttgctagcctccaccgcgccgcgagtcacgccgttcatgcaccggctggtcctggagcacgggaggacgagcatgtcctggttcggccccagccccaaggtgaccatcgtcgacccggacctggccaaggacgtgctgtccaacaagttcggccacttcgagaagctcaaggtcccggcgctgtccaagatgctgggctccggcgtggccagccacgagggcgagaagtgggtcaagcaccggaggatcctcaaccatgcgttccatcttgagaagctcaagctggtgagcaggtgggcggcggagtcccttggctccgacggctcgtgcgagctggacgtctggccggagctgcagaacctgacgggagacatcatttctcgcaccgtgttcagcagcagctacagcgaagggagaaggatcttccagctacaggtcgagcaagcttcgcttgtcatgaccaacattcggaagatcatgatccccggctacatgtacttgcctaccgcgaacaacaggaagatgcgcaggaacaacagggaggtggagtcaatcctgcgagagataatcgggaagaggatccaggcgatggaacaaggcgagggcaccaaagacgacctggtgggtctactgctggagacaaacatgagagacgacatggggatgacgatcgaagacgtgatcgaggagtgcaaggtgttctacttcgtcgggatggagaccacgttggtgctgctcatgtggacgatggtggtgctcagcatgcacccggagtggcaggaccgcgcgagggaggaggtgacggctctgttcggcagggacgacaagcccgaattgcaaaaacgggactgctaagcaagctaagatttcaatggcatattccttcatacataggccattgagcgacgaggcacgccgcgtcagcactcccttggtggtcacttgcaatgaccagagacgggaggtctccgttgcccagaacatcgctaacaaggaaattgaccgcaccgttgcattcgacaaggtgctaggtccaaagtctcaacagcaggacgtcttcaaccatgctgttgtgccacttgtcagcgaggttttggacggttataattgcacaatatttgcatatggccagactggaactggcaaaacatacataatggaaggaggagggggcaaagcactgaatgctgacctcccgactgatgctagtgtcattccaagtgctgttaagcgcatatttgacatcctcgaggcacagagtgcagagtacagcatgaaggtttcttttcttgagctgtacaatgtggagctcactgatcttctagctctacaatgagattgcaagaacgggactgctaagcaagctaagatttcaatggcctattccttcatacataggccattgaaccggaagattttgtcggtattcggtaactataggatcatgtggttgttggtcgagttggaccaattatgctggctcatttgttggatgttttgacaagtcgattctagcttccttatgatctatgttagatttggtaatgcataccagttagtaaagcatttatgatgtacattgttatacatagagctttacatcacaaaaattatcagtttccctcagttacgatatgcatttagtatttatcgtattttgaaaattaataacctattatactatgataggcttgacttcatgtttatctaaataacttagtgcgatgatgcttgaaaacttatcttccattttgccagatcaatgaataaaaggattattcatatcaatgtccatgcaccttctcagaaaatccttttgtgatgttggtgttggtttcctggacctgtactggtacatatgctaagtcatccacaaatctgacccagaattgtaccgttctttttatagccatgtttggtacttgtttgagtgctccatagttcgcaagtttttttgttatgatgtattttgacatttgaatctcagacatgcttaggaactactgatttgaatttatgggctaacagttccagtatttcaaatagaaagtatgctatatcaaataagttgatgatacttttggtactggagaatgaagctagactgcatttgatattagaagtctgtttgtctgattgcagttgattataaagaagctag

SEQ ID NO: 19899 - DNA, 2389 bp, Zea Mays
cagcgctcccgctccttgctcgcctccacccgcggccaccaccgccctgcggcccccgccgcttgctagcctccaccgcgccgcgagtcacgccgttcatgcaccggctggtcctggagcacgggaggacgagcatgtcctggttcggccccagccccaaggtgaccatcgtcgacccggacctggccaaggacgtgctgtccaacaagttcggccacttcgagaagctcaaggtcccggcgctgtccaagatgctgggctccggcgtggccagccacgagggcgagaagtgggtcaagcaccggaggatcctcaaccatgcgttccatcttgagaagctcaaggtactactaactactacatataattaattgcatataattaattgatccttggaattatctggcaatgtgcagcgcatgctgccggcgttttctacgtgctgcgaggagctggtgagcaggtgggcggcggagtcccttggctccgacggctcgtgcgagctggacgtctggccggagctgcagaacctgacgggagacatcatttctcgcaccgtgttcagcagcagctacagcgaagggagaaggatcttccagctacaggtcgagcaagcttcgcttgtcatgaccaacattcggaagatcatgatccccggctacatgtacttgcctaccgcgaacaacaggaagatgcgcaggaacaacagggaggtggagtcaatcctgcgagagataatcgggaagaggatccaggcgatggaacaaggcgagggcaccaaagacgacctggtgggtctactgctggagacaaacatgagagacgacatggggatgacgatcgaagacgtgatcgaggagtgcaaggtgttctacttcgtcgggatggagaccacgttggtgctgctcatgtggacgatggtggtgctcagcatgcacccggagtggcaggaccgcgcgagggaggaggtgacggctctgttcggcagggacgacaagcccgagtatgacggcctaagccgcctcaaagtcattgcaaaaacgggactgctaagcaagctaagatttcaatggcatattccttcatacataggccattgagcgacgaggcacgccgcgtcagcactcccttggtggtcacttgcaatgaccagagacgggaggtctccgttgcccagaacatcgctaacaaggaaattgaccgcaccgttgcattcgacaaggtgctaggtccaaagtctcaacagcaggacgtcttcaaccatgctgttgtgccacttgtcagcgaggttttggacggttataattgcacaatatttgcatatggccagactggaactggcaaaacatacataatggaaggaggagggggcaaagcactggtgcaatttttattatatatattcacatgctacacatgtttctgaattctgatgcgtgtcattccaagtgctgttaagcgcatatttgacatcctcgaggcacagagtgcagagtacagcatgaaggtttcttttcttgagctgtacaatgtggagctcactgatcttctagctctacaatgagattgcaagaacgggactgctaagcaagctaagatttcaatggcctattccttcatacataggccattgaaccggaagattttgtcggtattcggtaactataggatcatgtggttgttggtcgagttggaccaattatgctggctcatttgttggatgttttgacaagtcgattctagcttccttatgatctatgttagatttggtaatgcataccagttagtaaagcatttatgatgtacattgttatacatagagctttacatcacaaaaattatcagtttccctcagttacgatatgcatttagtatttatcgtattttgaaaattaataacctattatactatgataggcttgacttcatgtttatctaaataacttagtgcgatgatgcttgaaaacttatcttccattttgccagatcaatgaataaaaggattattcatatcaatgtccatgcaccttctcagaaaatccttttgtgatgttggtgttggtttcctggacctgtactggtacatatgctaagtcatccacaaatctgacccagaattgtaccgttctttttatagccatgtttggtacttgtttgagtgctccatagttcgcaagtttttttgttatgatgtattttgacatttgaatctcagacatgcttaggaactactgatttgaatttatgggctaacagttccagtatttcaaatagaaagtatgctatatcaaataagttgatgatacttttggtactggagaatgaagctagactgcatttgatattagaagtctgtttgtctgattgcagttgattataaagaagctag

SEQ ID NO: 19900 - DNA, 3038 bp, Zea Mays
cagcgctcccgctccttgctcgcctccacccgcggccaccaccgccctgcggcccccgccgcttgctagcctccaccgcgccgcgagtcacgccgttcatgcaccggctggtcctggagcacgggaggacgagcatgtcctggttcggccccagccccaaggtgaccatcgtcgacccggacctggccaaggacgtgctgtccaacaagttcggccacttcgagaagctcaaggtcccggcgctgtccaagatgctgggctccggcgtggccagccacgagggcgagaagtgggtcaagcaccggaggatcctcaaccatgcgttccatcttgagaagctcaagcgcatgctgccggcgttttctacgtgctgcgaggagctggtgagcaggtgggcggcggagtcccttggctccgacggctcgtgcgagctggacgtctggccggagctgcagaacctgacgggagacatcatttctcgcaccgtgttcagcagcagctacagcgaagggagaaggatcttccagctacaggtcgagcaagcttcgcttgtcatgaccaacattcggaagatcatgatccccggctacatgtacttgcctaccgcgaacaacaggaagatgcgcaggaacaacagggaggtggagtcaatcctgcgagagataatcgggaagaggatccaggcgatggaacaaggcgagggcaccaaagacgacctggtgggtctactgctggagacaaacatgagagacgacatggggatgacgatcgaagacgtgatcgaggagtgcaaggtgttctacttcgtcgggatggagaccacgttggtgctgctcatgtggacgatggtggtgctcagcatgcacccggagtggcaggaccgcgcgagggaggaggtgacggctctgttcggcagggacgacaagcccgagtatgacggcctaagccgcctcaaagtcgtgaccatggtgctctacgaggtgctccgactgtacccgccggccacctccgtcgtccgacaaacgtacaaggagatggaggtcggaggcgtcacctaccccgccggcgtgatcctggagctgcccgtgctgctcatccaccacgacccggacatctggggaggcgacgcgcgcgagtttaggcccgataggttctccgagggcgtgtccagggcctccaaggaccccggcgcgttcctcccgttcggttggagcccgcgcatctgcatcggccagaacttcgcgctgctggaggccaagatggcgctctgcatgatcctccagcggtttgagttcgggctcgcgccatcctatgctcatgcgccgcataccatgataaccttgcatcctatgcacggtgcgcagcttaagctcagagcaatatgatctcgacacgatgggtgtcccatcgttgatgccattgttatgtataaccttacaattcagataggcattcggccctgttaatgtctgaaataagtatcttcgcgttggcattttgtaatgtgcttttcacgtaccattggtgctttattgccttttgtatataaacatgtggatatatgtaactcatacattacacaaacaaacacaaacacaccagagccagagctatagggtggagctataaactgtggctctacttttgtacacaaaactggctccacatgttcttccaatcctgcaactgcgtttttcgcatccccgtttgattgcaaaaacgggactgctaagcaagctaagatttcaatggcatattccttcatacataggccattgagcgacgaggcacgccgcgtcagcactcccttggtggtcacttgcaatgaccagagacgggaggtctccgttgcccagaacatcgctaacaaggaaattgaccgcaccgttgcattcgacaaggtgctaggtccaaagtctcaacagcaggacgtcttcaaccatgctgttgtgccacttgtcagcgaggttttggacggttataattgcacaatatttgcatatggccagactggaactggcaaaacatacataatggaaggaggagggggcaaagcactgaatgctgacctcccgactgatgctagtgtcattccaagtgctgttaagcgcatatttgacatcctcgaggcacagagtgcagagtacagcatgaaggtttcttttcttgagctgtacaatgtggagctcactgatcttctagctctacaatgagattgcaagaacgggactgctaagcaagctaagatttcaatggcctattccttcatacataggccattgaaccggaagattttgtcggtattcggtaactataggatcatgtggttgttggtcgagttggaccaattatgctggctcatttgttggatgttttgacaagtcgattctagcttccttatgatctatgttagatttggtaatgcataccagttagtaaagcatttatgatgtacattgttatacatagagctttacatcacaaaaattatcagtttccctcagttacgatatgcatttagtatttatcgtattttgaaaattaataacctattatactatgataggcttgacttcatgtttatctaaataacttagtgcgatgatgcttgaaaacttatcttccattttgccagatcaatgaataaaaggattattcatatcaatgtccatgcaccttctcagaaaatccttttgtgatgttggtgttggtttcctggacctgtactggtacatatgctaagtcatccacaaatctgacccagaattgtaccgttctttttatagccatgtttggtacttgtttgagtgctccatagttcgcaagtttttttgttatgatgtattttgacatttgaatctcagacatgcttaggaactactgatttgaatttatgggctaacagttccagtatttcaaatagaaagtatgctatatcaaataagttgatgatacttttggtactggagaatgaagctagactgcatttgatattagaagtctgtttgtctgattgcagttgattataaagaagctag

SEQ ID NO: 19901 - DNA, 2926 bp, Zea Mays
cagcgctcccgctccttgctcgcctccacccgcggccaccaccgccctgcggcccccgccgcttgctagcctccaccgcgccgcgagtcacgccgttcatgcaccggctggtcctggagcacgggaggacgagcatgtcctggttcggccccagccccaaggtgaccatcgtcgacccggacctggccaaggacgtgctgtccaacaagttcggccacttcgagaagctcaaggtcccggcgctgtccaagatgctgggctccggcgtggccagccacgagggcgagaagtgggtcaagcaccggaggatcctcaaccatgcgttccatcttgagaagctcaagcgcatgctgccggcgttttctacgtgctgcgaggagctggtgagcaggtgggcggcggagtcccttggctccgacggctcgtgcgagctggacgtctggccggagctgcagaacctgacgggagacatcatttctcgcaccgtgttcagcagcagctacagcgaagggagaaggatcttccagctacaggtcgagcaagcttcgcttgtcatgaccaacattcggaagatcatgatccccggctacatgtacttgcctaccgcgaacaacaggaagatgcgcaggaacaacagggaggtggagtcaatcctgcgagagataatcgggaagaggatccaggcgatggaacaaggcgagggcaccaaagacgacctggtgggtctactgctggagacaaacatgagagacgacatggggatgacgatcgaagacgtgatcgaggagtgcaaggtgttctacttcgtcgggatggagaccacgttggtgctgctcatgtggacgatggtggtgctcagcatgcacccggagtggcaggaccgcgcgagggaggaggtgacggctctgttcggcagggacgacaagcccgagtatgacggcctaagccgcctcaaagtcgtgaccatggtgctctacgaggtgctccgactgtacccgccggccacctccgtcgtccgacaaacgtacaaggagatggaggtcggaggcgtcacctaccccgccggcgtgatcctggagctgcccgtgctgctcatccaccacgacccggacatctggggaggcgacgcgcgcgagtttaggcccgataggttctccgagggcgtgtccagggcctccaaggaccccggcgcgttcctcccgttcggttggagcccgcgcatctgcatcggccagaacttcgcgctgctggaggccaagatggcgctctgcatgatcctccagcggtttgagttcgggctcgcgccatcctatgctcatgcgccgcataccatgataaccttgcatcctatgcacggtgcgcagcttaagctcagagcaatatgatctcgacacgatgggtgtcccatcgttgatgccattgttatgtataaccttacaattcagataggcattcggccctgttaatgtctgaaataagtatcttcgcgttggcattttgtaatgtgcttttcacgtaccattggtgctttattgccttttgtatataaacatgtggatatatgtaactcatacattacacaaacaaacacaaacacaccagagccagagctatagggtggagctataaactgtggctctacttttgtacacaaaactggctccacatgttcttccaatcctgcaactgcgtttttcgcatccccgtttgattgcaaaaacgggactgctaagcaagctaagatttcaatggcatattccttcatacataggccattgagcgacgaggcacgccgcgtcagcactcccttggtggtcacttgcaatgaccagagacgggaggtctccgttgcccagaacatcgctaacaaggaaattgaccgcaccgttgcattcgacaaggtgctaggtccaaagtctcaacagcaggacgtcttcaaccatgctgttgtgccacttgtcagcgaggttttggacggttataattgcacaatatttgcatatggccagactggaactggcaaaacatacataatggaaggaggagggggcaaagcactggtgcaatttttattatatatattcacatgctacacatgtttctgaattctgatgcggttagtttgctgcttcaactgacgccataactctactccatttctatagaatgctgacctcccgactgatgctagtgtcattccaagtgctgttaagcgcatatttgacatcctcgaggcacagagtgcagagtacagcatgaaggtttcttttcttgagctgtacaatgtggagctcactgatcttctagctctacaatgagattgcaagaacgggactgctaagcaagctaagatttcaatggcctattccttcatacataggccattgaaccggaagattttgtcggtattcggtaactataggatcatgtggttgttggtcgagttggaccaattatgctggctcatttgttggatgttttgacaagtcgattctagcttccttatgatctatgttagatttgatcaatgaataaaaggattattcatatcaatgtccatgcaccttctcagaaaatccttttgtgatgttggtgttggtttcctggacctgtactggtacatatgctaagtcatccacaaatctgacccagaattgtaccgttctttttatagccatgtttggtacttgtttgagtgctccatagttcgcaagtttttttgttatgatgtattttgacatttgaatctcagacatgcttaggaactactgatttgaatttatgggctaacagttccagtatttcaaatagaaagtatgctatatcaaataagttgatgatacttttggtactggagaatgaagctagactgcatttgatattagaagtctgtttgtctgattgcagttgattataaagaagctag

SEQ ID NO: 19902 - DNA, 1888 bp, Zea Mays
cagcgctcccgctccttgctcgcctccacccgcggccaccaccgccctgcggcccccgccgcttgctagcctccaccgcgccgcgagtcacgccgttcatgcaccggctggtcctggagcacgggaggacgagcatgtcctggttcggccccagccccaaggtgaccatcgtcgacccggacctggccaaggacgtgctgtccaacaagttcggccacttcgagaagctcaaggtcccggcgctgtccaagatgctgggctccggcgtggccagccacgagggcgagaagtgggtcaagcaccggaggatcctcaaccatgcgttccatcttgagaagctcaaggtactactaactactacatataattaattgcatataattaattgatccttggaattatctggcaatgtgcagcgcatgctgccggcgttttctacgtgctgcgaggagctggtgagcaggtgggcggcggagtcccttggctccgacggctcgtgcgagctggacgtctggccggagctgcagaacctgacgggagacatcatttctcgcaccgtgttcagcagcagctacagcgaagggagaaggatcttccagctacaggtcgagcaagcttcgcttgtcatgaccaacattcggaagatcatgatccccggctacatgtacttgcctaccgcgaacaacaggaagatgcgcaggaacaacagggaggtggagtcaatcctgcgagagataatcgggaagaggatccaggcgatggaacaaggcgagggcaccaaagacgacctggtgggtctactgctggagacaaacatgagagacgacatggggatgacgatcgaagacgtgatcgaggagtgcaaggtgttctacttcgtcgggatggagaccacgttggtgctgctcatgtggacgatggtggtgctcagcatgcacccggagtggcaggaccgcgcgagggaggaggtgacggctctgttcggcagggacgacaagcccgagtatgacggcctaagccgcctcaaagtcattgcaaaaacgggactgctaagcaagctaagatttcaatggcatattccttcatacataggccattgagcgacgaggcacgccgcgtcagcactcccttggtggtcacttgcaatgaccagagacgggaggtctccgttgcccagaacatcgctaacaaggaaattgaccgcaccgttgcattcgacaaggtgctaggtccaaagtctcaacagcaggacgtcttcaaccatgctgttgtgccacttgtcagcgaggttttggacggttataattgcacaatatttgcatatggccagactggaactggcaaaacatacataatggaaggaggagggggcaaagcactggtgcaatttttattatatatattcacatgctacacatgtttctgaattctgatgcggttagtttgctgcttcaactgacgccataactctactccatttctatagaatgctgacctcccgactgatgctagtgtcattccaagtgctgttaagcgcatatttgacatcctcgaggcacagagtgcagagtacagcatgaaggtttcttttcttgagctgtacaatgtggagctcactgatcttctagctctacaatgagattgcaagaacgggactgctaagcaagctaagatttcaatggcctattccttcatacataggccattgaaccggaagattttgtcggtattcggtaactataggatcatgtggttgttggtcgagttggaccaattatgctggctcatttgttggatgttttgacaagtcgattctagcttccttatgatctatgttagatttgatgattgcaataagatatcatgaggcgcgccgaggagaacaggg

SEQ ID NO: 19903 - DNA, 1847 bp, Zea Mays
cagcgctcccgctccttgctcgcctccacccgcggccaccaccgccctgcggcccccgccgcttgctagcctccaccgcgccgcgagtcacgccgttcatgcaccggctggtcctggagcacgggaggacgagcatgtcctggttcggccccagccccaaggtgaccatcgtcgacccggacctggccaaggacgtgctgtccaacaagttcggccacttcgagaagctcaaggtcccggcgctgtccaagatgctgggctccggcgtggccagccacgagggcgagaagtgggtcaagcaccggaggatcctcaaccatgcgttccatcttgagaagctcaagcgcatgctgccggcgttttctacgtgctgcgaggagctggtgagcaggtgggcggcggagtcccttggctccgacggctcgtgcgagctggacgtctggccggagctgcagaacctgacgggagacatcatttctcgcaccgtgttcagcagcagctacagcgaagggagaaggatcttccagctacaggtcgagcaagcttcgcttgtcatgaccaacattcggaagatcatgatccccggctacatgtacttgcctaccgcgaacaacaggaagatgcgcaggaacaacagggaggtggagtcaatcctgcgagagataatcgggaagaggatccaggcgatggaacaaggcgagggcaccaaagacgacctggtgggtctactgctggagacaaacatgagagacgacatggggatgacgatcgaagacgtgatcgaggagtgcaaggtgttctacttcgtcgggatggagaccacgttggtgctgctcatgtggacgatggtggtgctcagcatgcacccggagtggcaggaccgcgcgagggaggaggtgacggctctgttcggcagggacgacaagcccgagtatgacggcctaagccgcctcaaagtcgtgaccatggtgctctacgaggtgctccgactgtacccgccggccacctccgtcgtccgacaaacgtacaaggagatggaggtcggaggcgtcacctaccccgccggcgtgatcctggagctgcccgtgctgctcatccaccacgacccggacatctggggaggcgacgcgcgcgagtttaggcccgataggttctccgagggcgtgtccagggcctccaaggaccccggcgcgttcctcccgttcggttggagcccgcgcatctgcatcggccagaacttcgcgctgctggaggccaagatggcgctctgcatgatcctccagcggtttgagttcgggctcgcgccatcctatgctcatgcgccgcataccatgataaccttgcatcctatgcacggtgcgcagcttaagctcagagcaatatgatctcgacacgatgggtgtcccatcgttgatgccattgttatgtataaccttacaattcagataggcattcggccctgttaatgtctgaaataagtatcttcgcgttggcattttgtaatgtgcttttcacgtaccattggtgctttattgccttttgtatataaacatgtggatatatgtaactcatacattacacaaacaaacacaaacacaccagagccagagctatagggtggagctataaactgtggctctacttttgtacacaaaactggctccacatgttcttccaatcctgcaactgcgtttttcgcatccccgtttgattgcaagaacgggactgctaagcaagctaagatttcaatggcctattccttcatacataggccattgaaccggaagattttgtcggtattcgatgattgcaataagatatcatgaggcgcgccgaggagaacaggg

SEQ ID NO: 19904 - DNA, 1836 bp, Zea Mays
cagcgctcccgctccttgctcgcctccacccgcggccaccaccgccctgcggcccccgccgcttgctagcctccaccgcgccgcgagtcacgccgttcatgcaccggctggtcctggagcacgggaggacgagcatgtcctggttcggccccagccccaaggtgaccatcgtcgacccggacctggccaaggacgtgctgtccaacaagttcggccacttcgagaagctcaaggtcccggcgctgtccaagatgctgggctccggcgtggccagccacgagggcgagaagtgggtcaagcaccggaggatcctcaaccatgcgttccatcttgagaagctcaagcgcatgctgccggcgttttctacgtgctgcgaggagctggtgagcaggtgggcggcggagtcccttggctccgacggctcgtgcgagctggacgtctggccggagctgcagaacctgacgggagacatcatttctcgcaccgtgttcagcagcagctacagcgaagggagaaggatcttccagctacaggtcgagcaagcttcgcttgtcatgaccaacattcggaagatcatgatccccggctacatgtacttgcctaccgcgaacaacaggaagatgcgcaggaacaacagggaggtggagtcaatcctgcgagagataatcgggaagaggatccaggcgatggaacaaggcgagggcaccaaagacgacctggtgggtctactgctggagacaaacatgagagacgacatggggatgacgatcgaagacgtgatcgaggagtgcaaggtgttctacttcgtcgggatggagaccacgttggtgctgctcatgtggacgatggtggtgctcagcatgcacccggagtggcaggaccgcgcgagggaggaggtgacggctctgttcggcagggacgacaagcccgagtatgacggcctaagccgcctcaaagtcgtgaccatggtgctctacgaggtgctccgactgtacccgccggccacctccgtcgtccgacaaacgtacaaggagatggaggtcggaggcgtcacctaccccgccggcgtgatcctggagctgcccgtgctgctcatccaccacgacccggacatctggggaggcgacgcgcgcgagtttaggcccgataggttctccgagggcgtgtccagggcctccaaggaccccggcgcgttcctcccgttcggttggagcccgcgcatctgcatcggccagaacttcgcgctgctggaggccaagatggcgctctgcatgatcctccagcggtttgagttcgggctcgcgccatcctatgctcatgcgccgcataccatgataaccttgcatcctatgcacggtgcgcagcttaagctcagagcaatatgatctcgacacgatgggtgtcccatcgttgatgccattgttatgtataaccttacaattcagataggcattcggccctgttaatgtctgaaataagtatcttcgcgttggcattttgtaatgtgcttttcacgtaccattggtgctttattgccttttgtatataaacatgtggatatatgtaactcatacattacacaaacaaacacaaacacaccagagccagagctatagggtggagctataaactgtggctctacttttgtacacaaaactggctccacatgttcttccaatcctgcaactgcgtttttcgcatccccgtttgattgcaagaacgggactgctaagcaagctaagatttcaatggcctattccttcatacataggccattgaaccggaagattttatgattgcaataagatatcatgaggcgcgccgaggagaacaggg

SEQ ID NO: 19905 - DNA, 2640 bp, Zea Mays
cagcgctcccgctccttgctcgcctccacccgcggccaccaccgccctgcggcccccgccgcttgctagcctccaccgcgccgcgagtcacgccgttcatgcaccggctggtcctggagcacgggaggacgagcatgtcctggttcggccccagccccaaggtgaccatcgtcgacccggacctggccaaggacgtgctgtccaacaagttcggccacttcgagaagctcaaggtcccggcgctgtccaagatgctgggctccggcgtggccagccacgagggcgagaagtgggtcaagcaccggaggatcctcaaccatgcgttccatcttgagaagctcaagcgcatgctgccggcgttttctacgtgctgcgaggagctggtgagcaggtgggcggcggagtcccttggctccgacggctcgtgcgagctggacgtctggccggagctgcagaacctgacgggagacatcatttctcgcaccgtgttcagcagcagctacagcgaagggagaaggatcttccagctacaggtcgagcaagcttcgcttgtcatgaccaacattcggaagatcatgatccccggctacatgaagatgcgcaggaacaacagggaggtggagtcaatcctgcgagagataatcgggaagaggatccaggcgatggaacaaggcgagggcaccaaagacgacctggtgggtctactgctggagacaaacatgagagacgacatggggatgacgatcgaagacgtgatcgaggagtgcaaggtgttctacttcgtcgggatggagaccacgttggtgctgctcatgtggacgatggtggtgctcagcatgcacccggagtggcaggaccgcgcgagggaggaggtgacggctctgttcggcagggacgacaagcccgagtatgacggcctaagccgcctcaaagtcgtgaccatggtgctctacgaggtgctccgactgtacccgccggccacctccgtcgtccgacaaacgtacaaggagatggaggtcggaggcgtcacctaccccgccggcgtgatcctggagctgcccgtgctgctcatccaccacgacccggacatctggggaggcgacgcgcgcgagtttaggcccgataggttctccgagggcgtgtccagggcctccaaggaccccggcgcgttcctcccgttcggttggagcccgcgcatctgcatcggccagaacttcgcgctgctggaggccaagatggcgctctgcatgatcctccagcggtttgagttcgggctcgcgccatcctatgctcatgcgccgcataccatgataaccttgcatcctatgcacggtgcgcagcttaagctcagagcaatatgatctcgacacgatgggtgtcccatcgttgatgccattgttatgtataaccttacaattcagataggcattcggccctgttaatgtctgaaataagtatcttcgcgttggcattttgtaatgtgcttttcacgtaccattggtgctttattgccttttgtatataaacatgtggatatatgtaactcatacattacacaaacaaacacaaacacaccagagccagagctatagggtggagctataaactgtggctctacttttgtacacaaaactggctccacatgttcttccaatcctgcaactgcgtttttcgcatccccgtttggtacagcttctctggctcttcctgtgttcttgatccctttgttccctttgatttcatctccgctcactttctttctgttcgattttgacgcctgcagattgcaaaaacgggactgctaagcaagctaagatttcaatggcatattccttcatacataggccattgagcgacgaggcacgccgcgtcagcactcccttggtggtcacttgcaatgaccagagacgggaggtctccgttgcccagaacatcgctaacaaggaaattgaccgcaccgttgcattcgacaaggtgctaggtccaaagtctcaacagcaggacgtcttcaaccatgctgttgtgccacttgtcagcgaggttttggacggttataattgcacaatatttgcatatggccagactggaactggcaaaacatacataatggaaggaggagggggcaaagcactggtgcaatttttattatatatattcacatgctacacatgtttctgaattctgatgcggttagtttgctgcttcaactgacgccataactctactccatttctatagaatgctgacctcccgactgatgctagtgtcattccaagtgctgttaagcgcatatttgacatcctcgaggcacagagtgcagagtacagcatgaaggtttcttttcttgagctgtacaatgtggagctcactgatcttctagctctacaatgagattgcaagaacgggactgctaagcaagctaagatttcaatggcctattccttcatacataggccattgaaccggaagattttgtcggtattcggtaactataggatcatgtggttgttggtcgagttggaccaattatgctggctcatttgttggatgttttgacaagtcgattctagcttccttatgatctatgttagatttgatgattgcaataagatatcatgaggcgcgccgaggagaacaggg

SEQ ID NO: 19906 - DNA, 3118 bp, Zea Mays
cagcgctcccgctccttgctcgcctccacccgcggccaccaccgccctgcggcccccgccgcttgctagcctccaccgcgccgcgagtcacgccgttcatgcaccggctggtcctggagcacgggaggacgagcatgtcctggttcggccccagccccaaggtgaccatcgtcgacccggacctggccaaggacgtgctgtccaacaagttcggccacttcgagaagctcaaggtcccggcgctgtccaagatgctgggctccggcgtggccagccacgagggcgagaagtgggtcaagcaccggaggatcctcaaccatgcgttccatcttgagaagctcaagcgcatgctgccggcgttttctacgtgctgcgaggagctggtgagcaggtgggcggcggagtcccttggctccgacggctcgtgcgagctggacgtctggccggagctgcagaacctgacgggagacatcatttctcgcaccgtgttcagcagcagctacagcgaagggagaaggatcttccagctacaggtcgagcaagcttcgcttgtcatgaccaacattcggaagatcatgatccccggctacatgtacttgcctaccgcgaacaacaggaagatgcgcaggaacaacagggaggtggagtcaatcctgcgagagataatcgggaagaggatccaggcgatggaacaaggcgagggcaccaaagacgacctggtgggtctactgctggagacaaacatgagagacgacatggggatgacgatcgaagacgtgatcgaggagtgcaaggtgttctacttcgtcgggatggagaccacgttggtgctgctcatgtggacgatggtggtgctcagcatgcacccggagtggcaggaccgcgcgagggaggaggtgacggctctgttcggcagggacgacaagcccgagtatgacggcctaagccgcctcaaagtcgtgaccatggtgctctacgaggtgctccgactgtacccgccggccacctccgtcgtccgacaaacgtacaaggagatggaggtcggaggcgtcacctaccccgccggcgtgatcctggagctgcccgtgctgctcatccaccacgacccggacatctggggaggcgacgcgcgcgagtttaggcccgataggttctccgagggcgtgtccagggcctccaaggaccccggcgcgttcctcccgttcggttggagcccgcgcatctgcatcggccagaacttcgcgctgctggaggccaagatggcgctctgcatgatcctccagcggtttgagttcgggctcgcgccatcctatgctcatgcgccgcataccatgataaccttgcatcctatgcacggtgcgcagcttaagctcagagcaatatgatctcgacacgatgggtgtcccatcgttgatgccattgttatgtataaccttacaattcagataggcattcggccctgttaatgtctgaaataagtatcttcgcgttggcattttgtaatgtgcttttcacgtaccattggtgctttattgccttttgtatataaacatgtggatatatgtaactcatacattacacaaacaaacacaaacacaccagagccagagctatagggtggagctataaactgtggctctacttttgtacacaaaactggctccacatgttcttccaatcctgcaactgcgtttttcgcatccccgtttgattgcaaaaacgggactgctaagcaagctaagatttcaatggcatattccttcatacataggccattgagcgacgaggcacgccgcgtcagcactcccttggtggtcacttgcaatgaccagagacgggaggtctccgttgcccagaacatcgctaacaaggaaattgaccgcaccgttgcattcgacaaggtgctaggtccaaagtctcaacagcaggacgtcttcaaccatgctgttgtgccacttgtcagcgaggttttggacggttataattgcacaatatttgcatatggccagactggaactggcaaaacatacataatggaaggaggagggggcaaagcactgaatgctgacctcccgactgatgctagtgtcattccaagtgctgttaagcgcatatttgacatcctcgaggcacagagtgcagagtacagcatgaaggtttcttttcttgagctgtacaatgtggagctcactgatcttctagctctacaatgagattgcaagaacgggactgctaagcaagctaagatttcaatggcctattccttcatacataggccattgaaccggaagattttgtcggtattcggtaactataggatcatgtggttgttggtcgagttggaccaattatgctggctcatttgttggatgttttgacaagtcgattctagcttccttatgatctatgttagatttggtaatgcataccagttagtaaagcatttatgatgtacattgttatacatagagctttacatcacaaaaattatcagtttccctcagttacgatatgcatttagtatttatcgtattttgaaaattaataacctattatactatgataggcttgacttcatgtttatctaaataacttagtgcgatgatgcttgaaaacttatcttccattttgccagatcaatgaataaaaggattattcatatcaatgtccatgcaccttctcagaaaatccttttgtgatgttggtgttggtttcctggacctgtactgatgattgcaataagatatcatgaggcgcgccgaggagaacaggggcctcctctccgcctcctccttcgacaggcagctgctgcggtacgaccatcaggcgtttcatctgttgtacaatatgtgaatcaatcttccattggtatgaactgtgatctgattctttgtctcgaccggtgcaggaaggaggtggtgaggagggtcaaggccgcggtggcgggacgtgagtgaagtgagctttgtcgagcctatatgtggaggtcagtcatgaagctgggactaggacaagggcgagctgaaggctagaagctgtaaatgcacccttcaagagtcttcataggccaagtctctactggaaggaaacagtgggcgatgaaagcagggaatttggg

SEQ ID NO: 19907 - DNA, 1203 bp, Zea Mays
catgaagatgcgcaggaacaacagggaggtggagtcaatcctgcgagagataatcgggaagaggatccaggcgatggaacaaggcgagggcaccaaagacgacctggtgggtctactgctggagacaaacatgagagacgacatggggatgacgatcgaagacgtgatcgaggagtgcaaggtgttctacttcgtcgggatggagaccacgttggtgctgctcatgtggacgatggtggtgctcagcatgcacccggagtggcaggaccgcgcgagggaggaggtgacggctctgttcggcagggacgacaagcccgagtatgacggcctaagccgcctcaaagtcattgcaaaaacgggactgctaagcaagctaagatttcaatggcatattccttcatacataggccattgagcgacgaggcacgccgcgtcagcactcccttggtggtcacttgcaatgaccagagacgggaggtctccgttgcccagaacatcgctaacaaggaaattgaccgcaccgttgcattcgacaaggtgctaggtccaaagtctcaacagcaggacgtcttcaaccatgctgttgtgccacttgtcagcgaggttttggacggttataattgcacaatatttgcatatggccagactggaactggcaaaacatacataatggaaggaggagggggcaaagcactggtgcaatttttattatatatattcacatgctacacatgtttctgaattctgatgcggttagtttgctgcttcaactgacgccataactctactccatttctatagaatgctgacctcccgactgatgctagtgtcattccaagtgctgttaagcgcatatttgacatcctcgaggcacagagtgcagagtacagcatgaaggtttcttttcttgagctgtacaatgtggagctcactgatcttctagctctacaatgagattgcaagaacgggactgctaagcaagctaagatttcaatggcctattccttcatacataggccattgaaccggaagattttgtcggtattcggtaactataggatcatgtggttgttggtcgagttggaccaattatgctggctcatttgttggatgttttgacaagtcgattctagcttccttatgatctatgttagatttgatgattgcaataagatatcatgaggcgcgccgaggagaacaggg

SEQ ID NO: 19908 - DNA, 4301 bp, Zea Mays
gagagatctcttaacaagataattgtttatttttatcgttaactagtacacgaaaacattgtcacatacaagtttaacgggtcctcgcggggaatgggaatgtggatagcttctctgtctccacccgtcggaggaagagttttccccgtttatattcccgtgagaaataaacttccctattcttatccctaagagcatgttcggttgtaagaggaccgaaggattaaagaagattaaatcctctacaattcaattttaaatatgaatagatttaatctcttaaattttttctaaccgaacaagctttaatagaggaattttcgatgaataacggatctatattgtcatccctagctataaatgaaaccgtagtaacccgtagggcactttgctattagctatacataaggtactacatgcgctcaacaacccaacgaattttttttcccttctccatcgaaaagataaaataaattcagaccctttttcctataataataaatatacatggaggcggcgccgacggagtagctgcagtggtgtggtgtcggacagtgaaaggagcacaagacaacactcaggcactcagctgattgatgagctagcattgtatatacagtacaggtagaggcgtatagcgagcgagcgagcgagcaagcgcgcgcgcacacagagagagagagagagagagagagagagacaagacaacagcaacagatagaccgggccaagttcgtgagtccatcgtgtacatacggccgagtggcgacgccgtcgtcttcaccacgcacgccgcgcctcttccatagtctcgctcgcctccattaattccaatcctctctcctccgctagcgctccaccagcacgcaccggcagatgaagaacatggcgtctacgacggtacggtgatcaccttcatcatcacatcactcgttcatcgcccgccggcccgccggttgttggtaggccagggtcagccactcagccgagccagccatgaagctcgtcgtcgagatctccgacgcagccgacctcgcccccaaggacggcaccgcctcctgcaacccctacgtagaggtggacttcgacgaccagcgccagcgcaccgccaccaagcccgccgaccgctccccgtactggaaccagacgctggtcttcgacgtccgcgaccccgcgcgcttcccttccctccccatcgacgtctccgtcttccacgaccgacgcctccaggaccacaacgccctccgcccacagaccttcctcggccgcgtccgcatcaacggcgcctccgtcgcgccgtcgccacaggaggcggtcctgcagaggttcctgctcctcccaaccaccaccaccacccgcagcagcagcagcagcagcaggagtcggtcgcggctgctgccgccaccggagatcccgaaaggatggtcaggtccgccttcgcaccacagcagccgtcggcggttgagcagccagcggcagctgggaacggcggggatgagcacgaggcacgccctcctcgcatcttccgctccgtgccagcagccgagccccgccgcgcgacgctccacgctgtggccgcgcctcctcccccgcccggccagacggtcgtcatgcccaaacccgctgcctccgcccctcccggccccgccttcggcctggtcgagaccaagccgcctctgccggccaagatgggcccgcgcgcggccgccgccgccgccgccaagatcgcgtccacgtacgacatggtggagccgatgacgtacctgtacgtgagcgtggtgaaggcgcgcgacctccccaacatggacgtgaccggcgcgctggacccctacgtggaggtgaagctgggcaacttcaagggcgtgaccaagcacctggacaagaatcccaacccggtgtggcgccagaccttcgccttctcccgggagcacctgcagtccaacctgctggaggtggccatcaaggacaaggacatgatcaaggacgacttcgtcggccgcgtcctcttcgacatgaccgacatcccgcagcgcgtgccccccgacagcccgctcgcgccgcagtggtaccgcctcgccgaccgctccggcgagaagctgcggcacggcgagatcatgctggcggtgtggatcggcacgcaggccgacgaggcgttcccggaagcctggcactcggacgcgcactcgctgcccttcgagggcctctccaacaccaggtccaaggtctactactcgcccaagctcgcctacctcaaggtggtggccatcgcggcgcaggacgtggtccccgccggctcagagaagggccgcccgctggcgcccgtcatcgccaagatccagctcggctggcaggtccgccggacgcgtccggggcagccgcagggctccgccaaccccgtgtggaacgaggagttcatgttcgtggcggcagatccgttcgacgagccgctcgtggtgacggtggaggagcgcgtggcggcggggcgcgacgagcccgtgggccgggtgatcatccccgtccagttgccgtcgtacgtgccccgcaacgacgtggccaagtcggtggaggccaagtggttcaacctgtcccgcgcgctgacggcggacgaggccgcggcgggcgtgaccgccgccaaggcgctgtcggagaagacaaccttctccagcaagatccacctgcggctgagcctggagacggcgtaccacgtgctggacgagtcgacgcactacagcagcgacctgcagccgtcggccaagaagctgcgcaagtcccctatcggcatcctggagttgggcatcctgagcgcgcggaacctggtgcccatgaaggccaaggaagggcggctgacggacccctactgcgtggccaagtacgggtccaagtgggtgcgcaccaggacgctgctcaacacgctggcgccgcagtggaacgagcagtacacctgggaggtgttcgacccctgcaccatcgtcaccgtcgccgtgttcgacaacgggtacgtcctcggcggcggcgagggcagcaaggaccagaggatcggcaaggtgcgcgtgcggctatcgacgctggagatcgaccgcgtgtacacccacttctacccgctgatgacgctgacgcccggcgggctgaagaagaccggcgagctgcacctggcggtgcggttcacctgcacggcgtgggccaacatgctgggcatgtacggcaagccgctgctgccgaagatgcactacagccaccccatctccgtgctgcagctggactacctccggttccaggcgatgcagatggtggcggcgcggctggggcgcgctgagccgccgctgcggcgggaggtggtggagtacatgctggacgtggactcgcacatgttcagcctgcggcggagcaaggccaacttctaccggatcacctccctcttctcgggcgccgtggcggtggcgaagtggatggagggcatctgcaagtggaagaacccgctgacgacggtgctggtgcacgtgctgttcctgatcctggtgtgctacccggagctgatcctgcccaccgtgttcctgtacttgttcatgatcgggatgtggaactaccggcggcggccgcggaagccgccgcacatggacacggtgctgtcgcacgcggagtccgggctggtgcacccggacgagctggacgaggagttcgacacgttcccgacgagcaagcccggggacgtggtgcggatgcgctacgaccggctgcgcagcgtggccgggcgcgtgcagacggtggtgggcgacctggccacgcagggggagagagcgcaggcgctgctgagctggagggacccgagggcgacggccatcttcatcatgctgtcgctggtggtggccgtggtgctgtacgtgacgcccttccaggtggtggccgtggtgctggggctgtacctgctgcgccatccgcgcttccggagcaagcagccgtcggtgccattcaacttctacaagaggcttccggccaagtccgacatgctgctctagctgcgctgcgctgcgctgctctctgccctgcctgttggaattggaacaccaagcatgttccttagtttcttttaatttgctcccaattaattaaattatatattaccacgcacgaatctcagataaataaatgtaaatccctaccagtactactcctacataggagttgagttggatcagcagataccttacctagctacctttttgtgtgtcagaagagaagagaagagtacagtggtacagtactactactctgaataatatgaggaacagaattttcattcagaa

SEQ ID NO: 19909 - DNA, 4095 bp, Zea Mays
gagagatctcttaacaagataattgtttatttttatcgttaactagtacacgaaaacattgtcacatacaagtttaacgggtcctcgcggggaatgggaatgtggatagcttctctgtctccacccgtcggaggaagagttttccccgtttatattcccgtgagaaataaacttccctattcttatccctaagagcatgttcggttgtaagaggaccgaaggattaaagaagattaaatcctctacaattcaattttaaatatgaatagatttaatctcttaaattttttctaaccgaacaagctttaatagaggaattttcgatgaataacggatctatattgtcatccctagctataaatgaaaccgtagtaacccgtagggcactttgctattagctatacataaggtactacatgcgctcaacaacccaacgaattttttttcccttctccatcgaaaagataaaataaattcagaccctttttcctataataataaatatacatggaggcggcgccgacggagtagctgcagtggtgtggtgtcggacagtgaaaggagcacaagacaacactcaggcactcagctgattgatgagctagcattgtatatacagtacaggtagaggcgtatagcgagcgagcgagcgagcaagcgcgcgcgcacacagagagagagagagagagagagagagagacaagacaacagcaacagatagaccgggccaagttcgtgagtccatcgtgtacatacggccgagtggcgacgccgtcgtcttcaccacgcacgccgcgcctcttccatagtctcgctcgcctccattaattccaatcctctctcctccgctagcgctccaccagcacgcaccggcagatgaagaacatggcgtctacgacggtacggtgatcaccttcatcatcacatcactcgttcatcgcccgccggcccgccggttgttggtaggccagggtcagccactcagccgagccagccatgaagctcgtcgtcgagatctccgacgcagccgacctcgcccccaaggacggcaccgcctcctgcaacccctacgtagaggtggacttcgacgaccagcgccagcgcaccgccaccaagcccgccgaccgctccccgtactggaaccagacgctggtcttcgacgtccgcgaccccgcgcgcttcccttccctccccatcgacgtctccgtcttccacgaccgacgcctccaggaccacaacgccctccgcccacagaccttcctcggccgcgtccgcatcaacggcgcctccgtcgcgccgtcgccacaggaggcggtcctgcagaggtacccgctcgagaaacggagcttcttctcacgcgtctcgggcgacatcgcgatcaggatctacctcgtcggagatgatgtcaataatgaaagcgtacaggttcctgctcctcccaaccaccaccaccacccgcagcagcagcagcagcagcaggagtcggtcgcggctgctgccgccaccggagatcccgaaaggatggtcaggtccgccttcgcaccacagcagccgtcggcggttgagcagccagcggcagctgggaacggcggggatgagcacgaggcacgccctcctcgcatcttccgctccgtgccagcagccgagccccgccgcgcgacgctccacgctgtggccgcgcctcctcccccgcccggccagacggtcgtcatgcccaaacccgctgcctccgcccctcccggccccgccttcggcctggtcgagaccaagccgcctctgccggccaagatgggcccgcgcgcggccgccgccgccgccgccaagatcgcgtccacgtacgacatggtggagccgatgacgtacctgtacgtgagcgtggtgaaggcgcgcgacctccccaacatggacgtgaccggcgcgctggacccctacgtggaggtgaagctgggcaacttcaagggcgtgaccaagcacctggacaagaatcccaacccggtgtggcgccagaccttcgccttctcccgggagcacctgcagtccaacctcaaggtggtggccatcgcggcgcaggacgtggtccccgccggctcagagaagggccgcccgctggcgcccgtcatcgccaagatccagctcggctggcaggtccgccggacgcgtccggggcagccgcagggctccgccaaccccgtgtggaacgaggagttcatgttcgtggcggcagatccgttcgacgagccgctcgtggtgacggtggaggagcgcgtggcggcggggcgcgacgagcccgtgggccgggtgatcatccccgtccagttgccgtcgtacgtgccccgcaacgacgtggccaagtcggtggaggccaagtggttcaacctgtcccgcgcgctgacggcggacgaggccgcggcgggcgtgaccgccgccaaggcgctgtcggagaagacaaccttctccagcaagatccacctgcggctgagcctggagacggcgtaccacgtgctggacgagtcgacgcactacagcagcgacctgcagccgtcggccaagaagctgcgcaagtcccctatcggcatcctggagttgggcatcctgagcgcgcggaacctggtgcccatgaaggccaaggaagggcggctgacggacccctactgcgtggccaagtacgggtccaagtgggtgcgcaccaggacgctgctcaacacgctggcgccgcagtggaacgagcagtacacctgggaggtgttcgacccctgcaccatcgtcaccgtcgccgtgttcgacaacgggtacgtcctcggcggcggcgagggcagcaaggaccagaggatcggcaaggtgcgcgtgcggctatcgacgctggagatcgaccgcgtgtacacccacttctacccgctgatgacgctgacgcccggcgggctgaagaagaccggcgagctgcacctggcggtgcggttcacctgcacggcgtgggccaacatgctgggcatgtacggcaagccgctgctgccgaagatgcactacagccaccccatctccgtgctgcagctggactacctccggttccaggcgatgcagatggtggcggcgcggctggggcgcgctgagccgccgctgcggcgggaggtggtggagtacatgctggacgtggactcgcacatgttcagcctgcggcggagcaaggccaacttctaccggatcacctccctcttctcgggcgccgtggcggtggcgaagtggatggagggcatctgcaagtggaagaacccgctgacgacggtgctggtgcacgtgctgttcctgatcctggtgtgctacccggagctgatcctgcccaccgtgttcctgtacttgttcatgatcgggatgtggaactaccggcggcggccgcggaagccgccgcacatggacacggtgctgtcgcacgcggagtccgggctggtgcacccggacgagctggacgaggagttcgacacgttcccgacgagcaagcccggggacgtggtgcggatgcgctacgaccggctgcgcagcgtggccgggcgcgtgcagacggtggtgggcgacctggccacgcagggggagagagcgcaggcgctgctgagctggagggacccgagggcgacggccatcttcatcatgctgtcgctggtggtggccgtggtgctgtacgtgacgcccttccaggtggtggccgtggtgctggggctgtacctgctgcgccatccgcgcttccggagcaagcagccgtcggtgccattcaacttctacaagaggcttccggccaagtccgacatgctgctctagctgcgctgcgctgcgctgctctctgccctgcctgttggaattggaacaccaagcatgttccttagtttcttttaatttgctcccaattaattaaattatatattaccacgcacgaatctcagataaataaatgtaaatccctaccagtactactcctacataggagttgagttggatcagcagataccttacctagctacctttttgtgtgtcagaagagaagagaagagtacagtggtacagtactactactctgaataatatgaggaacagaattttcattcagaa

SEQ ID NO: 19910 - DNA, 5786 bp, Zea Mays
ctgggctgcagccccgggcggcactcgcggcccaccagaggcccaccgtcgcgcccagccccaaatcccaaccctagctccagcctccagccgccgcagctcctctctaggctccactgctccagccgccgcgcctcctgcctggctgcctcttgcctggctgcctcctctgtcctctccacgactccacttctccagtctgagcagtctccagcgaccagaggcagcgccgcagcgcgctcggccgctcgccgttccgcgcggccgcgcctcctctccagcgtcgcgccgcgcctcctctccagcgccagcccgccaccgcggcaccgccaggcgccctgccggccagccggccagccagagccaggcgcgcaacgcgctcgaccgccgaccgccgaccgcacaccgcagcacgggactacgggagcagccgaggcccgaccgcccgagaaattcaagataaaagattttgaagcattttcaagtcttaagaactcggaagataaatttaccttgcatcatcatctcatgaacggtatgtacaagattattgtatttatagaatttgtatcgatttatttttagactacatatttcttgaatgtttaaattatatcttacttcttgtgtcatattaaacatcatttttttgttatagtcttaacttagtaacccctcttgcatcaatcctggatccgccactggcctagaaatgtatcttaggagacgattgctgccatgtgatcttgtcttagatcctacatgaagcgactaagataccgcacactgaaaaaaacaatgtctggtcgagtacctggtctcatccaccttaagcgacgagctgtccttggacaacttcaatcttgtttccatcagtgtcgctcatgggttgcaggctatcatgcatgcctgcattctccagcaccttttggagcataggctgcttgcgagagctcgatgccatgttgcccttgcatccttgtctgactttgatgctgaggtagtatgtaagctccctcaggtcactcatgcggactccctttccttcttgaaggtgtcgatttattctcttgatttccctgtaataatgaggtcgtcgacatatatgccaaccaccagtcttgattgctcgacgttgtgcgtgtatagtccatgtttgcaggtgcttcttcaagatgctcgacaaaaatgcagaagtaatgtttaggtggcttaacaccgtgccaccatacctcgaattgaatggagtcctcgcctccacgctctgagtagacgcccgatttaggatggacacagccatggtgactgcctcccccaaaaactagccggacatcgtcttcgcctcttcatgatgctcctggccatccccatggcggtctggttccacctcttcactacgtcattctgctgaggcgtgtatgacacagtgagatgctctagatcccctcctcgacgcagtagttggcgaacgtccgcacaatgaactcaccaccgcgatttgtgcgtagcgtccccagttttcttgctggatgaaccaccaagaactgtgagtagacggccactaccttccttgctggatgatccaccaagctccattgtgcggagtccagtcaccaccacgagtggcgatgctgaggtcgaggagcgtttcaatggacaacacgatctgttcaaggtcatcaggaacataatgtagcaacttcttcactacctcctcagcgatgtcaactccgactactcgaagttggttcgcgagattcgaagcctgtccggcgaagtcctccaccatctcgcctggcttgaacgcgaggtcgccgaattccctctgaagccggttggcattcgcctccttgactcgctaagtgcccacacaaacaaaattttatggagtcccatgccttccttgttgccttgcgtgcgagctaggctcgcctacatcttcggcggcaccgcgcggagtagcgccgccagtgtgtccctgtcgtcgcggaagacgttcgtccccggctcagtcgcctccaaaaggcactaagcttggagattgacttgcatcacgagtgaccactgagcactgaccactcggcctagttagtcttcctgagcatggggtagaccgccatcgtagaactccgctcgatgagacacgttccatgacgatctccgtggagttgcgccgtccgcgaggaaaaaacctgcgacagcgaccgcctcctcctttctccgcctccatcttcccgttgactgtacaccgacactggttgaacacttttgctccgatactagttgttagaaccgagggctaccccttggctgcactcttgtcaacgttgaggaagatgaacggggattctacaagaacacagtcacccgagaaacatacattagtttttggtatggcaaaaataaaccacatattctgaactctattcacaacaatgtagactgaaacttaacacacgttcacagccacgattgaccactacacatgacgagcgagttacgcctcacacctgtgtgaaccgtgtcatcccatagctcaacgtgccatgcaagacactcaaccaaccttgcatgcccatgcatacaactgactcctaaacacacgcgtgatcgctaacattctggcccaagcacactgaatgaacgaatgaaaaacaaagtaaaactgaactaaggactataacctctgaacatgccagagttattcaacaaatatcaggtggtgtaccactagagttgtaaattctgtctcttcgcctatcgcatccagagccacatgctcttccaggagagcctgaaaaacgttcatgttgtgcttgtaagtgcttgctattgctatttcctctgctctaaatacagactgggttgataaaggaaaatgctaatcacaacattgcttacatcctcagcaatgagtagcacaccatccttatcctgcacaaacatgggacaactagtcggattaaagccatctgtttagactgttgtagctataatccatagagacaaaaacactatagaagcagtagaagccgatacaaattaaagccaagcgaacaagcatgtacaaactatattgcaccagttgaacaagaaccaactaaccttgagtgcgacgaacagaaaaggatggtgtataaatcatattgtgggcaacatcctgcagatacaaagtgtcagcaatcataagcatgccaacgaagacccaagattgattacttgtaaggggtgtttggttctagggactaaagtttagtacatgtcacatcgaatgtttggatgccaaatataagtattaaatatagtctaattataaaaataattatatagataaagactaaaaaagagacaaattttaagaataattaatctatggttaacaaatatttaatgtagtatcacattagcggattttaaagcaccatctatgattaacaaatatttaatctatgattgattatatagataaagactaaaaaagaatgtatgtgattatggaaagcaccacctcttgctgtataacagaatctgaaacggagagggaaagatgcgtgtaaagagattgtgatatttagaagcaacagatggaatgctttgcttgtgttggtcgtcatcgacctaaagaaacaggtaaaaattgtgcatcaaacgtataggaaaggaaggaagcatgattcatttacattaggaaccatgggacacagaatgaataatcaggtgaagacatacaactacctagccactgaaatttgtgctcttgaggacttgcaataagcctcaaaaagtgtggttgtgaagctttagggcctgtttggtaatgcagttttaaaataatataattttaaaataacacagcttataattatacatggcacaaatgctacaatattacattaccatagtaaaaccacgctattgtttaaaatcgaaatgtatttagttacttaaaaaaccgaaatatttgcagagaaaacaaaagaaaattaaggcactaagtggagtttccaaaactcaaaaataccatggttttagataaaccatagtatttaaaactgtattttacctgtactaaccaaatattttttggcttccaataacatgatatcattaaatactatagtattattttaaaactgtaaaaataataaacttccgatacatgttaacggggcagagaagcatgcagtcgtgtaagtcctgcgatcctaactgattatgcactccaatgggctgcggagcacaaaggggagaaaaacaaaaacgagtgggaggtggccgtgggccatgttgctgctgctgacgaggcggcgcgacccatagtaaaggcgtacaacagctcacctccctcgtccagctccagccgccgtcaggcttccgacgcaacttctaactccgttcgcctccaggcgacaccatcgcccgctggcacgccgccacagcagcaggttaacacaatttggcccggagcttagttgaatcctgcttccgccactgcggacaaccatggcgtcgtcgaagctgcagctgcctgctgacgacagcgtcctcctgctcatcacccactccaatctcaccaccttcgcagcggacatccgcgtctcgcaacagaccaccgtggaggcgctcaaggacaagctctggcgcaagaccggcaccgccgtcgcttccatgcgcctccagctccgcgacgactccggcaccaagatcgccgacctcgacgacgacgccgcgccactcgcggcctacgccccctacaacggctaccggatccatgtcgttgatctcgacccttcctcactcacctcagggggttggttggaagacacttcccttgtcgacaagtacacaatgtccgatgaaacatacgataagctcgacactaactttcgaaaattcaaagaaaagatggtcccgaaaaactctccgtcagaggataaagaagaatcagaaaagcatatggaggaactatgctccaaaatcaaggtgggtgatagatgtgaagttgagcctggtgccaagaggggcactgtaaaatttgttggtagagctgaagcccttggacgtggattctgggttggagtgcaatatgatgagccacttgggaagcatgacggcatggtgaaaggcattcgcttctttgagtgccctcaaggtcatggggcaattgtgaggccagagaaagtaaaggttggcgacttcccggagagagacccatttgaagacgaggacgatgacgagatttgagtgcgtgtgcgtttggaaaagcaaggggaatgtccttgttgaattgcattcgaaacgtgtgtaaaatgaattcggagatttgagtgtgcgcgcttgcttgcatcttcttgggcaatcatagtgatcacatttcaaggcatgctgttacatctctactatttaagcgtgagctaataaattttccctccaacgcagagtatccaaaaaatggggtggattcgaatcctgctcacttgtataaagcgcatgacttctaccactataacttatttctgtctgtgttatataaattagagatattttgtgtgtatgatactaataattttaaaaaatataatatcatttaagcaaggtttacttatatatctgtagaaacagttacatatatgtgggttcttctactagtcctctgacccggaggaaaagatggagattttcgccaacttagagcatctctaacaatacctcaaaggtacgaaaaactattctaacattgtcttattttataaaacttgatcaaaaaattatattggacacccttt

SEQ ID NO: 19911 - DNA, 1873 bp, Zea Mays
ggctgcagccccgggcggcactcgcggcccaccagaggcccaccgtcgcgcccagccccaaatcccaaccctagctccagcctccagccgccgcagctcctctctaggctccactgctccagccgccgcgcctcctgcctggctgcctcttgcctggctgcctcctctgtcctctccacgactccacttctccagtctgagcagtctccagcgaccagaggcagcgccgcagcgcgctcggccgctcgccgttccgcgcggccgcgcctcctctccagcgtcgcgccgcgcctcctctccagcgccagcccgccaccgcggcaccgccaggcgccctgccggccagccggccagccagagccaggcgcgcaacgcgctcgaccgccgaccgccgaccgcacaccgcagcacgggactacgggagcagccgaggcccgaccgcccgagaaattcaagataaaagattttgaagcattttcaagtcttaagaactcggaagataaatttaccttgcatcatcatctcatgaacggttaacacaatttggcccggagcttagttgaatcctgcttccgccactgcggacaaccatggcgtcgtcgaagctgcagctgcctgctgacgacagcgtcctcctgctcatcacccactccaatctcaccaccttcgcagcggacatccgcgtctcgcaacagaccaccgtggaggcgctcaaggacaagctctggcgcaagaccggcaccgccgtcgcttccatgcgcctccagctccgcgacgactccggcaccaagatcgccgacctcgacgacgacgccgcgccactcgcggcctacgccccctacaacggctaccggatccatgtcgttgatctcgacccttcctcactcacctcagggggttggttggaagacacttcccttgtcgacaagtacacaatgtccgatgaaacatacgataagctcgacactaactttcgaaaattcaaagaaaagatggtcccgaaaaactctccgtcagaggataaagaagaatcagaaaagcatatggaggaactatgctccaaaatcaaggtgggtgatagatgtgaagttgagcctggtgccaagaggggcactgtaaaatttgttggtagagctgaagcccttggacgtggattctgggttggagtgcaatatgatgagccacttgggaagcatgacggcatggtgaaaggcattcgcttctttgagtgccctcaaggtcatggggcaattgtgaggccagagaaagtaaaggttggcgacttcccggagagagacccatttgaagacgaggacgatgacgagatttgagtgcgtgtgcgtttggaaaagcaaggggaatgtccttgttgaattgcattcgaaacgtgtgtaaaatgaattcggagatttgagtgtgcgcgcttgcttgcatcttcttgggcaatcatagtgatcacatttcaaggcatgctgttacatctctactatttaagcgtgagctaataaattttccctccaacgcagagtatccaaaaaatggggtggattcgaatcctgctcacttgtataaagcgcatgacttctaccactataacttatttctgtctgtgttatataaattagagatattttgtgtgtatgatactaataattttaaaaaatataatatcatttaagcaaggtttacttatatatctgtagaaacagttacatatatgtgggttcttctactagtcctctgacccggaggaaaagatggagattttcgccaacttagagcatctctaacaatacctcaaaggtacgaaaaactattctaacattgtcttattttataaaacttgatcaaaaaattatattggacacccttt

SEQ ID NO: 19912 - DNA, 2143 bp, Zea Mays
gctgcagccccgggcggcactcgcggcccaccagaggcccaccgtcgcgcccagccccaaatcccaaccctagctccagcctccagccgccgcagctcctctctaggctccactgctccagccgccgcgcctcctgcctggctgcctcttgcctggctgcctcctctgtcctctccacgactccacttctccagtctgagcagtctccagcgaccagaggcagcgccgcagcgcgctcggccgctcgccgttccgcgcggccgcgcctcctctccagcgtcgcgccgcgcctcctctccagcgccagcccgccaccgcggcaccgccaggcgccctgccggccagccggccagccagagccaggcgcgcaacgcgctcgaccgccgaccgccgaccgcacaccgcagcacgggactacgggagcagccgaggcccgaccgcccgagaaattcaagataaaagattttgaagcattttcaagtcttaagaactcggaagataaatttaccttgcatcatcatctcatgaacgagaagcatgcagtcgtgtaagtcctgcgatcctaactgattatgcactccaatgggctgcggagcacaaaggggagaaaaacaaaaacgagtgggaggtggccgtgggccatgttgctgctgctgacgaggcggcgcgacccatagtaaaggcgtacaacagctcacctccctcgtccagctccagccgccgtcaggcttccgacgcaacttctaactccgttcgcctccaggcgacaccatcgcccgctggcacgccgccacagcagcaggttaacacaatttggcccggagcttagttgaatcctgcttccgccactgcggacaaccatggcgtcgtcgaagctgcagctgcctgctgacgacagcgtcctcctgctcatcacccactccaatctcaccaccttcgcagcggacatccgcgtctcgcaacagaccaccgtggaggcgctcaaggacaagctctggcgcaagaccggcaccgccgtcgcttccatgcgcctccagctccgcgacgactccggcaccaagatcgccgacctcgacgacgacgccgcgccactcgcggcctacgccccctacaacggctaccggatccatgtcgttgatctcgacccttcctcactcacctcagggggttggttggaagacacttcccttgtcgacaagtacacaatgtccgatgaaacatacgataagctcgacactaactttcgaaaattcaaagaaaagatggtcccgaaaaactctccgtcagaggataaagaagaatcagaaaagcatatggaggaactatgctccaaaatcaaggtgggtgatagatgtgaagttgagcctggtgccaagaggggcactgtaaaatttgttggtagagctgaagcccttggacgtggattctgggttggagtgcaatatgatgagccacttgggaagcatgacggcatggtgaaaggcattcgcttctttgagtgccctcaaggtcatggggcaattgtgaggccagagaaagtaaaggttggcgacttcccggagagagacccatttgaagacgaggacgatgacgagatttgagtgcgtgtgcgtttggaaaagcaaggggaatgtccttgttgaattgcattcgaaacgtgtgtaaaatgaattcggagatttgagtgtgcgcgcttgcttgcatcttcttgggcaatcatagtgatcacatttcaaggcatgctgttacatctctactatttaagcgtgagctaataaattttccctccaacgcagagtatccaaaaaatggggtggattcgaatcctgctcacttgtataaagcgcatgacttctaccactataacttatttctgtctgtgttatataaattagagatattttgtgtgtatgatactaataattttaaaaaatataatatcatttaagcaaggtttacttatatatctgtagaaacagttacatatatgtgggttcttctactagtcctctgacccggaggaaaagatggagattttcgccaacttagagcatctctaacaatacctcaaaggtacgaaaaactattctaacattgtcttattttataaaacttgatcaaaaaattatattggacacccttt

SEQ ID NO: 19913 - DNA, 2140 bp, Zea Mays
gctgcagccccgggcggcactcgcggcccaccagaggcccaccgtcgcgcccagccccaaatcccaaccctagctccagcctccagccgccgcagctcctctctaggctccactgctccagccgccgcgcctcctgcctggctgcctcttgcctggctgcctcctctgtcctctccacgactccacttctccagtctgagcagtctccagcgaccagaggcagcgccgcagcgcgctcggccgctcgccgttccgcgcggccgcgcctcctctccagcgtcgcgccgcgcctcctctccagcgccagcccgccaccgcggcaccgccaggcgccctgccggccagccggccagccagagccaggcgcgcaacgcgctcgaccgccgaccgccgaccgcacaccgcagcacgggactacgggagcagccgaggcccgaccgcccgagaaattcaagataaaagattttgaagcattttcaagtcttaagaactcggaagataaatttaccttgcatcatcatctcatgaacgagaagcatgcagtcgtgtaagtcctgcgatcctaactgattatgcactccaatgggctgcggagcacaaaggggagaaaaacaaaaacgagtgggaggtggccgtgggccatgttgctgctgctgacgaggcggcgcgacccatagtaaaggcgtacaacagctcacctccctcgtccagctccagccgccgtcaggcttccgacgcaacttctaactccgttcgcctccaggcgacaccatcgcccgctggcacgccgccacagcaggttaacacaatttggcccggagcttagttgaatcctgcttccgccactgcggacaaccatggcgtcgtcgaagctgcagctgcctgctgacgacagcgtcctcctgctcatcacccactccaatctcaccaccttcgcagcggacatccgcgtctcgcaacagaccaccgtggaggcgctcaaggacaagctctggcgcaagaccggcaccgccgtcgcttccatgcgcctccagctccgcgacgactccggcaccaagatcgccgacctcgacgacgacgccgcgccactcgcggcctacgccccctacaacggctaccggatccatgtcgttgatctcgacccttcctcactcacctcagggggttggttggaagacacttcccttgtcgacaagtacacaatgtccgatgaaacatacgataagctcgacactaactttcgaaaattcaaagaaaagatggtcccgaaaaactctccgtcagaggataaagaagaatcagaaaagcatatggaggaactatgctccaaaatcaaggtgggtgatagatgtgaagttgagcctggtgccaagaggggcactgtaaaatttgttggtagagctgaagcccttggacgtggattctgggttggagtgcaatatgatgagccacttgggaagcatgacggcatggtgaaaggcattcgcttctttgagtgccctcaaggtcatggggcaattgtgaggccagagaaagtaaaggttggcgacttcccggagagagacccatttgaagacgaggacgatgacgagatttgagtgcgtgtgcgtttggaaaagcaaggggaatgtccttgttgaattgcattcgaaacgtgtgtaaaatgaattcggagatttgagtgtgcgcgcttgcttgcatcttcttgggcaatcatagtgatcacatttcaaggcatgctgttacatctctactatttaagcgtgagctaataaattttccctccaacgcagagtatccaaaaaatggggtggattcgaatcctgctcacttgtataaagcgcatgacttctaccactataacttatttctgtctgtgttatataaattagagatattttgtgtgtatgatactaataattttaaaaaatataatatcatttaagcaaggtttacttatatatctgtagaaacagttacatatatgtgggttcttctactagtcctctgacccggaggaaaagatggagattttcgccaacttagagcatctctaacaatacctcaaaggtacgaaaaactattctaacattgtcttattttataaaacttgatcaaaaaattatattggacacccttt

SEQ ID NO: 19914 - DNA, 1367 bp, Zea Mays
ccgggcggcactcgcggcccaccagaggcccaccgtcgcgcccagccccaaatcccaaccctagctccagcctccagccgccgcagctcctctctaggctccactgctccagccgccgcgcctcctgcctggctgcctcttgcctggctgcctcctctgtcctctccacgactccacttctccagtctgagcagtctccagcgaccagaggcagcgccgcagcgcgctcggccgctcgccgttccgcgcggccgcgcctcctctccagcgtcgcgccgcgcctcctctccagcgccagcccgccaccgcggcaccgccaggcgccctgccggccagccggccagccagagccaggcgcgcaacgcgctcgaccgccgaccgccgaccgcacaccgcagcacgggactacgggagcagccgaggcccgaccgcccgagaaattcaagataaaagattttgaagcattttcaagtcttaagaactcggaagataaatttaccttgcatcatcatctcatgaacggaatcagaaaagcatatggaggaactatgctccaaaatcaaggtgggtgatagatgtgaagttgagcctggtgccaagaggggcactgtaaaatttgttggtagagctgaagcccttggacgtggattctgggttggagtgcaatatgatgagccacttgggaagcatgacggcatggtgaaaggcattcgcttctttgagtgccctcaaggtcatggggcaattgtgaggccagagaaagtaaaggttggcgacttcccggagagagacccatttgaagacgaggacgatgacgagatttgagtgcgtgtgcgtttggaaaagcaaggggaatgtccttgttgaattgcattcgaaacgtgtgtaaaatgaattcggagatttgagtgtgcgcgcttgcttgcatcttcttgggcaatcatagtgatcacatttcaaggcatgctgttacatctctactatttaagcgtgagctaataaattttccctccaacgcagagtatccaaaaaatggggtggattcgaatcctgctcacttgtataaagcgcatgacttctaccactataacttatttctgtctgtgttatataaattagagatattttgtgtgtatgatactaataattttaaaaaatataatatcatttaagcaaggtttacttatatatctgtagaaacagttacatatatgtgggttcttctactagtcctctgacccggaggaaaagatggagattttcgccaacttagagcatctctaacaatacctcaaaggtacgaaaaactattctaacattgtcttattttataaaacttgatcaaaaaattatattggacacccttt

SEQ ID NO: 19915 - DNA, 1410 bp, Zea Mays
caccagaggcccaccgtcgcgcccagccccaaatcccaaccctagctccagcctccagccgccgcagctcctctctaggctccactgctccagccgccgcgcctcctgcctggctgcctcttgcctggctgcctcctctgtcctctccacgactccacttctccagtctgagcagtctccagcgaccagaggcagcgccgcagcgcgctcggccgctcgccgttccgcgcggccgcgcctcctctccagcgtcgcgccgcgcctcctctccagcgccagcccgccaccgcggcaccgccaggcgccctgccggccagccggccagccagagccaggcgcgcaacgcgctcgaccgccgaccgccgaccgcacaccgcagcacgggactacgggagcagccgaggcccgaccgcccgagaaattcaagataaaagattttgaagcattttcaagtcttaagaactcggaagataaatttaccttgcatcatcatctcatgaacgctaactttcgaaaattcaaagaaaagatggtcccgaaaaactctccgtcagaggataaagaagaatcagaaaagcatatggaggaactatgctccaaaatcaaggtgggtgatagatgtgaagttgagcctggtgccaagaggggcactgtaaaatttgttggtagagctgaagcccttggacgtggattctgggttggagtgcaatatgatgagccacttgggaagcatgacggcatggtgaaaggcattcgcttctttgagtgccctcaaggtcatggggcaattgtgaggccagagaaagtaaaggttggcgacttcccggagagagacccatttgaagacgaggacgatgacgagatttgagtgcgtgtgcgtttggaaaagcaaggggaatgtccttgttgaattgcattcgaaacgtgtgtaaaatgaattcggagatttgagtgtgcgcgcttgcttgcatcttcttgggcaatcatagtgatcacatttcaaggcatgctgttacatctctactatttaagcgtgagctaataaattttccctccaacgcagagtatccaaaaaatggggtggattcgaatcctgctcacttgtataaagcgcatgacttctaccactataacttatttctgtctgtgttatataaattagagatattttgtgtgtatgatactaataattttaaaaaatataatatcatttaagcaaggtttacttatatatctgtagaaacagttacatatatgtgggttcttctactagtcctctgacccggaggaaaagatggagattttcgccaacttagagcatctctaacaatacctcaaaggtacgaaaaactattctaacattgtcttattttataaaacttgatcaaaaaattatattggacacccttt

SEQ ID NO: 19916 - DNA, 5751 bp, Zea Mays
caccagaggcccaccgtcgcgcccagccccaaatcccaaccctagctccagcctccagccgccgcagctcctctctaggctccactgctccagccgccgcgcctcctgcctggctgcctcttgcctggctgcctcctctgtcctctccacgactccacttctccagtctgagcagtctccagcgaccagaggcagcgccgcagcgcgctcggccgctcgccgttccgcgcggccgcgcctcctctccagcgtcgcgccgcgcctcctctccagcgccagcccgccaccgcggcaccgccaggcgccctgccggccagccggccagccagagccaggcgcgcaacgcgctcgaccgccgaccgccgaccgcacaccgcagcacgggactacgggagcagccgaggcccgaccgcccgagaaattcaagataaaagattttgaagcattttcaagtcttaagaactcggaagataaatttaccttgcatcatcatctcatgaacggtatgtacaagattattgtatttatagaatttgtatcgatttatttttagactacatatttcttgaatgtttaaattatatcttacttcttgtgtcatattaaacatcatttttttgttatagtcttaacttagtaacccctcttgcatcaatcctggatccgccactggcctagaaatgtatcttaggagacgattgctgccatgtgatcttgtcttagatcctacatgaagcgactaagataccgcacactgaaaaaaacaatgtctggtcgagtacctggtctcatccaccttaagcgacgagctgtccttggacaacttcaatcttgtttccatcagtgtcgctcatgggttgcaggctatcatgcatgcctgcattctccagcaccttttggagcataggctgcttgcgagagctcgatgccatgttgcccttgcatccttgtctgactttgatgctgaggtagtatgtaagctccctcaggtcactcatgcggactccctttccttcttgaaggtgtcgatttattctcttgatttccctgtaataatgaggtcgtcgacatatatgccaaccaccagtcttgattgctcgacgttgtgcgtgtatagtccatgtttgcaggtgcttcttcaagatgctcgacaaaaatgcagaagtaatgtttaggtggcttaacaccgtgccaccatacctcgaattgaatggagtcctcgcctccacgctctgagtagacgcccgatttaggatggacacagccatggtgactgcctcccccaaaaactagccggacatcgtcttcgcctcttcatgatgctcctggccatccccatggcggtctggttccacctcttcactacgtcattctgctgaggcgtgtatgacacagtgagatgctctagatcccctcctcgacgcagtagttggcgaacgtccgcacaatgaactcaccaccgcgatttgtgcgtagcgtccccagttttcttgctggatgaaccaccaagaactgtgagtagacggccactaccttccttgctggatgatccaccaagctccattgtgcggagtccagtcaccaccacgagtggcgatgctgaggtcgaggagcgtttcaatggacaacacgatctgttcaaggtcatcaggaacataatgtagcaacttcttcactacctcctcagcgatgtcaactccgactactcgaagttggttcgcgagattcgaagcctgtccggcgaagtcctccaccatctcgcctggcttgaacgcgaggtcgccgaattccctctgaagccggttggcattcgcctccttgactcgctaagtgcccacacaaacaaaattttatggagtcccatgccttccttgttgccttgcgtgcgagctaggctcgcctacatcttcggcggcaccgcgcggagtagcgccgccagtgtgtccctgtcgtcgcggaagacgttcgtccccggctcagtcgcctccaaaaggcactaagcttggagattgacttgcatcacgagtgaccactgagcactgaccactcggcctagttagtcttcctgagcatggggtagaccgccatcgtagaactccgctcgatgagacacgttccatgacgatctccgtggagttgcgccgtccgcgaggaaaaaacctgcgacagcgaccgcctcctcctttctccgcctccatcttcccgttgactgtacaccgacactggttgaacacttttgctccgatactagttgttagaaccgagggctaccccttggctgcactcttgtcaacgttgaggaagatgaacggggattctacaagaacacagtcacccgagaaacatacattagtttttggtatggcaaaaataaaccacatattctgaactctattcacaacaatgtagactgaaacttaacacacgttcacagccacgattgaccactacacatgacgagcgagttacgcctcacacctgtgtgaaccgtgtcatcccatagctcaacgtgccatgcaagacactcaaccaaccttgcatgcccatgcatacaactgactcctaaacacacgcgtgatcgctaacattctggcccaagcacactgaatgaacgaatgaaaaacaaagtaaaactgaactaaggactataacctctgaacatgccagagttattcaacaaatatcaggtggtgtaccactagagttgtaaattctgtctcttcgcctatcgcatccagagccacatgctcttccaggagagcctgaaaaacgttcatgttgtgcttgtaagtgcttgctattgctatttcctctgctctaaatacagactgggttgataaaggaaaatgctaatcacaacattgcttacatcctcagcaatgagtagcacaccatccttatcctgcacaaacatgggacaactagtcggattaaagccatctgtttagactgttgtagctataatccatagagacaaaaacactatagaagcagtagaagccgatacaaattaaagccaagcgaacaagcatgtacaaactatattgcaccagttgaacaagaaccaactaaccttgagtgcgacgaacagaaaaggatggtgtataaatcatattgtgggcaacatcctgcagatacaaagtgtcagcaatcataagcatgccaacgaagacccaagattgattacttgtaaggggtgtttggttctagggactaaagtttagtacatgtcacatcgaatgtttggatgccaaatataagtattaaatatagtctaattataaaaataattatatagataaagactaaaaaagagacaaattttaagaataattaatctatggttaacaaatatttaatgtagtatcacattagcggattttaaagcaccatctatgattaacaaatatttaatctatgattgattatatagataaagactaaaaaagaatgtatgtgattatggaaagcaccacctcttgctgtataacagaatctgaaacggagagggaaagatgcgtgtaaagagattgtgatatttagaagcaacagatggaatgctttgcttgtgttggtcgtcatcgacctaaagaaacaggtaaaaattgtgcatcaaacgtataggaaaggaaggaagcatgattcatttacattaggaaccatgggacacagaatgaataatcaggtgaagacatacaactacctagccactgaaatttgtgctcttgaggacttgcaataagcctcaaaaagtgtggttgtgaagctttagggcctgtttggtaatgcagttttaaaataatataattttaaaataacacagcttataattatacatggcacaaatgctacaatattacattaccatagtaaaaccacgctattgtttaaaatcgaaatgtatttagttacttaaaaaaccgaaatatttgcagagaaaacaaaagaaaattaaggcactaagtggagtttccaaaactcaaaaataccatggttttagataaaccatagtatttaaaactgtattttacctgtactaaccaaatattttttggcttccaataacatgatatcattaaatactatagtattattttaaaactgtaaaaataataaacttccgatacatgttaacggggcagagaagcatgcagtcgtgtaagtcctgcgatcctaactgattatgcactccaatgggctgcggagcacaaaggggagaaaaacaaaaacgagtgggaggtggccgtgggccatgttgctgctgctgacgaggcggcgcgacccatagtaaaggcgtacaacagctcacctccctcgtccagctccagccgccgtcaggcttccgacgcaacttctaactccgttcgcctccaggcgacaccatcgcccgctggcacgccgccacagcaggttaacacaatttggcccggagcttagttgaatcctgcttccgccactgcggacaaccatggcgtcgtcgaagctgcagctgcctgctgacgacagcgtcctcctgctcatcacccactccaatctcaccaccttcgcagcggacatccgcgtctcgcaacagaccaccgtggaggcgctcaaggacaagctctggcgcaagaccggcaccgccgtcgcttccatgcgcctccagctccgcgacgactccggcaccaagatcgccgacctcgacgacgacgccgcgccactcgcggcctacgccccctacaacggctaccggatccatgtcgttgatctcgacccttcctcactcacctcagggggttggttggaagacacttcccttgtcgacaagtacacaatgtccgatgaaacatacgataagctcgacactaactttcgaaaattcaaagaaaagatggtcccgaaaaactctccgtcagaggataaagaagaatcagaaaagcatatggaggaactatgctccaaaatcaaggtgggtgatagatgtgaagttgagcctggtgccaagaggggcactgtaaaatttgttggtagagctgaagcccttggacgtggattctgggttggagtgcaatatgatgagccacttgggaagcatgacggcatggtgaaaggcattcgcttctttgagtgccctcaaggtcatggggcaattgtgaggccagagaaagtaaaggttggcgacttcccggagagagacccatttgaagacgaggacgatgacgagatttgagtgcgtgtgcgtttggaaaagcaaggggaatgtccttgttgaattgcattcgaaacgtgtgtaaaatgaattcggagatttgagtgtgcgcgcttgcttgcatcttcttgggcaatcatagtgatcacatttcaaggcatgctgttacatctctactatttaagcgtgagctaataaattttccctccaacgcagagtatccaaaaaatggggtggattcgaatcctgctcacttgtataaagcgcatgacttctaccactataacttatttctgtctgtgttatataaattagagatattttgtgtgtatgatactaataattttaaaaaatataatatcatttaagcaaggtttacttatatatctgtagaaacagttacatatatgtgggttcttctactagtcctctgacccggaggaaaagatggagattttcgccaacttagagcatctctaacaatacctcaaaggtacgaaaaactattctaacattgtcttattttataaaacttgatcaaaaaattatattggacacccttt

SEQ ID NO: 19917 - DNA, 4984 bp, Zea Mays
aggaaaacgaaggaaaatagagcgaagaagagttggtggtcggtagctactgctccgttgcccaattcttccctcctcctccctactgattccagctatcagtcctctccgccaaaagacaagaccataaagattactcatagattaaagtagggtttggacgtctgcctgtccatttcggcgtctgttcttagcggccgacaagcggaatctggatcaagtcccctgcttcaacccatcccctctcatcgattcattgccacaaggcagctgattgctcacagcgttggatgtgagaattggattcggacccaccgatcgatatgccgttcggccacacgcggctcgatgtccggcgtccgccgcagtcgtcctacctctgctgctccacaaccaccgtcgccgtattcgtcgcgctctgcctggtggctgtgtggatggcgtcgtccatgctcgtcacccctgccgagttccctccatttcagtccaaagtgcgtccactgaggcctcatgactctcctcctgccaccggaagcttaaccagtgctgatcagggcgatggcatcaccacccatgatgatccaccacctgctacacaacaattgcctcctgtaacagacagcatggatggtgaaaatcagcaacaagaacttttcactacagagcgcggaccatggtcaaccaaggctgaacaatctaacaaggacgctaaagagcaaaccttgacgtccagtagcccactgagcttccgttgggcgttatgcaacgtcgatgctggagcagattatattccatgcctcgacaacgtagcagctatcaagaagctccgttccaccaagcactacgaacaccgagaaaggcattgccccgagaaatctcctacctgccttgttcctctaccagagggctacaggaatccaattaggtggccaaagagcagagatcagatatggtacaataacgttcctcatactaagctggttgaatacaagggacaccaaaactgggttaaggtttctggagaatacctcaccttccccggaggcgggactcagtttaaacatggtgcgttgcgctacattgattttattcaggaggcaaagaaggatgtagcatggggaaaacgaagccgtgtagtgttagatgttggttgtggagtagctagctttggaggatatctatttgacagagatgtgattactatgtcatttgcacctaaagatgagcacgaagctcaggttcagtttgctcttgaaagaggaatacctgctatatcagctgtcatgggtacaaaaaggctcccatttcccagtagggtgtttgatgttgttcattgtgcacgatgtagggtaccgtggcatattgaaggcggtaaactcttgcttgaactggacagactgttacgtcctggtggttactttgtgtggtctgctacacccgtataccagaagctgcctgaagatgttgagatatggcaagccatgtctgctctaaccagttcaatgtgctggaaaatggtcaacaaagtaaaggatagggtgaatagagtgggtatagcaatttacagaaagccaacagacaacagctgctacgaagcaagatctgaaacaaaccctccactctgtggagagtacgacgatcctgatgctgcctggaacatatcgttgggggcttgtatgcataagttgcctgtagatcctaccgttcgtggttcacagtggcctgagttatggccattgagactggagaaaccaccttattggctgagaggttctgaggctggagtatatgggaaacctgccccggaggattttcaagcagactatgaacactggaagcgagtcgtgagcaattcatacatgaatggtttgggtattgactggtctactgttagaaatgttatggatatgaaagccgtatatgcagggttcgcagcagctttgcgcgatctcaaggtgtgggtcatgaatgtggttccaattgattcacctgacacgcttccaattatatatgagcgcgggctgtttggactgtaccatgactggtgtgagtcgtttagcacctatccgagaacttatgatcttgtgcacgccaaccatctgttctccaaggttaagaagaggtgcgagctattacctgttatcgtggaggtggaccgggtgttgaggccacaaggccggctaattgtcagagacaacattgaaacaacaagtgaggtggagaacattctgaaatctctccactgggaggtccgcatgtcttacttccaggagaaagaaggcttgctgttggtgcagaagacgacatggcggccaaatgaaactgaagctaagctatgatgcagagcccttgccccttggaaggaggaaaggaagatctagtgtttgcaaggtcctctacttttgtgaggcatcttttatttatgtagaatttgtagagctatatgattggtagatgtggaggaatctggtggtttccagcatatccatattcatctgtggaagtggaactggttatctgattccctttttttttttgattcatccattcggaaggggaaggtaacgataaatagaaaaggaattgagaattggcggaggtcaaaggcccaacacaacccaatccggaaccccaaccccacccccaccaccaagggtccaaagccatgcgtgccgccatggcggcggcggtcctccgacccacggccgccaccctccgcttcctctccaccccaccacaccagcgccgccgcgtcttggtcggacacctcccctttgctcgccgacgccgccactcctccaccgctacggccccagcgctggaggactccagcccccgcagtggcgaaggcaaggccgtgcgccgccgccgcgcccgtgaatctccccagggcctcctccgccaccagctcgacatgtgctcccgcaacgccgacctcaccaccgcgctccgcctctacgacgacgccctctccccggacaaccccatcccgctctccctccaccactacaactgcctgctctacctctgctccaacgccgccgctaccgactctgacagccatatctccgccaccgccgctcagcgcggcttcgacatcttcgccaggatggaggccgacggcgtccagcccaacgaggccaccctcaccagcgtcgcgcgcctcgccgccgccacccgcgaccctgccatggccttctccgtcgtccgccgcatggccgctgcgggcaccccgccgcgcctccgcacctacggccccgccctcttcgcctactgcgatgccaaagatgccgacggcgccaagcaggtcgaggctcacatggacgcatctggcgtcgtgcccgaggagcccgagctcgcagcgttgctccgcgtcaacgcggacacgggcaaggccgatgaggtttacaggctcctgcacaggacgcgcgtcctcgtcaggcaggtctgcgacaccactgcccaggtcgtcgaggcctggttccggtcggacgcagcgtcccaggcgggggtggacagctgggatcccaccaaggtaaaggagggcgtcgtcaagggcggcggcggctggcatggccagggatggcttggcaagggcgcatggagcgttggctggaccgagatgggcaaggatgggacatgccaacgctgtggggagaggcttgtctgcattgacattgatccagccgagactgacaactttgcaaattcgctcaccgaactggccattaagcttgaggccagggaagatttcctcagttttcagagctggctacgccgccatggaccattcgatgctgttatagacgctgctaatgtaggcctttacaaaagtaaagatttctgtttttcacaggtaggaggaggcttttcttcagccaagcagtaaaattatgatccgatacttgtttgacacaaaggcaggcaggcagacagacagagctaatacgaccaagtttgggtcgctctctccttgtaggttaactctgttgtaaatgctatacagagagtaactaaatcaaagaagttgccactgatcgttttgcataggagccgtgtaaatgttggtcctgcaaaagccccatacaaccagaagattctggacagttggaggaatgctggagctctgtatgcaacccctcctggctccaatgacgattggtattggctgtatgcagctgtcagttgccgatcgttgcttgttacaaatgatgagatgcgagaccacttgttccaactgcttggcactagttttttccctaggtggaaagaaaaacatcaggtcagactaactttctccgggcatggccctacccttcacttgccgcctccttattcaattgttattcaggaatctgaagatggaagctggcatgtaccaacaacaacaggcgatgatattgaaaagccacggcagtggttgtgcactactagaaaatctttgaggtagatgtgatttaattttggcccagtcaagttgacacagaatggtgccaagttgccaaccttggtgggaactgggaagggtggtggcgtgacaaaccctgaaaccagcaaagcttaaatgcagcaacttgttggcccgaacgaaagaaagctgattggagtacaagtgatgaatatgagcaggccatggatatggaaagccttttgttgtaacatcgtgagctgtttattgctagcccaggttattctagagtagtttgagaaccgtggtaaggtaatttgcttcatgtgagttttacttttattaaatgacgtgccatgccagtgatttgaaggatgtggcaggcaagtaatcaaagaaagagatgaatgttatctaatttgtcattagcacacatacctaacctctggcgccccaatggtttctgacggactggtgaatggtgattgatgagggactgcgttgcaccgtgagttttggtgttaaattttcttaaaagtttaattaaatttagtatatttatagtaatactaatac

SEQ ID NO: 19918 - DNA, 4871 bp, Zea Mays
ggaaaacgaaggaaaatagagcgaagaagagttggtggtcggtagctactgctccgttgcccaattcttccctcctcctccctactgattccagctatcagtcctctccgccaaaagacaagaccataaagattactcatagattaaagtagggtttggacgtctgcctgtccatttcggcgtctgttcttagcggccgacaagcggaatctggatcaagtcccctgcttcaacccatcccctctcatcgattcattgccacaaggcagctgattgctcacagcgttggatgtgagaattggattcggacccaccgatcgatatgccgttcggccacacgcggctcgatgtccggcgtccgccgcagtcgtcctacctctgctgctccacaaccaccgtcgccgtattcgtcgcgctctgcctggtggctgtgtggatggcgtcgtccatgctcgtcacccctgccgagttccctccatttcagtccaaagtgcgtccactgaggcctcatgactctcctcctgccaccggaagcttaaccagtgctgatcagggcgatggcatcaccacccatgatgatccaccacctgctacacaacaattgcctcctgtaacagacagcatggatggtgaaaatcagcaacaagaacttttcactacagagcgcggaccatggtcaaccaaggctgaacaatctaacaaggacgctaaagagcaaaccttgacgtccagtagcccactgagcttccgttgggcgttatgcaacgtcgatgctggagcagattatattccatgcctcgacaacgtagcagctatcaagaagctccgttccaccaagcactacgaacaccgagaaaggcattgccccgagaaatctcctacctgccttgttcctctaccagagggctacaggaatccaattaggtggccaaagagcagagatcagatatggtacaataacgttcctcatactaagctggttgaatacaagggacaccaaaactgggttaaggtttctggagaatacctcaccttccccggaggcgggactcagtttaaacatggtgcgttgcgctacattgattttattcaggaggcaaagaaggatgtagcatggggaaaacgaagccgtgtagtgttagatgttggttgtggagtagctagctttggaggatatctatttgacagagatgtgattactatgtcatttgcacctaaagatgagcacgaagctcaggttcagtttgctcttgaaagaggaatacctgctatatcagctgtcatgggtacaaaaaggctcccatttcccagtagggtgtttgatgttgttcattgtgcacgatgtagggtaccgtggcatattgaagttatttggcaggcggtaaactcttgcttgaactggacagactgttacgtcctggtggttactttgtgtggtctgctacacccgtataccagaagctgcctgaagatgttgagatatggcaagccatgtctgctctaaccagttcaatgtgctggaaaatggtcaacaaagtaaaggatagggtgaatagagtgggtatagcaatttacagaaagccaacagacaacagctgctacgaagcaagatctgaaacaaaccctccactctgtggagagtacgacgatcctgatgctgcctggaacatatcgttgggggcttgtatgcataagttgcctgtagatcctaccgttcgtggttcacagtggcctgagttatggccattgagactggagaaaccaccttattggctgagaggttctgaggctggagtatatgggaaacctgccccggaggattttcaagcagactatgaacactggaagcgagtcgtgagcaattcatacatgaatggtttgggtattgactggtctactgttagaaatgttatggatatgaaagccgtatatgcagggttcgcagcagctttgcgcgatctcaaggtgtgggtcatgaatgtggttccaattgattcacctgacacgcttccaattatatatgagcgcgggctgtttggactgtaccatgactggtgtgagtcgtttagcacctatccgagaacttatgatcttgtgcacgccaaccatctgttctccaaggttaagaagaggtgcgagctattacctgttatcgtggaggtggaccgggtgttgaggccacaaggccggctaattgtcagagacaacattgaaacaacaagtgaggtggagaacattctgaaatctctccactgggaggtccgcatgtcttacttccaggagaaagaaggcttgctgttggtgcagaagacgacatggcggccaaatgaaactgaagctaagctatgatgcagagcccttgccccttggaaggaggaaaggaagatctagtgtttgcaaggtcctctacttttgtgaggcatcttttatttatgtagaatttgtagagctatatgattggtagatgtggaggaatctggtggtttccagcatatccatattcatctgtggaagtggaactggttatctgattccctttttttttttgattcatccattcggaaggggaaggtaacgataaatagaaaaggaattgagaattggcggaggtcaaaggcccaacacaacccaatccggaaccccaaccccacccccaccaccaagggtccaaagccatgcgtgccgccatggcggcggcggtcctccgacccacggccgccaccctccgcttcctctccaccccaccacaccagcgccgccgcgtcttggtcggacacctcccctttgctcgccgacgccgccactcctccaccgctacggccccagcgctggaggactccagcccccgcagtggcgaaggcaaggccgtgcgccgccgccgcgcccgtgaatctccccagggcctcctccgccaccagctcgacatgtgctcccgcaacgccgacctcaccaccgcgctccgcctctacgacgacgccctctccccggacaaccccatcccgctctccctccaccactacaactgcctgctctacctctgctccaacgccgccgctaccgactctgacagccatatctccgccaccgccgctcagcgcggcttcgacatcttcgccaggatggaggccgacggcgtccagcccaacgaggccaccctcaccagcgtcgcgcgcctcgccgccgccacccgcgaccctgccatggccttctccgtcgtccgccgcatggccgctgcgggcaccccgccgcgcctccgcacctacggccccgccctcttcgcctactgcgatgccaaagatgccgacggcgccaagcaggtcgaggctcacatggacgcatctggcgtcgtgcccgaggagcccgagctcgcagcgttgctccgcgtcaacgcggacacgggcaaggccgatgaggtttacaggctcctgcacaggacgcgcgtcctcgtcaggcaggtctgcgacaccactgcccaggtcgtcgaggcctggttccggtcggacgcagcgtcccaggcgggggtggacagctgggatcccaccaaggtaaaggagggcgtcgtcaagggcggcggcggctggcatggccagggatggcttggcaagggcgcatggagcgttggctggaccgagatgggcaaggatgggacatgccaacgctgtggggagaggcttgtctgcattgacattgatccagccgagactgacaactttgcaaattcgctcaccgaactggccattaagcttgaggccagggaagatttcctcagttttcagagctggctacgccgccatggaccattcgatgctgttatagacgctgctaatgtaggcctttacaaaagtaaagatttctgtttttcacaggttaactctgttgtaaatgctatacagagagtaactaaatcaaagaagttgccactgatcgttttgcataggagccgtgtaaatgttggtcctgcaaaagccccatacaaccagaagattctggacagttggaggaatgctggagctctgtatgcaacccctcctggctccaatgacgattggtattggctgtatgcagctgtcagttgccgatcgttgcttgttacaaatgatgagatgcgagaccacttgttccaactgcttggcactagttttttccctaggtggaaagaaaaacatcaggtcagactaactttctccgggcatggccctacccttcacttgccgcctccttattcaattgttattcaggaatctgaagatggaagctggcatgtaccaacaacaacaggcgatgatattgaaaagccacggcagtggttgtgcactactagaaaatctttgaggtagatgtgatttaattttggcccagtcaagttgacacagaatggtgccaagttgccaaccttggtgggaactgggaagggtggtggcgtgacaaaccctgaaaccagcaaagcttaaatgcagcaacttgttggcccgaacgaaagaaagctgattggagtacaagtgatgaatatgagcaggccatggatatggaaagccttttgttgtaacatcgtgagctgtttattgctagcccaggttattctagagtagtttgagaaccgtggtaaggtaatttgcttcatgtgagttttacttttattaaatgacgtgccatgccagtgatttgaaggatgtggcaggcaagtaatcaaagaaagagatgaatgttatctaatttgtcattagcacacatacctaacctctggcgccccaatggtttctgacggactggtgaatggtgattgatgagggactgcgttgcaccgtgagttttggtgttaaattttcttaaaagtttaattaaatttagtatatttatagtaatactaatac

SEQ ID NO: 19919 - DNA, 4833 bp, Zea Mays
ggaaaacgaaggaaaatagagcgaagaagagttggtggtcggtagctactgctccgttgcccaattcttccctcctcctccctactgattccagctatcagtcctctccgccaaaagacaagaccataaagattactcatagattaaagtagggtttggacgtctgcctgtccatttcggcgtctgttcttagcggccgacaagcggaatctggatcaagtcccctgcttcaacccatcccctctcatcgattcattgccacaaggcagctgattgctcacagcgttggatgtgagaattggattcggacccaccgatcgatatgccgttcggccacacgcggctcgatgtccggcgtccgccgcagtcgtcctacctctgctgctccacaaccaccgtcgccgtattcgtcgcgctctgcctggtggctgtgtggatggcgtcgtccatgctcgtcacccctgccgagttccctccatttcagtccaaagtgcgtccactgaggcctcatgactctcctcctgccaccggaagcttaaccagtgctgatcagggcgatggcatcaccacccatgatgatccaccacctgctacacaacaattgcctcctgtaacagacagcatggatggtgaaaatcagcaacaagaacttttcactacagagcgcggaccatggtcaaccaaggctgaacaatctaacaaggacgctaaagagcaaaccttgacgtccagtagcccactgagcttccgttgggcgttatgcaacgtcgatgctggagcagattatattccatgcctcgacaacgtagcagctatcaagaagctccgttccaccaagcactacgaacaccgagaaaggcattgccccgagaaatctcctacctgccttgttcctctaccagagggctacaggaatccaattaggtggccaaagagcagagatcagatatggtacaataacgttcctcatactaagctggttgaatacaagggacaccaaaactgggttaaggtttctggagaatacctcaccttccccggaggcgggactcagtttaaacatggtgcgttgcgctacattgattttattcaggaggcaaagaaggatgtagcatggggaaaacgaagccgtgtagtgttagatgttggttgtggagtagctagctttggaggatatctatttgacagagatgtgattactatgtcatttgcacctaaagatgagcacgaagctcaggttcagtttgctcttgaaagaggaatacctgctatatcagctgtcatgggtacaaaaaggctcccatttcccagtagggtgtttgatgttgttcattgtgcacgatgtagggtaccgtggcatattgaaggcggtaaactcttgcttgaactggacagactgttacgtcctggtggttactttgtgtggtctgctacacccgtataccagaagctgcctgaagatgttgagatatggcaagccatgtctgctctaaccagttcaatgtgctggaaaatggtcaacaaagtaaaggatagggtgaatagagtgggtatagcaatttacagaaagccaacagacaacagctgctacgaagcaagatctgaaacaaaccctccactctgtggagagtacgacgatcctgatgctgcctggaacatatcgttgggggcttgtatgcataagttgcctgtagatcctaccgttcgtggttcacagtggcctgagttatggccattgagactggagaaaccaccttattggctgagaggttctgaggctggagtatatgggaaacctgccccggaggattttcaagcagactatgaacactggaagcgagtcgtgagcaattcatacatgaatggtttgggtattgactggtctactgttagaaatgttatggatatgaaagccgtatatgcagggttcgcagcagctttgcgcgatctcaaggtgtgggtcatgaatgtggttccaattgattcacctgacacgcttccaattatatatgagcgcgggctgtttggactgtaccatgactggtgtgagtcgtttagcacctatccgagaacttatgatcttgtgcacgccaaccatctgttctccaaggttaagaagaggtgcgagctattacctgttatcgtggaggtggaccgggtgttgaggccacaaggccggctaattgtcagagacaacattgaaacaacaagtgaggtggagaacattctgaaatctctccactgggaggtccgcatgtcttacttccaggagaaagaaggcttgctgttggtgcagaagacgacatggcggccaaatgaaactgaagctaagctatgatgcagagcccttgccccttggaaggaggaaaggaagatctagtgtttgcaaggtcctctacttttgtgaggcatcttttatttatgtagaatttgtagagctatatgattggtagatgtggaggaatctggtggtttccagcatatccatattcatctgtggaagtggaactggttatctgattccctttttttttttgattcatccattcggaaggggaaggtaacgataaatagaaaaggaattgagaattggcggaggtcaaaggcccaacacaacccaatccggaaccccaaccccacccccaccaccaagggtccaaagccatgcgtgccgccatggcggcggcggtcctccgacccacggccgccaccctccgcttcctctccaccccaccacaccagcgccgccgcgtcttggtcggacacctcccctttgctcgccgacgccgccactcctccaccgctacggccccagcgctggaggactccagcccccgcagtggcgaaggcaaggccgtgcgccgccgccgcgcccgtgaatctccccagggcctcctccgccaccagctcgacatgtgctcccgcaacgccgacctcaccaccgcgctccgcctctacgacgacgccctctccccggacaaccccatcccgctctccctccaccactacaactgcctgctctacctctgctccaacgccgccgctaccgactctgacagccatatctccgccaccgccgctcagcgcggcttcgacatcttcgccaggatggaggccgacggcgtccagcccaacgaggccaccctcaccagcgtcgcgcgcctcgccgccgccacccgcgaccctgccatggccttctccgtcgtccgccgcatggccgctgcgggcaccccgccgcgcctccgcacctacggccccgccctcttcgcctactgcgatgccaaagatgccgacggcgccaagcaggtcgaggctcacatggacgcatctggcgtcgtgcccgaggagcccgagctcgcagcgttgctccgcgtcaacgcggacacgggcaaggccgatgaggtttacaggctcctgcacaggacgcgcgtcctcgtcaggcaggtctgcgacaccactgcccaggtcgtcgaggcctggttccggtcggacgcagcgtcccaggcgggggtggacagctgggatcccaccaaggtaaaggagggcgtcgtcaagggcggcggcggctggcatggccagggatggcttggcaagggcgcatggagcgttggctggaccgagatgggcaaggatgggacatgccaacgctgtggggagaggcttgtctgcattgacattgatccagccgagactgacaactttgcaaattcgctcaccgaactggccattaagcttgaggccagggaagatttcctcagttttcagagctggctacgccgccatggaccattcgatgctgttatagacgctgctaatgtaggcctttacaaaagtaaagatttctgtttttcacagagagtaactaaatcaaagaagttgccactgatcgttttgcataggagccgtgtaaatgttggtcctgcaaaagccccatacaaccagaagattctggacagttggaggaatgctggagctctgtatgcaacccctcctggctccaatgacgattggtattggctgtatgcagctgtcagttgccgatcgttgcttgttacaaatgatgagatgcgagaccacttgttccaactgcttggcactagttttttccctaggtggaaagaaaaacatcaggtcagactaactttctccgggcatggccctacccttcacttgccgcctccttattcaattgttattcaggaatctgaagatggaagctggcatgtaccaacaacaacaggcgatgatattgaaaagccacggcagtggttgtgcactactagaaaatctttgaggtagatgtgatttaattttggcccagtcaagttgacacagaatggtgccaagttgccaaccttggtgggaactgggaagggtggtggcgtgacaaaccctgaaaccagcaaagcttaaatgcagcaacttgttggcccgaacgaaagaaagctgattggagtacaagtgatgaatatgagcaggccatggatatggaaagccttttgttgtaacatcgtgagctgtttattgctagcccaggttattctagagtagtttgagaaccgtggtaaggtaatttgcttcatgtgagttttacttttattaaatgacgtgccatgccagtgatttgaaggatgtggcaggcaagtaatcaaagaaagagatgaatgttatctaatttgtcattagcacacatacctaacctctggcgccccaatggtttctgacggactggtgaatggtgattgatgagggactgcgttgcaccgtgagttttggtgttaaattttcttaaaagtttaattaaatttagtatatttatagtaatactaatac

SEQ ID NO: 19920 - DNA, 4812 bp, Zea Mays
ggaaaacgaaggaaaatagagcgaagaagagttggtggtcggtagctactgctccgttgcccaattcttccctcctcctccctactgattccagctatcagtcctctccgccaaaagacaagaccataaagattactcatagattaaagtagggtttggacgtctgcctgtccatttcggcgtctgttcttagcggccgacaagcggaatctggatcaagtcccctgcttcaacccatcccctctcatcgattcattgccacaaggcagctgattgctcacagcgttggatgtgagaattggattcggacccaccgatcgatatgccgttcggccacacgcggctcgatgtccggcgtccgccgcagtcgtcctacctctgctgctccacaaccaccgtcgccgtattcgtcgcgctctgcctggtggctgtgtggatggcgtcgtccatgctcgtcacccctgccgagttccctccatttcagtccaaagtgcgtccactgaggcctcatgactctcctcctgccaccggaagcttaaccagtgctgatcagggcgatggcatcaccacccatgatgatccaccacctgctacacaacaattgcctcctgtaacagacagcatggatggtgaaaatcagcaacaagaacttttcactacagagcgcggaccatggtcaaccaaggctgaacaatctaacaaggacgctaaagagcaaaccttgacgtccagtagcccactgagcttccgttgggcgttatgcaacgtcgatgctggagcagattatattccatgcctcgacaacgtagcagctatcaagaagctccgttccaccaagcactacgaacaccgagaaaggcattgccccgagaaatctcctacctgccttgttcctctaccagagggctacaggaatccaattaggtggccaaagagcagagatcagatatggtacaataacgttcctcatactaagctggttgaatacaagggacaccaaaactgggttaaggtttctggagaatacctcaccttccccggaggcgggactcagtttaaacatggtgcgttgcgctacattgattttattcaggaggcaaagaaggatgtagcatggggaaaacgaagccgtgtagtgttagatgttggttgtggagtagctagctttggaggatatctatttgacagagatgtgattactatgtcatttgcacctaaagatgagcacgaagctcaggttcagtttgctcttgaaagaggaatacctgctatatcagctgtcatgggtacaaaaaggctcccatttcccagtagggtgtttgatgttgttcattgtgcacgatgtagggtaccgtggcatattgaaggcggtaaactcttgcttgaactggacagactgttacgtcctggtggttactttgtgtggtctgctacacccgtataccagaagctgcctgaagatgttgagatatggcaagtaaaggatagggtgaatagagtgggtatagcaatttacagaaagccaacagacaacagctgctacgaagcaagatctgaaacaaaccctccactctgtggagagtacgacgatcctgatgctgcctggaacatatcgttgggggcttgtatgcataagttgcctgtagatcctaccgttcgtggttcacagtggcctgagttatggccattgagactggagaaaccaccttattggctgagaggttctgaggctggagtatatgggaaacctgccccggaggattttcaagcagactatgaacactggaagcgagtcgtgagcaattcatacatgaatggtttgggtattgactggtctactgttagaaatgttatggatatgaaagccgtatatgcagggttcgcagcagctttgcgcgatctcaaggtgtgggtcatgaatgtggttccaattgattcacctgacacgcttccaattatatatgagcgcgggctgtttggactgtaccatgactggtgtgagtcgtttagcacctatccgagaacttatgatcttgtgcacgccaaccatctgttctccaaggttaagaagaggtgcgagctattacctgttatcgtggaggtggaccgggtgttgaggccacaaggccggctaattgtcagagacaacattgaaacaacaagtgaggtggagaacattctgaaatctctccactgggaggtccgcatgtcttacttccaggagaaagaaggcttgctgttggtgcagaagacgacatggcggccaaatgaaactgaagctaagctatgatgcagagcccttgccccttggaaggaggaaaggaagatctagtgtttgcaaggtcctctacttttgtgaggcatcttttatttatgtagaatttgtagagctatatgattggtagatgtggaggaatctggtggtttccagcatatccatattcatctgtggaagtggaactggttatctgattccctttttttttttgattcatccattcggaaggggaaggtaacgataaatagaaaaggaattgagaattggcggaggtcaaaggcccaacacaacccaatccggaaccccaaccccacccccaccaccaagggtccaaagccatgcgtgccgccatggcggcggcggtcctccgacccacggccgccaccctccgcttcctctccaccccaccacaccagcgccgccgcgtcttggtcggacacctcccctttgctcgccgacgccgccactcctccaccgctacggccccagcgctggaggactccagcccccgcagtggcgaaggcaaggccgtgcgccgccgccgcgcccgtgaatctccccagggcctcctccgccaccagctcgacatgtgctcccgcaacgccgacctcaccaccgcgctccgcctctacgacgacgccctctccccggacaaccccatcccgctctccctccaccactacaactgcctgctctacctctgctccaacgccgccgctaccgactctgacagccatatctccgccaccgccgctcagcgcggcttcgacatcttcgccaggatggaggccgacggcgtccagcccaacgaggccaccctcaccagcgtcgcgcgcctcgccgccgccacccgcgaccctgccatggccttctccgtcgtccgccgcatggccgctgcgggcaccccgccgcgcctccgcacctacggccccgccctcttcgcctactgcgatgccaaagatgccgacggcgccaagcaggtcgaggctcacatggacgcatctggcgtcgtgcccgaggagcccgagctcgcagcgttgctccgcgtcaacgcggacacgggcaaggccgatgaggtttacaggctcctgcacaggacgcgcgtcctcgtcaggcaggtctgcgacaccactgcccaggtcgtcgaggcctggttccggtcggacgcagcgtcccaggcgggggtggacagctgggatcccaccaaggtaaaggagggcgtcgtcaagggcggcggcggctggcatggccagggatggcttggcaagggcgcatggagcgttggctggaccgagatgggcaaggatgggacatgccaacgctgtggggagaggcttgtctgcattgacattgatccagccgagactgacaactttgcaaattcgctcaccgaactggccattaagcttgaggccagggaagatttcctcagttttcagagctggctacgccgccatggaccattcgatgctgttatagacgctgctaatgtaggcctttacaaaagtaaagatttctgtttttcacaggttaactctgttgtaaatgctatacagagagtaactaaatcaaagaagttgccactgatcgttttgcataggagccgtgtaaatgttggtcctgcaaaagccccatacaaccagaagattctggacagttggaggaatgctggagctctgtatgcaacccctcctggctccaatgacgattggtattggctgtatgcagctgtcagttgccgatcgttgcttgttacaaatgatgagatgcgagaccacttgttccaactgcttggcactagttttttccctaggtggaaagaaaaacatcaggtcagactaactttctccgggcatggccctacccttcacttgccgcctccttattcaattgttattcaggaatctgaagatggaagctggcatgtaccaacaacaacaggcgatgatattgaaaagccacggcagtggttgtgcactactagaaaatctttgaggtagatgtgatttaattttggcccagtcaagttgacacagaatggtgccaagttgccaaccttggtgggaactgggaagggtggtggcgtgacaaaccctgaaaccagcaaagcttaaatgcagcaacttgttggcccgaacgaaagaaagctgattggagtacaagtgatgaatatgagcaggccatggatatggaaagccttttgttgtaacatcgtgagctgtttattgctagcccaggttattctagagtagtttgagaaccgtggtaaggtaatttgcttcatgtgagttttacttttattaaatgacgtgccatgccagtgatttgaaggatgtggcaggcaagtaatcaaagaaagagatgaatgttatctaatttgtcattagcacacatacctaacctctggcgccccaatggtttctgacggactggtgaatggtgattgatgagggactgcgttgcaccgtgagttttggtgttaaattttcttaaaagtttaattaaatttagtatatttatagtaatactaatac

SEQ ID NO: 19921 - DNA, 4789 bp, Zea Mays
ggaaaacgaaggaaaatagagcgaagaagagttggtggtcggtagctactgctccgttgcccaattcttccctcctcctccctactgattccagctatcagtcctctccgccaaaagacaagaccataaagattactcatagattaaagtagggtttggacgtctgcctgtccatttcggcgtctgttcttagcggccgacaagcggaatctggatcaagtcccctgcttcaacccatcccctctcatcgattcattgccacaaggcagctgattgctcacagcgttggatgtgagaattggattcggacccaccgatcgatatgccgttcggccacacgcggctcgatgtccggcgtccgccgcagtcgtcctacctctgctgctccacaaccaccgtcgccgtattcgtcgcgctctgcctggtggctgtgtggatggcgtcgtccatgctcgtcacccctgccgagttccctccatttcagtccaaagtgcgtccactgaggcctcatgactctcctcctgccaccggaagcttaaccagtgctgatcagggcgatggcatcaccacccatgatgatccaccacctgctacacaacaattgcctcctgtaacagacagcatggatggtgaaaatcagcaacaagaacttttcactacagagcgcggaccatggtcaaccaaggctgaacaatctaacaaggacgctaaagagcaaaccttgacgtccagtagcccactgagcttccgttgggcgttatgcaacgtcgatgctggagcagattatattccatgcctcgacaacgtagcagctatcaagaagctccgttccaccaagcactacgaacaccgagaaaggcattgccccgagaaatctcctacctgccttgttcctctaccagagggctacaggaatccaattaggtggccaaagagcagagatcagatatggtacaataacgttcctcatactaagctggttgaatacaagggacaccaaaactgggttaaggtttctggagaatacctcaccttccccggaggcgggactcagtttaaacatggtgcgttgcgctacattgattttattcaggaggcaaagaaggatgtagcatggggaaaacgaagccgtgtagtgttagatgttggttgtggagtagctagctttggaggatatctatttgacagagatgtgattactatgtcatttgcacctaaagatgagcacgaagctcaggttcagtttgctcttgaaagaggaatacctgctatatcagctgtcatgggtacaaaaaggctcccatttcccagtagggtgtttgatgttgttcattgtgcacgatgtagggtaccgtggcatattgaaggcggtaaactcttgcttgaactggacagactgttacgtcctggtggttactttgtgtggtctgctacacccgtataccagaagctgcctgaagatgttgagatatggcaagccatgtctgctctaaccagttcaatgtgctggaaaatggtcaacaaagtaaaggatagggtgaatagagtgggtatagcaatttacagaaagccaacagacaacagctgctacgaagcaagatctgaaacaaaccctccactctgtggagagtacgacgatcctgatgctgcctggaacatatcgttgggggcttgtatgcataagttgcctgtagatcctaccgttcgtggttcacagtggcctgagttatggccattgagactggagaaaccaccttattggctgagaggttctgaggctggagtatatgggaaacctgccccggaggattttcaagcagactatgaacactggaagcgagtcgtgagcaattcatacatgaatggtttgggtattgactggtctactgttagaaatgttatggatatgaaagccgtatatgcagggttcgcagcagctttgcgcgatctcaaggtgtgggtcatgaatgtggttccaattgattcacctgacacgcttccaattatatatgagcgcgggctgtttggactgtaccatgactggtgtgagtcgtttagcacctatccgagaacttatgatcttgtgcacgccaaccatctgttctccaaggttaagaagaggtgcgagctattacctgttatcgtggaggtggaccgggtgttgaggccacaaggccggctaattgtcagagacaacattgaaacaacaagtgaggtggagaacattctgaaatctctccactgggaggtccgcatgtcttacttccaggagaaagaaggcttgctgttggtgcagaagacgacatggcggccaaatgaaactgaagctaagctatgatgcagagcccttgccccttggaaggaggaaaggaagatctagtgtttgcaaggtcctctacttttgtgaggcatcttttatttatgtagaatttgtagagctatatgattggtagatgtggaggaatctggtggtttccagcatatccatattcatctgtggaagtggaactggttatctgattccctttttttttttgattcatccattcggaaggggaaggtaacgataaatagaaaaggaattgagaattggcggaggtcaaaggcccaacacaacccaatccggaaccccaaccccacccccaccaccaagggtccaaagccatgcgtgccgccatggcggcggcggtcctccgacccacggccgccaccctccgcttcctctccaccccaccacaccagcgccgccgcgtcttggtcggacacctcccctttgctcgccgacgccgccactcctccaccgctacggccccagcgctggaggactccagcccccgcagtggcgaaggcaaggccgtgcgccgccgccgcgcccgtgaatctccccagggcctcctccgccaccagctcgacatgtgctcccgcaacgccgacctcaccaccgcgctccgcctctacgacgacgccctctccccggacaaccccatcccgctctccctccaccactacaactgcctgctctacctctgctccaacgccgccgctaccgactctgacagccatatctccgccaccgccgctcagcgcggcttcgacatcttcgccaggatggaggccgacggcgtccagcccaacgaggccaccctcaccagcgtcgcgcgcctcgccgccgccacccgcgaccctgccatggccttctccgtcgtccgccgcatggccgctgcgggcaccccgccgcgcctccgcacctacggccccgccctcttcgcctactgcgatgccaaagatgccgacggcgccaagcaggtcgaggctcacatggacgcatctggcgtcgtgcccgaggagcccgagctcgcagcgttgctccgcgtcaacgcggacacgggcaaggccgatgaggtttacaggctcctgcacaggacgcgcgtcctcgtcaggcaggtctgcgacaccactgcccaggtcgtcgaggcctggttccggtcggacgcagcgtcccaggcgggggtggacagctgggatcccaccaaggtaaaggagggcgtcgtcaagggcggcggcggctggcatggccagggatggcttggcaagggcgcatggagcgttggctggaccgagatgggcaaggatgggacatgccaacgctgtggggagaggcttgtctgcattgacattgatccagccgagactgacaactttgcaaattcgctcaccgaactggccattaagcttgaggccagggaagatttcctcagttttcagagctggctacgccgccatggaccattcgatgctgttatagacgctgctaatgtaggcctttacaaaagtaaagatttctgtttttcacaggagccgtgtaaatgttggtcctgcaaaagccccatacaaccagaagattctggacagttggaggaatgctggagctctgtatgcaacccctcctggctccaatgacgattggtattggctgtatgcagctgtcagttgccgatcgttgcttgttacaaatgatgagatgcgagaccacttgttccaactgcttggcactagttttttccctaggtggaaagaaaaacatcaggtcagactaactttctccgggcatggccctacccttcacttgccgcctccttattcaattgttattcaggaatctgaagatggaagctggcatgtaccaacaacaacaggcgatgatattgaaaagccacggcagtggttgtgcactactagaaaatctttgaggtagatgtgatttaattttggcccagtcaagttgacacagaatggtgccaagttgccaaccttggtgggaactgggaagggtggtggcgtgacaaaccctgaaaccagcaaagcttaaatgcagcaacttgttggcccgaacgaaagaaagctgattggagtacaagtgatgaatatgagcaggccatggatatggaaagccttttgttgtaacatcgtgagctgtttattgctagcccaggttattctagagtagtttgagaaccgtggtaaggtaatttgcttcatgtgagttttacttttattaaatgacgtgccatgccagtgatttgaaggatgtggcaggcaagtaatcaaagaaagagatgaatgttatctaatttgtcattagcacacatacctaacctctggcgccccaatggtttctgacggactggtgaatggtgattgatgagggactgcgttgcaccgtgagttttggtgttaaattttcttaaaagtttaattaaatttagtatatttatagtaatactaatac

SEQ ID NO: 19922 - DNA, 4829 bp, Zea Mays
ggaaaatagagcgaagaagagttggtggtcggtagctactgctccgttgcccaattcttccctcctcctccctactgattccagctatcagtcctctccgccaaaagacaagaccataaagattactcatagattaaagtagggtttggacgtctgcctgtccatttcggcgtctgttcttagcggccgacaagcggaatctggatcaagtcccctgcttcaacccatcccctctcatcgattcattgccacaaggcagctgattgctcacagcgttggatgtgagaattggattcggacccaccgatcgatatgccgttcggccacacgcggctcgatgtccggcgtccgccgcagtcgtcctacctctgctgctccacaaccaccgtcgccgtattcgtcgcgctctgcctggtggctgtgtggatggcgtcgtccatgctcgtcacccctgccgagttccctccatttcagtccaaagtgcgtccactgaggcctcatgactctcctcctgccaccggaagcttaaccagtgctgatcagggcgatggcatcaccacccatgatgatccaccacctgctacacaacaattgcctcctgtaacagacagcatggatggtgaaaatcagcaacaagaacttttcactacagagcgcggaccatggtcaaccaaggctgaacaatctaacaaggacgctaaagagcaaaccttgacgtccagtagcccactgagcttccgttgggcgttatgcaacgtcgatgctggagcagattatattccatgcctcgacaacgtagcagctatcaagaagctccgttccaccaagcactacgaacaccgagaaaggcattgccccgagaaatctcctacctgccttgttcctctaccagagggctacaggaatccaattaggtggccaaagagcagagatcagatatggtacaataacgttcctcatactaagctggttgaatacaagggacaccaaaactgggttaaggtttctggagaatacctcaccttccccggaggcgggactcagtttaaacatggcaaagaaggatgtagcatggggaaaacgaagccgtgtagtgttagatgttggttgtggagtagctagctttggaggatatctatttgacagagatgtgattactatgtcatttgcacctaaagatgagcacgaagctcaggttcagtttgctcttgaaagaggaatacctgctatatcagctgtcatgggtacaaaaaggctcccatttcccagtagggtgtttgatgttgttcattgtgcacgatgtagggtaccgtggcatattgaagttatttggcaggcggtaaactcttgcttgaactggacagactgttacgtcctggtggttactttgtgtggtctgctacacccgtataccagaagctgcctgaagatgttgagatatggcaagccatgtctgctctaaccagttcaatgtgctggaaaatggtcaacaaagtaaaggatagggtgaatagagtgggtatagcaatttacagaaagccaacagacaacagctgctacgaagcaagatctgaaacaaaccctccactctgtggagagtacgacgatcctgatgctgcctggaacatatcgttgggggcttgtatgcataagttgcctgtagatcctaccgttcgtggttcacagtggcctgagttatggccattgagactggagaaaccaccttattggctgagaggttctgaggctggagtatatgggaaacctgccccggaggattttcaagcagactatgaacactggaagcgagtcgtgagcaattcatacatgaatggtttgggtattgactggtctactgttagaaatgttatggatatgaaagccgtatatgcagggttcgcagcagctttgcgcgatctcaaggtgtgggtcatgaatgtggttccaattgattcacctgacacgcttccaattatatatgagcgcgggctgtttggactgtaccatgactggtgtgagtcgtttagcacctatccgagaacttatgatcttgtgcacgccaaccatctgttctccaaggttaagaagaggtgcgagctattacctgttatcgtggaggtggaccgggtgttgaggccacaaggccggctaattgtcagagacaacattgaaacaacaagtgaggtggagaacattctgaaatctctccactgggaggtccgcatgtcttacttccaggagaaagaaggcttgctgttggtgcagaagacgacatggcggccaaatgaaactgaagctaagctatgatgcagagcccttgccccttggaaggaggaaaggaagatctagtgtttgcaaggtcctctacttttgtgaggcatcttttatttatgtagaatttgtagagctatatgattggtagatgtggaggaatctggtggtttccagcatatccatattcatctgtggaagtggaactggttatctgattccctttttttttttgattcatccattcggaaggggaaggtaacgataaatagaaaaggaattgagaattggcggaggtcaaaggcccaacacaacccaatccggaaccccaaccccacccccaccaccaagggtccaaagccatgcgtgccgccatggcggcggcggtcctccgacccacggccgccaccctccgcttcctctccaccccaccacaccagcgccgccgcgtcttggtcggacacctcccctttgctcgccgacgccgccactcctccaccgctacggccccagcgctggaggactccagcccccgcagtggcgaaggcaaggccgtgcgccgccgccgcgcccgtgaatctccccagggcctcctccgccaccagctcgacatgtgctcccgcaacgccgacctcaccaccgcgctccgcctctacgacgacgccctctccccggacaaccccatcccgctctccctccaccactacaactgcctgctctacctctgctccaacgccgccgctaccgactctgacagccatatctccgccaccgccgctcagcgcggcttcgacatcttcgccaggatggaggccgacggcgtccagcccaacgaggccaccctcaccagcgtcgcgcgcctcgccgccgccacccgcgaccctgccatggccttctccgtcgtccgccgcatggccgctgcgggcaccccgccgcgcctccgcacctacggccccgccctcttcgcctactgcgatgccaaagatgccgacggcgccaagcaggtcgaggctcacatggacgcatctggcgtcgtgcccgaggagcccgagctcgcagcgttgctccgcgtcaacgcggacacgggcaaggccgatgaggtttacaggctcctgcacaggacgcgcgtcctcgtcaggcaggtctgcgacaccactgcccaggtcgtcgaggcctggttccggtcggacgcagcgtcccaggcgggggtggacagctgggatcccaccaaggtaaaggagggcgtcgtcaagggcggcggcggctggcatggccagggatggcttggcaagggcgcatggagcgttggctggaccgagatgggcaaggatgggacatgccaacgctgtggggagaggcttgtctgcattgacattgatccagccgagactgacaactttgcaaattcgctcaccgaactggccattaagcttgaggccagggaagatttcctcagttttcagagctggctacgccgccatggaccattcgatgctgttatagacgctgctaatgtaggcctttacaaaagtaaagatttctgtttttcacaggttaactctgttgtaaatgctatacagagagtaactaaatcaaagaagttgccactgatcgttttgcataggagccgtgtaaatgttggtcctgcaaaagccccatacaaccagaagattctggacagttggaggaatgctggagctctgtatgcaacccctcctggctccaatgacgattggtattggctgtatgcagctgtcagttgccgatcgttgcttgttacaaatgatgagatgcgagaccacttgttccaactgcttggcactagttttttccctaggtggaaagaaaaacatcaggtcagactaactttctccgggcatggccctacccttcacttgccgcctccttattcaattgttattcaggaatctgaagatggaagctggcatgtaccaacaacaacaggcgatgatattgaaaagccacggcagtggttgtgcactactagaaaatctttgaggtagatgtgatttaattttggcccagtcaagttgacacagaatggtgccaagttgccaaccttggtgggaactgggaagggtggtggcgtgacaaaccctgaaaccagcaaagcttaaatgcagcaacttgttggcccgaacgaaagaaagctgattggagtacaagtgatgaatatgagcaggccatggatatggaaagccttttgttgtaacatcgtgagctgtttattgctagcccaggttattctagagtagtttgagaaccgtggtaaggtaatttgcttcatgtgagttttacttttattaaatgacgtgccatgccagtgatttgaaggatgtggcaggcaagtaatcaaagaaagagatgaatgttatctaatttgtcattagcacacatacctaacctctggcgccccaatggtttctgacggactggtgaatggtgattgatgagggactgcgttgcaccgtgagttttggtgttaaattttcttaaaagtttaattaaatttagtatatttatagtaatactaatac

SEQ ID NO: 19923 - DNA, 4838 bp, Zea Mays
gttgcccaattcttccctcctcctccctactgattccagctatcagtcctctccgccaaaagacaagaccataaagattactcatagattaaagtagggtttggacgtctgcctgtccatttcggcgtctgttcttagcggccgacaagcggaatctggatcaagtcccctgcttcaacccatcccctctcatcgattcattgccacaaggcagctgattgctcacagcgttggatgtgagaattggattcggacccaccgatcgatatgccgttcggccacacgcggctcgatgtccggcgtccgccgcagtcgtcctacctctgctgctccacaaccaccgtcgccgtattcgtcgcgctctgcctggtggctgtgtggatggcgtcgtccatgctcgtcacccctgccgagttccctccatttcagtccaaagtgcgtccactgaggcctcatgactctcctcctgccaccggaagcttaaccagtgctgatcagggcgatggcatcaccacccatgatgatccaccacctgctacacaacaattgcctcctgtaacagacagcatggatggtgaaaatcagcaacaagaacttttcactacagagcgcggaccatggtcaaccaaggctgaacaatctaacaaggacgctaaagagcaaaccttgacgtccagtagcccactgagcttccgttgggcgttatgcaacgtcgatgctggagcagattatattccatgcctcgacaacgtagcagctatcaagaagctccgttccaccaagcactacgaacaccgagaaaggcattgccccgagaaatctcctacctgccttgttcctctaccagagggctacaggaatccaattaggtggccaaagagcagagatcagatatggtacaataacgttcctcatactaagctggttgaatacaagggacaccaaaactgggttaaggtttctggagaatacctcaccttccccggaggcgggactcagtttaaacatggtgcgttgcgctacattgattttattcaggaggcaaagaaggatgtagcatggggaaaacgaagccgtgtagtgttagatgttggttgtggagtagctagctttggaggatatctatttgacagagatgtgattactatgtcatttgcacctaaagatgagcacgaagctcaggttcagtttgctcttgaaagaggaatacctgctatatcagctgtcatgggtacaaaaaggctcccatttcccagtagggtgtttgatgttgttcattgtgcacgatgtagggtaccgtggcatattgaagttatttggcaggcggtaaactcttgcttgaactggacagactgttacgtcctggtggttactttgtgtggtctgctacacccgtataccagaagctgcctgaagatgttgagatatggcaagtaaaggatagggtgaatagagtgggtatagcaatttacagaaagccaacagacaacagctgctacgaagcaagatctgaaacaaaccctccactctgtggagagtacgacgatcctgatgctgcctggaacatatcgttgggggcttgtatgcataagttgcctgtagatcctaccgttcgtggttcacagtggcctgagttatggccattgagactggagaaaccaccttattggctgagaggttctgaggctggagtatatgggaaacctgccccggaggattttcaagcagactatgaacactggaagcgagtcgtgagcaattcatacatgaatggtttgggtattgactggtctactgttagaaatgttatggatatgaaagccgtatatgcagggtaaggagtctaaccttcggagcatgtggagttcctctttcactgggactcatttttttttctgttgtaggttcgcagcagctttgcgcgatctcaaggtgtgggtcatgaatgtggttccaattgattcacctgacacgcttccaattatatatgagcgcgggctgtttggactgtaccatgactggtgtgagtcgtttagcacctatccgagaacttatgatcttgtgcacgccaaccatctgttctccaaggttaagaagaggtgcgagctattacctgttatcgtggaggtggaccgggtgttgaggccacaaggccggctaattgtcagagacaacattgaaacaacaagtgaggtggagaacattctgaaatctctccactgggaggtccgcatgtcttacttccaggagaaagaaggcttgctgttggtgcagaagacgacatggcggccaaatgaaactgaagctaagctatgatgcagagcccttgccccttggaaggaggaaaggaagatctagtgtttgcaaggtcctctacttttgtgaggcatcttttatttatgtagaatttgtagagctatatgattggtagatgtggaggaatctggtggtttccagcatatccatattcatctgtggaagtggaactggttatctgattccctttttttttttgattcatccattcggaaggggaaggtaacgataaatagaaaaggaattgagaattggcggaggtcaaaggcccaacacaacccaatccggaaccccaaccccacccccaccaccaagggtccaaagccatgcgtgccgccatggcggcggcggtcctccgacccacggccgccaccctccgcttcctctccaccccaccacaccagcgccgccgcgtcttggtcggacacctcccctttgctcgccgacgccgccactcctccaccgctacggccccagcgctggaggactccagcccccgcagtggcgaaggcaaggccgtgcgccgccgccgcgcccgtgaatctccccagggcctcctccgccaccagctcgacatgtgctcccgcaacgccgacctcaccaccgcgctccgcctctacgacgacgccctctccccggacaaccccatcccgctctccctccaccactacaactgcctgctctacctctgctccaacgccgccgctaccgactctgacagccatatctccgccaccgccgctcagcgcggcttcgacatcttcgccaggatggaggccgacggcgtccagcccaacgaggccaccctcaccagcgtcgcgcgcctcgccgccgccacccgcgaccctgccatggccttctccgtcgtccgccgcatggccgctgcgggcaccccgccgcgcctccgcacctacggccccgccctcttcgcctactgcgatgccaaagatgccgacggcgccaagcaggtcgaggctcacatggacgcatctggcgtcgtgcccgaggagcccgagctcgcagcgttgctccgcgtcaacgcggacacgggcaaggccgatgaggtttacaggctcctgcacaggacgcgcgtcctcgtcaggcaggtctgcgacaccactgcccaggtcgtcgaggcctggttccggtcggacgcagcgtcccaggcgggggtggacagctgggatcccaccaaggtaaaggagggcgtcgtcaagggcggcggcggctggcatggccagggatggcttggcaagggcgcatggagcgttggctggaccgagatgggcaaggatgggacatgccaacgctgtggggagaggcttgtctgcattgacattgatccagccgagactgacaactttgcaaattcgctcaccgaactggccattaagcttgaggccagggaagatttcctcagttttcagagctggctacgccgccatggaccattcgatgctgttatagacgctgctaatgtaggcctttacaaaagtaaagatttctgtttttcacaggttaactctgttgtaaatgctatacagagagtaactaaatcaaagaagttgccactgatcgttttgcataggagccgtgtaaatgttggtcctgcaaaagccccatacaaccagaagattctggacagttggaggaatgctggagctctgtatgcaacccctcctggctccaatgacgattggtattggctgtatgcagctgtcagttgccgatcgttgcttgttacaaatgatgagatgcgagaccacttgttccaactgcttggcactagttttttccctaggtggaaagaaaaacatcaggtcagactaactttctccgggcatggccctacccttcacttgccgcctccttattcaattgttattcaggaatctgaagatggaagctggcatgtaccaacaacaacaggcgatgatattgaaaagccacggcagtggttgtgcactactagaaaatctttgaggtagatgtgatttaattttggcccagtcaagttgacacagaatggtgccaagttgccaaccttggtgggaactgggaagggtggtggcgtgacaaaccctgaaaccagcaaagcttaaatgcagcaacttgttggcccgaacgaaagaaagctgattggagtacaagtgatgaatatgagcaggccatggatatggaaagccttttgttgtaacatcgtgagctgtttattgctagcccaggttattctagagtagtttgagaaccgtggtaaggtaatttgcttcatgtgagttttacttttattaaatgacgtgccatgccagtgatttgaaggatgtggcaggcaagtaatcaaagaaagagatgaatgttatctaatttgtcattagcacacatacctaacctctggcgccccaatggtttctgacggactggtgaatggtgattgatgagggactgcgttgcaccgtgagttttggtgttaaattttcttaaaagtttaattaaatttagtatatttatagtaatactaatac

SEQ ID NO: 19924 - DNA, 4353 bp, Zea Mays
cccaattcttccctcctcctccctactgattccagctatcagtcctctccgccaaaagacaagaccataaagattactcatagattaaagtagggtttggacgtctgcctgtccatttcggcgtctgttcttagcggccgacaagcggaatctggatcaagtcccctgcttcaacccatcccctctcatcgattcattgccacaaggcagctgattgctcacagcgttggatgtgagaattggattcggacccaccgatcgatatgccgttcggccacacgcggctcgatgtccggcgtccgccgcagtcgtcctacctctgctgctccacaaccaccgtcgccgtattcgtcgcgctctgcctggtggctgtgtggatggcgtcgtccatgctcgtcacccctgccgagttccctccatttcagtccaaagtgcgtccactgaggcctcatgactctcctcctgccaccggaagcttaaccagtgctgatcagggcgatggcatcaccacccatgatgatccaccacctgctacacaacaattgcctcctgtaacagacagcatggatggtgaaaatcagcaacaagaacttttcactacagagcgcggaccatggtcaaccaaggctgaacaatctaacaaggacgctaaagagcaaaccttgacgtccagtagcccactgagcttccgttgggcgttatgcaacgtcgatgctggagcagattatattccatgcctcgacaacgtagcagctatcaagaagctccgttccaccaagcactacgaacaccgagaaaggcattgccccgagaaatctcctacctgccttgttcctctaccagagggctacaggaatccaattaggtggccaaagagcagagatcagatatggtacaataacgttcctcatactaagctggttgaatacaagggacaccaaaactgggttaaggtttctggagaatacctcaccttccccggaggcgggactcagtttaaacatggtgcgttgcgctacattgattttattcaggaggcaaagaaggatgtagcatggggaaaacgaagccgtgtagtgttagatgttggttgtggagtagctagctttggaggatatctatttgacagagatgtgattactatgtcatttgcacctaaagatgagcacgaagctcaggttcagtttgctcttgaaagaggaatacctgctatatcagctgtcatgggtacaaaaaggctcccatttcccagtagggtgtttgatgttgttcattgtgcacgatgtagggtaccgtggcatattgaaggcggtaaactcttgcttgaactggacagactgttacgtcctggtggttactttgtgtggtctgctacacccgtataccagaagctgcctgaagatgttgagatatggcaaggttcgcagcagctttgcgcgatctcaaggtgtgggtcatgaatgtggttccaattgattcacctgacacgcttccaattatatatgagcgcgggctgtttggactgtaccatgactggtgtgagtcgtttagcacctatccgagaacttatgatcttgtgcacgccaaccatctgttctccaaggttaagaagaggtgcgagctattacctgttatcgtggaggtggaccgggtgttgaggccacaaggccggctaattgtcagagacaacattgaaacaacaagtgaggtggagaacattctgaaatctctccactgggaggtccgcatgtcttacttccaggagaaagaaggcttgctgttggtgcagaagacgacatggcggccaaatgaaactgaagctaagctatgatgcagagcccttgccccttggaaggaggaaaggaagatctagtgtttgcaaggtcctctacttttgtgaggcatcttttatttatgtagaatttgtagagctatatgattggtagatgtggaggaatctggtggtttccagcatatccatattcatctgtggaagtggaactggttatctgattccctttttttttttgattcatccattcggaaggggaaggtaacgataaatagaaaaggaattgagaattggcggaggtcaaaggcccaacacaacccaatccggaaccccaaccccacccccaccaccaagggtccaaagccatgcgtgccgccatggcggcggcggtcctccgacccacggccgccaccctccgcttcctctccaccccaccacaccagcgccgccgcgtcttggtcggacacctcccctttgctcgccgacgccgccactcctccaccgctacggccccagcgctggaggactccagcccccgcagtggcgaaggcaaggccgtgcgccgccgccgcgcccgtgaatctccccagggcctcctccgccaccagctcgacatgtgctcccgcaacgccgacctcaccaccgcgctccgcctctacgacgacgccctctccccggacaaccccatcccgctctccctccaccactacaactgcctgctctacctctgctccaacgccgccgctaccgactctgacagccatatctccgccaccgccgctcagcgcggcttcgacatcttcgccaggatggaggccgacggcgtccagcccaacgaggccaccctcaccagcgtcgcgcgcctcgccgccgccacccgcgaccctgccatggccttctccgtcgtccgccgcatggccgctgcgggcaccccgccgcgcctccgcacctacggccccgccctcttcgcctactgcgatgccaaagatgccgacggcgccaagcaggtcgaggctcacatggacgcatctggcgtcgtgcccgaggagcccgagctcgcagcgttgctccgcgtcaacgcggacacgggcaaggccgatgaggtttacaggctcctgcacaggacgcgcgtcctcgtcaggcaggtctgcgacaccactgcccaggtcgtcgaggcctggttccggtcggacgcagcgtcccaggcgggggtggacagctgggatcccaccaaggtaaaggagggcgtcgtcaagggcggcggcggctggcatggccagggatggcttggcaagggcgcatggagcgttggctggaccgagatgggcaaggatgggacatgccaacgctgtggggagaggcttgtctgcattgacattgatccagccgagactgacaactttgcaaattcgctcaccgaactggccattaagcttgaggccagggaagatttcctcagttttcagagctggctacgccgccatggaccattcgatgctgttatagacgctgctaatgtaggcctttacaaaagtaaagatttctgtttttcacaggttaactctgttgtaaatgctatacagagagtaactaaatcaaagaagttgccactgatcgttttgcataggagccgtgtaaatgttggtcctgcaaaagccccatacaaccagaagattctggacagttggaggaatgctggagctctgtatgcaacccctcctggctccaatgacgattggtattggctgtatgcagctgtcagttgccgatcgttgcttgttacaaatgatgagatgcgagaccacttgttccaactgcttggcactagttttttccctaggtggaaagaaaaacatcaggtcagactaactttctccgggcatggccctacccttcacttgccgcctccttattcaattgttattcaggaatctgaagatggaagctggcatgtaccaacaacaacaggcgatgatattgaaaagccacggcagtggttgtgcactactagaaaatctttgaggtagatgtgatttaattttggcccagtcaagttgacacagaatggtgccaagttgccaaccttggtgggaactgggaagggtggtggcgtgacaaaccctgaaaccagcaaagcttaaatgcagcaacttgttggcccgaacgaaagaaagctgattggagtacaagtgatgaatatgagcaggccatggatatggaaagccttttgttgtaacatcgtgagctgtttattgctagcccaggttattctagagtagtttgagaaccgtggtaaggtaatttgcttcatgtgagttttacttttattaaatgacgtgccatgccagtgatttgaaggatgtggcaggcaagtaatcaaagaaagagatgaatgttatctaatttgtcattagcacacatacctaacctctggcgccccaatggtttctgacggactggtgaatggtgattgatgagggactgcgttgcaccgtgagttttggtgttaaattttcttaaaagtttaattaaatttagtatatttatagtaatactaatac

SEQ ID NO: 19925 - DNA, 4676 bp, Zea Mays
ccaattcttccctcctcctccctactgattccagctatcagtcctctccgccaaaagacaagaccataaagattactcatagattaaagtagggtttggacgtctgcctgtccatttcggcgtctgttcttagcggccgacaagcggaatctggatcaagtcccctgcttcaacccatcccctctcatcgattcattgccacaaggcagctgattgctcacagcgttggatgtgagaattggattcggacccaccgatcgatatgccgttcggccacacgcggctcgatgtccggcgtccgccgcagtcgtcctacctctgctgctccacaaccaccgtcgccgtattcgtcgcgctctgcctggtggctgtgtggatggcgtcgtccatgctcgtcacccctgccgagttccctccatttcagtccaaagtgcgtccactgaggcctcatgactctcctcctgccaccggaagcttaaccagtgctgatcagggcgatggcatcaccacccatgatgatccaccacctgctacacaacaattgcctcctgtaacagacagcatggatggtgaaaatcagcaacaagaacttttcactacagagcgcggaccatggtcaaccaaggctgaacaatctaacaaggacgctaaagagcaaaccttgacgtccagtagcccactgagcttccgttgggcgttatgcaacgtcgatgctggagcagattatattccatgcctcgacaacgtagcagctatcaagaagctccgttccaccaagcactacgaacaccgagaaaggcattgccccgagaaatctcctacctgccttgttcctctaccagagggctacaggaatccaattaggtggccaaagagcagagatcagatatggtacaataacgttcctcatactaagctggttgaatacaagggacaccaaaactgggttaaggtttctggagaatacctcaccttccccggaggcgggactcagtttaaacatggtgcgttgcgctacattgattttattcaggaggcaaagaaggatgtagcatggggaaaacgaagccgtgtagtgttagatgttggttgtggagtagctagctttggaggatatctatttgacagagatgtgattactatgtcatttgcacctaaagatgagcacgaagctcaggttcagtttgctcttgaaagaggaatacctgctatatcagctgtcatgggtacaaaaaggctcccatttcccagtagggtgtttgatgttgttcattgtgcacgatgtagggtaccgtggcatattgaaggcggtaaactcttgcttgaactggacagactgttacgtcctggtggttactttgtgtggtctgctacacccgtataccagaagctgcctgaagatgttgagatatggcaaggatagggtgaatagagtgggtatagcaatttacagaaagccaacagacaacagctgctacgaagcaagatctgaaacaaaccctccactctgtggagagtacgacgatcctgatgctgcctggaacatatcgttgggggcttgtatgcataagttgcctgtagatcctaccgttcgtggttcacagtggcctgagttatggccattgagactggagaaaccaccttattggctgagaggttctgaggctggagtatatgggaaacctgccccggaggattttcaagcagactatgaacactggaagcgagtcgtgagcaattcatacatgaatggtttgggtattgactggtctactgttagaaatgttatggatatgaaagccgtatatgcagggttcgcagcagctttgcgcgatctcaaggtgtgggtcatgaatgtggttccaattgattcacctgacacgcttccaattatatatgagcgcgggctgtttggactgtaccatgactggtgtgagtcgtttagcacctatccgagaacttatgatcttgtgcacgccaaccatctgttctccaaggttaagaagaggtgcgagctattacctgttatcgtggaggtggaccgggtgttgaggccacaaggccggctaattgtcagagacaacattgaaacaacaagtgaggtggagaacattctgaaatctctccactgggaggtccgcatgtcttacttccaggagaaagaaggcttgctgttggtgcagaagacgacatggcggccaaatgaaactgaagctaagctatgatgcagagcccttgccccttggaaggaggaaaggaagatctagtgtttgcaaggtcctctacttttgtgaggcatcttttatttatgtagaatttgtagagctatatgattggtagatgtggaggaatctggtggtttccagcatatccatattcatctgtggaagtggaactggttatctgattccctttttttttttgattcatccattcggaaggggaaggtaacgataaatagaaaaggaattgagaattggcggaggtcaaaggcccaacacaacccaatccggaaccccaaccccacccccaccaccaagggtccaaagccatgcgtgccgccatggcggcggcggtcctccgacccacggccgccaccctccgcttcctctccaccccaccacaccagcgccgccgcgtcttggtcggacacctcccctttgctcgccgacgccgccactcctccaccgctacggccccagcgctggaggactccagcccccgcagtggcgaaggcaaggccgtgcgccgccgccgcgcccgtgaatctccccagggcctcctccgccaccagctcgacatgtgctcccgcaacgccgacctcaccaccgcgctccgcctctacgacgacgccctctccccggacaaccccatcccgctctccctccaccactacaactgcctgctctacctctgctccaacgccgccgctaccgactctgacagccatatctccgccaccgccgctcagcgcggcttcgacatcttcgccaggatggaggccgacggcgtccagcccaacgaggccaccctcaccagcgtcgcgcgcctcgccgccgccacccgcgaccctgccatggccttctccgtcgtccgccgcatggccgctgcgggcaccccgccgcgcctccgcacctacggccccgccctcttcgcctactgcgatgccaaagatgccgacggcgccaagcaggtcgaggctcacatggacgcatctggcgtcgtgcccgaggagcccgagctcgcagcgttgctccgcgtcaacgcggacacgggcaaggccgatgaggtttacaggctcctgcacaggacgcgcgtcctcgtcaggcaggtctgcgacaccactgcccaggtcgtcgaggcctggttccggtcggacgcagcgtcccaggcgggggtggacagctgggatcccaccaaggtaaaggagggcgtcgtcaagggcggcggcggctggcatggccagggatggcttggcaagggcgcatggagcgttggctggaccgagatgggcaaggatgggacatgccaacgctgtggggagaggcttgtctgcattgacattgatccagccgagactgacaactttgcaaattcgctcaccgaactggccattaagcttgaggccagggaagatttcctcagttttcagagctggctacgccgccatggaccattcgatgctgttatagacgctgctaatgtaggcctttacaaaagtaaagatttctgtttttcacaggagccgtgtaaatgttggtcctgcaaaagccccatacaaccagaagattctggacagttggaggaatgctggagctctgtatgcaacccctcctggctccaatgacgattggtattggctgtatgcagctgtcagttgccgatcgttgcttgttacaaatgatgagatgcgagaccacttgttccaactgcttggcactagttttttccctaggtggaaagaaaaacatcaggtcagactaactttctccgggcatggccctacccttcacttgccgcctccttattcaattgttattcaggaatctgaagatggaagctggcatgtaccaacaacaacaggcgatgatattgaaaagccacggcagtggttgtgcactactagaaaatctttgaggtagatgtgatttaattttggcccagtcaagttgacacagaatggtgccaagttgccaaccttggtgggaactgggaagggtggtggcgtgacaaaccctgaaaccagcaaagcttaaatgcagcaacttgttggcccgaacgaaagaaagctgattggagtacaagtgatgaatatgagcaggccatggatatggaaagccttttgttgtaacatcgtgagctgtttattgctagcccaggttattctagagtagtttgagaaccgtggtaaggtaatttgcttcatgtgagttttacttttattaaatgacgtgccatgccagtgatttgaaggatgtggcaggcaagtaatcaaagaaagagatgaatgttatctaatttgtcattagcacacatacctaacctctggcgccccaatggtttctgacggactggtgaatggtgattgatgagggactgcgttgcaccgtgagttttggtgttaaattttcttaaaagtttaattaaatttagtatatttatagtaatactaatac

SEQ ID NO: 19926 - DNA, 4928 bp, Zea Mays
cttccctcctcctccctactgattccagctatcagtcctctccgccaaaagacaagaccataaagattactcatagattaaagtagggtttggacgtctgcctgtccatttcggcgtctgttcttagcggccgacaagcggaatctggatcaagtcccctgcttcaacccatcccctctcatcgattcattgccacaaggcagctgattgctcacagcgttggatgtgagaattggattcggacccaccgatcgatatgccgttcggccacacgcggctcgatgtccggcgtccgccgcagtcgtcctacctctgctgctccacaaccaccgtcgccgtattcgtcgcgctctgcctggtggctgtgtggatggcgtcgtccatgctcgtcacccctgccgagttccctccatttcagtccaaagtgcgtccactgaggcctcatgactctcctcctgccaccggaagcttaaccagtgctgatcagggcgatggcatcaccacccatgatgatccaccacctgctacacaacaattgcctcctgtaacagacagcatggatggtgaaaatcagcaacaagaacttttcactacagagcgcggaccatggtcaaccaaggctgaacaatctaacaaggacgctaaagagcaaaccttgacgtccagtagcccactgagcttccgttgggcgttatgcaacgtcgatgctggagcagattatattccatgcctcgacaacgtagcagctatcaagaagctccgttccaccaagcactacgaacaccgagaaaggcattgccccgagaaatctcctacctgccttgttcctctaccagagggctacaggaatccaattaggtggccaaagagcagagatcagatatggtacaataacgttcctcatactaagctggttgaatacaagggacaccaaaactgggttaaggtttctggagaatacctcaccttccccggaggcgggactcagtttaaacatggtgcgttgcgctacattgattttattcaggaggcaaagaaggatgtagcatggggaaaacgaagccgtgtagtgttagatgttggttgtggagtagctagctttggaggatatctatttgacagagatgtgattactatgtcatttgcacctaaagatgagcacgaagctcaggttcagtttgctcttgaaagaggaatacctgctatatcagctgtcatgggtacaaaaaggctcccatttcccagtagggtgtttgatgttgttcattgtgcacgatgtagggtaccgtggcatattgaagttatttggcaggcggtaaactcttgcttgaactggacagactgttacgtcctggtggttactttgtgtggtctgctacacccgtataccagaagctgcctgaagatgttgagatatggcaagccatgtctgctctaaccagttcaatgtgctggaaaatggtcaacaaagtaaaggatagggtgaatagagtgggtatagcaatttacagaaagccaacagacaacagctgctacgaagcaagatctgaaacaaaccctccactctgtggagagtacgacgatcctgatgctgcctggaacatatcgttgggggcttgtatgcataagttgcctgtagatcctaccgttcgtggttcacagtggcctgagttatggccattgagactggagaaaccaccttattggctgagaggttctgaggctggagtatatgggaaacctgccccggaggattttcaagcagactatgaacactggaagcgagtcgtgagcaattcatacatgaatggtttgggtattgactggtctactgttagaaatgttatggatatgaaagccgtatatgcagggttcgcagcagctttgcgcgatctcaaggtgtgggtcatgaatgtggttccaattgattcacctgacacgcttccaattatatatgagcgcgggctgtttggactgtaccatgactggtgtgagtcgtttagcacctatccgagaacttatgatcttgtgcacgccaaccatctgttctccaaggttaagaagaggtgcgagctattacctgttatcgtggaggtggaccgggtgttgaggccacaaggccggctaattgtcagagacaacattgaaacaacaagtgaggtggagaacattctgaaatctctccactgggaggtccgcatgtcttacttccaggagaaagaaggcttgctgttggtgcagaagacgacatggcggccaaatgaaactgaagctaagctatgatgcagagcccttgccccttggaaggaggaaaggaagatctagtgtttgcaaggtcctctacttttgtgaggcatcttttatttatgtagaatttgtagagctatatgattggtagatgtggaggaatctggtggtttccagcatatccatattcatctgtggaagtggaactggttatctgattccctttttttttttgattcatccattcggaaggggaaggtaacgataaatagaaaaggaattgagaattggcggaggtcaaaggcccaacacaacccaatccggaaccccaaccccacccccaccaccaagggtccaaagccatgcgtgccgccatggcggcggcggtcctccgacccacggccgccaccctccgcttcctctccaccccaccacaccagcgccgccgcgtcttggtcggacacctcccctttgctcgccgacgccgccactcctccaccgctacggccccagcgctggaggactccagcccccgcagtggcgaaggcaaggccgtgcgccgccgccgcgcccgtgaatctccccagggcctcctccgccaccagctcgacatgtgctcccgcaacgccgacctcaccaccgcgctccgcctctacgacgacgccctctccccggacaaccccatcccgctctccctccaccactacaactgcctgctctacctctgctccaacgccgccgctaccgactctgacagccatatctccgccaccgccgctcagcgcggcttcgacatcttcgccaggatggaggccgacggcgtccagcccaacgaggccaccctcaccagcgtcgcgcgcctcgccgccgccacccgcgaccctgccatggccttctccgtcgtccgccgcatggccgctgcgggcaccccgccgcgcctccgcacctacggccccgccctcttcgcctactgcgatgccaaagatgccgacggcgccaagcaggtcgaggctcacatggacgcatctggcgtcgtgcccgaggagcccgagctcgcagcgttgctccgcgtcaacgcggacacgggcaaggccgatgaggtttacaggctcctgcacaggacgcgcgtcctcgtcaggcaggtctgcgacaccactgcccaggtcgtcgaggcctggttccggtcggacgcagcgtcccaggcgggggtggacagctgggatcccaccaaggtaaaggagggcgtcgtcaagggcggcggcggctggcatggccagggatggcttggcaagggcgcatggagcgttggctggaccgagatgggcaaggatgggacatgccaacgctgtggggagaggcttgtctgcattgacattgatccagccgagactgacaactttgcaaattcgctcaccgaactggccattaagcttgaggccagggaagatttcctcagttttcagagctggctacgccgccatggaccattcgatgctgttatagacgctgctaatgtaggcctttacaaaagtaaagatttctgtttttcacaggtaggaggaggcttttcttcagccaagcagtaaaattatgatccgatacttgtttgacacaaaggcaggcaggcagacagacagagctaatacgaccaagtttgggtcgctctctccttgtaggttaactctgttgtaaatgctatacagagagtaactaaatcaaagaagttgccactgatcgttttgcataggagccgtgtaaatgttggtcctgcaaaagccccatacaaccagaagattctggacagttggaggaatgctggagctctgtatgcaacccctcctggctccaatgacgattggtattggctgtatgcagctgtcagttgccgatcgttgcttgttacaaatgatgagatgcgagaccacttgttccaactgcttggcactagttttttccctaggtggaaagaaaaacatcaggtcagactaactttctccgggcatggccctacccttcacttgccgcctccttattcaattgttattcaggaatctgaagatggaagctggcatgtaccaacaacaacaggcgatgatattgaaaagccacggcagtggttgtgcactactagaaaatctttgaggtagatgtgatttaattttggcccagtcaagttgacacagaatggtgccaagttgccaaccttggtgggaactgggaagggtggtggcgtgacaaaccctgaaaccagcaaagcttaaatgcagcaacttgttggcccgaacgaaagaaagctgattggagtacaagtgatgaatatgagcaggccatggatatggaaagccttttgttgtaacatcgtgagctgtttattgctagcccaggttattctagagtagtttgagaaccgtggtaaggtaatttgcttcatgtgagttttacttttattaaatgacgtgccatgccagtgatttgaaggatgtggcaggcaagtaatcaaagaaagagatgaatgttatctaatttgtcattagcacacatacctaacctctggcgccccaatggtttctgacggactggtgaatggtgattgatgagggactgcgttgcaccgtgagttttggtgttaaattttcttaaaagtttaattaaatttagtatatttatagtaatactaatac

SEQ ID NO: 19927 - DNA, 4734 bp, Zea Mays
cttccctcctcctccctactgattccagctatcagtcctctccgccaaaagacaagaccataaagattactcatagattaaagtagggtttggacgtctgcctgtccatttcggcgtctgttcttagcggccgacaagcggaatctggatcaagtcccctgcttcaacccatcccctctcatcgattcattgccacaaggcagctgattgctcacagcgttggatgtgagaattggattcggacccaccgatcgatatgccgttcggccacacgcggctcgatgtccggcgtccgccgcagtcgtcctacctctgctgctccacaaccaccgtcgccgtattcgtcgcgctctgcctggtggctgtgtggatggcgtcgtccatgctcgtcacccctgccgagttccctccatttcagtccaaagtgcgtccactgaggcctcatgactctcctcctgccaccggaagcttaaccagtgctgatcagggcgatggcatcaccacccatgatgatccaccacctgctacacaacaattgcctcctgtaacagacagcatggatggtgaaaatcagcaacaagaacttttcactacagagcgcggaccatggtcaaccaaggctgaacaatctaacaaggacgctaaagagcaaaccttgacgtccagtagcccactgagcttccgttgggcgttatgcaacgtcgatgctggagcagattatattccatgcctcgacaacgtagcagctatcaagaagctccgttccaccaagcactacgaacaccgagaaaggcattgccccgagaaatctcctacctgccttgttcctctaccagagggctacaggaatccaattaggtggccaaagagcagagatcagatatggtacaataacgttcctcatactaagctggttgaatacaagggacaccaaaactgggttaaggtttctggagaatacctcaccttccccggaggcgggactcagtttaaacatggtgcgttgcgctacattgattttattcaggaggcaaagaaggatgtagcatggggaaaacgaagccgtgtagtgttagatgttggttgtggagtagctagctttggaggatatctatttgacagagatgtgattactatgtcatttgcacctaaagatgagcacgaagctcaggttcagtttgctcttgaaagaggaatacctgctatatcagctgtcatgggtacaaaaaggctcccatttcccagtagggtgtttgatgttgttcattgtgcacgatgtagggtaccgtggcatattgaagttatttggcaggcggtaaactcttgcttgaactggacagactgttacgtcctggtggttactttgtgtggtctgctacacccgtataccagaagctgcctgaagatgttgagatatggcaagccatgtctgctctaaccagttcaatgtgctggaaaatggtcaacaaagtaaaggatagggtgaatagagtgggtatagcaatttacagaaagccaacagacaacagctgctacgaagcaagatctgaaacaaaccctccactctgtggagagtacgacgatcctgatgctgcctggaacatatcgttgggggcttgtatgcataagttgcctgtagatcctaccgttcgtggttcacagtggcctgagttatggccattgagactggagaaaccaccttattggctgagaggttctgaggctggagtatatgggaaacctgccccggaggattttcaagcagactatgaacactggaagcgagtcgtgagcaattcatacatgaatggtttgggtattgactggtctactgttagaaatgttatggatatgaaagccgtatatgcagggttcgcagcagctttgcgcgatctcaaggtgtgggtcatgaatgtggttccaattgattcacctgacacgcttccaattatatatgagcgcgggctgtttggactgtaccatgactggtgtgagtcgtttagcacctatccgagaacttatgatcttgtgcacgccaaccatctgttctccaaggttaagaagaggtgcgagctattacctgttatcgtggaggtggaccgggtgttgaggccacaaggccggctaattgtcagagacaacattgaaacaacaagtgaggtggagaacattctgaaatctctccactgggaggtccgcatgtcttacttccaggagaaagaaggcttgctgttggtgcagaagacgacatggcggccaaatgaaactgaagctaagctatgatgcagagcccttgccccttggaaggaggaaaggaagatctagtgtttgcaaggtcctctacttttgtgaggcatcttttatttatgtagaatttgtagagctatatgattggtagatgtggaggaatctggtggtttccagcatatccatattcatctgtggaagtggaactggttatctgattccctttttttttttgattcatccattcggaaggggaaggtaacgataaatagaaaaggaattgagaattggcggaggtcaaaggcccaacacaacccaatccggaaccccaaccccacccccaccaccaagggtccaaagccatgcgtgccgccatggcggcggcggtcctccgacccacggccgccaccctccgcttcctctccaccccaccacaccagcgccgccgcgtcttggtcggacacctcccctttgctcgccgacgccgccactcctccaccgctacggccccagcgctggaggactccagcccccgcagtggcgaaggcaaggccgtgcgccgccgccgcgcccgtgaatctccccagggcctcctccgccaccagctcgacatgtgctcccgcaacgccgacctcaccaccgcgctccgcctctacgacgacgccctctccccggacaaccccatcccgctctccctccaccactacaactgcctgctctacctctgctccaacgccgccgctaccgactctgacagccatatctccgccaccgccgctcagcgcggcttcgacatcttcgccaggatggaggccgacggcgtccagcccaacgaggccaccctcaccagcgtcgcgcgcctcgccgccgccacccgcgaccctgccatggccttctccgtcgtccgccgcatggccgctgcgggcaccccgccgcgcctccgcacctacggccccgccctcttcgcctactgcgatgccaaagatgccgacggcgccaagcaggtcgaggctcacatggacgcatctggcgtcgtgcccgaggagcccgagctcgcagcgttgctccgcgtcaacgcggacacgggcaaggccgatgaggtttacaggctcctgcacaggacgcgcgtcctcgtcaggcaggtctgcgacaccactgcccaggtcgtcgaggcctggttccggtcggacgcagcgtcccaggcgggggtggacagctgggatcccaccaaggtaaaggagggcgtcgtcaagggcggcggcggctggcatggccagggatggcttggcaagggcgcatggagcgttggctggaccgagatgggcaaggatgggacatgccaacgctgtggggagaggcttgtctgcattgacattgatccagccgagactgacaactttgcaaattcgctcaccgaactggccattaagcttgaggccagggaagatttcctcagttttcagagctggctacgccgccatggaccattcgatgctgttatagacgctgctaatgtaggcctttacaaaagtaaagatttctgtttttcacaggagccgtgtaaatgttggtcctgcaaaagccccatacaaccagaagattctggacagttggaggaatgctggagctctgtatgcaacccctcctggctccaatgacgattggtattggctgtatgcagctgtcagttgccgatcgttgcttgttacaaatgatgagatgcgagaccacttgttccaactgcttggcactagttttttccctaggtggaaagaaaaacatcaggtcagactaactttctccgggcatggccctacccttcacttgccgcctccttattcaattgttattcaggaatctgaagatggaagctggcatgtaccaacaacaacaggcgatgatattgaaaagccacggcagtggttgtgcactactagaaaatctttgaggtagatgtgatttaattttggcccagtcaagttgacacagaatggtgccaagttgccaaccttggtgggaactgggaagggtggtggcgtgacaaaccctgaaaccagcaaagcttaaatgcagcaacttgttggcccgaacgaaagaaagctgattggagtacaagtgatgaatatgagcaggccatggatatggaaagccttttgttgtaacatcgtgagctgtttattgctagcccaggttattctagagtagtttgagaaccgtggtaaggtaatttgcttcatgtgagttttacttttattaaatgacgtgccatgccagtgatttgaaggatgtggcaggcaagtaatcaaagaaagagatgaatgttatctaatttgtcattagcacacatacctaacctctggcgccccaatggtttctgacggactggtgaatggtgattgatgagggactgcgttgcaccgtgagttttggtgttaaattttcttaaaagtttaattaaatttagtatatttatagtaatactaatac

SEQ ID NO: 19928 - DNA, 4720 bp, Zea Mays
cgccaaaagacaagaccataaagattactcatagattaaagtagggtttggacgtctgcctgtccatttcggcgtctgttcttagcggccgacaagcggaatctggatcaagtcccctgcttcaacccatcccctctcatcgattcattgccacaaggcagctgattgctcacagcgttggatgtgagaattggattcggacccaccgatcgatatgccgttcggccacacgcggctcgatgtccggcgtccgccgcagtcgtcctacctctgctgctccacaaccaccgtcgccgtattcgtcgcgctctgcctggtggctgtgtggatggcgtcgtccatgctcgtcacccctgccgagttccctccatttcagtccaaagtgcgtccactgaggcctcatgactctcctcctgccaccggaagcttaaccagtgctgatcagggcgatggcatcaccacccatgatgatccaccacctgctacacaacaattgcctcctgtaacagacagcatggatggtgaaaatcagcaacaagaacttttcactacagagcgcggaccatggtcaaccaaggctgaacaatctaacaaggacgctaaagagcaaaccttgacgtccagtagcccactgagcttccgttgggcgttatgcaacgtcgatgctggagcagattatattccatgcctcgacaacgtagcagctatcaagaagctccgttccaccaagcactacgaacaccgagaaaggcattgccccgagaaatctcctacctgccttgttcctctaccagagggctacaggaatccaattaggtggccaaagagcagagatcagatatggtacaataacgttcctcatactaagctggttgaatacaagggacaccaaaactgggttaaggtttctggagaatacctcaccttccccggaggcgggactcagtttaaacatggcaaagaaggatgtagcatggggaaaacgaagccgtgtagtgttagatgttggttgtggagtagctagctttggaggatatctatttgacagagatgtgattactatgtcatttgcacctaaagatgagcacgaagctcaggttcagtttgctcttgaaagaggaatacctgctatatcagctgtcatgggtacaaaaaggctcccatttcccagtagggtgtttgatgttgttcattgtgcacgatgtagggtaccgtggcatattgaaggcggtaaactcttgcttgaactggacagactgttacgtcctggtggttactttgtgtggtctgctacacccgtataccagaagctgcctgaagatgttgagatatggcaagccatgtctgctctaaccagttcaatgtgctggaaaatggtcaacaaagtaaaggatagggtgaatagagtgggtatagcaatttacagaaagccaacagacaacagctgctacgaagcaagatctgaaacaaaccctccactctgtggagagtacgacgatcctgatgctgcctggaacatatcgttgggggcttgtatgcataagttgcctgtagatcctaccgttcgtggttcacagtggcctgagttatggccattgagactggagaaaccaccttattggctgagaggttctgaggctggagtatatgggaaacctgccccggaggattttcaagcagactatgaacactggaagcgagtcgtgagcaattcatacatgaatggtttgggtattgactggtctactgttagaaatgttatggatatgaaagccgtatatgcagggttcgcagcagctttgcgcgatctcaaggtgtgggtcatgaatgtggttccaattgattcacctgacacgcttccaattatatatgagcgcgggctgtttggactgtaccatgactggtgtgagtcgtttagcacctatccgagaacttatgatcttgtgcacgccaaccatctgttctccaaggttaagaagaggtgcgagctattacctgttatcgtggaggtggaccgggtgttgaggccacaaggccggctaattgtcagagacaacattgaaacaacaagtgaggtggagaacattctgaaatctctccactgggaggtccgcatgtcttacttccaggagaaagaaggcttgctgttggtgcagaagacgacatggcggccaaatgaaactgaagctaagctatgatgcagagcccttgccccttggaaggaggaaaggaagatctagtgtttgcaaggtcctctacttttgtgaggcatcttttatttatgtagaatttgtagagctatatgattggtagatgtggaggaatctggtggtttccagcatatccatattcatctgtggaagtggaactggttatctgattccctttttttttttgattcatccattcggaaggggaaggtaacgataaatagaaaaggaattgagaattggcggaggtcaaaggcccaacacaacccaatccggaaccccaaccccacccccaccaccaagggtccaaagccatgcgtgccgccatggcggcggcggtcctccgacccacggccgccaccctccgcttcctctccaccccaccacaccagcgccgccgcgtcttggtcggacacctcccctttgctcgccgacgccgccactcctccaccgctacggccccagcgctggaggactccagcccccgcagtggcgaaggcaaggccgtgcgccgccgccgcgcccgtgaatctccccagggcctcctccgccaccagctcgacatgtgctcccgcaacgccgacctcaccaccgcgctccgcctctacgacgacgccctctccccggacaaccccatcccgctctccctccaccactacaactgcctgctctacctctgctccaacgccgccgctaccgactctgacagccatatctccgccaccgccgctcagcgcggcttcgacatcttcgccaggatggaggccgacggcgtccagcccaacgaggccaccctcaccagcgtcgcgcgcctcgccgccgccacccgcgaccctgccatggccttctccgtcgtccgccgcatggccgctgcgggcaccccgccgcgcctccgcacctacggccccgccctcttcgcctactgcgatgccaaagatgccgacggcgccaagcaggtcgaggctcacatggacgcatctggcgtcgtgcccgaggagcccgagctcgcagcgttgctccgcgtcaacgcggacacgggcaaggccgatgaggtttacaggctcctgcacaggacgcgcgtcctcgtcaggcaggtctgcgacaccactgcccaggtcgtcgaggcctggttccggtcggacgcagcgtcccaggcgggggtggacagctgggatcccaccaaggtaaaggagggcgtcgtcaagggcggcggcggctggcatggccagggatggcttggcaagggcgcatggagcgttggctggaccgagatgggcaaggatgggacatgccaacgctgtggggagaggcttgtctgcattgacattgatccagccgagactgacaactttgcaaattcgctcaccgaactggccattaagcttgaggccagggaagatttcctcagttttcagagctggctacgccgccatggaccattcgatgctgttatagacgctgctaatgtaggcctttacaaaagtaaagatttctgtttttcacaggttaactctgttgtaaatgctatacagagagtaactaaatcaaagaagttgccactgatcgttttgcataggagccgtgtaaatgttggtcctgcaaaagccccatacaaccagaagattctggacagttggaggaatgctggagctctgtatgcaacccctcctggctccaatgacgattggtattggctgtatgcagctgtcagttgccgatcgttgcttgttacaaatgatgagatgcgagaccacttgttccaactgcttggcactagttttttccctaggtggaaagaaaaacatcaggtcagactaactttctccgggcatggccctacccttcacttgccgcctccttattcaattgttattcaggaatctgaagatggaagctggcatgtaccaacaacaacaggcgatgatattgaaaagccacggcagtggttgtgcactactagaaaatctttgaggtagatgtgatttaattttggcccagtcaagttgacacagaatggtgccaagttgccaaccttggtgggaactgggaagggtggtggcgtgacaaaccctgaaaccagcaaagcttaaatgcagcaacttgttggcccgaacgaaagaaagctgattggagtacaagtgatgaatatgagcaggccatggatatggaaagccttttgttgtaacatcgtgagctgtttattgctagcccaggttattctagagtagtttgagaaccgtggtaaggtaatttgcttcatgtgagttttacttttattaaatgacgtgccatgccagtgatttgaaggatgtggcaggcaagtaatcaaagaaagagatgaatgttatctaatttgtcattagcacacatacctaacctctggcgccccaatggtttctgacggactggtgaatggtgattgatgagggactgcgttgcaccgtgagttttggtgttaaattttcttaaaagtttaattaaatttagtatatttatagtaatactaatac

SEQ ID NO: 19929 - DNA, 2111 bp, Zea Mays
gacaattaaactacaaaactcgcaaaaccgacagatcggcaagcatgctacgttgcattgcatttgcacggaaaagagacgctttttaattcggcaccgacagtgccagctgcccctccacgggaaggccagcaccgtcggcgggtcaaccacccacccccgcctggccgcctcctcttgaaaactccctaccccggtggcccggtcacctcaccttcacccaccgcccggcgcccgccatgtattcggccaaccactggggcggctcgttcgagatcgccgatggggcggcggaggatgaccacagccgcaacatggacctggaccgcggcgcgctgtcggcgcggcagcaccacgagctggacgagacgcagcagagctggctgctaggcccgccggaggccaagaagaaggacaagtacgtggacctcggttgtgtcgtcgtcaagcgcaagctcctctggtgggccttgtggtgcgtcgtcgccgctttcgtcctcatcggcctccccatcatcatcgccaagtccatcccgcacaagaagccaggcccgccgccgccagatcagtacacagaggcgctgcacaaggcgctcctcttcttcaacgcccagaaatccggccaccttcccaagaacaatggcatcaagtggcgcgggaactctggcctgtcagacggctccgacgccaaggacgtcaagggtggcctcgtcggcggctactacgacgctggcgacaacatcaagttccacttcccgatggccttctccatgacgctgctgagctggtcggtgatcgagtacagcgccaagtacaaggccatgggggagtatgaccatgtcagggagctcatcaagtggggcaccgactatctgctactcaccttcaactcctctgcttccaccatcgacaagttatacgcccaggtgggtgctgctaagatcaacggcagccggccggacgaccattactgctggaaccggccggaggacatggcgtaccctcgcccttcactgtccgtgagctccgcccctgatctgggtggcgaggtcgccgctgcacttgcggctgcctccatcgtgttccgtgacaacgccgcctactccaagaagctcagccagggcgcggccaccgtgtacaagttcgcgcggcagtcggggcggcgcaccccctactcgctccggcagccggacatcgagtactactacaactccaccagctactgggacgagtacatgtggagcgcggggtggatgtactacgccactggcaacagcagctacatcaccttcgccaccgacccgcggctgcccaagaacgccaaggccttcttcagcatcctcgacttctccgtgttcagctgggacaacaagctcccgggcgcccagctgctgctgtcgcgcctgcgcatgttcctcaaccccggctacccgtacgaggagtcgctagccggctaccacaacgccaccagcctcaacatgtgcatgtacttcccgcgcttcgccgccttcaacttcaccaagggcgggatggcgctcttcaaccacggcagggggcagccgctgcagtacgtcgtcgccaactccttcatcgccgcgctctacgccgactacatggaggccgtcaacgtccccggctggtactgcggcccaaacttcatgaccaccaacgacctccgggagttcgccaggtctcaggtcaactacattctcggtgacaaccccaagaagatgagctacgtggttgggttcggcagcaagtacccgcggcacgtgcaccaccgtggcgcgtccacgccgcacaacggcgtcaagtactcgtgcaccggcggctacaagtggcgcgacagcaagaaggcggaccccaacctgctggcgggcgccatggtcggcgggcctgacaagaacgacggcttcaaggactcgcgcaacaccttcgggcagaacgagccgacgctggtgggcaacgccggcctcgtcgcggccctggtggctctcaccaacagcggtaggggagccggcgtcaccaccgtcgacaagaacaccatgttctccgccgtgccgccaatgttcccggccacgccgccgccgccgtcatcatggaagccgtga

SEQ ID NO: 19930 - DNA, 2723 bp, Zea Mays
gagtaagaagaaagagggcggcggcacggcagagccaaagccgaggcgagccgagcagtacatgcatcccgcttcccgcattcctcatcgaggtccggtccagcagccttttgcgccttcgtgtccctcccctccactccctcaccgggggctgggctggtggggagtggggactgggggcagtcgccacgccgcagtccattctttcgtcacccatcgcagctccaacacctctcgctagtcgtcatggcggcttccgcggcagcgttccccctcccaccgccgacgcctcctcttcgactttcacatgtcttttgatatcacagaaaaggattgcccctgccttcactgctgtgaatgccagggacgtttctgtcgccctacaatatatggacattggacttgatagttggcaaactttcttctatatactggacgttccagctttcgccaacctgctgctttaaccacatcttttccttctttcccgattttgcctctcactatcatcaattaccgctaaaagtgaaacaagtgttctccctatggccaagacatcacttcctcctggattccggtttcatccaactgatgtagaactcacagtctactatttaaagaggaaactactgggaaaacacttacgctgcaatgctatcactgagattgatctatacaagttcgccccttgggatcttccagagagagcttccttggagagtaacgatctagtgtggtatttcttttgcccgcgcgataggaaatattctagtgggttaaggactaatcgctcaactggagttggatattggaaagctaccgggaaggacaggccggtggtatataattctaggactgttgggatgaagagaactttagtgtttcatcttggcaagccaccacgaggtgatagaactgactgggtaatgtatgaatataggctggaggacgaggaaatagctgcttctggtgttaaactggatgcctgcgttctatgcaaaatctttcagaaaagtggcccagggcccaagattggcgcacagtatggtgccccattcaatgaagaagactggaacgatgccagtaatgtagagtgttctccatgtgtgccttctgtggccccttgcgcacctgaatcaagtcgtggtgggttgaattctgctggtcaacgcctggctgtgagttatgatgtcaaggtttccttgggctcctcggcagaaggtatcaacagacctgctgtcaatggagttcatcctgtcagaccttctcctgatgctcctaatgactgcatacacattcaattgctggctgaggttatgagatgttcctcaacctcaatgcatgttttacgtactgctggtgacgatggtttgctggctgattcaactgctgactacagtagtgataatagaatatctttggatgctattgaaactatattctgtgaagtggatgagcttgggccccaggctatggtgaacaatactaaccattgtgactcatgcggtgagtatttgattcaccctacgatggtggcacgaggagctgaacagtacttagagctaaatgacctgtccttttcgctcaccgatggtcctgattcctgtggcgtgcttttctctaatggtgtatctgttgagcaactaccggatcttgagctcaggtttgagcagttctctcctgaccacatctccaataccgctattgcttccacatcaacaacggttggttcatctgcttcagtgcccttattggaggatcacaggacctgattcagaattggagtcatctggcgcacatgttaattgaatctaggaggatctgcaggacaaagctggacaagagaggtttaggaccttgaccagctcttactacagaggggcacaggggatcattatggtgtatgatgtcagtcgacgagagacgttcaccaatctttctgatatatgggccaaggaaattgacctgtattcaaccaaccaggactgtgtaaagatgcttgttggaaataaagtagacaaggaaagtgagagggctgtcacgaaaaaggagggaattgaatttgccagggaatacggttgtttgtttctagaatgcagtgcgaaaacaaaagtaaacgtagaacagtgttttgaggaactggttctaaagatcttagacacgccaagcctcctggcggatgcttcctcagcaggggtcagcaagaagaacatcttcaagcagaaggctccagaagctgacgccgccacaggcagctgctgttaacatggttttggtcctgtatattgctatatgtggtgaagacaattggcagcagctatataatgatgtatcaagttaaacttacctgacaatatgtagtcttgcctcccaaccgcagctaagtagcagaggcacgggtgggtggcatcaataccggcatgatacagtatcagacactgtcatctatataagaaacagccatacttcggttcgttggttgcctaagctcgctactccaagtatctcggtggttggccttgcgcttctactggtggacagcaatatcaacatgtctatatgtgacagaaaacagcctcacttctatttatttgtgccgtgcagtcgtgcagatgatatttcatctcaatccacaataacacatcttgtggaagcagattacgtttgagctaattgtggacgaataaagattaatggactctaaccatcaattagctattact

SEQ ID NO: 19931 - DNA, 2241 bp, Zea Mays
ggaaaatcctttgccatgactcatgggtcagtgacacatgattaaggggttttggactttcacatgtcttttgatatcacagaaaaggattgcccctgccttcactgctgtgaatgccagggacgtttctgtcgccctacaatatatggacattggacttgatagttggcaaactttcttctatatactggacgttccagctttcgccaacctgctgctttaaccacatcttttccttctttcccgattttgcctctcactatcatcaattaccgctaaaagtgaaacaagtgttctccctatggccaagacatcacttcctcctggattccggtttcatccaactgatgtagaactcacagtctactatttaaagaggaaactactgggaaaacacttacgctgcaatgctatcactgagattgatctatacaagttcgccccttgggatcttccaggctggaggacgaggaaatagctgcttctggtgttaaactggatgcctgcgttctatgcaaaatctttcagaaaagtggcccagggcccaagattggcgcacagtatggtgccccattcaatgaagaagactggaacgatgccagtaatgtagagtgttctccatgtgtgccttctgtggccccttgcgcacctgaatcaagtcgtggtgggttgaattctgctggtcaacgcctggctgtgagttatgatgtcaaggtttccttgggctcctcggcagaaggtatcaacagacctgctgtcaatggagttcatcctgtcagaccttctcctgatgctcctaatgactgcatacacattcaattgctggctgaggttatgagatgttcctcaacctcaatgcatgttttacgtactgctggtgacgatggtttgctggctgattcaactgctgactacagtagtgataatagaatatctttggatgctattgaaactatattctgtgaagtggatgagcttgggccccaggctatggtgaacaatactaaccattgtgactcatgcggtgagtatttgattcaccctacgatggtggcacgaggagctgaacagtacttagagctaaatgacctgtccttttcgctcaccgatggtcctgattcctgtggcgtgcttttctctaatggtgtatctgttgagcaactaccggatcttgagctcaggtttgagcagttctctcctgaccacatctccaataccgctattgcttccacatcaacaacggttggttcatctgcttcagtgcccttattggaggatcacaggacctgattcagaattggagtcatctggcgcacatgttaattgaatctaggaggatctgcaggacaaagctggacaagagaggtttaggaccttgaccagctcttactacagaggggcacaggggatcattatggtgtatgatgtcagtcgacgagagacgttcaccaatctttctgatatatgggccaaggaaattgacctgtattcaaccaaccaggactgtgtaaagatgcttgttggaaataaagtagacaaggaaagtgagagggctgtcacgaaaaaggagggaattgaatttgccagggaatacggttgtttgtttctagaatgcagtgcgaaaacaaaagtaaacgtagaacagtgttttgaggaactggttctaaagatcttagacacgccaagcctcctggcggatgcttcctcagcaggggtcagcaagaagaacatcttcaagcagaaggctccagaagctgacgccgccacaggcagctgctgttaacatggttttggtcctgtatattgctatatgtggtgaagacaattggcagcagctatataatgatgtatcaagttaaacttacctgacaatatgtagtcttgcctcccaaccgcagctaagtagcagaggcacgggtgggtggcatcaataccggcatgatacagtatcagacactgtcatctatataagaaacagccatacttcggttcgttggttgcctaagctcgctactccaagtatctcggtggttggccttgcgcttctactggtggacagcaatatcaacatgtctatatgtgacagaaaacagcctcacttctatttatttgtgccgtgcagtcgtgcagatgatatttcatctcaatccacaataacacatcttgtggaagcagattacgtttgagctaattgtggacgaataaagattaatggactctaaccatcaattagctattact

SEQ ID NO: 19932 - DNA, 825 bp, Zea Mays
aagtagttcagtttagtagtagttttgattatgacgaaatgtttcgctattttttttacgagtgttagttagcgctgggcctgggaaagagaagaaaagggaagggccccatctacgcccgccctcgtgtacctggagccgtcggcttccgccagcgcccagctggaggtctcgctgttcccttcacgatacgcccccccaaagcggatcaaaccctagatctcgtcttgtcgccccgttcctccgatcccatcctatccgatcctcatggattcctcctcgtccagcctcagccagcagcccgagttcgactacctcttcaagctactccttatcggcgactccggcgtcggcaagagcagcctcctcctccgcttcaccgccgactccttcgatgacctctcccctaccataggtgttgacttcaaggtgaagatggttagcattggtggcaaaaaactcaagcttgccatctgggacacagctggacaagagaggtttaggaccttgaccagctcttactacagaggggcacaggggatcattatggtgtatgatgtcagtcgacgagagacgttcaccaatctttctgatatatgggccaaggaaattgacctgtattcaaccaaccaggactgtgtaaagatgcttgttggaaataaagtagacaaggaaagtgagagggctgtcacgaaaaaggagggaattgaatttgccagggaatacggttgtttgtttctagaatgcagtgcgaaaacaaaagtaaacgtagaacagtgttttgaggaactggttctaaagtattggcctgtatgcacgttgcag

SEQ ID NO: 19933 - DNA, 453 bp, Zea Mays
tacgagtgttagttagcgctgggcctgggaaagagaagaaaagggaagggccccatctacgcccgccctcgtgtacctggagccgtcggcttccgccagcgcccagctggaggtctcgctgttcccttcacgatacgcccccccaaagcggatcaaaccctagatctcgtcttgtcgccccgttcctccgatcccatcctatccgatcctcatggattcctcctcgtccagcctcagccagcagcccgagttcgactacctcttcaagctactccttatcggcgactccggcgtcggcaagagcagcctcctcctccgcttcaccgccgactccttcgatgacctctcccctaccataggtgttgacttcaaggtgaagatggttagcattggtggcaaaaaactcaagcttgccatctgggacacagcatatacaggacggggacttttcag

SEQ ID NO: 19934 - DNA, 1983 bp, Zea Mays
ggactgggctgcaaaaggaaaaggagccgaggaagccctcccctctcgccgcagccgcaccaccagaccgacaaccggccggcttccctcgcccccggcgaggagtgaagacaagccgacaaggcaaaaccatcgcctgtacggtatccaaccgccgtcccgccgcacaaccaaggatagggcgggagagggggatctcgctttcgctccgctgccgcatgcgcaccgcccctcctcatgacaccaactagggcaccaccagcccccttctcgtcgacctccgcgcggtgactctgctgagcatcatacccttatagggcccgacccatggatgtaacttcgaccgctgccgcctccgcctcaggcgggggtaggtggtacacgggcatgtccgcggataacatcaagggcctggtgctcgcgctctcctccagcctcttcatcggcgccagcttcattatcaagaagaagggactcaagaaggccgcatcctccggcgtcagagcgggggttggtggctattcttatttatatgagcctctttggtgggttggcatgataacaatgattgttggagaagttgcaaatttcgcagcttatgcatttgcaccggctattttggtcactcctctcggtgctcttagcattattatcagcgctgtgcttgcacatgtaatgctgcgggagaagctgcacatatttggaattcttggatgcgcgctatgtgttgtgggatccaccacaattgtccttcatgctccaccagagcgtgaaatcgagtcagtgacagaagtgtgggatctggctacggaaccagccttcatgtgttatgcagcagtggtaattgctatagctgccatacttgtttatcggtttgtcccactttatgggcagacacatgtcatggtctacataggtgtttgctctctcgttggttccatctcggtcatgagcgtgaaagctcttggtatagcattgaagctgaccttttcaggaacgaaccagcttatttacccacagacatgggcttttagtctggttgtcatctcatgtatcattacccaaatgaattacttgaacaaggcacttgacacgtttaatacagcagttgtgtcacccatttattataccatgttcacatctttaactatcttggcaagtgtcatcatgttcaagggcactaaatagtgattgagccagtgttccaaatccaatttcaaatggagatttccttggattgcattagactaaactgtaaaagaagcagtatgagcctgagcttcagctttcaggactgggacaggcaaaatcctacgcaaattgtgactgagatgtgtggctttgttacgatcctttctggaacttttcttctacataaaacaaaggacatggctgatggtgggctttcgatgtcatcctccttccgtcttcctacatcttcttcggtgcgcttctccaaacaaacagatgaagatggtgaaggaattcctctaagatcgtccgaatcattccggtcaccacattaacgcatgtttgctaatcattaatttgcacagagttaggggtgggtattatatagataatgctatcagtgagcttgtactaagggtacgatggatggaccctcttttgctttggcagaattgtatatgtatgcccaacatcttgtggaactcccaatatatttctcttggctgtcgtgtgtgataactgatgaaggatgcgtaatttatggctgccatcagccatcaggaacattgagtgctgtggaacctcttcacttgagctactgggaagtaagtaccttccaacgatatactgcatcagcaatgggaagaaaaaatggcaacaaacaggaacatgtattcagagcagagcctatgcatggtttcattcatccccaccacatgaacatgaattcggtacaaaagacagggaatgcggaaaaagatagagcgagacggggagtgactggattgacga

SEQ ID NO: 19935 - DNA, 3655 bp, Zea Mays
cgcgcttctttcctgggaactgcaactacaaccgcaatgttggtggaggtagagtcgtagagactagagagtcacacacgctcgctgctgcctctccttcctctcctcggcaagtgagagaggtgtgaaccgacgaggaagagcacccatccccactgcgcatcctcgattcgattccgtccccttgcctcttgcctcttgggcgtctccgcggctagatggcgtctccccctcccttcgacctctgcggcgatctcgacgacgacgacatcgatgaacccgtcaccgccgtccccaaggatcgccatctccctgccgccgcccctacgccgaacggcctcaacgaccacctcctccgcttcacccgcagcctccagcgccccacccaaaaccctaaccctagccccaatccgccaccgcctccgcccccagccgccgccgaagaacaagtcgagaaggtcaagctcgccggccgccgccgcctatgcaagcttgccaccaccaccaccgccactcagcgagtggatgaagaggaggcggagtgggacaaccaggacgacggtgaaagcatactcgacatcctagacgacctcaccacacgatttgactctctatccgtccagaagcccagcaccgccgcgaggtccaggacacaacagctcacccctttgccgtgcgccatcaccgtggacgacgacctagatgaccatagcccagatgatgtggatgctcacgccggtgcctcctcaccccttcaaatttctagctctgatgaagctagggctcccaccagacgctccgaggtcaagatcgaaactgatttagtctcctcagcctgtacccattatgcctgtgatgacgtccgtggcaaggggaagaacaaagggaccaccaaggatgttgggaggctaaatagggtatcaaaggcctcatcctttgttgattcttattccgattctgattatgacgactgcgaggaggaccaaggaacaagaacagattatgctgttaagcagctaagaagcaagggattcacaaggagaccacccaacaccccaacattcaggaaccatggtgtcagcgacgatgagctgggtcaggagaaggagaaccttggagctgtggagaacaatgctgaggatgttggatgggagaagacagaggacttcaagatggatccaactggaactgctgcaacatccaagccatacaagctcccaggaaagatattcaagatgcttttcgcccaccagcgcgagggcctccgatggctctgggttctgcactgcaggggaacaggaggaatcctaggggatgacatgggtcttggcaagacgatgcaggttgctgcatttttggctggactgtttcattctcgtctagtcaagagggtgctcattgttgctccaaagacacttctggcccattggacaaaggagctttcaattgttggccttaaagaaaagatcagagactactctggccccagcacaaatattcgcaattatgaactccaatatgccttcaaggagggtggtatcctcataaccacctatgacattgtcaggaacaactacaagctcataagaggcaactcctacaacaacagcaatgatgatgatgatgaggaaggaactttgtggaattacgtaattcttgatgagggacatctaataaaaaataataagacacaaagggcccaaagtttgtacgaaataccttgtgcccatcgcattgtgatcagtggaacacctattcaaaataacttgaaggaaatgtggactctgttcaatttctgttgcccagatgtcttgggtgataaacagcagttcaaaataaggtatgaaacggctatccttcgaggaaatgacaaaaatgctaccgctcgagagaagcacgtaggctcaaatgtagcaaaggaactaagagagcgaatcaagccatactttttgcggcgcctgaaaagtgaagttgtctttgatactggtgcatcagaagaaaaaacattagccaagaagaatgagctaattgtctggctgaagttaacaccatgccagaggaaactatatgaagcttttctaaatagtgagctggttcatttagcattgcagccaaaggcatcaccgttggctgcaatcacaatattgaagaaaatatgtgatcatccactgctattaactaagaaaggtgctgagggtgtgttggaaggaatgggtgaaatgttgaatgatcaagacattggaatggtggaaaaaatggccatgaaccttgcagatatggctcatgatgataatgcactggaagttggtcaggatgtctcatgcaagctatcattcatcatgtccttgttgcggaaccttgttggagaggggcatcatgttttaatattttcacagactcgtaaaatgctaaaccttattcaggaagctataatattagagggctatgcgtttttgcgcattgatggcaccaccaaggtttctgaccgggaaaggattgtgaaggacttccaagagggttgtggagctccagtttttctgctaaccacacaagttggtgggcttggacttacactcaccaaggcaactcgtgtcattgtagttgatcctgcatggaaccctagacaatcaaagtgttgatcgtgcttaccgaattggacagactaaaaatgtgattgtataccgcttgatgacatctgcgaccattgaagaaaagatatacaaattgcaggttttgaagggcgctctgttcaggacagctacggagcaaaaagagcaaacacgttacttcagcaagagtgagattcaagagctatttagtttgccacaacaaggatttgatgtttccctcacacataagcagttgcaagaagagcatggtcaacaagttgttctggatgagtccttgaggaagcatatacagtttctggagcaacaaggaatagccggtgtgagtcatcacagcctcctattctctaaaactgcaaccctgcccactctgagtgagaatgatgcactggacagcaaacctcggggcatgcccatgatgccccagcaatattacaagggatcctcatctgactatgtcgccaacggggcatcttttgcgctgaagccaaaggatgaaagtttcactgttcgaaactacattccaagtaacagaagcgcagagagtcctgaagagataaaggcaagaatcaaccggctttcacagaccctctccaacgctatggtggtgagaagataaggaggcagataaatgagctggacgagaagctgacttctgctgagaaggggctgaaggaggggggcactgaagtgatttccttggatgactgatccaagacatggagagtctgtgctcggcaaaagtaaagtgttttgaatagctttagtcactgggttgtgactagcatcaatcaagtctgctctttttgctgcatctctgggctgggtctatcgtttatgcaatacaatgctttttctgatgatgattatatgaataatataatccccagacaaagcagcaaccattacagtcagacagagatgcagaatgcttggtgggtttgcttgatcactctatagtccgtccgttcattgtataggcggctgaatcaaaatcagaggagaagggcgagcagggcgttaaagat

SEQ ID NO: 19936 - DNA, 3641 bp, Zea Mays
ctgcaactacaaccgcaatgttggtggaggtagagtcgtagagactagagagtcacacacgctcgctgctgcctctccttcctctcctcggcaagtgagagaggtgtgaaccgacgaggaagagcacccatccccactgcgcatcctcgattcgattccgtccccttgcctcttgcctcttgggcgtctccgcggctagatggcgtctccccctcccttcgacctctgcggcgatctcgacgacgacgacatcgatgaacccgtcaccgccgtccccaaggatcgccatctccctgccgccgcccctacgccgaacggcctcaacgaccacctcctccgcttcacccgcagcctccagcgccccacccaaaaccctaaccctagccccaatccgccaccgcctccgcccccagccgccgccgaagaacaagtcgagaaggtcaagctcgccggccgccgccgcctatgcaagcttgccaccaccaccaccgccactcagcgagtggatgaagaggaggcggagtgggacaaccaggacgacggtgaaagcatactcgacatcctagacgacctcaccacacgatttgactctctatccgtccagaagcccagcaccgccgcgaggtccaggacacaacagctcacccctttgccgtgcgccatcaccgtggacgacgacctagatgaccatagcccagatgatgtggatgctcacgccggtgcctcctcaccccttcaaatttctagctctgatgaagctagggctcccaccagacgctccgaggtcaagatcgaaactgatttagtctcctcagcctgtacccattatgcctgtgatgacgtccgtggcaaggggaagaacaaagggaccaccaaggatgttgggaggctaaatagggtatcaaaggcctcatcctttgttgattcttattccgattctgattatgacgactgcgaggaggaccaaggaacaagaacagattatgctgttaagcagctaagaagcaagggattcacaaggagaccacccaacaccccaacattcaggaaccatggtgtcagcgacgatgagctgggtcaggagaaggagaaccttggagctgtggagaacaatgctgaggatgttggatgggagaagacagaggacttcaagatggatccaactggaactgctgcaacatccaagccatacaagctcccaggaaagatattcaagatgcttttcgcccaccagcgcgagggcctccgatggctctgggttctgcactgcaggggaacaggaggaatcctaggggatgacatgggtcttggcaagacgatgcaggttgctgcatttttggctggactgtttcattctcgtctagtcaagagggtgctcattgttgctccaaagacacttctggcccattggacaaaggagctttcaattgttggccttaaagaaaagatcagagactactctggccccagcacaaatattcgcaattatgaactccaatatgccttcaaggagggtggtatcctcataaccacctatgacattgtcaggaacaactacaagctcataagaggcaactcctacaacaacagcaatgatgatgatgatgaggaaggaactttgtggaattacgtaattcttgatgagggacatctaataaaaaataataagacacaaagggcccaaagtttgtacgaaataccttgtgcccatcgcattgtgatcagtggaacacctattcaaaataacttgaaggaaatgtggactctgttcaatttctgttgcccagatgtcttgggtgataaacagcagttcaaaataaggtatgaaacggctatccttcgaggaaatgacaaaaatgctaccgctcgagagaagcacgtaggctcaaatgtagcaaaggaactaagagagcgaatcaagccatactttttgcggcgcctgaaaagtgaagttgtctttgatactggtgcatcagaagaaaaaacattagccaagaagaatgagctaattgtctggctgaagttaacaccatgccagaggaaactatatgaagcttttctaaatagtgagctggttcatttagcattgcagccaaaggcatcaccgttggctgcaatcacaatattgaagaaaatatgtgatcatccactgctattaactaagaaaggtgctgagggtgtgttggaaggaatgggtgaaatgttgaatgatcaagacattggaatggtggaaaaaatggccatgaaccttgcagatatggctcatgatgataatgcactggaagttggtcaggatgtctcatgcaagctatcattcatcatgtccttgttgcggaaccttgttggagaggggcatcatgttttaatattttcacagactcgtaaaatgctaaaccttattcaggaagctataatattagagggctatgcgtttttgcgcattgatggcaccaccaaggtttctgaccgggaaaggattgtgaaggacttccaagagggttgtggagctccagtttttctgctaaccacacaagttggtgggcttggacttacactcaccaaggcaactcgtgtcattgtagttgatcctgcatggaaccctagtacagacaatcaaagtgttgatcgtgcttaccgaattggacagactaaaaatgtgattgtataccgcttgatgacatctgcgaccattgaagaaaagatatacaaattgcaggttttgaagggcgctctgttcaggacagctacggagcaaaaagagcaaacacgttacttcagcaagagtgagattcaagagctatttagtttgccacaacaaggatttgatgtttccctcacacataagcagttgcaagaagagcatggtcaacaagttgttctggatgagtccttgaggaagcatatacagtttctggagcaacaaggaatagccggtgtgagtcatcacagcctcctattctctaaaactgcaaccctgcccactctgagtgagaatgatgcactggacagcaaacctcggggcatgcccatgatgccccagcaatattacaagggatcctcatctgactatgtcgccaacggggcatcttttgcgctgaagccaaaggatgaaagtttcactgttcgaaactacattccaagtaacagaagcgcagagagtcctgaagagataaaggcaagaatcaaccggctttcacagaccctctccaacgctatggtggtgagaagataaggaggcagataaatgagctggacgagaagctgacttctgctgagaaggggctgaaggaggggggcactgaagtgatttccttggatgactgatccaagacatggagagtctgtgctcggcaaaagtaaagtgttttgaatagctttagtcactgggttgtgactagcatcaatcaagtctgctctttttgctgcatctctgggctgggtctatcgtttatgcaatacaatgctttttctgatgatgattatatgaataatataatccccagacaaagcagcaaccattacagtcagacagagatgcagaatgcttggtgggtttgcttgatcactctatagtccgtccgttcattgtataggcggctgaatcaaaatcagaggagaagggcgagcagggcgttaaagat

SEQ ID NO: 19937 - DNA, 3590 bp, Zea Mays
gtcgtagagactagagagtcacacacgctcgctgctgcctctccttcctctcctcggcaagtgagagaggtgtgaaccgacgaggaagagcacccatccccactgcgcatcctcgattcgattccgtccccttgcctcttgcctcttgggcgtctccgcggctagatggcgtctccccctcccttcgacctctgcggcgatctcgacgacgacgacatcgatgaacccgtcaccgccgtccccaaggatcgccatctccctgccgccgcccctacgccgaacggcctcaacgaccacctcctccgcttcacccgcagcctccagcgccccacccaaaaccctaaccctagccccaatccgccaccgcctccgcccccagccgccgccgaagaacaagtcgagaaggtcaagctcgccggccgccgccgcctatgcaagcttgccaccaccaccaccgccactcagcgagtggatgaagaggaggcggagtgggacaaccaggacgacggtgaaagcatactcgacatcctagacgacctcaccacacgatttgactctctatccgtccagaagcccagcaccgccgcgaggtccaggacacaacagctcacccctttgccgtgcgccatcaccgtggacgacgacctagatgaccatagcccagatgatgtggatgctcacgccggtgcctcctcaccccttcaaatttctagctctgatgaagctagggctcccaccagacgctccgaggtcaagatcgaaactgatttagtctcctcagcctgtacccattatgcctgtgatgacgtccgtggcaaggggaagaacaaagggaccaccaaggatgttgggaggctaaatagggtatcaaaggcctcatcctttgttgattcttattccgattctgattatgacgactgcgaggaggaccaaggaacaagaacagattatgctgttaagcagctaagaagcaagggattcacaaggagaccacccaacaccccaacattcaggaaccatggtgtcagcgacgatgagctgggtcaggagaaggagaaccttggagctgtggagaacaatgctgaggatgttggatgggagaagacagaggacttcaagatggatccaactggaactgctgcaacatccaagccatacaagctcccaggaaagatattcaagatgcttttcgcccaccagcgcgagggcctccgatggctctgggttctgcactgcaggggaacaggaggaatcctaggggatgacatgggtcttggcaagacgatgcaggttgctgcatttttggctggactgtttcattctcgtctagtcaagagggtgctcattgttgctccaaagacacttctggcccattggacaaaggagctttcaattgttggccttaaagaaaagatcagagactactctggccccagcacaaatattcgcaattatgaactccaatatgccttcaaggagggtggtatcctcataaccacctatgacattgtcaggaacaactacaagctcataagaggcaactcctacaacaacagcaatgatgatgatgatgaggaaggaactttgtggaattacgtaattcttgatgagggacatctaataaaaaataataagacacaaagggcccaaagtttgtacgaaataccttgtgcccatcgcattgtgatcagtggaacacctattcaaaataacttgaaggaaatgtggactctgttcaatttctgttgcccagatgtcttgggtgataaacagcagttcaaaataaggtatgaaacggctatccttcgaggaaatgacaaaaatgctaccgctcgagagaagcacgtaggctcaaatgtagcaaaggaactaagagagcgaatcaagccatactttttgcggcgcctgaaaagtgaagttgtctttgatactggtgcatcagaagaaaaaacattagccaagaagaatgagctaattgtctggctgaagttaacaccatgccagaggaaactatatgaagcttttctaaatagtgagctggttcatttagcattgcagccaaaggcatcaccgttggctgcaatcacaatattgaagaaaatatgtgatcatccactgctattaactaagaaaggtgctgagggtgtgttggaaggaatgggtgaaatgttgaatgatcaagacattggaatggtggaaaaaatggccatgaaccttgcagatatggctcatgatgataatgcactggaagttggtcaggatgtctcatgcaagctatcattcatcatgtccttgttgcggaaccttgttggagaggggcatcatgttttaatattttcacagactcgtaaaatgctaaaccttattcaggaagctataatattagagggctatgcgtttttgcgcattgatggcaccaccaaggtttctgaccgggaaaggattgtgaaggacttccaagagggttgtggagctccagtttttctgctaaccacacaagttggtgggcttggacttacactcaccaaggcaactcgtgtcattgtagttgatcctgcatggaaccctagtacagacaatcaaagtgttgatcgtgcttaccgaattggacagactaaaaatgtgattgtataccgcttgatgacatctgcgaccattgaagaaaagatatacaaattgcaggttttgaagggcgctctgttcaggacagctacggagcaaaaagagcaaacacgttacttcagcaagagtgagattcaagagctatttagtttgccacaacaaggatttgatgtttccctcacacataagcagttgcaagaagagcatggtcaacaagttgttctggatgagtccttgaggaagcatatacagtttctggagcaacaaggaatagccggtgtgagtcatcacagcctcctattctctaaaactgcaaccctgcccactctgagtgagaatgatgcactggacagcaaacctcggggcatgcccatgatgccccagcaatattacaagggatcctcatctgactatgtcgccaacggggcatcttttgcgctgaagccaaaggatgaaagtttcactgttcgaaactacattccaagtaacagaagcgcagagagtcctgaagagataaaggtgctgttgtcgaagctaccagatggtggtgagaagataaggaggcagataaatgagctggacgagaagctgacttctgctgagaaggggctgaaggaggggggcactgaagtgatttccttggatgactgatccaagacatggagagtctgtgctcggcaaaagtaaagtgttttgaatagctttagtcactgggttgtgactagcatcaatcaagtctgctctttttgctgcatctctgggctgggtctatcgtttatgcaatacaatgctttttctgatgatgattatatgaataatataatccccagacaaagcagcaaccattacagtcagacagagatgcagaatgcttggtgggtttgcttgatcactctatagtccgtccgttcattgtataggcggctgaatcaaaatcagaggagaagggcgagcagggcgttaaagat

SEQ ID NO: 19938 - DNA, 3624 bp, Zea Mays
gtcgtagagactagagagtcacacacgctcgctgctgcctctccttcctctcctcggcaagtgagagaggtgtgaaccgacgaggaagagcacccatccccactgcgcatcctcgattcgattccgtccccttgcctcttgcctcttgggcgtctccgcggctagatggcgtctccccctcccttcgacctctgcggcgatctcgacgacgacgacatcgatgaacccgtcaccgccgtccccaaggatcgccatctccctgccgccgcccctacgccgaacggcctcaacgaccacctcctccgcttcacccgcagcctccagcgccccacccaaaaccctaaccctagccccaatccgccaccgcctccgcccccagccgccgccgaagaacaagtcgagaaggtcaagctcgccggccgccgccgcctatgcaagcttgccaccaccaccaccgccactcagcgagtggatgaagaggaggcggagtgggacaaccaggacgacggtgaaagcatactcgacatcctagacgacctcaccacacgatttgactctctatccgtccagaagcccagcaccgccgcgaggtccaggacacaacagctcacccctttgccgtgcgccatcaccgtggacgacgacctagatgaccatagcccagatgatgtggatgctcacgccggtgcctcctcaccccttcaaatttctagctctgatgaagctagggctcccaccagacgctccgaggtcaagatcgaaactgatttagtctcctcagcctgtacccattatgcctgtgatgacgtccgtggcaaggggaagaacaaagggaccaccaaggatgttgggaggctaaatagggtatcaaaggcctcatcctttgttgattcttattccgattctgattatgacgactgcgaggaggaccaaggaacaagaacagattatgctgttaagcagctaagaagcaagggattcacaaggagaccacccaacaccccaacattcaggaaccatggtgtcagcgacgatgagctgggtcaggagaaggagaaccttggagctgtggagaacaatgctgaggatgttggatgggagaagacagaggacttcaagatggatccaactggaactgctgcaacatccaagccatacaagctcccaggaaagatattcaagatgcttttcgcccaccagcgcgagggcctccgatggctctgggttctgcactgcaggggaacaggaggaatcctaggggatgacatgggtcttggcaagacgatgcaggttgctgcatttttggctggactgtttcattctcgtctagtcaagagggtgctcattgttgctccaaagacacttctggcccattggacaaaggagctttcaattgttggccttaaagaaaagatcagagactactctggccccagcacaaatattcgcaattatgaactccaatatgccttcaaggagggtggtatcctcataaccacctatgacattgtcaggaacaactacaagctcataagaggcaactcctacaacaacagcaatgatgatgatgatgaggaaggaactttgtggaattacgtaattcttgatgagggacatctaataaaaaataataagacacaaagggcccaaagtttgtacgaaataccttgtgcccatcgcattgtgatcagtggaacacctattcaaaataacttgaaggaaatgtggactctgttcaatttctgttgcccagatgtcttgggtgataaacagcagttcaaaataaggtatgaaacggctatccttcgaggaaatgacaaaaatgctaccgctcgagagaagcacgtaggctcaaatgtagcaaaggaactaagagagcgaatcaagccatactttttgcggcgcctgaaaagtgaagttgtctttgatactggtgcatcagaagaaaaaacattagccaagaagaatgagctaattgtctggctgaagttaacaccatgccagaggaaactatatgaagcttttctaaatagtgagctggttcatttagcattgcagccaaaggcatcaccgttggctgcaatcacaatattgaagaaaatatgtgatcatccactgctattaactaagaaaggtgctgagggtgtgttggaaggaatgggtgaaatgttgaatgatcaagacattggaatggtggaaaaaatggccatgaaccttgcagatatggctcatgatgataatgcactggaagttggtcaggatgtctcatgcaagctatcattcatcatgtccttgttgcggaaccttgttggagaggggcatcatgttttaatattttcacagactcgtaaaatgctaaaccttattcaggaagctataatattagagggctatgcgtttttgcgcattgatggcaccaccaaggtttctgaccgggaaaggattgtgaaggacttccaagagggttgtggagctccagtttttctgctaaccacacaagttggtgggcttggacttacactcaccaaggcaactcgtgtcattgtagttgatcctgcatggaaccctagacaatcaaagtgttgatcgtgcttaccgaattggacagactaaaaatgtgattgtataccgcttgatgacatctgcgaccattgaagaaaagatatacaaattgcaggttttgaagggcgctctgttcaggacagctacggagcaaaaagagcaaacacgttacttcagcaagagtgagattcaagagctatttagtttgccacaacaaggatttgatgtttccctcacacataagcagttgcaagaagagcatggtcaacaagttgttctggatgagtccttgaggaagcatatacagtttctggagcaacaaggaatagccggtgtgagtcatcacagcctcctattctctaaaactgcaaccctgcccactctgagtgagaatgatgcactggacagcaaacctcggggcatgcccatgatgccccagcaatattacaagggatcctcatctgactatgtcgccaacggggcatcttttgcgctgaagccaaaggatgaaagtttcactgttcgaaactacattccaagtaacagaagcgcagagagtcctgaagagataaaggcaagaatcaaccggctttcacagaccctctccaacgctgtgctgttgtcgaagctaccagatggtggtgagaagataaggaggcagataaatgagctggacgagaagctgacttctgctgagaaggggctgaaggaggggggcactgaagtgatttccttggatgactgatccaagacatggagagtctgtgctcggcaaaagtaaagtgttttgaatagctttagtcactgggttgtgactagcatcaatcaagtctgctctttttgctgcatctctgggctgggtctatcgtttatgcaatacaatgctttttctgatgatgattatatgaataatataatccccagacaaagcagcaaccattacagtcagacagagatgcagaatgcttggtgggtttgcttgatcactctatagtccgtccgttcattgtataggcggctgaatcaaaatcagaggagaagggcgagcagggcgttaaagat

SEQ ID NO: 19939 - DNA, 517 bp, Zea Mays
aaatcatgcaccgaccacaaatacacgactcgaaggttgaatttctgtatcttgaaaacatcgtaggcttcgactcctttccaaagctctggggaaacaccttgtacaaactttgactaaactgattcttataagtgcttgtttagatactctagtattcaccccaataaacatattctagtattcactccaatacacatgtgtaatatacaccccagtcctggtgtaaatactagaatatcaaaacataacctaagaggtgtccagtgtaagaaattccagtgacactgcattcttaagaatataacatgttaagcttttcgcagagctgaaaccacggatcttcacactcctgaggtggccatggcggtgctcaggtgtgtgtgcctcagttgtggatgcgcagaaatcgattcatgtctgtgtttattttgatctagtagtaagggttcttgggaatatccaaaaagtctatgacgtgcctctaaagcagatgccaagctcggtcctagtctcc

SEQ ID NO: 19940 - DNA, 1355 bp, Zea Mays
cccgaacgtcatgacggcctctagcaggagcgcgtgccgctcgtggacgccgcggacgagcccgaagcccacgggacgctgcaggacaaaggcatgcatgcaaggcaaagagtgagactgagacgtggcgggcatgatgagtacgccgtacgcgtgtttgcacagatagcgcggccgcacgcagtcaattctgacttctcgtttcaatgctgacgtgctcgatcttctggtgtctcggcgtttggcactcgatcgaggcactgttttcacaaacagcttcacgatcacgagctcttttgtgaactattttttttcccaaaccctctttttttaaaaaaaatgtaatgctatcaccaccacaaagaaataaacagcttcataggtgatgagtatagtatcgtaaagaaataaataacttcacgggtgaaatagagagatgaggttgcaaaaaaagtagttttttttctagatctctcacccatttacatgtcccagtcatgcatgaggtttaagctggtaaaggtgatttctcaaaatttgagttagtagttaggcatacaaagtttgagttgtgccccggcctaataccattggtatggtcagacatattttgccaaacagacccccgagtacctttgtatgcctaactggaacctttatttataataatcaaacgtaaaatagtactgtagtatttgacatggacacgtggcgaaattaagtcgaattaccgtgccgccggagacgagcgttagcagcaacgacgcgaccacggcgccgagcatctgcgcgagccagtataccgcggcacggccgaaagagatgcgacggcccacgagcaggccgaacgtgaccgcagggttgacgtgcccacccgacgcgttgctcgctaccgccaccgcggccaccagcgccagcgtgtgcgcgatggccaccgcgagcaggccgcccggcgttgccgtgtccttgtacagcttccctgcaaaattaatcagacgaacgaaaagatcttcaagcaccgcagttcagaacagcaccgaatgcatgcgctgcgtgcatgtgaatcctgaaggtgttttgtttggatgtgtgctaaggttttcgcgcgcgcgtacagaggccgtagacggagccttcggcggcgaacacgaacatggctgtggcgacgaactccgacaccaccgcgcgagtggcgtccggcaggagcggccccgtcccggtggtgtcggcccggcgcgccgggtggcgacctggcagcatgttcgacgatactgtgcctgcctttttcccccgaagctccgaatctgatttctgcagtgttgagtgtcactctccttttcagcgccggaaatgat

SEQ ID NO: 19941 - DNA, 5495 bp, Zea Mays
gcttggtgaagaagtgggcgccatgcagctcatcgagcaactcatcgaccaccggaatagggaacttgtccttcgatgtcttagcattcagggccctgtagtcgatgcagaaccgccacgagttgtcgggcttgcggaccagcaagaccggggcagagaatggcgatgtgctggggcgaatgatcccttgggcgagcatggcgctgcactgacgctctaactcgtccttctggagctgggggtaacggtagggccgaaccgccaccggtgccgcccccggaagaagatgaatgcggtggtcgtaggggcgggcgggtggcagcccttgcggctcggcgaagaccagctcaaattgccgaagaagatcgtcgaggagcggctgtgtgggcgtgctggacaccacgcacgtagccggctgtgggggaaccgcgccgggcgcccctaggccggaccaaatgatgcggcggccccccttggtgaaggacatggacaggcggtcgcagtcccagaggatcggccccagcagccgcaggaactcgaagcccaaaatgacgtcgaaggtgccgagggtgaggccgatacagtcgatggaaaactgttcggtgcccacccgcaggtcgacgctccgcgccataccttggcacggtatgttgtcaccgttggccacctgcactttgatggtggggtgtggcgtggatggcagctgcaggcggctcatcagacccaccgacatgaagttggtggtggagccggagtcgacgagggccacaagacggtggccattgatggagacaggcagcaacatggcgtttggtgtgcgcacccctgccaatgcgtgcagcgagaccgtcggaatgatggccgcgacgcgcgagggtggctcctgctcgagcgcgatctgtaggtcagctccctcctcttggggctcgtcgtcgatgtagtcgtcgttctccaagtagaagaggcggggacacacgtgcccacgcacatagggctcatcacaattgaaacagagcccttgacgacgtcgttcctgctgctcggccggcgtaagccgacggaacggtcgcgctggggcggctgtacctgctggttgcgctgcagcggttggcggagcagtcagcggacgcggcggtgctggcagtcccgggcgagactgccggaacccgcgcgctggaggcggagtggtctgcgccgctgcacgctgctcgaaagcacgcgccaagtacatcgctgattgaaggtcctgggggtctcggatggccacatcagcccggatgtggtcggggaggccgccgacaaagagttcggtcttctgctgcgcgtcgagcttgcgcgtgtggccgagcatagcgttgaagcggtcggcgtagtcctgtaccgtcgaggtgaagggcaggcgggcaagttcggacaggcgggtgccccgaacaggcggcccaaactgaagggtacagacctccttgaagcgtccccacgttggcatgccctcgtcttgctccagggcgtaataccaagtctgcgcagcgcccttcaggtgatacgaagcgagccaagtgcggtcagtcaccagggtgcgctggccccggaagaactgctcgcattggttcaaccaatttagggggtcaacgctgccatcataggtggggaagttgatcttgtagtagcgagggggagtctgtgccgcctggctatagcccaggccagcagcgggctcgacgaccccggaggaggctgtctgggtcgtgggttcatggaagaggactccctcgacgcctccgtagaagacccccccagaggccagcgcgtgggggcttcagactgcaccaccgacgacgtgatggtcgccggagtagagtagatcggcggctgcagcacatatgacgggacttgcgacggtgatcggggccactgcattaagtgcagcggtacgccaggcgcagccccggtcatggaggatgcggcagcggcggatgttcggagagatgcggtgggcggcggcgcagatggactgggcggcagtggcatggtggtggaggcaggcagcggtgggttctgggtgccggtgatgtaggtatggatggaggagatgttcccctgcatcgcggtcatgtttccctgcatgacagccatgttccgtgaaatttcccggactacttcagcgagggaatctagggtcaggggaacagatgaggtgcctggcggcacataaccggtggacggcaccgcggctaatggcagcgacgccgacgcctgagaaagcgacgacgctgatggcgaggagggcagcggcgcggacggatcgctggacatagccgataccagattgataggaatatgatccctaccacggattggccttaggttgtatgagtgtgaggggactgggcgagggaggaaacgcccacggctgtgtttgggcgtcgtggatgctgggcgcagggaaagagggagatgggctgctgaacggaagaacacactgatgagcagtagcgcgatgaacagtagcgcgatgaacagtggcggctagggtttctcccagctcccagagggaagctggaaactataattgtttctgcttaattccatatagggtggtgcttacaattatttatactcccttctagtacttatctaatgagatcaaatccctcttttctctctaacaaatcttatcccttaatcttctaatccttatccaactaatctgcatgtgtagatccttatccaactaatttgcatgtctatctgttgcctctgctgttatccggtgctgttatccggcgcctgtagtggcagccggtcataacacctctacctcagggaccaagccttgaaccggtcgccacatgctcctcagatcaagtcaacacacgacactgggcaaataagagaaagctcccttccatagcatttataaacgaggtggttaaaaacggcactattgccatgtctgaggccataggtgtatatgaacactacagaggccagtagcaagcatacataaaaaatccatcaaaataggacagctaccaaaggaactcaaaaagccctccttaattctcagctaatggtgctgccaaatgggaaagacccttggcaccagcaatctcccatttttttctttcctcatcagcagctctaagactcatattttgttataggatttatatattttatcggggtcggctgaccccaacaaaccaccctacattcgcccctgaaaggatgtggaagtcagcaagtacatcgtctatcagctacaccgtactcaacgatatagaattatagactctcgtatccgccaccatggtatgatggaggtgttcatcacgaatggatcaacaactactataagatagaagtagttgggtctctacattgtggaacttgatataaggttccgtttggatctacctgactaaattttagtcctatcacattgaatgtttaaatgctagttagaagtattaaaaatagtctaattataaaactaattacacagataaggactaaacgataagacgagtctattaagtctaagcccattattcgctcatgtggtgctaaagtacacatttcttaatcgtggatttaattaggcttaataaatttgtctcgtcgtttagtcttcatctatgttattagttttataattagactatatttaatacttaaaattgacattcaaatatccaatgtgacatagactaaactttagtcaggcgaaccaaacacattgtaaatttcttctctcttatgctataaaaggacaaagtagatgcaacaataaaaaggttttgggctgctcagcttttcatattctagtcttactttatacatggttacatctatacatgtaccacatagacagtgtaaacctctctctaaatcataaaagacaatctatcgtgtcaacattcttattcaaagcggtcctacgtctacagtactctctctttctcggcttttggtagcttggtgcagaacaacacacgttcaaacataaaattatcgtgacattatttcaattccgctgcaactcgcgagcacagtacacatagaacatcacttatgacgaaattaacagtaaatactatcgcaatttcagcaaaaccctgccgaatcggttagagcctaagatatcgaggtcagttgtacaagttctgcgtcatcaatgtcagaggagcgacctcatcggcctactttcgcatctgattcttatttatggttactagctacaaacaaatcttcaaatccgaacgtaccccagctcaagaggttcaccctttaatcaatgctccatccaaatccaagcagcgggaagacccagcgcaactgcaactcaactagttcggagtaaagtggaggaaaccacacttcgggattcacatgtacacatacctgcagcaatcgcctcaagggaagacggaggcggggcaggagacgacggcgacggctccacggtgggtggagaaggctcctccgctggaggagtgacctggctctcgatctggcccatggagagatgcagagcgggagcgggagcgggagaaggcggcggtcacgctcgtttcttccggtaaatgctagggagaggcgaaaacgacagggcggcggagttggctcaacgctggagtcgaggcagcgaccaacctcggaaggaaacttcgacccgagttcgactagcaccggcggtccggcgcgtccccggctcccagcctgcctgccagtgccaggtgccagccatccgatcttcgcttggccacggaactctgtgggccgaacaccaatacccgaggtgggcaggtttctcaatgggccccaaattctcccgcggcttctctcttcttgtcttcccctaaacgtcgctcgccgcttttcgctatttctcggggagcgtgtgttccagttcctgccttgcaggccgccgagatggtgggaccgtgggaggcggcaaaccgatggaggacagcgtcacgcgggccacgcggctttcggtgcggcagcgatcagcgcctccgccgtcgccgtgcaccccctcgacacggttaagcactcctccagcttccagctgggctccggcagttggtggaccggctcaggccgcttctggccctgtaggtttttacagtggcattggatggtccataatgggtaaacttcctgggttgggagcacattttgtgacctatgaactgttaacagatggaagggaggacaactatgtctattattctgaggctatgttggctggcatagttgctggtgctgtagagactgttttctgcacaccatttgaacttttcaaacttcgaaagctagttagttttgtgattccttcaaaagctatgggccctgcaaatgttgttaaggatcatttccagtggttttcaactgttgctgggtatgttcttgatataacggtgtggaacaacacggcgggccttttatctgatctttctccaagcatcccgacatgttgggtgctctga

SEQ ID NO: 19942 - DNA, 3307 bp, Zea Mays
attcgaacccagtcacagagacacacttgacactactgttctcctcatcctacgtacgcactgtttcatttcagccatgcccatgagcatcccccgcgcggcgcacctccttgtgctcctctccgttctagccatctccctctcgtcgtgcggcgccgccgcagcgttgccggtgtacgacacggacggccacgagctgagcgccgacgcggactactacgtcctcccggcaccgccccgcgggagcggcggcggcggcggcgggctcaccatggcccccaagggcctgcacccgtgcccgctcttcgtcgcgcaggagacggacccgctccgcaagggcttccccgtgcgcttcgcgccgctgcagcaggaccagggtggcagcgaccgcgccgtgcgcgtctcctccgacgtcggcgtccacttcgccgccgcgacgacgtgcgtgcagaccaccgagtggcacgtctccggcgacggcgccgcgccgcggtcgggccgtcggctcgtcctcaccggcccggtcctgtcctcgagcccgaacggacgggagaaggtgttccgcgtcgagaagcacagccgcgggtacaagctggtgtggtgcgggggctccagcgcgtcgacgtcgtgccaggacctgggcgtgttcagggacgatggggaccgccgcgcgtggctcggcaccaccgagaccgaccgggctcatgccgtcgtgttccagaaggacaccaccatgcatgcttgatgcggtgcttcgtttcgtatgcgtagtgcgtagcagttgctcttgctcaactcgactctggtttacaaatagtttgccaaaatagcttaaactccgccaacagagaccgtacgtgaagctaaaaaacagctctgccggtgaattggagctatgacaaacagagtctaatacctctgttcgcctgaggttcaaactttcagcacttctctcgcgttcgtgacacactgaactggtttcgttgtcttgcagctagacaatttaggcaattaaaaaatggccacggtggaaaaaaaaatcactacccaggctcagctgcatttgaatgtccagcaactaaagcctcatgtctgcaggtccaggacccaggatgcctttctcagggtctatgggaagcacatccgcatgcgagcgtctcccatcttccactgacgcctgctgtggctggagccactcctgctgttcagtcaaagtgttagaccaacaacatttccaatgaaacagaaaataaaaacatacaactagctactgagcacagaagaaatagaccagacctcttcgtgacctttatcaggatcaggcaagtcgggagttacaatcggtggtattgcctctggatcaggcttctggaacacaaatgctgaatacaagcctgcgaaaaccagctgaaacattgagtatactgggaccttacaatccaatgcagcaaaagttagaattctaaaaaaaaggggcagacccactgctggaggctcgcacatgagtgaggtccgaggaaaggataaagcaagacaagtctcctccccgcaaatgcggagaggctgctttaaacccatgacctagtgactcagtgagacagctctcatcgttgcaccaggcctgcccttctaaaaagaaaaagaattctacaccacctaaaatgtcgtaggaacgagcaacaagcttccctcgagcatccaaaaaacttgcaccgtaaccaccaagcattggagcgaattgtgttctggatcagtcacaaccaagagtcaaatacggtctcggacatcgaacattgtttggtagtaaccatgtcgcatttactgggacagcaggcgatgaatggagtaaattgaagagatggaaataaattacaaaaagacactctacagagaaccaacagaaaaatggttgcatgaaaatagcatgctacctgttatcatcataaaactcggttaaattctggatctccacatattcaagtccagcttcccttgataatctgtttcaacacaacctagcattgtgaaaactctcatcaccctacttgcttgaatttacagaggttctaggttataatgatagcgggatatacgacaaaatgttgaaagtaaatgagagaagaacctcataagggtgggaaagtggaccaggcactgattctcaaacaccgcgtcactcgcgaatttgagttgatacttctttccaaaaaagggaaacctgcaccatatatcacacgatacatggtcaggaagtcagtgtaacaaaagtttctaggtgtatttagtatacaatttcagctcatacttctcttcctcgacttcaaaggtaatggtatagttctctgagcgaatgctatttggaacagtcttcaaacccttattatgtgaagcctcaacattcttttgatattttgtcctacagaatataaaacaaccaacttagaaagatttaagccgctacctgggctgcagctgtaaagcccagctgttcagcagcccatgcagcgcaagcaaaaagagcagccgtctgtccctggtgctacacttggttgcatccactgctggttactggtctggctgctgcagctgcttgctggctgctgccgctgcagccacagcacagctgcagccacttatccgcagcacccccaaagaacattgtttggtcaagcacattgcacactaaatttgtactggagaatttaaagtttacttgcaatgaagaataaatgctagcctatataatttacttggttggcagatggccacaaaagcttagaagataatttattttggaggagaaaaggagaagacgttaggacataagaacaaaattcacggtattgtggtgagcataccatattgtagatgaatctggagttatgccaaagaagtagcctccaggtttgagaagtgatgatacattgttcagaagcttctttgcctgttcttcattctcaaagcataactatctttcgaaaagtataaaatataaagattagcaaagctcacaagcatatcatattctacagttctagagaacaaccaactcgcctgcaagtgctgcatacagcaaaccatatctgcttggatgcccttttcctgcacttgagcttcaaaaccatcctgccatgcaattgtaacgcacaccaattgtcagctcgaaagactgctgtgccagcgccttagcgcatttgtttgtgttggaaggcatagagggagagtctacatcagaaggatccaactcgatgaattcagcagtgaaaggtttcctcctgttctcccatagctcacgggcatagttgac

SEQ ID NO: 19943 - DNA, 836 bp, Zea Mays
cttagattctcgcagtgcaatgtggtcatatttcagaatctgtcgataacacatgctattcgcagtcgatgcagataatttacttaaggaagagggttttggtgctccgttttgctccatagtaaggaagagaaggaatttgacacagctggtagttctctttgcttataagagccagtttaataatagagtctattggtggttctaactcattggacatatcatctagaatcaacaataaatacacttatataataaagctgactataagtctataagattggctcttcgattaattctttatctttttctctccatcattttgtcttgagcctttgtagtaccggactcttgcgtcagagaccatctcctctacaactaaaaatgttatatataaacatgctgagcaaaaacacaaataaaggtaaaataaggacatcagcaaaactagaacaccaccttaaaaaatcgattattatattatacttgctctaagtggcaagttaagatgtggcgaagtgcctaacgaatacctgaccaccacctggcgtaggtcggcgcccagtcattgtcatggaagagaaagagcacacacgatggaatggagaaggctcgggccacgctgtaccagtaccactcaacacagcgtttgggccggcggcgtggccgagtcggacggatgtgcacacggatgttgtgcacgagctggtggccaccgtgttggcgtgtgggtgcctgggtggttcgtcgaactcggagatgtggagagtgctgaaacgtgagcagcgtataaggccaggcagatggatgggcgtaggattttaaatcggaggaag

SEQ ID NO: 19944 - DNA, 926 bp, Zea Mays
aatcgcgtctctgcaacagctgtcctccggcctcatcctatccgcgcacgtagcgtagcggggatcgcaccgcccgccgctcaatcaccatgccgcctctcgccaccacgtacaccaagtacgagacccgccgccgagatccggacccccgcgcggccgtgctcctcgtgatcgacgtgcagggccacttcgcctcgctggccgccccgatcatgccggccatcgcgtccaccgtcgctctgtgccgcgccgcgggcgtgccggtcgtgtacacccgccacgtggacccggtcccgcgcctgcccccgctcggcgagtggtggcccggcgaccgcatcgacgccggcacgcccgcggccgagctgctcccgggggccggccgcgcccagggggacctcgtggtggagaagggcacgtacagcgccttcgtgggcacggggctggaggcgacgctgcggcggatgggcgccggggaggtgatcgtggccggcgtgatgaccaacctgtgctgcgagaccaccgcgcgggacgccttcgtcagggggttccgcgtgttcttctccgccgacgccacggccacggccagccaggacctgcaggatgccacgctcgccaacatggcgtacgggttcgcttacctcgtcgattgcaagcggctcgaggcggcgctggggaaggcggcccagtgatgaggtgtgtgcgacgttgtgaacttgtgatccagatgctctgcaccttgtatttatacctttacggttgtgcctatgcttgttgaactgcgctgctgagtttgcttgcatacaagatgcacgctggcccattggcccttgtgtctgctttcaggccttcgttggatcgatcggctatgatgcgaatgtatagaacctatgtatacgtaaaaaagaaaaagaaaaacatagtcacaa

SEQ ID NO: 19945 - DNA, 2460 bp, Zea Mays
ctgattttaggtggtaccagatttattctatgataaaaacctccttaagtcaaccacactgaatgttgaactttttagatggcacaaagttcaaatacagaacaaatggttgtctgcacatattgaggctgagacaaacttgaacgtaataaagtgagagactgaaagaaagcaagaaccatacatcagtgatcaatcagtgtgacgaactgataagctgttgctctattactagaccaaaactttggaacaccatcacaaagtagtgtgacggagacttacagctgttcataggacagatcgataagcatcatcttccctgtaccgacaccaccgtccaccatagaggtaaagcccctccactggagcataggtagaaggctgagtaatgagacgggaccatagccatcgactccacaacactgatggaagctatccaggaaatgaatctttggtcaaagaccagaacaacacctgaaagctatcgccatttactagctctcctgatgttattctcctctcccattccaccatcggaccacctcttccaatatagtatcagtactacccactaacaaacacaatggcatccccacaatctgaatcaactaattcttcatcgtcggcaagcttcgaggcaaggatatccagtacggtagcaatgcctcccaactcaggccccaggtcctgcccggcgacgaactcgcgcaccacgttgtccacctcaatcatgctgcacccgggcgtcttcctcgtgctccggctccgtatctccttcctcgtactcgccacttcgccccatcggcctgcagcgccgtacacgttggccagcatgacgagattgcccacgtcccctggctccagctcgacgagccgctcggccgccaccacggctgtttcgacgtcgccatggctgcggcaagcgctgagcagcgacccccatatcttgccatctggagggaccggcatgcctcgtatggtgtcgagcgcgcgttggattcgccctgaccggccgaggaggtcgacgacgcagccatagtgctcgacgccgggttccacaccataatcttccttcatttgatccaagtagcgcaggccttcgtccacgaggcccgcgtgggagcaggccgacaagagccccacgaatgtgatgccatttggcatcacccttccttctctatccatcacctcaaacaacctgacagcctcgcgtgctctcccgtgtgccgcgaggccgccgatcgctgtgctccatgagatgacgtccttctcggacatgccgtggaacagctgcagcgcttcctcgatgcacccgcacttcgcgtacatctccatcagcgcgttgcaaatgtatacctttcccagcatgccgtgcttgctgcagtaagcatatatccaccggccaagctccagagcgccaagctgggcacaggccggcagcaccgcgacgatgctcacgtcatctggttcgaatccttccatttgcatcagcctgaacacctctactgcacctgtgaagtccccaacggcggtgtatccggacaccaaggcggtccaggaaaccacggtcttgtcgggcatcgaatagaacaactcccgtgccctcctcatctgccccattctcgcgtgcgcggagatgagcgtgttccaggagaccacgtccttctcccgcattccatcgaacgccttgcgtgcggtcgacagatccccgcagcgcgtgtacatctcgatcagggagttctgtacgacagcgtgtgactcgcacccggacctcgccacgtgcgcgtgcacctgcctgccgagccgagaagcagcgagggcgccgcaggccttgaggaggaacgggtacgtgaaccggtcgccgacggagaagccagcagtcgaagggtgcgggaggcacctaagcatgcggacgtagacctcgaccgcgtcgcggtggaggtggttctgcgcgtaggccttgatcatggcgttgtggaggtggaggttcggggcggggatctgggcgaaaacccgcgcggcgtgcgcggcgcggccgtgggcgttgcagatgtgcacgatctgggtggcaacgtagctgctctgcgagaggcacaaccgcacggcgaggccgtgcgctcggaggaggtcccggaaagtggcgcaggtgcggagcctcgcgatgatcgcgtcctccagctgccacagcgaccgcgccgccatggcatcaacagccaacagcggcgaggtgttccacgaatcggccggcgggtgtgttgtgctcaaatctatccttcggctaagtgccgcctgatagaggctttgcggtggctagttaccccgtcgatgaagccatgagcccatgaaggtacctcgagcataaatactcgtcgtgtaggtgatgcaatggcgtcgttaacgtaccgctgcattttgtaccgaacgggaaaatccaattgaaaaactgatgcatggttccac

SEQ ID NO: 19946 - DNA, 519 bp, Zea Mays
ctgctcctgattacagcctgcatgctagctagatggtggtagccagaagaagaagacttccagccaaaggtggtcaaaacttcttgatctaaagaaaaccctggataaagcgcctaagtgaattacttagtatgcatcagtcaactgccaatgctgcatgcagagcaagagaatagtgctgtatcatgatgctggaatggaagtggcgacaacttgaacttgttcaaccaagatggaaggttggtggtttgtaactcattggctgttggctatccttttcttttgaacagaagagagaggattgaccatcttatctgaatggtatatacaatgcgactccatgcccagggactggtcatgttgagaacctagatacaggatcatacattataagcacatcatcagagaataaatgtgtgtgtgaacataactactatttgactgtttgtataaagcatttcatctttttttaaagttttaatataaaacatttcttgttggcacataagcattcatcat

SEQ ID NO: 19947 - DNA, 2393 bp, Zea Mays
ccgggaagggagcacacagttcgccgcacgcgcgcacctccgcggtccgcctttctcgcgccgtccggacctgacctgatggccactgcaacgcaccacagcgacgccccgggcctgaacggggccgagggcatggagatgatggcagaggccaacgagctccgccggcggggcaagcccagcgacgaccgcacggcgtcgtatggggccggcgcggaggaggacgaggcggcggccgcggcggcgccgtcgtcgtcgtccgtggagcgcgcgttcgcggaccagcccgtgccgtcgtggcgggagcagctgacgctgcgcgccttcgtcgtcagcttcttcctggccgtcatgttcagcgtcatcgtgatgaagctcaacctcaccacggggatcattccgtcgctcaacatctccgctgggctcctcggattcttcttcgtccgcctctggaccaaggccatcgagagcgtgggcttgctccggcagcccttcacgcgccaggagaacaccgtcatccagacctgcgtcgtcgcctcctacggcctctcgttcagcgggggctttggtaactacctattagccatgagtgataaaattgctgccatggtaactgaggcaaacaatgctcaaaatataaagaatccacaacttggatggataatcggtttcctgttccttgttagcttcatcggactcttcggtcttgtgccactgagaaagattatgatcgttgactacaagctgacttatcccagtggcactgccacagcctaccttataaacggctttcatacgccccagggtgccaagctcgcacggaagcaagtaaagaagctgggcacgttcttcgtccttagcttcgtttggggtttcttccagtggttctatactgctaacccggacgaatgtggattccaaaaatttccatcactaggcctgcaagctttcgacaacaagtttttctttgatttctctcctacgtatgttggggtgggaatgatttgctcacatattgtcaacgtatccattctcctgggagctatcctctcatggggaataatgtggccgctcatagccaagaaaaagggagtttggttctccgctgatctcgacgacaacagtcttcacggaatgcaaggtcttcatagccattgccttgattctcggggatggtctatacaacttcctgaagatattcatcctcaccgtggtctcgttaagatctcaagtaagaaaagctaacgctagcacacttcccatctctgacgatggcacagttaccagcaccgcacctacctcatacgacgaagagcggcgcaacgaacacttcctcaaagatcaaattccttggtacgctgcacttggaggctatgtcgccattgccgccatatctatcggtactgtcccacaaatattcccacagctgaagtggtaccacatcttggtggcctacatttttgctcctatactcgccttctgcaatgcctacggaaatggcctcacggactggtcgctggtcaccacctacggcaagctcgcgatcttcgcattcggtgcatgggtgggcgcctccaatggaggcgtccttgcaggcctggctgcctgtggcgtgatgatgaacattgtgggcaccgctgctgacctgatgggggacttcaaaaccgggtacctgacactagcctcaccgaggtcgatgttcatcagccaggtcatcggcacggcgatgggttgcgtcattgcgccctgcgtgttctggctcttctacaaggccttcggcaacatcggcgtcgctggcagcgagtaccctgcgccaaacgccgttgtcttccggagcatggcagtgctcggcgtggatggcttctcctcgcttcccgagaactgcctcactctctgctacgtgttcttcgctgcagcgatcgtcatcaacctgatcagggacctggtgcccaagaaggtgtcgaggttcatcccgatcccgatggcgatggcgatacctttctacatcggtgcgtacttcgccgtggacatgttcgttggtacagtgatactgttcgtgtggcaaaggctggacagagccaaagcagacacgttcgcgcctgcgattgcttccggcatgatctgtggtgatgggatatgggttctacctcagtcagtgcttgctcttgccaaggtgaagcctcccatctgcatgaagtttctgtcgagggcgatgaatgacaaagtggatgtttttcttggatcgtgatcatagaacgttcggtggaaatggaagtgtaaatgaaacggaacaattgtgacttactgtctgtaattagcaaaacgtatttcccgtggtaaataaatccgtattaaataccagttgagtgaacaattatattattcttattgat

SEQ ID NO: 19948 - DNA, 2139 bp, Zea Mays
ccgggaagggagcacacagttcgccgcacgcgcgcacctccgcggtccgcctttctcgcgccgtccggacctgacctgatggccactgcaacgcaccacagcgacgccccgggcctgaacggggccgagggcatggagatgatggcagaggccaacgagctccgccggcggggcaagcccagcgacgaccgcacggcgtcgtatggggccggcgcggaggaggacgaggcggcggccgcggcggcgccgtcgtcgtcgtccgtggagcgcgcgttcgcggaccagcccgtgccgtcgtggcgggagcagctgacgctgcgcgccttcgtcgtcagcttcttcctggccgtcatgttcagcgtcatcgtgatgaagctcaacctcaccacggggatcattccgtcgctcaacatctccgctgggctcctcggattcttcttcgtccgcctctggaccaaggccatcgagagcgtgggcttgctccggcagcccttcacgcgccaggagaacaccgtcatccagacctgcgtcgtcgcctcctacggcctctcgttcagcggaagcaagtaaagaagctgggcacgttcttcgtccttagcttcgtttggggtttcttccagtggttctatactgctaacccggacgaatgtggattccaaaaatttccatcactaggcctgcaagctttcgacaacaagtttttctttgatttctctcctacgtatgttggggtgggaatgatttgctcacatattgtcaacgtatccattctcctgggagctatcctctcatggggaataatgtggccgctcatagccaagaaaaagggagtttggttctccgctgatctcgacgacaacagtcttcacggaatgcaaggttaccgggtcttcatagccattgccttgattctcggggatggtctatacaacttcctgaagatattcatcctcaccgtggtctcgttaagatctcaagtaagaaaagctaacgctagcacacttcccatctctgacgatggcacagttaccagcaccgcacctacctcatacgacgaagagcggcgcaacgaacacttcctcaaagatcaaattccttggtacgctgcacttggaggctatgtcgccattgccgccatatctatcggtactgtcccacaaatattcccacagctgaagtggtaccacatcttggtggcctacatttttgctcctatactcgccttctgcaatgcctacggaaatggcctcacggactggtcgctggtcaccacctacggcaagctcgcgatcttcgcattcggtgcatgggtgggcgcctccaatggaggcgtccttgcaggcctggctgcctgtggcgtgatgatgaacattgtgggcaccgctgctgacctgatgggggacttcaaaaccgggtacctgacactagcctcaccgaggtcgatgttcatcagccaggtcatcggcacggcgatgggttgcgtcattgcgccctgcgtgttctggctcttctacaaggccttcggcaacatcggcgtcgctggcagcgagtaccctgcgccaaacgccgttgtcttccggagcatggcagtgctcggcgtggatggcttctcctcgcttcccgagaactgcctcactctctgctacgtgttcttcgctgcagcgatcgtcatcaacctgatcagggacctggtgcccaagaaggtgtcgaggttcatcccgatcccgatggcgatggcgatacctttctacatcggtgcgtacttcgccgtggacatgttcgttggtacagtgatactgttcgtgtggcaaaggctggacagagccaaagcagacacgttcgcgcctgcgattgcttccggcatgatctgtggtgatgggatatgggttctacctcagtcagtgcttgctcttgccaaggtgaagcctcccatctgcatgaagtttctgtcgagggcgatgaatgacaaagtggatgtttttcttggatcgtgatcatagaacgttcggtggaaatggaagtgtaaatgaaacggaacaattgtgacttactgtctgtaattagcaaaacgtatttcccgtggtaaataaatccgtattaaataccagttgagtgaacaattatattattcttattgat

SEQ ID NO: 19949 - DNA, 1572 bp, Zea Mays
ggaaaacgctcaaaccggcaaaccctaatccccatcccccagccgacagccgccgagcaaaccggctcctccggtcggtcatccactcatcctcatcccctggcccctgcccatccgatccgatcggtcatcccctacccctacctgatcggatcccctgctcttccgccgagcaccaccaggcagcaggctgcagccgtcgagcaccagcaggagcacggccaggaggacgacgcccgcatcctgcctcttctctgctgctggagcttctgctgccaggagcacggccagaaggacgacgcccctgctgctgccggtgagcggttgctcttctatggagacttccaaagaacaggcttccaaggactatgctggtttcgagaagaaagttaagaggacaatatatattgaccacctttctcctcaagtaaaggaatcggccatcaaagctgctcttgcacaatgtgcaaatgttgtccatgtggagttcatcgtcaattacacgatcccatataaagatattgcttctgctgcattggtggaattggatgatgacgtgcaggctaaggctgctgtagaattgatgaatgatttcccgttcataattgggggaatgccaaggcctgtaaaagctatccatgccaaggctgagatgtttcgtgatcgccctccttgccctggccttcgaaaagatttctgctgggtaaaacaaggagataaggactatgaagcgatgcagaaattgaaaaaccttgcaaagaggcaggaatctgagaacatggccctcatacagaaaatcttgaaagatgagaaggaactggcgactcggcagcaggaggtgcttgatggaaactgcaagaagtacgacatgctggaagctctagtgcagaagggagacatcactaaccttgctcaacaatacggagtgaacttgaacgactgatgagtcattcgtgtctttttcccccttccccttggagcgatggcgcaactggtgtgatgatgatggaataggatagcatgccatagttttggtccggtatctggaccctccctctggtgtaaagactatcccaacttaggcttgggcttttcagccttctttggctctccaaaaaatctaaattagctggctctgagcctctgactttctgatcgatccaagctagctggctagctacaggttgtgtatatgaatcttgcaggggtgctgacgacgttgcaggaagggtgtagtggcccaaggaagaagagcagcggcagaggaggaggccgaccacgacgacaaggagcatgagtcggtggtggggtcggtgggattcttctccaacctggaagaactgctggtgttcaaccccagggccattctgtcctgctttgttgtcgtccacaaggcctagcttgagctgaactagtagtagtgtatggctacatgtaaggatgtaatatggtttgaaaaatattcgtccggatccggattcgaagatggtgaacaatgatttggatggaatttttggatatccgaatttttttggatattgaatcacacgagaaatcactttaagtatataa

SEQ ID NO: 19950 - DNA, 2408 bp, Zea Mays
ggaaaacgctcaaaccggcaaaccctaatccccatcccccagccgacagccgccgagcaaaccggctcctccggtcggtcatccactcatcctcatcccctggcccctgcccatccgatccgatcggtcatcccctacccctacctgatcggatcccctgctcttccgccgagcaccaccaggcagcaggctgcagccgtcgagcaccagcaggagcacggccaggaggacgacgcccgcatcctgcctcttctctgctgctggagcttctgctgccaggagcacggccagaaggacgacgcccctgctgctgccggtgagcggtgatctgctgcgcccccatcctgcctcttctcctccctctcggcctcgcctcgatctgctgctggtaatgtcctttatgaggtactacaagattagaaaatagaaaggtgtcgactgtgactcttgataattgcaccaccaatgatagtattatgagttctatgcaagataagttgcccctcttatccctcatgctagatggtaaattgttacacatgcgttgtgtggcacacatcattaatcttattgtgaaagatggaatgaccgttatggataaaggtattaaaaaggtacgcaatagtgttgcattttggtgtgccacgccaaaaagacatgagcgttcgcacaactgctcaaatgaatgttaaatatgataaaaggatagctctagattgtaaaacaagatggaattcaacttatcttattgttgaattgggaagaaatttgattaattatgttattcaattgctgaaaattgttctttgttatatccgatggatatccaatggatatccgaaacccgatgggcatggatatggatatgaatttctaaccgcgggtatagtcgcgggcagatattatctatgaccatggatatgactgcgggcggatattttcaatatccgatctgaatccgacccgttgccatccctagtgcggtccgctcgccgtacccttcttctgcttgagcagcctgaggtcctgagcggcgtgcggcgcttctccaaatctcccctcctctcgactcacgttcctgcgttcgaaaccctaattccgtccgaggcggcagcggcggaccggcagctccccgctcggcttgtattgggcggctgtcgcgctgcagcagcaggggcatcgtcgcgctcgcaccaaccgaagacggcgtcggcctccacgcggcaccgacgaccgacccacagtcccaagtccaacgaggaggccggagcgctgaacagccgtctacatcctcctcccgaaggttgctcttctatggagacttccaaagaacaggcttccaaggactatgctggtttcgagaagaaagttaagaggacaatatatattgaccacctttctcctcaagtaaaggaatcggccatcaaagctgctcttgcacaatgtgcaaatgttgtccatgtggagttcatcgtcaattacacgatcccatataaagatattgcttctgctgcattggtggaattggatgatgacgtgcaggctaaggctgctgtagaattgatgaatgatttcccgttcataattgggggaatgccaaggcctgtaaaagctatccatgccaaggctgagatgtttcgtgatcgccctccttgccctggccttcgaaaagatttctgctgggtaaaacaaggagataaggactatgaagcgatgcagaaattgaaaaaccttgcaaagaggcaggaatctgagaacatggccctcatacagaaaatcttgaaagatgagaaggaactggcgactcggcagcaggaggtgcttgatggaaactgcaagaagtacgacatgctggaagctctagtgcagaagggagacatcactaaccttgctcaacaatacggagtgaacttgaacgactgatgagtcattcgtgtctttttcccccttccccttggagcgatggcgcaactggtgtgatgatgatggaataggatagcatgccatagttttggtccggtatctggaccctccctctggtgggtgctgacgacgttgcaggaagggtgtagtggcccaaggaagaagagcagcggcagaggaggaggccgaccacgacgacaaggagcatgagtcggtggtggggtcggtgggattcttctccaacctggaagaactgctggtgttcaaccccagggccattctgtcctgctttgttgtcgtccacaaggcctagcttgagctgaactagtagtagtgtatggctacatgtaaggatgtaatatggtttgaaaaatattcgtccggatccggattcgaagatggtgaacaatgatttggatggaatttttggatatccgaatttttttggatattgaatcacacgagaaatcactttaagtatataa

SEQ ID NO: 19951 - DNA, 1284 bp, Zea Mays
ggaaaacgctcaaaccggcaaaccctaatccccatcccccagccgacagccgccgagcaaaccggctcctccggtcggtcatccactcatcctcatcccctggcccctgcccatccgatccgatcggtcatcccctacccctacctgatcggatcccctgctcttccgccgagcaccaccaggcagcaggctgcagccgtcgagcaccagcaggagcacggccaggaggacgacgcccgcatcctgcctcttctctgctgctggagcttctgctgccaggagcacggccagaaggacgacgcccctgctgctgccgcggcggaccggcagctccccgctcggcttgtattgggcggctgtcgcgctgcagcagcaggggcatcgtcgcgctcgcaccaaccgaagacggcgtcggcctccacgcggcaccgacgaccgacccacagtcccaagtccaacgaggaggccggagcgctgaacagccgtctacatcctcctcccgaagaaaatcttgaaagatgagaaggaactggcgactcggcagcaggaggtgcttgatggaaactgcaagaagtacgacatgctggaagctctagtgcagaagggagacatcactaaccttgctcaacaatacggagtgaacttgaacgactgatgagtcattcgtgtctttttcccccttccccttggagcgatggcgcaactggtgtgatgatgatggaataggatagcatgccatagttttggtccggtatctggaccctccctctggtgtaaagactatcccaacttaggcttgggcttttcagccttctttggctctccaaaaaatctaaattagctggctctgagcctctgactttctgatcgatccaagctagctggctagctacaggttgtgtatatgaatcttgcaggggtgctgacgacgttgcaggaagggtgtagtggcccaaggaagaagagcagcggcagaggaggaggccgaccacgacgacaaggagcatgagtcggtggtggggtcggtgggattcttctccaacctggaagaactgctggtgttcaaccccagggccattctgtcctgctttgttgtcgtccacaaggcctagcttgagctgaactagtagtagtgtatggctacatgtaaggatgtaatatggtttgaaaaatattcgtccggatccggattcgaagatggtgaacaatgatttggatggaatttttggatatccgaatttttttggatattgaatcacacgagaaatcactttaagtatataa

SEQ ID NO: 19952 - DNA, 398 bp, Zea Mays
cgaacacgtcggaggggctctgtatgaaattcaccgacgagcagagcagtagggccacgatcccggcgggcatgcgcatttggttgccgcttgccggtgcacggggccaagacggaagaataaggtcgcgacgtgccgtgctcacgtccccgtcaagatcgatcttgggttcccacaagaactgtggacggatggaacagcaaggaagaagcagcaagagccaccaggaagctcactgagtgcattatatatagccggtgtcgtcgctaccgatgccgggcccgagaatcttagtttgatcctattaaagctgtctcaagcatattgtgcatatgatactattttatattgtatactacactatttatagtaaatttttaaataaaaaataagatgat

SEQ ID NO: 19953 - DNA, 1432 bp, Zea Mays
gtttggagcggcataagtttgaagtccaccaagggtccaatgctcattactatcgttccaccagtacttgcatcacgtctgaagttctcccctcgccgagtagccgcttcgcgttcgtcggcggcaaccaccagtccaccaccacgatggatatgtttgctgagctgcgatccaacgtgatgaggcactcatctctggaaggatcgaataatgtgctagttaaatttgaacaaaatgagcgtgtggctgcagctaggaaaggtggagatgcaagttagttggacagcgaatcacagccgaaacgatctgaaaatgttgtttttgatgtcaatgacaatatgacctcaaacatgtccaagaaagaaaaaggtagggaccatgacgaagcagcaaactgtgagaactctgcagttagcacaagcagatatcggaatggtcatgaagattttccgcgctaagagagattggaagacaggttggaaaaatgaagattgtatcgaggacattgctgtatgtgttggttccgatgatgaagagggttcaacagaagaaggtgcaggtcgaccctaaggatcaagaagactttgacagggcactgaaagccattcaagcttggagtcacgtaagctgactactgaagcagcggacaaaagatgtgtgggaatccggtggtgttagcgaggtgtgcattcaaggtgcttgtgaaggaaggacataagcagcagacaaagcaaatgcccatccgggggggactgccccactggtgccagagcaacagaatgctgctgagctcgaggagaagcagaacatgaagcggaaaattcttggatacaacgaaaggtaggaagaagaagaagaactgaacggagcgttcgccaggaagtgggaacggctggtgtcaaggaggaaggactgacgagcaccctgctggtcgcgttatctgggacggcccaaacagaggtggtggtgtacagtgcagcacagcggcactacttgggttgctggtgggttcttccgtggctatggaagggaggtgagctgatgccactgcgttcatggtttggtttggtaatggtttgccccaggaaagagccacctcagtatcgttccatgaacgtatttgcatcaggagttgtgcgacgtgagaacggtttgcatcaggagttggctcgtggtatgtggaactagtttgtttatgttgctatgcttgtacacaggaccgttttcactactacctcagatcagatgtcaggatgcttatggcgcgcatgatctgagcacgagaattttcgtacaattttcttcttcagatgtaaagtctctccttcgctgccctgcttactcatattatttacgctgcacatgctcctggtgcctcctattaccatgtttatgctttcaacactccatgattattcttcccccccccccc

SEQ ID NO: 19954 - DNA, 1617 bp, Zea Mays
actatcgttccaccagtacttgcatcacgtctgaagttctcccctcgccgagtagccgcttcgcgttcgtcggcggcaaccaccagtccaccaccacgatggtaagcatccgcttccacgtctcgtgggctaattgatagaggtccggcgccggtttctacgcgtcctcaggtctcagaatgcagcgccattctgacagcttttccccgctaggttgaggcgctcccccaaacggatatgtttgctgagctgcgatccaacgtgatgaggcactcatctctggaaggatcgaataatgtgctagttaaatttgaacaaaatgagcgtgtggctgcagctaggaaaggtggagatgcaagttagttggacagcgaatcacagccgaaacgatctgaaaatgttgtttttgatgtcaatgacaatatgacctcaaacatgtccaagaaagaaaaaggtagggaccatgacgaagcagcaaactgtgagaactctgcagttagcacaagcagatatcggaatggtcatgaagattttccgcgctaagagagattggaagacaggttggaaaaatgaagattgtatcgaggacattgctgtatgtgttggttccgatgatgaagagggttcaacagaagaaggtgcaggtcgaccctaaggatcaagaagactttgacagggcactgaaagccattcaagcttggagtcacgtaagctgactactgaagcagcggacaaaagatgtgtgggaatccggtggtgttagcgaggtgtgcattcaaggtgcttgtgaaggaaggacataagcagcagacaaagcaaatgcccatccgggggggactgccccactggtgccagagcaacagaatgctgctgagctcgaggagaagcagaacatgaagcggaaaattcttggatacaacgaaaggtaggaagaagaagaagaactgaacggagcgttcgccaggaagtgggaacggctggtgtcaaggaggaaggactgacgagcaccctgctggtcgcgttatctgggacggcccaaacagaggtggtggtgtacagtgcagcacagcggcactacttgggttgctggtgggttcttccgtggctatggaagggaggtgagctgatgccactgcgttcatggtttggtttggtaatggtttgccccaggaaagagccacctcagtatcgttccatgaacgtatttgcatcaggagttgtgcgacgtgagaacggtttgcatcaggagttggctcgtggtatgtggaactagtttgtttatgttgctatgcttgtacacaggaccgttttcactactacctcagatcaggtaatctcgtatccactagctcctcaaccgatgccttgcagtgcaaccctggacccggcgaccttgaacagttagttgactctcatgtttgctctgtcagatgtcaggatgcttatggcgcgcatgatctgagcacgagaattttcgtacaattttcttcttcagatgtaaagtctctccttcgctgccctgcttactcatattatttacgctgcacatgctcctggtgcctcctattaccatgtttatgctttcaacactccatgattattcttcccccccccccc

SEQ ID NO: 19955 - DNA, 2717 bp, Zea Mays
atggaggtgagagtgtgggcactgaagaggggtgcaaagtatcgcatgaagctgaagccgaaagccgagctagaagctgaagcattacacaaaatcagaagtgctggtccgagaaaccgcaatacaatttctcaagctgagactggaagtgcaaaacagagaaaaaggagttgggattttaaaaatcatgagcgtgttgctttcatggcatgaccacacgagggagctgcaacggtaccaaccaagaagggaaaggtgcagacgagggggaacctaagctagaaaccaatagtggcaattattgttcggaggccatcgccgctggtgggcggtggcttccccttcccctgtattagcagcgaggaggcagcagctgaagctctcgtctctgcctctccggacctccggtgaactccaacagagaccacctcctccatccgtcggtcatccatctgtgattccttttgcgtgtgcaagttgttaaatcggcacacggcctccgcttttggagtggagaggggcatatacggtttactggtgcgcccggggccgccgcttttcccgctggcctctccccggccgtcccattggagcgcgcaaagctgggcggcaccatttaaagaagcaaactgcactccaccattagcagcaccaaggcaccaccaccaagcgcaccgccacgccacacgatctataacgcgcaggcaggcgaggatcagaccggccggagcttgccttctccgttggggttcctgcttgccgcggcgcgagaacagatatattggatcggatttgtgccgggttcttggagcagtaggcaccaaactggtccaggttgggcaaaaatgcagtttaaccagtagctaacggagctctctcatcttgtactgtggcatttcttaagttgtctggaagctgaatctccaaggctggaagatccaacatctgttcttgaaaatttactgtacctgcaaatggcagacgatcctaacatgaattttggggcattctcccagtcactctgcaaccagcatgtagtttcatttcagacaagcgtagccactagcggctcaggaggcatgccaacatacctggattgttccactgggatggatgccagcgtggggatgctgaccacaccttcagtggttgtttccactggttcatctaatatgccagcagattccgggcagagcctcaaatatggagggccactggctgcggattggacacaggtcgagcttgaaattctgagagatggcatggagaaatatgttcatgaacaaggcatcatgaagtatataaagatagcagcatcgttaccgaacaagacagtaagagatgtcgcaatgaggtgccagtgggtagggaagaaagtaaatacaagacgaaggaaaccccaagaacaccatactgggagaaatacaaaagaaagaaaggataaatttgtagagcctgcgctgtggggaacaaatcatcctcttcaaacaggcatgacagcctcttcatttgtgccgcataatggccaaaacgctatgtttatatctggaggttggtaggtcacttgattacatgagtatcatgtctaattgtttgcttccatctatcttctttgtttcttgttatatgctgttaactgtctcgtgcaattatcaatatcatgatccggcatttgaattttttgcatttgagaggatatataaatactgctgccaatactagagtgactgaactacttcattttattaatgactccattgccaagtttatcgcagcctcagagatagatcgtccagtgctgcatctgctggaggaaaataataggcttcttaatcaaatcgaaacaaatattcagagatttcagcctcataacaacatcgatctcttccatcgggcaagaaggaacattaatgatcttgtacaaatcacgacccaactgcctgggctgaggaccaagatgcctccacttactgtggcaatagatgaaaatcttgctagcttcgtgcttcctggcattacaatggatcaagttcttggaagcaacgatttgaaggaggagccaagaggatggtagatccactgccagcatgtttcagtttattggtagatggatggaccatatggagaactactgcttcattttgcacaccaagtggcggtgaatagggtcaccattcaccaaggaccccctgctttctctatctgaaagcgaaaggagaggtggatgaaaccgttcagctgccctgcagctacccttagacgttggtggctacacagcgagggttttaggaactgcagtttttgtggccttgctgcacctgtaaaaaactgtgattctttctggtttccccttcagacagtagggtaaatagatgtagcggaggaagctcacaagaactagctaaatagttctctctagaagaaaaaaaatgtcgctacatagcaagaaggatcctttttgcctgtcgccatttgctgctagttcttccttcatgtgaacgtgatctaagttcctagttctctcttatccgtgctccgcctttgtatccacgaactggaaatatagatttctgagtatcctacgtgatcttggagaaaatctcgtcgagagcggagacgatgttgccgtagtgctcctgcacctggagcgcgtccttgtctctggcggcgtaatccagctgcggtcaagagcagaacacacgatgagcgttgagcaa

SEQ ID NO: 19956 - DNA, 2777 bp, Zea Mays
atggaggtgagagtgtgggcactgaagaggggtgcaaagtatcgcatgaagctgaagccgaaagccgagctagaagctgaagcattacacaaaatcagaagtgctggtccgagaaaccgcaatacaatttctcaagctgagactggaagtgcaaaacagagaaaaaggagttgggattttaaaaatcatgagcgtgttgctttcatggcatgaccacacgagggagctgcaacggtaccaaccaagaagggaaaggtgcagacgagggggaacctaagctagaaaccaatagtggcaattattgttcggaggccatcgccgctggtgggcggtggcttccccttcccctgtattagcagcgaggaggcagcagctgaagctctcgtctctgcctctccggacctccggtgaactccaacagagaccacctcctccatccgtcggtcatccatctgtgattccttttgcgtgtgcaagttgttaaatcggcacacggcctccgcttttggagtggagaggggcatatacggtttactggtgcgcccggggccgccgcttttcccgctggcctctccccggccgtcccattggagcgcgcaaagctgggcggcaccatttaaagaagcaaactgcactccaccattagcagcaccaaggcaccaccaccaagcgcaccgccacgccacacgatctataacgcgcaggcaggcgaggatcagaccggccggagcttgccttctccgttggggttcctgcttgccgcggcgcgagaacagatatattggatcggatttgtgccgggttcttggagcagtaggcaccaaactggtccaggttgggcaaaaatgcagtttaaccagtagctaacggagctctctcatcttgtactgtggcatttcttaagttgtctggaagctgaatctccaaggctggaagatccaacatctgttcttgaaaatttactgtacctgcaaatggcagacgatcctaacatgaattttggggcattctcccagtcactctgcaaccagcatgtagtttcatttcagacaagcgtagccactagcggctcaggaggcatgccaacatacctggattgttccactgggatggatgccagcgtggggatgctgaccacaccttcagtggttgtttccactggttcatctaatatgccagcagattccgggcagagcctcaaatatggagggccactggctgcggattggacacaggtcgagcttgaaattctgagagatggcatggagaaatatgttcatgaacaaggcatcatgaagtatataaagatagcagcatcgttaccgaacaagacagtaagagatgtcgcaatgaggtgccagtgggtagggaagaaagtaaatacaagacgaaggaaaccccaagaacaccatactgggagaaatacaaaagaaagaaaggataaatttgtagagcctgcgctgtggggaacaaatcatcctcttcaaacaggcatgacagcctcttcatttgtgccgcataatggccaaaacgctatgtttatatctggaggttggtaggtcacttgattacatgagtatcatgtctaattgtttgcttccatctatcttctttgtttcttgttatatgctgttaactgtctcgtgcaattatcaatatcatgatccggcatttgaattttttgcatttgagaggatatataaatactgctgccaatactagagtgactgaactacttcattttattaatgactccattgccaagtttatcgcaggtaggcaccccaccggagcttgatatttaatatataatcataatgcatctgtttttacttcctcagagatagatcgtccagtgctgcatctgctggaggaaaataataggcttcttaatcaaatcgaaacaaatattcagagatttcagcctcataacaacatcgatctcttccatcgggcaagaaggaacattaatgatcttgtacaaatcacgacccaactgcctgggctgaggaccaagatgcctccacttactgtggcaatagatgaaaatcttgctagcttcgtgcttcctggcattacaatggatcaagttcttggaagcaacgatttgaaggaggagccaagaggatggtagatccactgccagcatgtttcagtttattggtagatggatggaccatatggagaactactgcttcattttgcacaccaagtggcggtgaatagggtcaccattcaccaaggaccccctgctttctctatctgaaagcgaaaggagaggtggatgaaaccgttcagctgccctgcagctacccttagacgttggtggctacacagcgagggttttaggaactgcagtttttgtggccttgctgcacctgtaaaaaactgtgattctttctggtttccccttcagacagtagggtaaatagatgtagcggaggaagctcacaagaactagctaaatagttctctctagaagaaaaaaaatgtcgctacatagcaagaaggatcctttttgcctgtcgccatttgctgctagttcttccttcatgtgaacgtgatctaagttcctagttctctcttatccgtgctccgcctttgtatccacgaactggaaatatagatttctgagtatcctacgtgatcttggagaaaatctcgtcgagagcggagacgatgttgccgtagtgctcctgcacctggagcgcgtccttgtctctggcggcgtaatccagctgcggtcaagagcagaacacacgatgagcgttgagcaa

SEQ ID NO: 19957 - DNA, 2718 bp, Zea Mays
atggaggtgagagtgtgggcactgaagaggggtgcaaagtatcgcatgaagctgaagccgaaagccgagctagaagctgaagcattacacaaaatcagaagtgctggtccgagaaaccgcaatacaatttctcaagctgagactggaagtgcaaaacagagaaaaaggagttgggattttaaaaatcatgagcgtgttgctttcatggcatgaccacacgagggagctgcaacggtaccaaccaagaagggaaaggtgcagacgagggggaacctaagctagaaaccaatagtggcaattattgttcggaggccatcgccgctggtgggcggtggcttccccttcccctgtattagcagcgaggaggcagcagctgaagctctcgtctctgcctctccggacctccggtgaactccaacagagaccacctcctccatccgtcggtcatccatctgtgattccttttgcgtgtgcaagttgttaaatcggcacacggcctccgcttttggagtggagaggggcatatacggtttactggtgcgcccggggccgccgcttttcccgctggcctctccccggccgtcccattggagcgcgcaaagctgggcggcaccatttaaagaagcaaactgcactccaccattagcagcaccaaggcaccaccaccaagcgcaccgccacgccacacgatctataacgcgcaggcaggcgaggatcagaccggccggagcttgccttctccgttggggttcctgcttgccgcggcgcgagaacagatatattggatcggatttgtgccgggttcttggagcagtaggcaccaaactggtccaggttgggcaaaaatgcagtttaaccagtagctaacggagctctctcatcttgtactgtggcatttcttaagttgtctggaagctgaatctccaaggctggaagatccaacatctgttcttgaaaatttactgtacctgcaaatggcagacgatcctaacatgaattttggggcattctcccagtcactctgcaaccagcatgtagtttcatttcagacaagcgtagccactagcggctcaggaggcatgccaacatacctggattgttccactgggatggatgccagcgtggggatgctgaccacaccttcagtggttgtttccactggttcatctaatatgccagcagattccgggcagagcctcaaatatggagggccactggctgcggattggacacaggtcgagcttgaaattctgagagatggcatggagaaatatgttcatgaacaaggcatcatgaagtatataaagatagcagcatcgttaccgaacaagacagtaagagatgtcgcaatgaggtgccagtgggtagggaagaaagtaaatacaagacgaaggaaaccccaagaacaccatactgggagaaatacaaaagaaagaaaggataaatttgtagagcctgcgctgtggggaacaaatcatcctcttcaaacaggcatgacagcctcttcatttgtgccgcataatggccaaaacgctatgtttatatctggaggttggtaggtcacttgattacatgagtatcatgtctaattgtttgcttccatctatcttctttgtttcttgttatatgctgttaactgtctcgtgcaattatcaatatcatgatccggcatttgaattttttgcatttgagaggatatataaatactgctgccaatactagagtgactgaactacttcattttattaatgactccattgccaagtttatcgcaggcctcagagatagatcgtccagtgctgcatctgctggaggaaaataataggcttcttaatcaaatcgaaacaaatattcagagatttcagcctcataacaacatcgatctcttccatcgggcaagaaggaacattaatgatcttgtacaaatcacgacccaactgcctgggctgaggaccaagatgcctccacttactgtggcaatagatgaaaatcttgctagcttcgtgcttcctggcattacaatggatcaagttcttggaagcaacgatttgaaggaggagccaagaggatggtagatccactgccagcatgtttcagtttattggtagatggatggaccatatggagaactactgcttcattttgcacaccaagtggcggtgaatagggtcaccattcaccaaggaccccctgctttctctatctgaaagcgaaaggagaggtggatgaaaccgttcagctgccctgcagctacccttagacgttggtggctacacagcgagggttttaggaactgcagtttttgtggccttgctgcacctgtaaaaaactgtgattctttctggtttccccttcagacagtagggtaaatagatgtagcggaggaagctcacaagaactagctaaatagttctctctagaagaaaaaaaatgtcgctacatagcaagaaggatcctttttgcctgtcgccatttgctgctagttcttccttcatgtgaacgtgatctaagttcctagttctctcttatccgtgctccgcctttgtatccacgaactggaaatatagatttctgagtatcctacgtgatcttggagaaaatctcgtcgagagcggagacgatgttgccgtagtgctcctgcacctggagcgcgtccttgtctctggcggcgtaatccagctgcggtcaagagcagaacacacgatgagcgttgagcaa

SEQ ID NO: 19958 - DNA, 2497 bp, Zea Mays
atggaggtgagagtgtgggcactgaagaggggtgcaaagtatcgcatgaagctgaagccgaaagccgagctagaagctgaagcattacacaaaatcagaagtgctggtccgagaaaccgcaatacaatttctcaagctgagactggaagtgcaaaacagagaaaaaggagttgggattttaaaaatcatgagcgtgttgctttcatggcatgaccacacgagggagctgcaacggtaccaaccaagaagggaaaggtgcagacgagggggaacctaagctagaaaccaatagtggcaattattgttcggaggccatcgccgctggtgggcggtggcttccccttcccctgtattagcagcgaggaggcagcagctgaagctctcgtctctgcctctccggacctccggtgaactccaacagagaccacctcctccatccgtcggtcatccatctgtgattccttttgcgtgtgcaagttgttaaatcggcacacggcctccgcttttggagtggagaggggcatatacggtttactggtgcgcccggggccgccgcttttcccgctggcctctccccggccgtcccattggagcgcgcaaagctgggcggcaccatttaaagaagcaaactgcactccaccattagcagcaccaaggcaccaccaccaagcgcaccgccacgccacacgatctataacgcgcaggcaggcgaggatcagaccggccggagcttgccttctccgttggggttcctgcttgccgcggcgcgagaacagatatattggatcggatttgtgccgggttcttggagcagtaggcaccaaactggtccaggttgggcaaaaatgcagtttaaccagtagctaacggagctctctcatcttgtactgtggcatttcttaagttgtctggaagctgaatctccaaggctggaagatccaacatctgttcttgaaaatttactgtacctgcaaatggcagacgatcctaacatgaattttggggcattctcccagtcactctgcaaccagcatgtagtttcatttcagacaagcgtagccactagcggctcaggaggcatgccaacatacctggattgttccactgggatggatgccagcgtggggatgctgaccacaccttcagtggttgtttccactggttcatctaatatgccagcagattccgggcagagcctcaaatatggagggccactggctgcggattggacacaggtcgagcttgaaattctgagagatggcatggagaaatatgttcatgaacaaggcatcatgaagtatataaagatagcagcatcgttaccgaacaagacagtaagagatgtcgcaatgaggtgccagtgggtagggaagaaagtaaatacaagacgaaggaaaccccaagaacaccatactgggagaaatacaaaagaaagaaaggataaatttgtagagcctgcgctgtggggaacaaatcatcctcttcaaacaggcatgacagcctcttcatttgtgccgcataatggccaaaacgctatgtttatatctggaggttgcctcagagatagatcgtccagtgctgcatctgctggaggaaaataataggcttcttaatcaaatcgaaacaaatattcagagatttcagcctcataacaacatcgatctcttccatcgggcaagaaggaacattaatgatcttgtacaaatcacgacccaactgcctgggctgaggaccaagatgcctccacttactgtggcaatagatgaaaatcttgctagcttcgtgcttcctggcattacaatggatcaagttcttggaagcaacgatttgaaggaggagccaagaggatggtagatccactgccagcatgtttcagtttattggtagatggatggaccatatggagaactactgcttcattttgcacaccaagtggcggtgaatagggtcaccattcaccaaggaccccctgctttctctatctgaaagcgaaaggagaggtggatgaaaccgttcagctgccctgcagctacccttagacgttggtggctacacagcgagggttttaggaactgcagtttttgtggccttgctgcacctgtaaaaaactgtgattctttctggtttccccttcagacagtagggtaaatagatgtagcggaggaagctcacaagaactagctaaatagttctctctagaagaaaaaaaatgtcgctacatagcaagaaggatcctttttgcctgtcgccatttgctgctagttcttccttcatgtgaacgtgatctaagttcctagttctctcttatccgtgctccgcctttgtatccacgaactggaaatatagatttctgagtatcctacgtgatcttggagaaaatctcgtcgagagcggagacgatgttgccgtagtgctcctgcacctggagcgcgtccttgtctctggcggcgtaatccagctgcggtcaagagcagaacacacgatgagcgttgagcaa

SEQ ID NO: 19959 - DNA, 1058 bp, Zea Mays
cagaacacgctggagaagtagcgaaatatcctaatgacacgtaggtgtaggtgccatataatccaactggccagcagtgtactgtgctcagtaattaagtagtactattttttaccggacgtggtgcaggaggtggcggacgcgatgtcgcgggtggccaagaccgtggcggtggcgctggcggggagccttctgggccacgacgaggcggcggcgttcccggcggggtgcggcgagaccacctgctacctgcggctcaatcggtacccggcgtgcccgttcgcggcgaacaccttcgggctggtgccccacacggacagcgacttcctgacggtgctgtcccaggaccaggtcgggggcctgcagctcatgacggacgccggctgggtggccgtcaagccccgccccgacgcgctcatcgtcaacatcggcgatctgtttcaggcctggagcaacaacctgtacaagagcgtggagcacaaggtggtggccaacgccgcggcggagcgcttctcggcggcctacttcctgtgcccgtcctacgactcgctcgtcggcacgtgcggcgagccgtcaccgtacagagacttcaccttcggggagtacaggaggaaggtgcaggaggacgtcaagaggaccggaagaaagattgggctccccaactttctcaaacaccggccaccccctcaatcacggcccgcctaaaattgacaagtcaaagcacctgccgttttgctctcgagaaatgacgagagcacctttttctcctgtaacttcacggtggatgcgagcacgacctcactgtgtacaagaaatatatatatatataatatgaaccctttgaggcgcttgcttctttttctttttctttgcttagctcatatatagtagaggtcactgtacaagaaagtgaacgaggacgacgcgtgcctgtgcctgtgcgcttatcaagctatcctcattatataatttcagcgatttccgatggaagaaaacgtttatctacatatattgtactacccctcttgcacagaaaaaactactttactttctagtaa

SEQ ID NO: 19960 - DNA, 198 bp, Zea Mays
atggccgggtacacgcagcaggcggctgtgaaggccaaggacgcaacggtctccacgggcgcgcaggtggcgcagaaggccaaggaggtgacagccgacaccgcgcgcaaggagaaggcggagcaaggcaaggagcgcgcgtcccgcgccgccgacgaggaggagcctacactcgtcggagggagaagaaatctatag

SEQ ID NO: 19961 - DNA, 203 bp, Zea Mays
gcatgaacagtagtacccatggatactggagagccgattctatagcaccaccaggagttctaggtgtaggttcaggaagagtacagaaaataatattactggtaagacaagatgagtcaagttggatcctccctataaatataaggctgaccccagcagcttactgatgcggacacggaaatgggacgcgatgcgtagctgca

SEQ ID NO: 19962 - DNA, 16300 bp, Zea Mays
gctagtccaaattcttggttgtcatgcaattcagcagtccaggcgttaaacttctaccccgtgagccgcaaagtttctgtacatgttaatgtcaaacaaatgaattgacaaatgtaatagttacaatggaatgtataaataatggctaattcaaataaatgtttggtgatttcttaacttgtaaaaaataagacaacaaatagctggctttaccaaaggttttgttaacctttagcatcataatccagaatattcaccattctaggtgccaccaaaaaaactaatattgcacctttacttagcaaattgaagacaacaaaaacagttcaaagatagaaaatgtccatatgacctttaacagtataatcaataatactaaccatccaagttttcataggttacaggctgacgttaatattcaataaataaaaacaactgaacttaggagagtttgaaggtgtcagtgagataagttagtcatctaggatgaccagatagtatcggtaaccagaaaggcaaggctcagtatcagcgatgtgcaaaggtcacaatggatgaggtcaaaggggtgagcagtgcgggacgtggaagtggggaagggtaagcgaacgtggcgcccaagctgatagacatggcagcattgccacagatgcagaggatgtcagaggtgctcgggagtctggaaaggatgttgtgaccgggatggccaacacgacagtaccaagtggagccagaggcaacaacggcgatggcgtaggctggggcaacacgagaagatgtagaaggggcaggaaggcggatagaatatatggggtcggaactatcgcaacgggcgatcacggcacgagtggtaagatggcgtatggtgagcccccaaggattgaactccatagagcagtggttaacaatggtgaagcgatgaaccaaaaagattctgaatgatattgagagcaacgaggatattgttgagatacaaaggaccaggaagaaccgtgtcatctactgaggtgacagacatagtctacccattaccaacaatgatgaaagaagggaaggtggggctaagagaatggggtaaagaaacaatactagggttaggagtggtgtggtacgagacgtcggagtcaacaacaaagtcggtaggaggactgggctgcgaagacatgggatacgagaagagagcaagggaaggcacccccacagagccatcgagaggggtgctagggtcgacagtagtgagcatgctgatgacggacatgggtggtggagacgacaaggcctcaagcgttatggagacaatctcgacactgcagaacacgaacggtccaagagtgtggcgaccctcctgagggtggagggaggcgagaggggtggtagagctcgatgcagtcacggagaacaggtttcatgacttgatataaggccacgaacgtgctccagagaagctggtcatcgtgaagggagacatgcacacagtagagaggcacgtgaaccacgacatggcgaaggacgggcgtcgaggaagccgaggcaagaaggtgcagggagtgccgatgccgcagcaagctccgcatcgacgaggcgatagaggaacacctcgacggggtaggcatcagagaccagtggaggccgacagctaggactacggtatgcggcacaggcggagcaaggagtggcgtggcccgagcagaggggagcacatgtttagcaggggcgtgcatggtggaggctaagttgagcgtggcgtcggggtcggctgtagggtgcggcgagagtgcggactggctctagcggtctagccggggcgaaaggtaaggaagcgacaccaaccgcgaggtcatactacctgaggaaggtccatgcgaggaaggcgaggatgtccgctggcgggatggggacgacgagcggaggacggatggagcccaccgtggggttggcgaagcagacgaagatggcctgccaacgacgtccaccacaggcgggggctgtgagccagtggttccagccatggggaagatctaagcgacgaacagcagacaaccacgggcgggtagggtggcgcagagcagaggagagcgatgttgcgtccgcagcagatgttagcggggaggacctccatgagcgggcaaggaccgacagaacggccaccgaaggtgagaggatgacggctagtactaggcataaaacccgagcccgaagcccaaaacccaaaatacctgagcccatacccgtttagcctgaaacccagtacccaaatggttccagcgagtaacaaaactaaatacccgattttaattcaagcctaatcgggtaacacacgacggtacccgaaatacccattaagcccgaaattatttttgatgtagatctataagacttcctaattccgacacagcccaccaacgtaaaggctttaatgcctcagccaggccacgccgacggccctccagtgccctagcgagaagcgatggacctctggtgtccacagaccaatgatcagccagacacaggcatccacgattccaagactagacgccaagaccggatggagcctgagtcgtcagcctgccaccaacgatgtgccggtgcgggcgcccccactgccacgaaatctagtcgtcgttcggcctcggactctagctattcggccttaggctccggagcatggtccatccgtgtcgttctcctctcctttgggctctagtcgttcagcgcactaagcgcactaggcaccacgccagttcaccatgtcctcagtttgctactcatgttgattgatatataattatatatgctcgcctgcccattgtagcatgtagctatggtgcgcctccacatgatcgtttcagggtgggcatggagatagagatggtggtgaactggtgatgttgttctgcgccctaaacaaaattggtcatgttgtattgttgttaccgtggttcagtcttcagagtttcctgttaaattcacaaggctacttgtatctattagattgtcgaaaccagcaacaatacgatccttttgctctcagttctttcttcttaatttgtcggcatgtgttatttccaatgaccaaaagctacagtggtggtgattctggtaacctttgcaccaaagttttccatgagccagctctttaaaattaggtagaacgggctacccgaacccgaaactttcgggtacccgaaatatcaagtatgcaatacatgaaacctattttgaggcatcatttctagatacaagaattttgaaaagcccaaaaaactcgacctgcatttttgggctaacccgagtgcccggtactaatgacggtggatgagtgaggtggagtagggaggtggcggctggggatgagagaagagaccctagccctgataccatgtggatagactaaaaaccctaaccctatttgggtaagggatgtattgatatataattagataggtgggccaaggcccattataacgataggacacaatgacaccacactaacatacttttcccattttctttggcacttttttgtttgggtctccacccagtctgatacttttcgcaatctttcgcacttttttgtttgggtctccacccagtttgatcgttcggttcgtgctctccagtgcgacaatggtcgcgagttcgacaacaccatctccagctcttttcctaagaacggtcgagccaaacgcaagactcacaccaccaccaacatgatatgttgcattctcttccaagtgtctctctgctagctattgggtggaggtgctgaatactaccacccatctcaactgcctcccccttcaaggtgggtcaatcatcccactcctttcttcatcctcttcggcaccgccccttcctatacgcacctccacgtctttggttgtgcatgtcatcccaacacctataccagtgctcctcacaaactttccccctgatccacgcgctgtcttttcctcgagtgctctgaccacaagaagtaccgatgccttgactttctcacccaccgcgtcatcatctctcaacatgtcgtttttggtgatgtcttcccccttgctggatcctccccacccctcgacctcgagtctcctcgatttcaatctcatcatctttccatcacttctcccatcctcggtcccgccatcctctcccacgccatgtgcggcaccttcccctttgactgcaccaagtgacgcctcatcgcctccgccacatgcggcacagtcaccttcaactgcaccacacgcaggcctgtcacccccgctcgcacctcgtttgacctcacctccctgaccacattcggctcgctttgtcgatctcacacgcgtctaccaacggcgtgtagaatccaatccctctgtcccctctgctgagctggccagtgcctccgcctgttcccgtgacgagctgtcggtgcaccatccagtcgctatccaccacaaccctcgccacgtccacccaatggtgacatgtcgatcgaccgatattctccgacctatcgaccgactggtgctcacggacgatgctactctggctccctcatatgtcccctcctctgtaagtgtcgcgctcgctgacccccattggcatcacgctttggaggaaaatgtggcccactggccaaccacacctaggacttggtgtcatgtcctcctagcaccgagttggtcaccagcaagtggatcttctgctacaagctcaagtccgacgactccctagatgcgtacaaggatcgttgggtcctttggggtttcactcagcgccccagagtagactacgacaagacctttagcccagttgtcaagctcgccaccgttcgaacaatcctctccctcgtcctctaccgggactgagcggtccaccaccttcacggcactctaaccgagacgatgtactgtagccagcccaccgacttcatcgactccgctcgcacgagtatggtgtgtaagttaaaccgttctttgtatggcctgaagcaggcgccgcagaattggtacagtcgttttgcctcctacttggtctccctcagcttcatcgaggccaagtcaaacacgtcctagtccatccattagcgcggcgatgacaccatctacctctcctctacgtcgacgacattgtgctcacggtgtctagtgtcgccctcctcgagcgcacgatcatcgcacttcaatgtgagttcatggtgaaggacctgggtcctctacaccacttcctcggggtcgccaaggagcgacacccctgggcctcttcattcactatcgccaatacaccatcaacattttggagcggactgacatgttcgactgtaagccttactccacgactgttgacactcaagtgaagttgtccgacgacgaaggtcctaggtcaacgacgtgacgacctataggagcctcactgtggctctccagtaacacagcttcaccaggctcgacatcgcctatgcggtctagcagaagtgccttcacatgcacaccccgcgagagccccacctcaccattgtcaagtagattcttcgctactttcgtggctcaatcgacttcagcctccttcgaccctctccgacttctgaacgagtggtctgcaccgacgctgataaacctctggctatgttgtgtccctgggcaccaacctcatctcctagtcctcgaagtggtagcccgttgtctcccactgtctcctgaggccgagtatcgcgttgtggccaatggcatggtcgaagcttactggctccgtcagcttcttcatgagctccgcagcccctcgtgtgtgccaccctcgtctactgcgacaacgagagcgtggtctacctctccaccaatcctgtgcagcatcagcgtatgaagcatgtggagattaacctccacttcgtctgtgagtctcgttgacagcaatgttcgcgttcttcgcttcctggccactttgcagttcgccgacatcttcaccaaagggtttcggtccagtctcaacatttgtacagaatagagttgtgcttgcggggtagtgatggatatcaacccagctcgactctttatggctcgttactgtaatgagccagctcggctcgactcgttatacaaacaagttaaacatctggctctgctcggcttgttaaagagctcgagcagctctataggcttgcaagccacaccaactaaacacagatccatataaagaaatatatataacacaaaatacaatcatagttaaagtgtttaacactgcaaatacaaaatcactataacattattgtcgtactatcatcctagactctaacttccaacattaaatcaaacaaccaagtatgcattagagtacaaatttacaaacccttattataacaagatagcaacaagcatcattgtagagcaatccatcatccatttcacaaatgtgtaacattttattgcacaacactaatgttgtatgctgctagcaaccacaagttcacaaaactgcaaccaataatcaaatattcaatagcaatgcaggtttgtggccatgcaataatgcaatacagcaataatgcaaaatttcatcacatggcacatctacatatgtccatatcacagatcgtaactatgagagggtaaaaatgagacaaggacacaccgacgacaatacgaagttgtgttgtggcttagcttggtttatctggctcgcaaactggcccgagctagctcattagagaaccaagctagaacgctagctcgacacactacaaaataaaaacaagtcgagccactaaaacgaaggcttaagatgaaggccgaagagggtaggggacattaggttcgtgctccacgttattcgacaaaatcacaaagttgcccatgcacatgcaactaaatcttgtcccacgggttcacctccatgttggcaagaaaaaagaacgagcatggccatgcaccgccgaaaatgtggtgttaatgattgggaatgtggtgttctttagggctagtgcatgacttggagtgactacaatgacttgttacttgtatatttatgttttctgtatttccccattgtgtaaggggcttagtgcatatttaccctcatgtacaggtgcacatacactggccttagggcctcataatgaatacaagtgctattcataacatggtatcgaagcgagaaattagggttagcctttttcactctaatctttcctacgcaccttgcacttgcttactcactctaatcttttgtcgctcgtggttgtcattcgccttgcgaagaagttgcatgtgcgtgtgttgctccgttccactcgagcatgcacgcgtgtacgctgtctcctcttctcgtgcgtgcgtcgccacctccagttgtgtgcgcctcacatccgttcgcgcgtccgcggacgacgtcggtttgctcgagtctgtcctcccactgacaagcccgcctggcgcgcatcgactaattgccagtaatcgacctgctaacaatctaccacccaccacttgcaactaacacccataggccatccagctatcagatgctcacgtcctcttgagtctaaggagacgctgcttgcagattatggtcaactggcaacatatgatgctcaatatagtgcatatcgaacatggctagatgaggatgctcgagccggttctattctcgctgctagtatggaggatctttgttgtagagtctattgagtatgacaattatcatcacatgtggacccttctccgtgatcgctacaaacataatggtcactctacttatcttgctgccatttgtaaggagcagcccttaccacaggatgatttctaccgtaaaatgtttgttgatgagttctatcgtcaaatgtttgttgtctggcgtcatcttgatactcttggtccgcagatgtctcctacacatgtgaattttgccttggttagaagatcgaccttgagtttcgtcgcacatatgacatcttgaccgtattcgtacagctggtatgttgccttcttcgatttcggttttggttgctcggtcttcgtgttcgccttcccagcctattgccccccctcgatgatgttgtcgtcctcatcaccttatcattttgcacatggaaagggtagtggtcttcattgtggatgggatggacatgtggagtctttctgttacaggaagaagaatcatcagtctgctcatcgttcttcacatactactagtagttccactgctagaggttctaagagttctattgttgcagctacccaggagatgttcatgctacttcgtcgacttgctacgtctacaccactgggagtcgctgactcggtaactcagtctaaagcttcgacagattctgctgctgcctctcaatcttctactgagggaccacctatcactccaggtacatatttcgatacttgattctagtgcttctttacatgtgacaccttatttcaccatctttcttccatgcaggctccatctcattctctcattgttcatattgacgatggttcccctttgccaattattaaacatgacactctaactccattttttacccttgtttttcgaactttgcatcgttgcccctcttttcttgaaacgaaacctctacttgcccctattttgttataagcacataacagtaactcagaccataaaaagacgttcatacccttgcaccattgcccctcttattatcaattgtttgcaaattttccctcactttgatataaaagtttagagtacaagtatgacataaatccaaccataaattttgaaaatcaattatttcaaattttcaaatactttaattttaataaaatagggttatgttcgtcaccatgcaacttatgtccatcgatctgcttgctggtcattgttgttgtgttattttttatcttgattcttgttatgttcaggatcgtactgcgggtcacctggttggtactggccctcaccgtcgtcaccctcggcgcctttggaagcttgactagcttcatcttccttccgctgcacctcccagttttggcagttctgtgttagctgctttgtccatgtcgtcttttgctcaatggcatcatcgtctatgtcatatttgtggctcttgtttgagtacattgattcgtcgtggtctcctaggttcggtttcaggtaatgagttcttagcttagtgtcaggattgtcgattaggcaagcagattcagcttcgttatcgttctactgagtctgtgtctgagtgtccttttaatcttgtccactctaatgcatggggctcgactccctttgcttcaaaagggggtcatcaatattgtatggttttcatatatgatttttctcgccatacatggatttattttatgaaaaaaacgtagtgaggctttatccatctataggattttctgtgttatggttagcactcaattcgacacatccattcgtgtctttcgtgctgattctgcagaagaataactttctgggtctcttcgtaatgttcttgttgcgcactgtatgcttgctcagttttcttgttctggtgctcatgttgttgagcgccagcatcatcatcttcttgagactactcgtgctcccatgcttgcttcttttgtttccctcacttctgggccaaggttgtctctactaccgcttatttgaccaaaattcagccttcttcggctcttcaagttggcattccttttgagcgcgcctttgtagcaagatgcctaattactctaggcttcgtcttttttattgtgtgttatgtgcttcttgcagatcatgagcgctataagttgactgtgcagtcagctgagtatgtcttctttcgtacaatgttgagcataagggctatcgttgttgggatccagttgctcatcgaatgcggatttctcgggatgttgtctttactgacatcctttctatccttgtccttctattgttgtttcctctgcatctttgatgatcctctatctgtcatgtttatcgctgactctgctagcatgtgtgttgctctcccgcctaccacctcatgttcctcctcatatgcccatatatatttcttcagagacttctgttataattcccgactacattgtcaagcctcctgtgacacacgtctatacatgacattgtcctttgactacttccccattggcttccactgatgtgccctcttctcttgatgtttcagcctctcccgctgattcatcttctccggctaggttgtcttcttctagtgatagctctcccgagttgattacacgacatggtcttcgtactcgtcaacctatagatcgcttagttttggccctgttacatggcagggttttgttagaactgctctttctgagccgactccctatcatgatgttattcttcatattgaatggcaacttgcaatgtcagggagattgttgctcttgagcgtactggcacttggttgattattcatcatcccctcatgtacagcctatcacatgtaagtgggtctataaggttaagacccgctctaatggttctcttgagcgtaaggcttgtcttgttggttgtggtttccggcaggaacatgggcatgattatgatgtgcgtctataaggataggatctgctctgatggttctcttgagtgttataaggctcatcttgttgcccgtggtttccagcatgagcatgggcgcgattatgatgagacttttgctcctgttgctcacatgaacattgttcacacccatcttgtggcttctaatcgtgagtggtccatctctgagtttgatgtcaagttgcatgaggaggtttatatgcagccaccacctaggtattctgttcctatgggcatggtttgtcaccttcgtcgttccctttatggcctcaagcaggctcctcaggcttggtttcaacatttgcttctatgatcactattggtggtttttctgccagtactcaatatcctgctttgtttgtgcacacatcatctcgtggtaggactcttctccttaattatgttgatgacataattattacaggggatgatcctcagtatattgcctttgtgaaggcatgtcttagtaagcagtttcttatgtctgatcttggtcctccttagtattttcttgggattgaggtttcctaaaaggacttctcttaatgatcaccttatttttaagactcctatggagctcaacgtttgccttcatgccactgatggtgagcctctttcagatcctacttgctattgtcacattgttggtagtctgatctatattggtgtcactcgtcctgatatctcgtattctatgcatattctgagtcagtttgtatctgcccccactcagcttcgctacatcatctccgtgttctacgttatcggcgtggaactatttctcgattatgttctttcctcgctctagatccttgcagcttcaagggctggacaaaataatcgtggcttgtcagttcgctcggctcgtagttagctcaactcggctcgtttcaattttgtcatgagctgagctagtatctcagctcgaattgttaacgagtcagctcaagacgagctcgagccagctcgttagctcgaacaagctagcatttgtcagcaaaatgaagccttcacttgagttgaatgaactaataagtgatgatttgttgatttggagttgaattgatgtgatcatgaaattatgagtactattactctatttctagtgttaaattagtgcataattaattaacaattgattatattgttgtctatatatgcatattgttttttgttgtgactcacgtgctaaacgagccagctcaagctcggtcgaaccgagctgagctgactcgatatctagctctcatgcctactgtgatgcgacttgggctagtgattcctcagattgtcaatctgtttctacctattgtattttttcttagtggttccctcattgcttcaaagactaagaagaaattagtagttttcagttagagtacataagttgagttgcgtgcagcgtgctatggctcttgcgaccgcataagtgacttgactacgatggttgctggctgattttgatgtttctgtgtctacatcgactccccttttgtctgacaataaaagtgctatcagtattgctcgtgaaccggtaaagcatgagcttactaagcatattggtgtcgatgcttattatacacgagcacagttcaatatgatgtcattgatctttgttatgtgtctttagagcttcaattagctgatttcttcaccaaagcatagaccagagctcagcatcagttctaattgtccaaactcagtgtggttgatccaccttgagtttgagagagggtgttagatgtatatttatgttttctatatttccacattgtagaaggggcttaatgcaaatttacctgcgaaggagtctctagctgagttggttagatggtctcaatagcactccttaggtcttgggttcaactatccgtgggagcggatttcaggctaagattaaaaaaagtcacttgctagtttccttgtcggcatgggtgaaccgacctacagtgggcgggccctcatgtaaggggttggtcgtgtgtgttaggcctcaaagcacagcatccccatgtatgaggggggcatctttcgtgcttttctcggctgagctctaattgtcctcttcttagtgaaatatcgtggtggggacggtctttcccccaccgaccaaattttatttagtgcatatttaccctcatgtatcggtgtatatataatgtccttacgacctcatattgaagaagatgcactatccactggggcaggatataatgtccttacgacctctaatttggaggttcttccgagataggcttccaaaaaagaagatgcaccttgttggtatgaatactctattaattctattaagccttgggccaggatatcactatccactggggccaggatatcacaaattttaacccgcgaatccaaaacacgagtatgagtgaagattttgacccaagggtgcacccgcacccgacccgaagtttcgcgggtgtgggtgtgggtgcgggtttctatttcaacacgtgggtgacccgcacccgacctgaaatttggttcattatttgttttgcacaaaaatgattaagatacagtagtaattattttaaataagtaacttggctaatgattcatgaaatgttttgttgttcaacgtgaaaatgcttaaacttcgtacatgtaactcaattattgctgctacttaattgcttatagcaaaactattgtttaaaagtgtacaataagtaaaacccgcgggtgacccgaaaacccgacgggttcaggtgcgatcgtgggcaggtttttgctcgacccgaacacgacccattgccatccctaaacatgactcactaaaccgatagaaaaaattaattaagcatgaatatccttttcacaaataaagctagataacaattatatgatcaaaatctaatggagaagagatgagaaacccctaaatcaaaacaaaatggaaaatgagaattagagccattggaagatggaaaaatagtcaatcaacttcaacgagcataacctttgttcttcatgtcatctcctttcaactcctctttggttgagcatgtctttcctcactacatgctagcaccatgtcacctctttcaaccctagtgctgcctctcttgccttgtcgtcctcctttgcttcaaccactcgcacaacctttcatccctccctcgtgtcttttcttgcttcttactccacactaatgatggcaaccatgtcaacttcagctatcaacaaccatgatagccaacaagagttggtcaagctactccctctctctttctcgctttttgcccaagccatgatgacattgtttcaggcaaaccatctaagattgatccctgatcagatctgagcctcaaccttgcatctaatgactacgttatgtcaagtacatatgtgccttgtgttgaatattgcttggtgcttgttatgcctcatatttcaccatatatgccgcttatcttcatcaaggttctctaaatacccatttagagaaaagagaaaaatacataagtagcccttaaatgtgtcatttaggtccaccgacaatgaaagtgcattctagtgtccctaatctttttagtagatgcactataggaccataccctccatgtaggcagtagttctaaaatggcatgttgattggtctccacgagacaactctcaactagcgcatgaacaaggtctcacttgtggtgggctctcattcatcatcctccctcgcattgtaaagcaaaggacgaagagcactttttgttctatgctcagatgcctcatgcgacaaacctagttagcatgttaggccgacgctaggccccatgtcaagggggtatgaactagtgatgcagcacttgaaaagaataaatgctagggaatgcagcctagatggcataatgtgaaaagtttaaggattgcccatgcatcaaaccaataatgattttactgctagtactttgaatatgcaccagacaaataatgattttactgctagtactttgaatatacaccagaccaataacgatgcaccactttgaatatacaccagaccaataatgattttactgctagtacttgtgtggcccttatgattgagtttgcatcaaaacaaaatggtaagtggctttgattgtttgaggtcatgacgaccaagctgacaagcacgacacacaacaacaacaataacaaaaccttttagtcccaaacaaattggagtaggctagagttaaaaacccaacaaaacccaaaaatcaaggttcgatcatatggatagttgttctccatgaactcctattcaaggctaaatctttgggtatatcacatcgtttcaagtctcctaaaattgtcttttcccatgtcaacttcagtcttcctctttctcttctcattgctatcgctataatactattagttgctatagtactattatccctctatttgagactatattcctataatttctatttttatatattactaaggtttcgccttgccttaccccttatcgttttaaaggtaaaaaggaggacggtcgccttacctcgccttgttgccttaacaactatggatcaaatctacgaatctaaaatatttatggttgaattgtgcaagagaaatgaagaaaatagaggtcatcatgattagttacgataagtcggccttatccccattgtaagttcaattagggtgtacgactagggcgactagaattatgatcattcaactaatcatcagttaatcatgattagtcgtctgattaagagtttaaccgactaattgcaagtttttgggccagtttctagcctgaaccgctagtcttttttttgttggacgcaatgggtaagggttctttttatttatctttacattgtggtccccaccctagtctcgccgtatccaggatgttgttgttgtcagctctagtgcctcctatcgtcggctccagtacggcgccctccgcctaccgccacccctatgccactcgcctccaattgtcgtccctgcgtggttgtgtcgcctgcctcctagaaaataagcacctcttcagacagtaatcctcaccttctttgttctcatccttctcttaggatccttgatccttctctgttgtatactagttccattgcttgttctaccattggtccattgctaagtctggtcctcctttgcttattatgccgctacagatagggataggacccgacgtaatgacatagaatcgatctttttagaatttgtgttgccccagcgcgatggcacaattcaagccacatgtgaatcagttgcaacaacttcatctaatgttgcaacttcaactagttcttacataaaagagaaagcaaattctgcattatccctagaaatgcttgagatggctaaggatcttaagagaaaggctcgatcttcagactcgggatggaattatggattctagacagattggttcaatgtatttttgccaaaaagttgtccctacaagaatcaaaacgttcaaacaatatattgttgggggtttggtgattgttagacagttatatgttgtcgtgtattgtgcggcttggagcctagcttccaaccgaccggtctggtatagttggttagagagatttggggggaggagtccaggccctgcaagattgggtaggacgtaggatcctactggctcattagattcaggaggtttccttttgcctcacgtcctccacccatatatgtatatgtattgtctctcaatcaatctactattcctccaaatctacattactttcatagtatc

SEQ ID NO: 19963 - DNA, 265 bp, Zea Mays
ggatggcgtcccacatgggctcgaacatggcggccttgccgaggatgtcgacaaggaggttccatgcgtaggcggtgtgcgacacggactgccccgcccagcggaagaagcggacggcggacttagggcgcttgtagcattcgcgggacttgagcaccagttcctcgacctcggccgtggggccgatgccgcaagcggacagcgccgcctccacctcccccgccgggacgcggcagatgatctccagaaaagcctccgcgcgcgg

SEQ ID NO: 19964 - DNA, 958 bp, Zea Mays
cccaacactacgaccgcctctctcttgcgtcggcaacagcagcgcagccagtagcccattactccttgctccacgccgccgctcgaaaccggcagaagtttagaagaacggggagggaagcacgcccccaaacgttccgaggtttcgcctctcggagcgcaccaacgccacccggagcgactcgccaccggcgcggagaaggagggcggaggctaggcgatggcggacgagaatgaggctgggaagaaagaggaagaggaatttagcacaggccctctgtcagtactaatgatgagtgttaagaacaacacccaggttctcatcaattgccgcaacaacaagaagctgcttggccgggttcgtgcttttgatcgccactgtaacatggtgctcgagaacgtgcgggagatgtggacagaggtccccaagactggcaagggcaaaaagaaggctctgcctgtgaacaaggatagattcatcagcaagatgttcctcaggggcgactcggtcatcatcgtgctgaggaaccccaagtgacagcccaaccggaagccagttccaacttacagcaaagggtttctattttgcttcaagccttcaatggcggtggcggatccatgagaaacctaacgttctttgatgggacgtgctcgcaacagacagtcagctatgactgatgtgatgcactaccgtctaccaaaatttaatatacatgtacagttaaagggagtttgggctgattgcattacgccacagaccacactcaacaagctctcatcgagtctgtaactctgtactcagtactgttccatccggcctgacctgagctatttgtatgctggcatggacggatagagtctggatattctcggacagtctagattgacgtaattatttttatttggtgaacttgtatttgttggatcaagttatcatttgttgcctgcgctgcgctgga

SEQ ID NO: 19965 - DNA, 1055 bp, Zea Mays
aagagctccaaagtccatccaccaccacagctgcctcccgagctcttcttctgccacaccgcatcagcatcatcacacacatcccctcccggcccaaatggcgagcaacacggccatcctcgagagcgacccgctcaactggggcaaggcggccgcggagctgacggggagccacctcgaggagaacctcaagagcgccgtcaagagctgcgtgatggcggtggccaggaaggtgctgaccaccagcctcggcggcgacctccacagcgcgcgcttcagcgagaaggccctgctcaccgccatcgaccgcgaggcggtgtacgggtactacgacgacccctgcagcgccaactcgcccctgatgaagaagatccgggccgtgctggtggaccacgccctcgccagcggcgaggccgagaaggacgccagcgcgtccgtgttctccaagatcaacaggttcgaggaggagctgcgcgaggcgctgcccagggagatggaggccgcccgcgtggccttcgagaccggcgccgcgccgatcgccaacaggatcaaggagagccggtcgtacccgctgtaccgcttcatccgccaggacctcggcgccgtgtacctgaccggcgagaagctcaagtcccccggcgaggagtgcaacaaggtgttcctggccctcagcgagggcaagctcatcgaccccatgctcgactgcctcaaggagtgggacggcaagcccctgcccatctgctgaggagtgaggaggaggacgccaccggtgccaagaggcaagacccgcaagaggaggagatgacaccgtacgcgcgcgaggaagaaataaagaagggagtatttcggtattctcaagcaggcttcatatcgtttgcgatctgaagatcattatatgttgttcctctgtactcatcttttttgtttggagcttgtagcagtgatcgtgtaaacgtgtattctgtctgttgttcttggctttctcatctgcaatatgttttggaattaaaatatactactactactactatattgagtacatggtctcctcgctc

SEQ ID NO: 19966 - DNA, 1914 bp, Zea Mays
gcggcgtggcgcaacgtgttgggtgggccggtgggcggtggcacgttagcctgccgctaggaaactccgggttctctgttctctctttccttccgactttcccactgccgtgacgattttcacagcgaattctccggccggcgccgccccgtccgtccgtccgtccgtccgttcattccgataccgaactcgccagtcgccacagcgatctctctcgctcgctccgccgacgcagcgctcggcttcagctcgagaggaggaaatggccagcagcggctacgaagggatcctcctgggaatggggaaccccctcctcgacatctccgctgtcgtcgacgagggcttcctcgccaagtatgatgtgaagccgggcaatgccattcttgcagaggacaagcatttgccaatgtatgacgaattggctagcaagagcaatgttgaatacattgctggaggagccactcaaaactctatcagggttgcccaatggatgcttcaaattcctggtgcatcaagttacattggttgcatcgggaaggataagtttggtgaggagatgaaaaaaaatgcacaagctgctggtattaatgcccattatcatgaggatgagaatgctccaacgggcacatgtgctgtttgtgttgttggtggagaaaggtcacttattgctaacttgtctgcggcaaactgctataagtctgaacatctgaagaaacctgagaattgggcacttgttgagaaggcaaaatatatttacattgctggatttttccttacggtatccccggattctattcaacttgttgctgagcatgccgctgcaactaacaaggtgtttatgatgaacctttctgctccctttatatgcgaggttttccgtgatgcccaagagaaagctcttccgtacgtggattacatctttggaaatgaaactgaggcgaggacctttgctaaagttcgcggttgggagaccgagaatgttgaggagatcgctttgaagatctcccaattaccgaaggcttcaggaacacacaagaagattactgttatcactcaaggttgcgatccggtagttgtggccgatgatggaaaggtgaaaactttccctgtgatcctcttgcctaaggagaagcttgttgacaccaatggtgcaggtgatgcgttcgttggtggcttcctgtcccagttggtacaagagaagaacatcgatgagtgtgtcagagctgcctgttacgccgccaatgttgtcatccaacgttctggctgcacttaccctgagaagcctgacttcaactagagccatttcagaatttagaatctattggcatctggtctgtataattagtcgggttcgccttggtctgtttgcggcacattctagtgccaccgtacaggtcaaatgttcatgcgtgtaaggcgtgtcatggcactctacaaaagtgcattcgtgcgtcacctcttgcaagggaaaccagctggttgtaagttcagccatgggcacactcttgaggccacaatatgtgccagaaatggcagtgtaccccggcctgccccggcactcggatgcgtgcatgcctctcccggttacggactctttacagttgcatctaaaacaattcaaagcaccttgcggtgcatccttgaaaagttggggcacaatatggttatggaccacactggagctaattgctagcttgctctacagcctataccctataattcagcctacacccataatggttttttgaacatctcgagctgaattacggaacacagaggcggtcaaatacaacgagggcgggccggtaccgcggtcagctgcacagtgccgggctccactcgcgctgggcgtcgacatggcagaggacagcgaggaacatgtcctcgtcgcaggggaggcacagcctggtgtcg

SEQ ID NO: 19967 - DNA, 2176 bp, Zea Mays
caacgtgttgggtgggccggtgggcggtggcacgttagcctgccgctaggaaactccgggttctctgttctctctttccttccgactttcccactgccgtgacgattttcacagcgaattctccggccggcgccgccccgtccgtccgtccgtccgtccgttcattccgataccgaactcgccagtcgccacagcgatctctctcgctcgctccgccgacgcagcgctcggcttcagctcgagaggaggaaatggccagcagcggctacgaagggatcctcctgggaatggggaaccccctcctcgacatctccgctgtcgtcgacgagggcttcctcgccaatggtgtgatgcggactccagcatcaccaattcaccctctctgttgtatccaacggcagttgggagagcatcaccaattcacctctctgttgtatccaacggtgctcaaatgggtatgatgtgaagccgggcaatgccattcttgcagaggacaagcatttgccaatgtaagtctcgttgcccctttagctcccattgcggtttgaaatgttggttatcgatactagcttgtcctgaacggagaatgggaaacaaattcttgatgttgtcacattaagcacccatgagacggggagaaacgtagtggactcctaatttttatggccaggtatgacgaattggctagcaagagcaatgttgaatacattgctggaggagccactcaaaactctatcagggttgcccaatggatgcttcaaattcctggtgcatcaagttacattggttgcatcgggaaggataagtttggtgaggagatgaaaaaaaatgcacaagctgctggtattaatgcccattatcatgaggatgagaatgctccaacgggcacatgtgctgtttgtgttgttggtggagaaaggtcacttattgctaacttgtctgcggcaaactgctataagtctgaacatctgaagaaacctgagaattgggcacttgttgagaaggcaaaatatatttacattgctggatttttccttacggtatccccggattctattcaacttgttgctgagcatgccgctgcaactaacaaggtgtttatgatgaacctttctgctccctttatatgcgaggttttccgtgatgcccaagagaaagctcttccgtacgtggattacatctttggaaatgaaactgaggcgaggacctttgctaaagttcgcggttgggagaccgagaatgttgaggagatcgctttgaagatctcccaattaccgaaggcttcaggaacacacaagaagattactgttatcactcaaggttgcgatccggtagttgtggccgatgatggaaaggtgaaaactttccctgtgatcctcttgcctaaggagaagcttgttgacaccaatggtgcaggtgatgcgttcgttggtggcttcctgtcccagttggtacaagagaagaacatcgatgagtgtgtcagagctgcctgttacgccgccaatgttgtcatccaacgttctggctgcacttaccctgagaagcctgacttcaactagagccatttcagaatttagaatctattggcatctggtctgtataattagtcgggttcgccttggtctgtttgcggcacattctagtgccaccgtacaggtcaaatgttcatgcgtgtaaggcgtgtcatggcactctacaaaagtgcattcgtgcgtcacctcttgcaagggaaaccagctggttgtaagttcagccatgggcacactcttgaggccacaatatgtgccagaaatggcagtgtaccccggcctgccccggcactcggatgcgtgcatgcctctcccggttacggactctttacagttgcatctaaaacaattcaaagcaccttgcggtgcatccttgaaaagttggggcacaatatggttatggaccacactggagctaattgctagcttgctctacagcctataccctataattcagcctacacccataatggttttttgaacatctcgagctgaattacggaacacagaggcggtcaaatacaacgagggcgggccggtaccgcggtcagctgcacagtgccgggctccactcgcgctgggcgtcgacatggcagaggacagcgaggaacatgtcctcgtcgcaggggaggcacagcctggtgtcg

SEQ ID NO: 19968 - DNA, 2380 bp, Zea Mays
ggcggtggcacgttagcctgccgctaggaaactccgggttctctgttctctctttccttccgactttcccactgccgtgacgattttcacagcgaattctccggccggcgccgccccgtccgtccgtccgtccgtccgttcattccgataccgaactcgccagtcgccacagcgatctctctcgctcgctccgccgacgcagcgctcggcttcagctcgagaggaggaaatggccagcagcggctacgaagggatcctcctgggaatggggaaccccctcctcgacatctccgctgtcgtcgacgagggcttcctcgccaagtatgatgtgaagccgggcaatgccattcttgcagaggacaagcatttgccaatcacccatgagacggggagaaacgtagtggactcctaatttttatggccaggtatgtacatatcttgatgttagtgttgtttttctggtgtgtgttaatctcccacagcaccctcactcttttccattatactttaccactttacaaatagacccttcaacttgttcataatacaccaacgctccccctcaggatgggccaaatatatttaacattcccatcttgttacatgccaactcattatccttaggacctaaaccttttgtgagactatccgctacttgattacgagattttacatacttcaacttcaaagccccactatcaatcttctctttgatgaagaacttatcaatctccacatgcttcatgcgatcaaactgaactggattatttgctatgttgattgctgccacattgtcacaatggagcaacattgtctcattcttcaacacttgaagctccttcaagagactcttcaaccatatcatttcacaaactgctagagccattgctctatgttcagcctctgcagtggatcgagataccacaacttgcttcttgtttctccatgaaaccagattacctcccacaaatacacaatatccagaagtggatctccgatcatccctactgctcgcccagtccgcatcacaatacccatccaaattcatatgttgatttggtctaaaccacaatcccttgccaggggttcccttcaggtatctcaggatttgataaactatcttcatatgcccagttctaggatcatgcatatacctactcaccacacttactgcataagcaatgtccggtcttgtatggcaaagatatatcaaacaaccaactaccctctgatatctttcccgatctatagggtcacctgactcagcacaagtttggtgattcctatcaatgggtgaaccacatgggcgacacccaagcattcctgtctctgacaaaaggtcgaggacatactttctttgggagagaataattccctgagatgatctagctatctcaatcccaaggaagtatcgaagtggtccaaggtcctttacctcaaaggctctacttagcctttccttcagtttcttgatctccttcgcatcatctccagtgatcactatatcatcaacataaaccgctagaatagtgatacacgagccctgatgtttgtagaagactgtgtgatctccattgcattgatgataacccatatcacacacaactcgcctgaatctatcaaaccacgcacgtggtgactgctttaggccatagagcgacttcttaagtctacacacttttccaatagtctgtttatttgcaaatccaggtgggatttccatatagacctcttccttcagatcaccatgaagaaatgcattcttcacatccagttgatgaagaggccaaccaaagttggccgcacatgagattaaggtcctcactgtgcccatttttgccacaggtgcaaaggtctcatcatagtcgatcccatatgtctgactatatcccttcgccaccagtcttgctttgtacctgtcaatctttccttcaggagtctgctttactgtgaagacccacttgcaccccaccgccttctttccttcaggaaggtgaacaagttcccatgtcttgttcttctgcagggcaagcagctcttccttcatggcatccttccactttggatcctgtttggcacacctccaatccttcggaatggatattgtttgtagagatgcaatgaaagttctatatgcaggagagacactagagtatgagacatacttagcaatgtcatgttcataacaataacgagaaggaggtttcccagcatttactctaggaactcttctttgcgcaagaggtaattcttcatgttcaggaatgggagaaatatggattggagagacattaccagctgggtctggagaggagtctgaagagagatatgggactggagcttcaacacatccaggttgtggttgctccccctgcttctt

SEQ ID NO: 19969 - DNA, 1804 bp, Zea Mays
ggcggtggcacgttagcctgccgctaggaaactccgggttctctgttctctctttccttccgactttcccactgccgtgacgattttcacagcgaattctccggccggcgccgccccgtccgtccgtccgtccgtccgttcattccgataccgaactcgccagtcgccacagcgatctctctcgctcgctccgccgacgcagcgctcggcttcagctcgagaggaggaaatggccagcagcggctacgaagggatcctcctgggaatggggaaccccctcctcgacatctccgctgtcgtcgacgagggcttcctcgccaagtatgatgtgaagccgggcaatgccattcttgcagaggacaagcatttgccaatgtatgacgaattggctagcaagagcaatgttgaatacattgctggaggagccactcaaaactctatcagggttgcccaatggatgcttcaaattcctggtgcatcaagttacattggttgcatcgggaaggataagtttggtgaggagatgaaaaaaaatgcacaagctgctggtattaatgcccattatcatgaggatgagaatgctccaacgggcacatgtgctgtttgtgttgttggtggagaaagttgagaaggcaaaatatatttacattgctggatttttccttacggtatccccggattctattcaacttgttgctgagcatgccgctgcaactaacaaggtgtttatgatgaacctttctgctccctttatatgcgaggttttccgtgatgcccaagagaaagctcttccgtacgtggattacatctttggaaatgaaactgaggcgaggacctttgctaaagttcgcggttgggagaccgagaatgttgaggagatcgctttgaagatctcccaattaccgaaggcttcaggaacacacaagaagattactgttatcactcaaggttgcgatccggtagttgtggccgatgatggaaaggtgaaaactttccctgtgatcctcttgcctaaggagaagcttgttgacaccaatggtgcaggtgatgcgttcgttggtggcttcctgtcccagttggtacaagagaagaacatcgatgagtgtgtcagagctgcctgttacgccgccaatgttgtcatccaacgttctggctgcacttaccctgagaagcctgacttcaactagagccatttcagaatttagaatctattggcatctggtctgtataattagtcgggttcgccttggtctgtttgcggcacattctagtgccaccgtacaggtcaaatgttcatgcgtgtaaggcgtgtcatggcactctacaaaagtgcattcgtgcgtcacctcttgcaagggaaaccagctggttgtaagttcagccatgggcacactcttgaggccacaatatgtgccagaaatggcagtgtaccccggcctgccccggcactcggatgcgtgcatgcctctcccggttacggactctttacagttgcatctaaaacaattcaaagcaccttgcggtgcatccttgaaaagttggggcacaatatggttatggaccacactggagctaattgctagcttgctctacagcctataccctataattcagcctacacccataatggttttttgaacatctcgagctgaattacggaacacagaggcggtcaaatacaacgagggcgggccggtaccgcggtcagctgcacagtgccgggctccactcgcgctgggcgtcgacatggcagaggacagcgaggaacatgtcctcgtcgcaggggaggcacagcctggtgtcg

SEQ ID NO: 19970 - DNA, 2042 bp, Zea Mays
ggcggtggcacgttagcctgccgctaggaaactccgggttctctgttctctctttccttccgactttcccactgccgtgacgattttcacagcgaattctccggccggcgccgccccgtccgtccgtccgtccgtccgttcattccgataccgaactcgccagtcgccacagcgatctctctcgctcgctccgccgacgcagcgctcggcttcagctcgagaggaggaaatggccagcagcggctacgaagggatcctcctgggaatggggaaccccctcctcgacatctccgctgtcgtcgacgagggcttcctcgccaagtatgatgtgaagccgggcaatgccattcttgcagaggacaagcatttgccaatgtaagtctcgttgcccctttagctcccattgcggtttgaaatgttggttatcgatactagcttgtcctgaacggagaatgggaaacaaattcttgatgttgtcacattaagcacccatgagacggggagaaacgtagtggactcctaatttttatggccaggtatgacgaattggctagcaagagcaatgttgaatacattgctggaggagccactcaaaactctatcagggttgcccaatggatgcttcaaattcctggtgcatcaagttacattggttgcatcgggaaggataagtttggtgaggagatgaaaaaaaatgcacaagctgctggtattaatgcccattatcatgaggatgagaatgctccaacgggcacatgtgctgtttgtgttgttggtggagaaaggtcacttattgctaacttgtctgcggcaaactgctataagtctgaacatctgaagaaacctgagaattgggcacttgttgagaaggcaaaatatatttacattgctggatttttccttacggtatccccggattctattcaacttgttgctgagcatgccgctgcaactaacaaggtgtttatgatgaacctttctgctccctttatatgcgaggttttccgtgatgcccaagagaaagctcttccgtacgtggattacatctttggaaatgaaactgaggcgaggacctttgctaaagttcgcggttgggagaccgagaatgttgaggagatcgctttgaagatctcccaattaccgaaggcttcaggaacacacaagaagattactgttatcactcaaggttgcgatccggtagttgtggccgatgatggaaaggtgaaaactttccctgtgatcctcttgcctaaggagaagcttgttgacaccaatggtgcaggtgatgcgttcgttggtggcttcctgtcccagttggtacaagagaagaacatcgatgagtgtgtcagagctgcctgttacgccgccaatgttgtcatccaacgttctggctgcacttaccctgagaagcctgacttcaactagagccatttcagaatttagaatctattggcatctggtctgtataattagtcgggttcgccttggtctgtttgcggcacattctagtgccaccgtacaggtcaaatgttcatgcgtgtaaggcgtgtcatggcactctacaaaagtgcattcgtgcgtcacctcttgcaagggaaaccagctggttgtaagttcagccatgggcacactcttgaggccacaatatgtgccagaaatggcagtgtaccccggcctgccccggcactcggatgcgtgcatgcctctcccggttacggactctttacagttgcatctaaaacaattcaaagcaccttgcggtgcatccttgaaaagttggggcacaatatggttatggaccacactggagctaattgctagcttgctctacagcctataccctataattcagcctacacccataatggttttttgaacatctcgagctgaattacggaacacagaggcggtcaaatacaacgagggcgggccggtaccgcggtcagctgcacagtgccgggctccactcgcgctgggcgtcgacatggcagaggacagcgaggaacatgtcctcgtcgcaggggaggcacagcctggtgtcg

SEQ ID NO: 19971 - DNA, 1884 bp, Zea Mays
ggcggtggcacgttagcctgccgctaggaaactccgggttctctgttctctctttccttccgactttcccactgccgtgacgattttcacagcgaattctccggccggcgccgccccgtccgtccgtccgtccgtccgttcattccgataccgaactcgccagtcgccacagcgatctctctcgctcgctccgccgacgcagcgctcggcttcagctcgagaggaggaaatggccagcagcggctacgaagggatcctcctgggaatggggaaccccctcctcgacatctccgctgtcgtcgacgagggcttcctcgccaagtatgatgtgaagccgggcaatgccattcttgcagaggacaagcatttgccaatgtagtatgacgaattggctagcaagagcaatgttgaatacattgctggaggagccactcaaaactctatcagggttgcccaatggatgcttcaaattcctggtgcatcaagttacattggttgcatcgggaaggataagtttggtgaggagatgaaaaaaaatgcacaagctgctggtattaatgcccattatcatgaggatgagaatgctccaacgggcacatgtgctgtttgtgttgttggtggagaaaggtcacttattgctaacttgtctgcggcaaactgctataagtctgaacatctgaagaaacctgagaattgggcacttgttgagaaggcaaaatatatttacattgctggatttttccttacggtatccccggattctattcaacttgttgctgagcatgccgctgcaactaacaaggtgtttatgatgaacctttctgctccctttatatgcgaggttttccgtgatgcccaagagaaagctcttccgtacgtggattacatctttggaaatgaaactgaggcgaggacctttgctaaagttcgcggttgggagaccgagaatgttgaggagatcgctttgaagatctcccaattaccgaaggcttcaggaacacacaagaagattactgttatcactcaaggttgcgatccggtagttgtggccgatgatggaaaggtgaaaactttccctgtgatcctcttgcctaaggagaagcttgttgacaccaatggtgcaggtgatgcgttcgttggtggcttcctgtcccagttggtacaagagaagaacatcgatgagtgtgtcagagctgcctgttacgccgccaatgttgtcatccaacgttctggctgcacttaccctgagaagcctgacttcaactagagccatttcagaatttagaatctattggcatctggtctgtataattagtcgggttcgccttggtctgtttgcggcacattctagtgccaccgtacaggtcaaatgttcatgcgtgtaaggcgtgtcatggcactctacaaaagtgcattcgtgcgtcacctcttgcaagggaaaccagctggttgtaagttcagccatgggcacactcttgaggccacaatatgtgccagaaatggcagtgtaccccggcctgccccggcactcggatgcgtgcatgcctctcccggttacggactctttacagttgcatctaaaacaattcaaagcaccttgcggtgcatccttgaaaagttggggcacaatatggttatggaccacactggagctaattgctagcttgctctacagcctataccctataattcagcctacacccataatggttttttgaacatctcgagctgaattacggaacacagaggcggtcaaatacaacgagggcgggccggtaccgcggtcagctgcacagtgccgggctccactcgcgctgggcgtcgacatggcagaggacagcgaggaacatgtcctcgtcgcaggggaggcacagcctggtgtcg

SEQ ID NO: 19972 - DNA, 1827 bp, Zea Mays
ggcggtggcacgttagcctgccgctaggaaactccgggttctctgttctctctttccttccgactttcccactgccgtgacgattttcacagcgaattctccggccggcgccgccccgtccgtccgtccgtccgtccgttcattccgataccgaactcgccagtcgccacagcgatctctctcgctcgctccgccgacgcagcgctcggcttcagctcgagaggaggaaatggccagcagcggctacgaagggatcctcctgggaatggggaaccccctcctcgacatctccgctgtcgtcgacgagggcttcctcgccaagtatgacgaattggctagcaagagcaatgttgaatacattgctggaggagccactcaaaactctatcagggttgcccaatggatgcttcaaattcctggtgcatcaagttacattggttgcatcgggaaggataagtttggtgaggagatgaaaaaaaatgcacaagctgctggtattaatgcccattatcatgaggatgagaatgctccaacgggcacatgtgctgtttgtgttgttggtggagaaaggtcacttattgctaacttgtctgcggcaaactgctataagtctgaacatctgaagaaacctgagaattgggcacttgttgagaaggcaaaatatatttacattgctggatttttccttacggtatccccggattctattcaacttgttgctgagcatgccgctgcaactaacaaggtgtttatgatgaacctttctgctccctttatatgcgaggttttccgtgatgcccaagagaaagctcttccgtacgtggattacatctttggaaatgaaactgaggcgaggacctttgctaaagttcgcggttgggagaccgagaatgttgaggagatcgctttgaagatctcccaattaccgaaggcttcaggaacacacaagaagattactgttatcactcaaggttgcgatccggtagttgtggccgatgatggaaaggtgaaaactttccctgtgatcctcttgcctaaggagaagcttgttgacaccaatggtgcaggtgatgcgttcgttggtggcttcctgtcccagttggtacaagagaagaacatcgatgagtgtgtcagagctgcctgttacgccgccaatgttgtcatccaacgttctggctgcacttaccctgagaagcctgacttcaactagagccatttcagaatttagaatctattggcatctggtctgtataattagtcgggttcgccttggtctgtttgcggcacattctagtgccaccgtacaggtcaaatgttcatgcgtgtaaggcgtgtcatggcactctacaaaagtgcattcgtgcgtcacctcttgcaagggaaaccagctggttgtaagttcagccatgggcacactcttgaggccacaatatgtgccagaaatggcagtgtaccccggcctgccccggcactcggatgcgtgcatgcctctcccggttacggactctttacagttgcatctaaaacaattcaaagcaccttgcggtgcatccttgaaaagttggggcacaatatggttatggaccacactggagctaattgctagcttgctctacagcctataccctataattcagcctacacccataatggttttttgaacatctcgagctgaattacggaacacagaggcggtcaaatacaacgagggcgggccggtaccgcggtcagctgcacagtgccgggctccactcgcgctgggcgtcgacatggcagaggacagcgaggaacatgtcctcgtcgcaggggaggcacagcctggtgtcg

SEQ ID NO: 19973 - DNA, 1635 bp, Zea Mays
ctctgttgtatccaacggcagttgggagagcatcaccaattcacctctctgttgtatccaacggtgctcaaatgggtatgatgtgaagccgggcaatgccattcttgcagaggacaagcatttgccaatgtatgacgaattggctagcaagagcaatgttgaatacattgctggaggagccactcaaaactctatcagggttgcccaatggatgcttcaaattcctggtgcatcaagttacattggttgcatcgggaaggataagtttggtgaggagatgaaaaaaaatgcacaagctgctggtattaatgcccattatcatgaggatgagaatgctccaacgggcacatgtgctgtttgtgttgttggtggagaaaggtcacttattgctaacttgtctgcggcaaactgctataagtctgaacatctgaagaaacctgagaattgggcacttgttgagaaggcaaaatatatttacattgctggatttttccttacggtatccccggattctattcaacttgttgctgagcatgccgctgcaactaacaaggtgtttatgatgaacctttctgctccctttatatgcgaggttttccgtgatgcccaagagaaagctcttccgtacgtggattacatctttggaaatgaaactgaggcgaggacctttgctaaagttcgcggttgggagaccgagaatgttgaggagatcgctttgaagatctcccaattaccgaaggcttcaggaacacacaagaagattactgttatcactcaaggttgcgatccggtagttgtggccgatgatggaaaggtgaaaactttccctgtgatcctcttgcctaaggagaagcttgttgacaccaatggtgcaggtgatgcgttcgttggtggcttcctgtcccagttggtacaagagaagaacatcgatgagtgtgtcagagctgcctgttacgccgccaatgttgtcatccaacgttctggctgcacttaccctgagaagcctgacttcaactagagccatttcagaatttagaatctattggcatctggtctgtataattagtcgggttcgccttggtctgtttgcggcacattctagtgccaccgtacaggtcaaatgttcatgcgtgtaaggcgtgtcatggcactctacaaaagtgcattcgtgcgtcacctcttgcaagggaaaccagctggttgtaagttcagccatgggcacactcttgaggccacaatatgtgccagaaatggcagtgtaccccggcctgccccggcactcggatgcgtgcatgcctctcccggttacggactctttacagttgcatctaaaacaattcaaagcaccttgcggtgcatccttgaaaagttggggcacaatatggttatggaccacactggagctaattgctagcttgctctacagcctataccctataattcagcctacacccataatggttttttgaacatctcgagctgaattacggaacacagaggcggtcaaatacaacgagggcgggccggtaccgcggtcagctgcacagtgccgggctccactcgcgctgggcgtcgacatggcagaggacagcgaggaacatgtcctcgtcgcaggggaggcacagcctggtgtcg

SEQ ID NO: 19974 - DNA, 1567 bp, Zea Mays
gcgggagcggcggcgggctgcggcggagaaacctagctccgtataccatgttgtttttctggtatgacgaattggctagcaagagcaatgttgaatacattgctggaggagccactcaaaactctatcagggttgcccaatggatgcttcaaattcctggtgcatcaagttacattggttgcatcgggaaggataagtttggtgaggagatgaaaaaaaatgcacaagctgctggtattaatgcccattatcatgaggatgagaatgctccaacgggcacatgtgctgtttgtgttgttggtggagaaaggtcacttattgctaacttgtctgcggcaaactgctataagtctgaacatctgaagaaacctgagaattgggcacttgttgagaaggcaaaatatatttacattgctggatttttccttacggtatccccggattctattcaacttgttgctgagcatgccgctgcaactaacaaggtgtttatgatgaacctttctgctccctttatatgcgaggttttccgtgatgcccaagagaaagctcttccgtacgtggattacatctttggaaatgaaactgaggcgaggacctttgctaaagttcgcggttgggagaccgagaatgttgaggagatcgctttgaagatctcccaattaccgaaggcttcaggaacacacaagaagattactgttatcactcaaggttgcgatccggtagttgtggccgatgatggaaaggtgaaaactttccctgtgatcctcttgcctaaggagaagcttgttgacaccaatggtgcaggtgatgcgttcgttggtggcttcctgtcccagttggtacaagagaagaacatcgatgagtgtgtcagagctgcctgttacgccgccaatgttgtcatccaacgttctggctgcacttaccctgagaagcctgacttcaactagagccatttcagaatttagaatctattggcatctggtctgtataattagtcgggttcgccttggtctgtttgcggcacattctagtgccaccgtacaggtcaaatgttcatgcgtgtaaggcgtgtcatggcactctacaaaagtgcattcgtgcgtcacctcttgcaagggaaaccagctggttgtaagttcagccatgggcacactcttgaggccacaatatgtgccagaaatggcagtgtaccccggcctgccccggcactcggatgcgtgcatgcctctcccggttacggactctttacagttgcatctaaaacaattcaaagcaccttgcggtgcatccttgaaaagttggggcacaatatggttatggaccacactggagctaattgctagcttgctctacagcctataccctataattcagcctacacccataatggttttttgaacatctcgagctgaattacggaacacagaggcggtcaaatacaacgagggcgggccggtaccgcggtcagctgcacagtgccgggctccactcgcgctgggcgtcgacatggcagaggacagcgaggaacatgtcctcgtcgcaggggaggcacagcctggtgtcg

SEQ ID NO: 19975 - DNA, 1557 bp, Zea Mays
gtaagctctgaagaaaaaccacaataatattcaaatggatgcttcaaattcctggtgcatcaagttacattggttgcatcgggaaggataagtttggtgaggagatgaaaaaaaatgcacaagctgctggtattaatgcccattatcatgaggatgagaatgctccaacgggcacatgtgctgtttgtgttgttggtggagaaaggtcacttattgctaacttgtctgcggcaaactgctataagtctgaacatctgaagaaacctgagaattgggcacttggtaatgcaaataggccactggagcacctttacgaattcccaccatctcttgatacaaatactgttcatcttgctgtttagactttggacacaatgttgagaaggcaaaatatatttacattgctggatttttccttacggtatccccggattctattcaacttgttgctgagcatgccgctgcaactaacaaggtgtttatgatgaacctttctgctccctttatatgcgaggttttccgtgatgcccaagagaaagctcttccgtacgtggattacatctttggaaatgaaactgaggcgaggacctttgctaaagttcgcggttgggagaccgagaatgttgaggagatcgctttgaagatctcccaattaccgaaggcttcaggaacacacaagaagattactgttatcactcaaggttgcgatccggtagttgtggccgatgatggaaaggtgaaaactttccctgtgatcctcttgcctaaggagaagcttgttgacaccaatggtgcaggtgatgcgttcgttggtggcttcctgtcccagttggtacaagagaagaacatcgatgagtgtgtcagagctgcctgttacgccgccaatgttgtcatccaacgttctggctgcacttaccctgagaagcctgacttcaactagagccatttcagaatttagaatctattggcatctggtctgtataattagtcgggttcgccttggtctgtttgcggcacattctagtgccaccgtacaggtcaaatgttcatgcgtgtaaggcgtgtcatggcactctacaaaagtgcattcgtgcgtcacctcttgcaagggaaaccagctggttgtaagttcagccatgggcacactcttgaggccacaatatgtgccagaaatggcagtgtaccccggcctgccccggcactcggatgcgtgcatgcctctcccggttacggactctttacagttgcatctaaaacaattcaaagcaccttgcggtgcatccttgaaaagttggggcacaatatggttatggaccacactggagctaattgctagcttgctctacagcctataccctataattcagcctacacccataatggttttttgaacatctcgagctgaattacggaacacagaggcggtcaaatacaacgagggcgggccggtaccgcggtcagctgcacagtgccgggctccactcgcgctgggcgtcgacatggcagaggacagcgaggaacatgtcctcgtcgcaggggaggcacagcctggtgtcg

SEQ ID NO: 19976 - DNA, 1534 bp, Zea Mays
aaaccaagtgctaaagtgaatactaatttggaacggatggagtattcgttttagctctttgttttttgtctatatttaaatgaatgataatgaatctagacatatatataaaacacatacatcaaatatgacatgaatctcttaattacctaaaacaaattatattttaggacagagggagtagtaaataaagcatcccatcatctttttactatttttgtcatgtggtgccgccattactcccgcagggggtgcaagaccagggctggggatgcgcccagcgtgccatagacacgcggtggtcgtgctcagatggcgtcagccacgacattcaaagatcaacatgcagggaagttgagaaggcaaaatatatttacattgctggatttttccttacggtatccccggattctattcaacttgttgctgagcatgccgctgcaactaacaaggtgtttatgatgaacctttctgctccctttatatgcgaggttttccgtgatgcccaagagaaagctcttccgtacgtggattacatctttggaaatgaaactgaggcgaggacctttgctaaagttcgcggttgggagaccgagaatgttgaggagatcgctttgaagatctcccaattaccgaaggcttcaggaacacacaagaagattactgttatcactcaaggttgcgatccggtagttgtggccgatgatggaaaggtgaaaactttccctgtgatcctcttgcctaaggagaagcttgttgacaccaatggtgcaggtgatgcgttcgttggtggcttcctgtcccagttggtacaagagaagaacatcgatgagtgtgtcagagctgcctgttacgccgccaatgttgtcatccaacgttctggctgcacttaccctgagaagcctgacttcaactagagccatttcagaatttagaatctattggcatctggtctgtataattagtcgggttcgccttggtctgtttgcggcacattctagtgccaccgtacaggtcaaatgttcatgcgtgtaaggcgtgtcatggcactctacaaaagtgcattcgtgcgtcacctcttgcaagggaaaccagctggttgtaagttcagccatgggcacactcttgaggccacaatatgtgccagaaatggcagtgtaccccggcctgccccggcactcggatgcgtgcatgcctctcccggttacggactctttacagttgcatctaaaacaattcaaagcaccttgcggtgcatccttgaaaagttggggcacaatatggttatggaccacactggagctaattgctagcttgctctacagcctataccctataattcagcctacacccataatggttttttgaacatctcgagctgaattacggaacacagaggcggtcaaatacaacgagggcgggccggtaccgcggtcagctgcacagtgccgggctccactcgcgctgggcgtcgacatggcagaggacagcgaggaacatgtcctcgtcgcaggggaggcacagcctggtgtcg

SEQ ID NO: 19977 - DNA, 3700 bp, Zea Mays
cttggttcttatatactccaacacgcacatagggcgctttattgtcttttaaaccaataattgaagcaatctccagtggttcagacttcagaggtgctctaggcttcaaggggcggctgggtgagggcagtgctcataactaaatgcccaaaggtacgctttgtatgttttattggaggaaaactgaaatttcttgatatttcaggctaacttaatgaccgaatttatcgtccaaattttggtttgtcatccctattcccccatggcttcttttattatctgcatgagtgaaggtgttcatgtttcattttttgtgaggtttcattgtttagttgaagatttgaagaaaatattgtgcgactgaggagctatctgaactagatgaaattaggttctctggtttggttcactgaataatatattgctgcaaaaaagaacctgcgccggcatagaccagtggtttgctccacctgacctagctgcctttactaacctgaatatgctagcaacatactagtacgtactctgtttccaaacaaagatgcaaccaaacaagtgctttgttttgaaaggcaagcaaagcatcaaacagagggaacagcaaccagaacaacacccacatactgtgtggttgacaaaacatgaagcaatctgacaaataaaggcatgcaacatctcaaaaatgatgcaggcaagcagcatgtcgagaacagctggccaggctaacactaaattaagtgaacaaacaactgggagcatgcacaaaaaaatattgaatgagttcacaaccagggcattcatatatataattaagtagtcatgctaatggattgaatgagttcaatgtcttcagagaaccaatcagaatgctatggactatgtattttgtggatctgcaattgtgtttttgtctgcagaattcagtgtgaaagatagatatagaacttgtgttctccttgaccttgtcaacgagggaaaaactaaaaggatttctgaccttacaatttcaaatctaaactaacacactctacctccctagaatactactactgtatttatcaattgggcaccgtaccagagaggcagagaacatccctcactctcagtttccattttgtagctatattctaagggtccctaatgtggtttctattttctagttaggatatatccagcaaaggacagaatgaaagtggtctctgtacaccttgctgctgctgttgctgttctacttctgttggcggcgaagcgcacccccgctattgcggttcctagccctcagtgccaacggcaatgtggcggcgttgacattgcgtttccgttcggcatcggtgacaactgctcgctatcacgaggattcaacctcagctgccaggaggtccaaaatggcgtctacaggccattcctaggtaatattgaggtgctcaacatctccttgataaatggcacggtccgggggctgaaccccgtctcgacatactgctacgactcctcctctggttccatggagcccagtacctggtcattcgacgtgagcagaaccccgtaccggttttcggacgtccagaacaagttcaccgtcatagggtgccagaccctcgtctacatcaaggacaacaccgacaagagctaccagagtgggtgcgtctcgacgtgccagagcctgtcggacgtggtggacggcggctcctgctccggcaggggctgttgccagacggccatacccaaggggatggactactacaacgtgagcttcgacgcaagcttcaacacgagccggatttggagcttcagccgctgcagctacgccgtgctgatggaggcggcggcgttccgtttcagcaccgcgtacatcaagacgacccgattcaacgacacgagcgctgggcaggtgcccgtggtgatggactgggcgatcagggagagggaggcggcgtcgtgtgtggtcgccaaacagaacgggacgggctcttacgcatgcgtcagtagcaacagcgagtgcgtggattcacaaaatgggccagggtacctgtgcaactgcacccaggggtacgaaggcaacccataccttccaggcggatgccatgatgttgatgaatgtaaatacagcccatgtcctacgggtgccgtctgccacaacacggtaggaggatacagatgctcatgccgagcaggactcaagttttctgaacaaagcaatagttgtggccctaatatcaacctaataattggtcttgcactaagtagtgccggtgccattctgattgtcgctgcagctgttgctatctttacacggaggtggcagagaatcgttcagaaaaggcttagaaagaggcactttcacaagaacaagggtattctcctagagcaactgttctcgtcatcagcagataacaacgctagtgacggtacgaagatattctctctggacgacctacagaaggccaccaacaacttcgaccgcacacgtgtggtcggcaacggcggccatggcacggtctacaagggcatactggctgatcagcgcgtggtggcaattaagaaatcgaaactcgtagagagcaccgaaatcgagcagttcatcaacgaggtggccatactctcacagatcaaccatcgcaacgtggtgaagctccatgggtgctgcctcgagtccgaggtccctctgctcgtctacgagttcatctccaatggcacgctgtacgatctcttgcaccaccgcgaccgcgagcaagacggacgacgacgaaccttgctgcagcagctgccctgggaggcacgcctgaggattgcagctgaggtcgccggcgcgcttacgtatctccactcagcagcatccgtgtccattcttcatagagacgtcaagtccatgaacgtgcttttgaatgacagctacacggccaaagtctccgattttggcgcgtccaggtctataccgattgaccagacacatctggtcactgctgtgcagggcacatttgggtatctagatccagagtacttccacacaggccaactcaacgagaagagcgacgtctacagtttcggtgtcattcttctcgagttattgacaaggaagaaaccgatcgtcgatggtgacagcggttacaaggtaaacttgtccagttatttcttatgggaaatggagaggaggccgcttgaagagatagtcgacgtcggaattataggggaagcaagtacggaagcgattctaggcatggctcaactggcagaggagtgcctcagcctaacaagggaggacaggcctaccatgaaggatgtggagatgaggctacaaatgttaaggtgtcagcaagatgttgctccaagggcacatccagcaaagagaacaaatatgattagtcatgctattccgatgcctgctagccagcacggctcacgccaatacagccaagagcaggagtttgtcttgtcctcgcgtgtaccacgatagattgttggcagaaaatatgtgtttttattggctagaatataaaacataaaaatatgtgtttttattggctaggtggatatgaatgagagtttataaccaacaaccatggttcaaaatgtttggatgttaactatgtctatgtcgttgtctgtggatatgtttgacccggttttgcaaacagtgaagcttcaaggcttcctaataagacccagtctctgctctttgcagtgccttgcctcgttctcg

SEQ ID NO: 19978 - DNA, 2643 bp, Zea Mays
caataattgaagtaatctccaaaggttcagacttcagaggtgctcttggcttcaaggggcggctgggtgagggcagagctctcaactaaatgcccaaaggatatatccagcaaaggacagaatgaaagtggtctctatacaccttgctgctgctgttgttgctgttctacttctgttggcggcaaagcgcacccctgctattgcggttcctagccctcaatgccaatggcaatgcggcggcgttgacattgcgtttccgttcggcatcggtgacaactgctcgctatcagcaggattcaacctcagctgtcaggaggtccaaagtggcgtctacaggccattccaagtacctggtatttcgacgcgagcggaaccccgtaccggttttcggacgtccagaacaagttcaccgtcatagggtgccagaccctcgcctacatcacggacaacaccgacaagagctaccagagtgggtgcgtctcgacgtgccagaatgtgtcagacctaacggacggatcctgctccggcatgggatgctgccagacaaacatacccaagaagatgggcttctacaacgtgagcttcgaccctgcctccgacacaagccaaatctcacggctgggcctcggcagctgcagctatgccgtgctgatggaggcggaggagttcagcttcagcaccacgtacatcaccaacacgacagctttcaacgacaccaacagtgggagggtgccggtggtgatggactgggcgataagagatgatggcgcgccgtcgtgtgagctcgccacaaggaacgagacgggcacttacgcgtgccgcagcggcaacagcaagtgtgtggaatcccccaatgggccagggtatctgtgcaactgctccggtgggtacgaaggcaacccatatcttccagatggatgccatgatgtcgacgagtgcaagaagaacagtccatgcccttcagtaggaggtgtatgccacaacacggtcggagcgtacaggtgttcttgtcgagcaggaagaaggcttaacaagcaaaacaatacgtgtgaccctgataccacattaataacaggggttacaatcggcttccttgttctcgtaatcttctcctccttcggatacatgatcctccagaagagaaaactgaaccaggttaagcaagatcattttcggcagcacggaggcatgattttgttcgagaggatgagatcagaaaatggccttgctttcacggtgttcagtgaagctgagcttgtaaaagctacagacagctacgacaagagcagaataattgggaagggaggccatgggacagtctacaaagggatagtcaagggcaacgtgccgatcgcgattaagcgatgtgcgcttattgacgacaggcagaagaaagagtttggtcaggagatgctgatactctcccagatcaaccacaagaacatcgtcaagctcgagggctgttgcctcgaggtggaagttccaatgctggtctacgagttcgttccaaatggcaccctctacgaactcatccatggcaagaaccaagcgctacagatccccttcagcaccctactgaggatcgcccatgaggcagcagagggcctcagttttctgcactcgtacgcgtctcctccgatcatccatggcgacgtgaagagcgccaacatccttcttgatggcaactacatggccaaagtgtcagattttggggcctccatactagcgccgtccgacaaagagcagtatgtcacgatggttcaaggtacctgtggatacctcgaccctgaatacatgcagacatgccaactgactgagaagagtgacgtctacagcttcggcgtcatccttcttgaggtcctcaccggccaagagcctctcaagttggatgggcctgagacgcagagaagcttgtcatcgaagttcctgtccgctatgaaggagaacaatcttgatgtgatcttgccgagccacgtgaatggtggacaagggagcaatgaactgatcagagggctcgcagagctagccaagcagtgcctggacatgtgtggctgcaacagaccatccatgaaggaggttgccgatgagcttggtagattgaggaagctttcgctgcatccttgggtacagatcgatgcagagatgatagagtctcaaagccttcttagtgggacaacgactgctagctttgaaatagaagttggtacaactgggtatcctacacaggaagctgagaacctgcccatgaacccaagaagttcgtactatgcgaggtaggtgattagcgtatgttgttgtgtactccgttgaaatttctactgctaggataacagcaagctagcagttctgttatcaaagatatactgcatattgacacaaatctctgcctatctttagccattcaaaagtatgtatatgtgtttctgcgcagcacgtctgcaacatatataatccggttttttacgtggtgcccttagttaatactccttgacaataaattctatatcttatttctttagataagtttatacatctgaaacattatcagatattaatacttgcaattgtaagatgctaatatttcacgcttctattgcatagaaaagggttacatatatagacctagaaaaccctaaatttaat

SEQ ID NO: 19979 - DNA, 1204 bp, Zea Mays
gactgagcaactctaacaaatagtgtaaatcaaccccaaaagcattagcaggagagaaaaaatgtgttttgtcccctccaacaggcccccttcttctcctcaatctcttcgtgtcccgcatccggtggcgttggtcatgcaaatatgcgcgccctgtgatttcccctatcgctgcagtgcccgctcccgtggctgctttcccgcgctttttgcctcgcgcgccgtagtggtggtgtgtggaacttggaaggcgcgagcgcgcaagcctctgtgggctgccgcagaggtttctgcgtccgaggagcaagacgctcgatctgaagtgcacgaggtggcgacagagtcttctgtggtgctggacgaggtggggggacatcgatccgcagtggaggcacgcggttgtaacttctgcgctgttagccggggcagggggctccatccgcgatgaatgtgcgcgcccgtggcttctgcggtggtggccgaggcagggggaagctcgatccgcggtgaaggcgcgcgtccgtggcttctgcgctggtggccaaggcgggggaagatgccgatcgcacgtgctggttcttcaattccgccgtcgccttgcaccggaggtcggattccccaaaggcatatggtcggcgacggatccatcacctgcgatggtggagaagctttgcgaccaagaaaccaaggtggaggaccatcgctccctttgttgccaggcccttccggggttgtccaagatccatttgcatcgtccacgtttggaagcagcgatggcttctctacatcctttgactgagctgctcatggttgcacaggcatgttcgttgtgcaaaactctggacaggttgcaaaactctggacaggatgcaaaatcactatttgctgtcacggctaccagtttgcatttgtgacttcggttcctgtaatggtgggcgagagaaagtaggtgtcagtaactgtgtggtaattattagtatgaacttatctcagtaatttgtgtggtaattgttagtatgaatgtatatcagtttggttccaattgctacttgtcttagcacatgttctctgtcaaattgttatttgtctcattaattgttctgtcaaattattacttgtcaatttcagtacttgtctgtgtaactagtgtaccagtaacagataccatatgtgagggttcaaggagcagcaactcttaaacgat

SEQ ID NO: 19980 - DNA, 1247 bp, Zea Mays
gactgagcaactctaacaaatagtgtaaatcaaccccaaaagcattagcaggagagaaaaaatgtgttttgtcccctccaacaggcccccttcttctcctcaatctcttcgtgtcccgcatccggtggcgttggtcatgcaaatatgcgcgccctgtgatttcccctatcgctgcagtgcccgctcccgtggctgctttcccgcgctttttgcctcgcgcgccgtagtggtggtgtgtggaacttggaaggcgcgagcgcgcaagcctctgtgggctgccgcagaggtttctgcgtccgaggagcaagacgctcgatctgaagtgcacgaggtggcgacagagtcttctgtggtgctggacgaggtggggggacatcgatccgcagtggaggcacgcggttgtaacttctgcgctgttagccggggcagggggctccatccgcgatgaatgtgcgcgcccgtggcttctgcggtggtggccgaggcagggggaagctcgatccgcggtgaaggcgcgcgtccgtggcttctgcgctggtggccaaggcgggggaagatgccgatcgcacgtgctggttcttcaattccgccgtcgccttgcaccggaggtcggattccccaaaggcatatggtcggcgacggatccatcacctgcgatggtggagaagctttgcgaccaagaaaccaaggtggaggaccatcgctccctttgttgccaggcccttccggggttgtccaagatccatttgcatcgtccacgtttggaagcagcgatggcttctctacatcctttgactgagctgctcatggattgagttaagacgacagagtggtagtacaatgcaagacatggttgcacaggcatgttcgttgtgcaaaactctggacaggttgcaaaactctggacaggatgcaaaatcactatttgctgtcacggctaccagtttgcatttgtgacttcggttcctgtaatggtgggcgagagaaagtaggtgtcagtaactgtgtggtaattattagtatgaacttatctcagtaatttgtgtggtaattgttagtatgaatgtatatcagtttggttccaattgctacttgtcttagcacatgttctctgtcaaattgttatttgtctcattaattgttctgtcaaattattacttgtcaatttcagtacttgtctgtgtaactagtgtaccagtaacagataccatatgtgagggttcaaggagcagcaactcttaaacgat

SEQ ID NO: 19981 - DNA, 1252 bp, Zea Mays
gactgagcaactctaacaaatagtgtaaatcaaccccaaaagcattagcaggagagaaaaaatgtgttttgtcccctccaacaggcccccttcttctcctcaatctcttcgtgtcccgcatccggtggcgttggtcatgcaaatatgcgcgccctgtgatttcccctatcgctgcagtgcccgctcccgtggctgctttcccgcgctttttgcctcgcgcgccgtagtggtggtgtgtggaacttggaaggcgcgagcgcgcaagcctctgtgggctgccgcagaggtttctgcgtccgaggagcaagacgctcgatctgaagtgcacgaggtggcgacagagtcttctgtggtgctggacgaggtggggggacatcgatccgcagtggaggcacgcggttgtaacttctgcgctgttagccggggcagggggctccatccgcgatgaatgtgcgcgcccgtggcttctgcggtggtggccgaggcagggggaagctcgatccgcggtgaaggcgcgcgtccgtggcttctgcgctggtggccaaggcgggggaagatgccgatcgcacgtgctggttcttcaattccgccgtcgccttgcaccggaggtcggattccccaaaggcatatggtcggcgacggatccatcacctgcgatggtggagaagctttgcgaccaagaaaccaaggtggaggaccatcgctccctttgttgccaggcccttccggggttgtccaagatccatttgcatcgtccacgtttggaagcagcgatggcttctctacatcctttgactgagctgctcatgtcaaggattgagttaagacgacagagtggtagtacaatgcaagacatggttgcacaggcatgttcgttgtgcaaaactctggacaggttgcaaaactctggacaggatgcaaaatcactatttgctgtcacggctaccagtttgcatttgtgacttcggttcctgtaatggtgggcgagagaaagtaggtgtcagtaactgtgtggtaattattagtatgaacttatctcagtaatttgtgtggtaattgttagtatgaatgtatatcagtttggttccaattgctacttgtcttagcacatgttctctgtcaaattgttatttgtctcattaattgttctgtcaaattattacttgtcaatttcagtacttgtctgtgtaactagtgtaccagtaacagataccatatgtgagggttcaaggagcagcaactcttaaacgat

SEQ ID NO: 19982 - DNA, 1975 bp, Zea Mays
aagcagaatgcagtgaaaggctgccattttaaaaccttgctctccggtataaaaaaaccttgctctccttctccgctcgatccccaacccacccgcacggcaccaccaccaatccatccatccttacgcattagctacactccccggcgtcgagcccccgcgaaccctagaccgccgccctcgcatctccgctcgtcgccgcggggtactccctccacccgtctagtgggagtcgcggcgggacgtccccgatccgagctctctccgccttagggtttttggggccggccatggactccatggagcagccggagcccaaaaccgcgggccactactacgcccttcaggttggctccgttttcctgacgggctactacaacgtcctgacgaaccagccgcacctggcgaaccagttctacacggacaacagcagtgttgttagactggactgcgagacgggtcggtggtcgtttggagagacggtggaggttatcaatgatatgatgatgtccatgaaactaagcaaggttgaggttaaaacagcgaatttcttagagtcatgggctggggcgattacgctgttggttactggcctagtgaaattgaagcactaccctgttcgcaagcgatttgctcagaatattgttcttgctccaaaggaagatggatattttatattcagtgacatctttaagctcatttgtgatgagtatgatgatcagtacccttttgctgattacaattgtgctgacaacatgccccaagtggaagcgtcttacacaatggctgaaatagggtctgattatttggatggagaacctgaggcacaggagactgttgatcctgctgaaaatcatgtgcagcaccaagattatttggaatataaggctggcaatgtgattgatgatgaaactcatttggaagagcatattcccccattccccagttcaacggatgttaaaagggattcacctcttgctcttccccaccctccatcacctaccctcgaagaacctgtggaagaagcacccaagacatatgcttcagtgaagagtttctttcggtttatgttgggaatctttcgccatctacttcggtctttgatcttgagaaagtgttccaggcttttggaagaattaaacctgatggagttgctatccgaagccgcaaggaggctggagtattctttggctttgttgagttcgaagacatgtctggtattcagaatgctttaagtgcatctccagtagagttaaatggccgttttgttcatgttgaagagaggaggcctaactgcggattccctcgtggaagaagaggccgtggaagagctgatttctcaagggaccaagctggtgggagatacgacggggagtatgctactcgatcgaaaggaattgggcaccagaaaaaaactggacgccagtatgacagttactactagttatgtaccgctctgctggtaaatggccgtgtaccattggtgttctctacttggtgctgttctggccataattttgctaaaagtcacaatgatgtcgggactagtatttctgctttgttgacattcggcggagtcttttttgggggatgggcatctgttaccattttgttgcgtcacagtagtttttggttctcagttaccgtgaccagttacaaatggatcatgctaccgtcggtgtcaaactttttaagcaatacctaggttgtacttgtaccgatgttaatagttggggaaatttggatccataccattcaaagatcaccactttggatccataccattactatctcacttacatgtgggtccacatgagtcaatgactacatgtgggtccacatgagtcaatgacatgtggggtccatggtatatatctaaagtttggatcttttaatgatatagatccaattgttcctaatagttggtattcttagattgacatagtttgcatacgtcggtattcacgttggtgtt

SEQ ID NO: 19983 - DNA, 1723 bp, Zea Mays
aagcagaatgcagtgaaaggctgccattttaaaaccttgctctccggttatcaatgatatgatgatgtccatgaaactaagcaaggttgaggttaaaacagcgaatttcttagagtcatgggctggggcgattacgctgttggttactggcctagtgaaattgaagcactaccctgttcgcaagcgatttgctcagaatattgttcttgctccaaaggaagatggatattttatattcagtgacatctttaagctcatttgtgatgagtatgatgatcagtacccttttgctgattacaattgtgctgacaacatgccccaagtggaagcgtcttacacaatggctgaaatagggtctgattatttggatggagaacctgaggcacaggagactgttgatcctgctgaaaatcatgtgcagcaccaagattatttggaatataaggctggcaatgtgattgatgatgaaactcatttggaagagcatattcccccattccccagttcaacggatgttaaaagggattcacctcttgctcttccccaccctccatcacctaccctcgaagaacctgtggaagaagcacccaagacatatgcttcagtgttgcgaacgaaatcaaaggcaacgctggcgattacagagtcacagcaggctcaacagctggcccagcagccacagtctgcctcagtgcatgaaaagtctaacctggacaaccaccgggatgttagcgtccctgaggatgaaggtaatgaacatggctaaaaatccattcgatccttgtgcgcctgaactgaagagtttctttcggtttatgttgggaatctttcgccatctacttcggtctttgatcttgagaaagtgttccaggcttttggaagaattaaacctgatggagttgctatccgaagccgcaaggaggctggagtattctttggctttgttgagttcgaagacatgtctggtattcagaatgctttaagtgcatctccagtagagttaaatggccgttttgttcatgttgaagagaggaggcctaactgcggattccctcgtggaagaagaggccgtggaagagctgatttctcaagggaccaagctggtgggagatacgacggggagtatgctactcgatcgaaaggaattgggcaccagaaaaaaactggacgccagtatgacagttactactagttatgtaccgctctgctggtaaatggccgtgtaccattggtgttctctacttggtgctgttctggccataattttgctaaaagtcacaatgatgtcgggactagtatttctgctttgttgacattcggcggagtcttttttgggggatgggcatctgttaccattttgttgcgtcacagtagtttttggttctcagttaccgtgaccagttacaaatggatcatgctaccgtcggtgtcaaactttttaagcaatacctaggttgtacttgtaccgatgttaatagttggggaaatttggatccataccattcaaagatcaccactttggatccataccattactatctcacttacatgtgggtccacatgagtcaatgactacatgtgggtccacatgagtcaatgacatgtggggtccatggtatatatctaaagtttggatcttttaatgatatagatccaattgttcctaatagttggtattcttagattgacatagtttgcatacgtcggtattcacgttggtgtt

SEQ ID NO: 19984 - DNA, 3402 bp, Zea Mays
aagcagaatgcagtgaaaggctgccattttaaaaccttgctctccggtataaaaaaaccttgctctccttctccgctcgatccccaacccacccgcacggcaccaccaccaatccatccatccttacgcattagctacactccccggcgtcgagcccccgcgaaccctagaccgccgccctcgcatctccgctcgtcgccgcggggtactccctccacccgtctagtgggagtcgcggcgggacgtccccgatccgagctctctccgccttagggtttttggggccggccatggactccatggagcagccggagcccaaaaccgcgggccactactacgcccttcaggttggctccgttttcctgacgggctactacaacgtcctgacgaaccagccgcacctggcgaaccagttctacacggacaacagcagtgttgttagactggactgcgagacgggtcggtggtcgtttggagagacggtggaggttatcaatgatatgatgatgtccatgaaactaagcaaggttgaggttaaaacagcgaatttcttagagtcatgggctggggcgattacgctgttggttactggcctagtgaaattgaagcactaccctgttcgcaagcgatttgctcagaatattgttcttgctccaaaggaagatggatattttatattcagtgacatctttaagctcatttgtgatgagtatgatgatcagtacccttttgctgattacaattgtgctgacaacatgccccaagtggaagcgtcttacacaatggctgaaatagggtctgattatttggatggagaacctgaggcacaggagactgttgatcctgctgaaaatcatgtgcagcaccaagattatttggaatataaggctggcaatgtgattgatgatgaaactcatttggaagagcatattcccccattccccagttcaacggatgttaaaagggattcacctcttgctcttccccaccctccatcacctaccctcgaagaacctgtggaagaagcacccaagacatatgcttcagtgttgcgaacgaaatcaaaggcaacgctggcgattacagagtcacagcaggctcaacagctggcccagcagccacagtctgcctcagtgcatgaaaagtctaacctggacaaccaccgggatgttagcgtccctgaggatgaaggtaatgaacatggctaaaaatccattcgatccttgtgcgcctgaactggtattgttaattgttcatttggtttttattcaaatcttccatttttagatttttgcttaattatcttttcaaggccttcttggatggtttaagttcagacccaaatctttgactaagtattttagccagtagttaaggagattttaaattgaccccctttatagaagttcctcctagaatatttaaatcgatatcgatgacctttactgacccccttttaaattgtcattgtatcagttctgtaaataatgtttcttaagtgggggctcttgttaggctatccaaactcctgtttgcttattttcaactgttattttcttctcattatgtgtaactatgtaagagctgctacatcatcgagaattccgtagcttattttcaacaccaggtttgcatgtttccagtttcattttatttaggcccaatcttcaatactagcagatttttagcaagtagttaagaagtaggcaatcgtagtagtaattgctgcatcaattaggagggtttcatgggcaggtgtatagccccatatcagctatataattgtgattgcttgtgtacctgcattaaccaaatacttgtgctgtttatacttgttgtgtgtgcgtgcgtgcgtgtgtgtgtgtgtgtgtgtgtgtgtgtgtgtgtgtgtgtgtgaaacaaagatccagtgtgtgttttgtttgtgataaacactcaagagggattgatttccaacattatcgactagcatgtcatctttactaaagcatgctaccagtaccagtatgtaatgaggtacctgagccagaatttcttctttattaaccactctttgcgaatgcgctgtatttatctttcttgaagcattatgacagtattgttaggctgagacatagttttttcttcattaaaagtttgcaccccccttacaaacttccatgctacagttatctgtcagggacctacttcatgcaacagaatttttgtctttcaatggtcaaaggttctttatgtttgtatatctttgtatgtatatcatgactaggttgtatacctgatttggggcagtgcatgttaaaatctctagtgtgtagtccacaatcatttctaccttctttgctatgttgtgtccatttctttttttattttataatatatatgtacagttatgcccacaaaatgtttttggacatagatcgattctcttctgttgtacatttttatgtagccttaactgtttggtttcgtttttcagaagagtttctttcggtttatgttgggaatctttcgccatctacttcggtctttgatcttgagaaagtgttccaggcttttggaagaattaaacctgatggagttgctatccgaagccgcaaggaggctggagtattctttggctttgttgagttcgaagacatgtctggtattcagaatgctttaagtgcatctccagtagagttaaatggccgttttgttcatgttgaagagaggaggcctaactgcggattccctcgtggaagaagaggccgtggaagagctgatttctcaagggaccaagctggtgggagatacgacggggagtatgctactcgatcgaaaggaattgggcaccagaaaaaaactggacgccagtatgacagttactactagttatgtaccgctctgctggtaaatggccgtgtaccattggtgttctctacttggtgctgttctggccataattttgctaaaagtcacaatgatgtcgggactagtatttctgctttgttgacattcggcggagtcttttttgggggatgggcatctgttaccattttgttgcgtcacagtagtttttggttctcagttaccgtgaccagttacaaatggatcatgctaccgtcggtgtcaaactttttaagcaatacctaggttgtacttgtaccgatgttaatagttggggaaatttggatccataccattcaaagatcaccactttggatccataccattactatctcacttacatgtgggtccacatgagtcaatgactacatgtgggtccacatgagtcaatgacatgtggggtccatggtatatatctaaagtttggatcttttaatgatatagatccaattgttcctaatagttggtattcttagattgacatagtttgcatacgtcggtattcacgttggtgtt

SEQ ID NO: 19985 - DNA, 3384 bp, Zea Mays
aagcagaatgcagtgaaaggctgccattttaaaaccttgctctccggtataaaaaaaccttgctctccttctccgctcgatccccaacccacccgcacggcaccaccaccaatccatccatccttacgcattagctacactccccggcgtcgagcccccgcgaaccctagaccgccgccctcgcatctccgctcgtcgccgcggggtactccctccacccgtctagtgggagtcgcggcgggacgtccccgatccgagctctctccgccttagggtttttggggccggccatggactccatggagcagccggagcccaaaaccgcgggccactactacgcccttcaggttggctccgttttcctgacgggctactacaacgtcctgacgaaccagccgcacctggcgaaccagttctacacggacaacagcagtgttgttagactggactgcgagacgggtcggtggtcgtttggagagacggtggaggttatcaatgatatgatgatgtccatgaaactaagcaaggttgaggttaaaacagcgaatttcttagagtcatgggctggggcgattacgctgttggttactggcctagtgaaattgaagcactaccctgttcgcaagcgatttgctcagaatattgttcttgctccaaaggaagatggatattttatattcagtgacatctttaagctcatttgtgatgagtatgatgatcagtacccttttgctgattacaattgtgctgacaacatgccccaagtggaagcgtcttacacaatggctgaaatagggtctgattatttggatggagaacctgaggcacaggagactgttgatcctgctgaaaatcatgtgcagcaccaagattatttggaatataaggctggcaatgtgattgatgatgaaactcatttggaagagcatattcccccattccccagttcaacggatgttaaaagggattcacctcttgctcttccccaccctccatcacctaccctcgaagaacctgtggaagaagcacccaagacatatgcttcagtggcaacgctggcgattacagagtcacagcaggctcaacagctggcccagcagccacagtctgcctcagtgcatgaaaagtctaacctggacaaccaccgggatgttagcgtccctgaggatgaaggtaatgaacatggctaaaaatccattcgatccttgtgcgcctgaactggtattgttaattgttcatttggtttttattcaaatcttccatttttagatttttgcttaattatcttttcaaggccttcttggatggtttaagttcagacccaaatctttgactaagtattttagccagtagttaaggagattttaaattgaccccctttatagaagttcctcctagaatatttaaatcgatatcgatgacctttactgacccccttttaaattgtcattgtatcagttctgtaaataatgtttcttaagtgggggctcttgttaggctatccaaactcctgtttgcttattttcaactgttattttcttctcattatgtgtaactatgtaagagctgctacatcatcgagaattccgtagcttattttcaacaccaggtttgcatgtttccagtttcattttatttaggcccaatcttcaatactagcagatttttagcaagtagttaagaagtaggcaatcgtagtagtaattgctgcatcaattaggagggtttcatgggcaggtgtatagccccatatcagctatataattgtgattgcttgtgtacctgcattaaccaaatacttgtgctgtttatacttgttgtgtgtgcgtgcgtgcgtgtgtgtgtgtgtgtgtgtgtgtgtgtgtgtgtgtgtgtgtgaaacaaagatccagtgtgtgttttgtttgtgataaacactcaagagggattgatttccaacattatcgactagcatgtcatctttactaaagcatgctaccagtaccagtatgtaatgaggtacctgagccagaatttcttctttattaaccactctttgcgaatgcgctgtatttatctttcttgaagcattatgacagtattgttaggctgagacatagttttttcttcattaaaagtttgcaccccccttacaaacttccatgctacagttatctgtcagggacctacttcatgcaacagaatttttgtctttcaatggtcaaaggttctttatgtttgtatatctttgtatgtatatcatgactaggttgtatacctgatttggggcagtgcatgttaaaatctctagtgtgtagtccacaatcatttctaccttctttgctatgttgtgtccatttctttttttattttataatatatatgtacagttatgcccacaaaatgtttttggacatagatcgattctcttctgttgtacatttttatgtagccttaactgtttggtttcgtttttcagaagagtttctttcggtttatgttgggaatctttcgccatctacttcggtctttgatcttgagaaagtgttccaggcttttggaagaattaaacctgatggagttgctatccgaagccgcaaggaggctggagtattctttggctttgttgagttcgaagacatgtctggtattcagaatgctttaagtgcatctccagtagagttaaatggccgttttgttcatgttgaagagaggaggcctaactgcggattccctcgtggaagaagaggccgtggaagagctgatttctcaagggaccaagctggtgggagatacgacggggagtatgctactcgatcgaaaggaattgggcaccagaaaaaaactggacgccagtatgacagttactactagttatgtaccgctctgctggtaaatggccgtgtaccattggtgttctctacttggtgctgttctggccataattttgctaaaagtcacaatgatgtcgggactagtatttctgctttgttgacattcggcggagtcttttttgggggatgggcatctgttaccattttgttgcgtcacagtagtttttggttctcagttaccgtgaccagttacaaatggatcatgctaccgtcggtgtcaaactttttaagcaatacctaggttgtacttgtaccgatgttaatagttggggaaatttggatccataccattcaaagatcaccactttggatccataccattactatctcacttacatgtgggtccacatgagtcaatgactacatgtgggtccacatgagtcaatgacatgtggggtccatggtatatatctaaagtttggatcttttaatgatatagatccaattgttcctaatagttggtattcttagattgacatagtttgcatacgtcggtattcacgttggtgtt

SEQ ID NO: 19986 - DNA, 3326 bp, Zea Mays
aagcagaatgcagtgaaaggctgccattttaaaaccttgctctccggtataaaaaaaccttgctctccttctccgctcgatccccaacccacccgcacggcaccaccaccaatccatccatccttacgcattagctacactccccggcgtcgagcccccgcgaaccctagaccgccgccctcgcatctccgctcgtcgccgcggggtactccctccacccgtctagtgggagtcgcggcgggacgtccccgatccgagctctctccgccttagggtttttggggccggccatggactccatggagcagccggagcccaaaaccgcgggccactactacgcccttcaggttggctccgttttcctgacgggctactacaacgtcctgacgaaccagccgcacctggcgaaccagttctacacggacaacagcagtgttgttagactggactgcgagacgggtcggtggtcgtttggagagacggtggaggttatcaatgatatgatgatgtccatgaaactaagcaaggttgaggttaaaacagcgaatttcttagagtcatgggctggggcgattacgctgttggttactggcctagtgaaattgaagcactaccctgttcgcaagcgatttgctcagaatattgttcttgctccaaaggaagatggatattttatattcagtgacatctttaagctcatttgtgatgagtatgatgatcagtacccttttgctgattacaattgtgctgacaacatgccccaagtggaagcgtcttacacaatggctgaaatagggtctgattatttggatggagaacctgaggcacaggagactgttgatcctgctgaaaatcatgtgcagcaccaagattatttggaatataaggctggcaatgtgattgatgatgaaactcatttggaagagcatattcccccattccccagttcaacggatgttaaaagggattcacctcttgctcttccccaccctccatcacctaccctcgaagaacctgtggaagaagcacccaagacatatgcttcagtgttgcgaacgaaatcaaaggcaacgctggcgattacagagtcacagcaggctcaacagctggcccagcagccacagtctgcctcagtgcatgaaaagtctaacctggacaaccaccgggatgttagcgtccctgaggatgaaggtaatgaacatggctaaaaatccattcgatccttgtgcgcctgaactggtattgttaattgttcatttggtttttattcaaatcttccatttttagatttttgcttaattatcttttcaaggccttcttggatggtttaagttcagacccaaatctttgactaagtattttagccagtagttaaggagattttaaattgaccccctttatagaagttcctcctagaatatttaaatcgatatcgatgacctttactgacccccttttaaattgtcattgtatcagttctgtaaataatgtttcttaagtgggggctcttgttaggctatccaaactcctgtttgcttattttcaactgttattttcttctcattatgtgtaactatgtaagagctgctacatcatcgagaattccgtagcttattttcaacaccaggtttgcatgtttccagtttcattttatttaggcccaatcttcaatactagcagatttttagcaagtagttaagaagtaggcaatcgtagtagtaattgctgcatcaattaggagggtttcatgggcaggtgtatagccccatatcagctatataattgtgattgcttgtgtacctgcattaaccaaatacttgtgctgtttatacttgttgtgtgtgcgtgcgtgcgtgtgtgtgtgtgtgtgtgtgtgtgtgtgtgtgtgtgtgtgtgaaacaaagatccagtgtgtgttttgtttgtgataaacactcaagagggattgatttccaacattatcgactagcatgtcatctttactaaagcatgctaccagtaccagtatgtaatgaggtacctgagccagaatttcttctttattaaccactctttgcgaatgcgctgtatttatctttcttgaagcattatgacagtattgttaggctgagacatagttttttcttcattaaaagtttgcaccccccttacaaacttccatgctacagttatctgtcagggacctacttcatgcaacagaatttttgtctttcaatggtcaaaggttctttatgtttgtatatctttgtatgtatatcatgactaggttgtatacctgatttggggcagtgcatgttaaaatctctagtgtgtagtccacaatcatttctaccttctttgctatgttgtgtccatttctttttttattttataatatatatgtacagttatgcccacaaaatgtttttggacatagatcgattctcttctgttgtacatttttatgtagccttaactgtttggtttcgtttttcagaagagtttctttcggtttatgttgggaatctttcgccatctacttcggtctttgatcttgagaaagtgttccaggcttttggaagaattaaacctgatggagttgctatccgaagccgcaaggaggctggagtattctttggctttgttgagttcgaagacatgtctggtattcagaatgctttaagtgaagaggccgtggaagagctgatttctcaagggaccaagctggtgggagatacgacggggagtatgctactcgatcgaaaggaattgggcaccagaaaaaaactggacgccagtatgacagttactactagttatgtaccgctctgctggtaaatggccgtgtaccattggtgttctctacttggtgctgttctggccataattttgctaaaagtcacaatgatgtcgggactagtatttctgctttgttgacattcggcggagtcttttttgggggatgggcatctgttaccattttgttgcgtcacagtagtttttggttctcagttaccgtgaccagttacaaatggatcatgctaccgtcggtgtcaaactttttaagcaatacctaggttgtacttgtaccgatgttaatagttggggaaatttggatccataccattcaaagatcaccactttggatccataccattactatctcacttacatgtgggtccacatgagtcaatgactacatgtgggtccacatgagtcaatgacatgtggggtccatggtatatatctaaagtttggatcttttaatgatatagatccaattgttcctaatagttggtattcttagattgacatagtttgcatacgtcggtattcacgttggtgtt

SEQ ID NO: 19987 - DNA, 1512 bp, Zea Mays
atatacacagtgtctcggagttgctcttacaacccgtagacagtcgcgcaaatgttgcgagcggccgcgtcgaggtgcgcccgcggcgccgtccggcggctgtcgtcgtctgcggtgatggaggcttcaccagtcgccgtggggtcgcggtggcagtctctccttgacgagggtgactggtcgtaccatcgggagtggtggggcgaggaggacggccccggcgagggcgtgcagaccgtcttccgccgccactccgagtgcggcaacggcgtcgtctccgtctccgcctaccctgcttcccttccggctagtgagcattggccagccatggagagatggcttcaagagagtaattcaagactatacccagaatcagccagctctgaccagtttaaggagcaaaatcacaaagctagacaaatgattgcaaaatcactattagacttcaaaacagggatgtcaagagtatggtatcagcaggattgacagcgctctcatgttcttcgtatgatctaccacaagcagcatctggacagaacaccatgaaaattctgtgcatcggccatggtggcggcagcttaccattgtttttggctagcaagttcagaggtgctaccatccacattgtggaaatcgatccggtggttgtttcagcatcagttgaatccatgggtttccccgcgtcacccgttaaaggcttatcgcccgagtccatgctaccttccgacgccgacgacctattatggggaggcatacacgaccgcgtcttcctgcacacagcagacgccgaggatttcattggcagcgacggcaacgagtatgacatcgtcttcatcgacgcctacgacggagacgacgtgttccctcgcaagctctgggacgtggacggggcgttcatgaagagcctagagaagagagtgcaccccgtccacggcaccgtggtcgtgaacctgcactccgactcagactccgaggccgcggaaggcaacgccgacttccagagcgcgcttcccatgggcaggcacgtctcccaggtctgcagggcttacatgcagcacttcggggtggccttcacggccgcggtcccgtggctctgcaacatcacgctcgtcgcctgccgcgccggcgggatggcgggcggcgcgcgccgggggctgagccgcagggatctcgtccttggcaagcttctgtccaagtccgacacggtggagcgcgcgctgggcctgccgttcccgtgtctgccctacatcaagaacggcttcacgatgccgactgatatcaaagactacgcttgctgcacaaaggaaatggccggaaacatcctgcaggcccgggttggagcggctgttgcggtgcacaaaagactcgactactgtgattccggcaaccgtatgagagaagtcgtggccgccgccgccgcaggctcaggggcgcgcacgtgaggtacattaaactggacgcatggcaggccacgagatgcttgcggttgccgatagaggcctttaccctcaa

SEQ ID NO: 19988 - DNA, 2928 bp, Zea Mays
atatacacagtgtctcggagttgctcttacaacccgtagacagtcgcgcaaatgttgcgagcggccgcgtcgaggtgcgcccgcggcgccgtccggcggctgtcgtcgtctgcggtgatggaggcttcaccagtcgccgtggggtcgcggtggcagtctctccttgacgagggtgactggtcgtaccatcgggagtggtggggcgaggaggacggccccggcgagggcgtgcagaccgtcttccgccgccactccgagtgcggcaacggcgtcgtctccgtctccgcctaccctgcttcccttccggctagtgagcattggccagccatggagagatggcttcaagagagtaattcaagactatacccagaatcagccagctctgaccagtttaagatgtcaagagtatggtatcagcaggattgacagcgctctcatgttcttcgtatgatctaccacaagcagcatctggacagaacaccatgaaaattctgtgcatcggccatggtggcggcagcttaccattgtttttggctagcaagttcagaggtgctaccatccacattgtggaaatcgatccggtggttgtttcagcatcagttgaatccatgggtttccccgcgtcacccgttaaaggcttatcgcccgagtccatgctaccttccgacgccgacgacctattatggggaggcatacacgaccgcgtcttcctgcacacagcagacgccgaggatttcattggcagcgacggcaacgagtatgacatcgtcttcatcgacgcctacgacggagacgacgtgttccctcgcaagctctgggacgtggacggggcgttcatgaagagcctagagaagagagtgcaccccgtccacggcaccgtggtcgtgaacctgcactccgactcagactccgaggccgcggaaggcaacgccgacttccagagcgcgcttcccatgggcaggcacgtctcccaggtctgcagggcttacatgcagcacttcggggtggccttcacggccgcggtcccgtggctctgcaacatcacgctcgtcgcctgccgcgccggcgggatggcgggcggcgcgcgccgggggctgagccgcagggatctcgtccttggcaagcttctgtccaagtccgacacggtggagcgcgcgctgggcctgccgttcccgtgtctgccctacatcaagaacggcttcacgatgccgactgatatcaaagactacgcttgctgcacaaaggaaatggccggaaacatcctgcaggcccgggttggagcggctgttgcggtgcacaaaagactcgactactgtgattccggcaaccgtatgagagaagtcgtggccgccgccgccgcaggctcaggggcgcgcacgtgaggtacattaaactggacgcatggcaggccacgagatgcttgcggttgccgatagaggcctttaccctcaagccgtggttgcattcgaagagtacttatcatcatgggtcatcgatctcgatcgagctccttttcttacaaaatcaacaacgagtcacatgcacccgctcgagaacgcacccgctcgagaacgcgttagtcaaagaacgaatagcgtgcctgccgaccgaccgatacagcgccaagtggctggctggttccatattatcacgatgatatatataaaatggagacacgtgactacgtgaggccaggcctccctcgacgaagaaacatccccgccttttcctctgcctcatgtgagtgagaacagagaagccgagggagatcggaggatgctgctgaggagctcgtccacgccgttcccgctccccttcctctcctcctccctgcacctccgccgcgccttctccgacgcccacctcccctccctccacccgccgtcatccacccccaacgacgccggcaggaccagcaaccccggacgcggcggcctccacacggagctctccttctccgtctacaacaccttcggcaagggcgaggccgtactcgccccgctggcgtcgccaccccgctcccagggacaggaagggggtcggcagcctccgccgactgtggtggtgcagccggagcacccggaggtgccgctgttcctcgccaggggcctcgggatcgaccgcatcgcctccggcttcttcaccgcgggcgccgacttgaaaggctgcggagccagcatggaggagcagcaggacgaggctgtggccgcgctggacgcgcagtacaagaccatggtcgacgagcagcccggcaacgcgctgttcctgcgcaactacgcgcagttcctccacgaggcgaagggcgacaccgcaagggccgaggagtactactcgcgcgccatgctcgcggatcccagcgacggcgagatcatgtcgcagtacgccaggctggtctgggaggtgcaccacgacccggagaggtgcctcggctacttccagcagtcggtgcaggcggccccgttggacagccacgtcctcgctgcgtacgccagcttcttgtgggagcaggacgacgacgactgcggagaccaagggacggcgggtggagcggcggcacaggagcgcgccgcgggaacagggcaagccatggagctggcgtccgcggccgtctgatcctttccactcctgacaggggacagcgcaggcgcgctatagcaaaatgcagtataaaatgcatggcgtatcaacggttataaagtatgaaatataaactgaataataagaataaaagaactcatgcggatatatacaaggtggagtggtgcggtgtaaaagtgtgttttctccctgaagaacaagccaattattctaattatctatgtcaattgtcaaattatatgttctttcggtggctacattagtacatattctaatcacgatgagaccactcccaaaaggagtgtctttttgaagagagacatgtttcac

SEQ ID NO: 19989 - DNA, 1253 bp, Zea Mays
atgagagagtcagaggagctcgacatcgagatcgcaaagccagcaggcagcctggtggaggagatggacgttggtcggtcagtttgctcaccggccgtagagatcgaaggcttcgcggaacgcgtcgggtcatcgaccatagctcccagtccttgtataccgtctcatgatatgaatctgcagtctttgcctgttgctactggagctccttatccagcatctatggcaccatcttccagcgctttctccacggttactacgcatggatgctttccttattcgacaccatccaccgcgcatccttccctttctggaatcctgccctgcaacaacaacatgatatcctattctgtactaccagaagaaccttcaggtggtattttctctggacagtctcctgaaggctgtgcagaccctggtgacattgattaccgtgttgagagtcagcaaattcctggtcctggcagaaccgtcgacgaatccgacaatagagatgaatggtttgtccccactgatataacttggaactggcaccaaatggctgaatccgcacccgttccctcgtatccgaattctaagtcatggcaacatgatgagcagcacatgaatttcggcactgtatcactatcaccgtataaagtactgttggctttctattgtgctaaacctaaagcaattcttgatataatgaatgttgaaggtctgactcgcgatcaggtcaaaagccactttcagaagtacaaacttcaagtaaagcagcacccttctgaagttccaggtacatcagtggagatgaccatgcgtagcgaagcaataccttcagacgtacagaaacacatccaagactatgcattacaggtgcaagtagagtttcagaagaaactacatgatatggtagagagcacaatgctggagattcgcagaagcctgctcgagaaccatgtgatgagtctccacgagcttgagcagcggcagtcgtcgtaccgtggcagcgacgacgcaggagcatgacgccatgaccgtcttctggtcgaggcttcaatgcctgtttctatgtggtgttgctttttttttcgcatgtaaatttgagttggtagtatagctccagaaccttgtgataagaatctgtgtgtgatgctgcagagtcaccttttgcagtacgtactggaatttcacactccacatgtaattatgcaaactctatagcttaccaactgttaacttgaatgggcaatgttgatgtctaaacttgg

SEQ ID NO: 19990 - DNA, 1370 bp, Zea Mays
atgagagagtcagaggagctcgacatcgagatcgcaaagccagcaggcagcctggtggaggagatggacgttggtcggtcagtttgctcaccggccgtagagatcgaaggcttcgcggaacgcgtcgggtcatcgaccatagctcccagtccttgtataccgtctcatgatatgaatctgcagtctttgcctgttgctactggagctccttatccagcatctatggcaccatcttccagcgctttctccacggttactacgcatggatgctttccttattcgacaccatccaccgcgcatccttccctttctggaatcctgccctgcaacaacaacatgatatcctattctgtactaccagaagaaccttcaggtggtattttctctggacagtctcctgaaggctgtgcagaccctggtgacattgattaccgtgttgagagtcagcaaattcctggtcctggcagaaccgtcgacgaatccgacaatagagatgaatggtttgtccccactgatataacttggaactggcaccaaatggctgaatccgcacccgttccctcgtatccgaattctaagtcatggcaacatgatgagcagcacatgaatttcggcactgtatcactatcaccgtataaagtactgttggctttctattgtgctaaacctaaagcaattcttgatataatgaatgttgaaggtctgactcgcgatcaggtcaaaagccactttcagaagtacaaacttcaagtaaagcagcacccttctgaagttccaggtacatcagtggagatgaccatgcgtagcgaagcaataccttcagacgtacagaagttcgtaacaacgagaaaaaacaaagcttttgcaaactatcatttgtgccaccatcgtcacttttacaaaaagtcccttatatttctttgtaatcaacctggcgtccatctaactcgacacatccaagactatgcattacaggtgcaagtagagtttcagaagaaactacatgatatggtagagagcacaatgctggagattcgcagaagcctgctcgagaaccatgtgatgagtctccacgagcttgagcagcggcagtcgtcgtaccgtggcagcgacgacgcaggagcatgacgccatgaccgtcttctggtcgaggcttcaatgcctgtttctatgtggtgttgctttttttttcgcatgtaaatttgagttggtagtatagctccagaaccttgtgataagaatctgtgtgtgatgctgcagagtcaccttttgcagtacgtactggaatttcacactccacatgtaattatgcaaactctatagcttaccaactgttaacttgaatgggcaatgttgatgtctaaacttgg

SEQ ID NO: 19991 - DNA, 1320 bp, Zea Mays
cgttcgcgcctccagcctcccctgaatcggtgagtccaaggaagtagttgcgggtcccctcgaccaattcgtttgctggcagtgcaaaggtccttgtataccgtctcatgatatgaatctgcagtctttgcctgttgctactggagctccttatccagcatctatggcaccatcttccagcgctttctccacggttactacgcatggatgctttccttattcgacaccatccaccgcgcatccttccctttctggaatcctgccctgcaacaacaacatgatatcctattctgtactaccagaagaaccttcaggtggtattttctctggacagtctcctgaaggctgtgcagaccctggtgacattgattaccgtgttgagagtcagcaaattcctggtcctggcagaaccgtcgacgaatccgacaatagagatgaatggtttgtccccactgatataacttggaactggcaccaaatggctgaatccgcacccgttccctcgtatccgaattctaagtcatggcaacatgatgagcagcacatggtacatgaatcagtctcggttccttctgaagaacctcagcaactgtgtccaaccgtttctcctctggcaaccacaaataatgcgcattgccccaaaagggccaaggcacgcatgcggtggactatggagatgcatgatcgcttcgtagatgctgtcaatctgcttggtggctgtgaaagtgctaaacctaaagcaattcttgatataatgaatgttgaaggtctgactcgcgatcaggtcaaaagccactttcagaagtacaaacttcaagtaaagcagcacccttctgaagttccaggtacatcagtggagatgaccatgcgtagcgaagcaataccttcagacgtacagaaacacatccaagactatgcattacaggtgcaagtagagtttcagaagaaactacatgatatggtagagagcacaatgctggagattcgcagaagcctgctcgagaaccatgtgatgagtctccacgagcttgagcagcggcagtcgtcgtaccgtggcagcgacgacgcaggagcatgacgccatgaccgtcttctggtcgaggcttcaatgcctgtttctatgtggtgttgctttttttttcgcatgtaaatttgagttggtagtatagctccagaaccttgtgataagaatctgtgtgtgatgctgcagagtcaccttttgcagtacgtactggaatttcacactccacatgtaattatgcaaactctatagcttaccaactgttaacttgaatgggcaatgttgatgtctaaacttgg

SEQ ID NO: 19992 - DNA, 5927 bp, Zea Mays
atgggctttactctggcttttgatggtgctgtcgcgcaggttacaacgagagcaaggccatccctgattccctgatgccttcttccttgagaaggcctccgcggaggcgttcatggagcgagtcgagtcggtagtgggcgaggtattcaacatcgtcaggcagtggcaaactcagcagcagaagcaggtccaggagttccaggcactacacgacacacacttggctccagatgagcattcatagtatttcgtcttccatgtcaattaacctataaactctttaataattgacgtctcgatgatgtgttatcatccatgtttaacttaaatgtgttctagttctgaaataccaaagtttataaaacaaaagatatgcaacaaggaatcaacattgaactgtaggtgtatgtgtgatagcctaccaagtgtaaaagtagatatgttcccttggttaggtgtagctaaacatatggtgaaaattggcagaagggaaatggtcctaacattcattttttggaagaactatatggtatagactacagagttcagatgctcaaggtagacagtggctgtttggtttggaggtataacataaataaaatgttccatgttattattgataaatgcattacatacaataaagaataccattgcatactttttttttatttcattctttattttctataaccctggttgtacctcacatgctactgaattctcttatatatatgatacatataagaggaagtatttcaatgagcccaaaaggctaaggagagagctgcaactgaagctagtgaagataaggggacaaggtctctaagggaatcttcagcaactactctaatgactacaccaatgtcatctccccctactattcccacacagacagaatagttctagaattcttggtggtaataaagagttgttgctgaagtaaatgcagttctttctgcagccaaaaaaactttagttggctttcacatgatatgtggcgatgaaaatatgttttcgtatgaatggcatcgtgaggaagaacttttgcatctagagtgtttgggtatatgtaatatgttgtatgccaaatgcaacttcaaaaaccttggtaacaatatagaattagtgtcttgatttatgctatttactaatatttttaacttagaatggggaattaattgcagaagcttcagaggagatttctgaaagaatggtttaatctagaaaataatgaattaatgttctttttgtatcaaatgccatatgcagaggtattgtttcattgaggacttccattcttctagtgacaatatgtatgtgtactggattgtgcaagcaattgctgattactttgatgtgtggattcatgcttacactttgcatcattcatggttctgtcatattgtctcccaagttgattcctatatgtcactatgtaatgcatgatttaatgtagatggccactagttatgtgtgcaaattctagttgatgaagtggcaatgtgttctcacttatcagtccctgataagctaaaatttcaccaaaacctggtcatatagaccaagtgcaggtaaccatatcataaaaaatgcaattatattatttttgttgtcgtgttattgaaatgttggaaatatattttgggctagaaggaggatggccagactatgtactctactactctgcttcttccttttcagtaaactccctttagatacatatttgaaaaaaataagcttagattttattatggcactggcatacatgggcatgagaaaaattacggtgtaaacatttttaacaaatcattgagtaatgtagaaacaaggactttgagaattctgtatttctgtactaggaaaccatatgcttaggcaattcttcagaggccatctctatctgttcatagcccttgataaacttgctataccatttagcagacaattttggtgttcgctttagtgacttgaaattcacatgacaaagaccatactttacggtgtaaccagagatccattcgaagttatccatcaaagaccacacaaaataacctctcacatctgctcctttcctgcacaaaagtagcaaagttttattattacctggctggagagcagtttacatgaaaagataattgaggcatgcaacaaccttattgcaaagctcaagtaagtgaggtagtcacgaatgtaagttgatctttcaatatcattaattatttcttctgctgtagtgctaatattggctatttgggcataacctgaaagataaaaaaagggtgatcaagagatccatacagatattttttatggtaccagtgtactacaagtgtaatatatgtaaataagcatggaagtgaatcattgttatgcacaaaggcatatattttgtatctaatttgtagattttagggaacctagtaacccaccgttctctgtgatgtacaaaggtatgcttttatatctctgctttaaatacatgaccaacttctccatggagcttggaacgacataggtgtttgcaacaggtgtctgcaatattagtttagttgtgttagcttgtgcataattaatttgtaactaggattcttgttgaatagaataatgcaatatacaatgccgatttttaccggttttccaatgggtatcccatttcgttctgttgatatagaaactaaagcttcagaagggtaggcgtccatatcacatagagaatatatgcaatccttgacatagaatgtttggtagtgatttaccccgatgaagtcaatttggttcttcagtagtttcttctctccttctgtaaattttggcaagtttggacctaagatttggcgcatctggtgaggatagtcaccaaagaacaagggatccaagatcctgttttagcatatatcatcaagtgagcattcaatcgtgaagatcaaaagttagttccaatcgtaaaatgctagtatgatggaaggttactgaatcaattgataccatggagcatcgaaagacagagctcggcttactgccaagtggtcctctgtgatattccttagtggttcataccatcttagatgtaatgaaattcctacaaagccaccttgcttggactgagaaggatggggaacaaggaaaacaaattatacaactttcatgagtatttaagagcaagcacacgggctcagttgatgaattccctgaatcacatttcccatatggctcggaacaacggttgggtggaaatgccccaatggagtatgcaagctttacaataagatttggctcattgaatgtgacccagtgctttactcggtcaccaaacatcttgaagcaaagctcaacgaagtaggtgaagtcctccctgaatagaaataaagaaacaaccacatatgaacttacggcatcttcgtagataaagctataatataggtgactaactgaatttgacttactgaatctctgggttcaaccaagaattgtatctttcttggagttcttcaggatggcatttgtggagggaggtagctgcccgcataatagcagaacagaaggcgtacctttttctagcagtccgttgatgaggctattgtagaatttaacgcctgcctgattaacacctccgaagcgaccctctggccatggatatttgaaaggtacaagcatataatttaagttaaacaccggcactaaggaaggatcacgtgcgtgttgtcgagctggtagctgtgtcagaagtcattgacagttggtgtaattctgagaatgagctcacttggaagaattctcgaccacgacaatgagaatctgtaggagctgagaccaatcgaatgcatcatttctatgtcgtcctgccggtgctgactttgtgtgagattgttgaccccctcatctttcttgataaagtatctttttgtttctaatgatgcttaccttgtatcgatgataatggtcagcagctacgtcgccattgcttccatcgtcaatatttcctgatttatggttaatagccaagactaagacagcaacaaaatcaagcacgtctgtgattttcacgatttcagcactccacaggggcaaccggcccttcgtgacctcgtcgtgcagtcctcgctccggtagctcgaaggaacgtcgcgatccaacgcgcggtgtcctggcgtcgtgagcttagacgggcctagtgcaagctgagcggctggatgtgctggacagcgctgtcgagcggcgagagccgtcgagtaggccgacttcagacgatctgacgaatccgagccgaagagtcatcctaatcgggccctctatttcctaagcccggccctcccagttctagctagctaaacagaagatgcatcatgcattcactagccaaaaaaaaaaatgttcacttcctcccctgattcaagagcgtgaaatgattttctaactgagacaaaaagagaaagaggaaagcgcagtgcgcaatgaccttctaaatagatacgtctaattaacatgcaaaatgtatgagcgtcgaaattaggttaaaccatttaatttatgacatcaagaagagtgttgaaaaatatttagtacaacataattgaaagtaccaagcaaaaagagaaggagatggtattgccacctgctgatccggtctggctaattccatatatattgtctagaactggttaggatggttcattaaccggccgagccggtttgcttgctgtgtccgaaacttatcgtgcttaaatacgttaagcgacaaacaaacaacacaaattattagttggatatgtaatcatgtctagattataataatatataaacagatcattaagtggttatataatttataagttggattatataatcctgagaggaaacaaacatagcctaagttgatttataaattagtattggatctattttagcgtgtaggtcatattttggacttggtttttactatgatgataccaactctttctatatgtgagagcattatggctgattaaggataccaagctttcaatcgtcagaaaatacatcatctaatttatttaccatactttctctctatcttattgttcatcaggagattttataggtgaccttaacaaccctagagaaatcttcgcgtactattctctgatagatcttttcgagaggtgactaagagtaggggggcctgggtcgggcgcgtatcctctaacatcgactgcactgacgttgggtcactgcacgtggccctaggcccacgcgtcagtgacccaccttgacgtcagaggatctcgacccgtctggaccacccgggccatggcattgggacgtgaccccaaatttgttaactcccacgaaaatattaaaatattatatgattaatatttgttaaatggtttaagtgtttaatatatatatttcattcttgtactagattgtatctctagacttgaaataattgatgaaaaagaacaaaggtattactttacaatgatgttttttgtcatgtaacttttaaactacttgtttttgccatgctttcatcaaaaattggtccatatggctttagtcaatcttggttctgccattgccgagagtttaccgataaacgaaaaacggactcaatatcagcctaaccaagacctcaatctgtttagttgatccattgcatttttgttgcaatcaagattatttacaaccacaggcatactaattttaacaaaagctacgaaaatatcccaagaatccccttaactataagggctagttggagagccataaaaccggagtagattagaggggctaaaattcccttcttagggttgatttggtgacaaggagatcacgaggggattaaggaggaaattagatggactaatttccccctcaataccctccaatccccccgtgattcctggtcaccaatagggctagttggcacctccattttcctatga

SEQ ID NO: 19993 - DNA, 5885 bp, Zea Mays
atgggctttactctggcttttgatggtgctgtcgcgcaggttacaacgagagcaaggccatccctgattccctgatgccttcttccttgagaaggcctccgcggaggcgttcatggagcgagtcgagtcggtagtgggcgaggtattcaacatcgtcaggcagtggcaaactcagcagcagaagcaggtccaggagttccaggcactacacgacacacacttggctccagatgagcattcatagtatttcgtcttccatgtcaattaacctataaactctttaataattgacgtctcgatgatgtgttatcatccatgtttaacttaaatgtgttctagttctgaaataccaaagtttataaaacaaaagatatgcaacaaggaatcaacattgaactgtaggtgtatgtgtgatagcctaccaagtgtaaaagtagatatgttcccttggttaggtgtagctaaacatatggtgaaaattggcagaagggaaatggtcctaacattcattttttggaagaactatatggtatagactacagagttcagatgctcaaggtagacagtggctgtttggtttggaggtataacataaataaaatgttccatgttattattgataaatgcattacatacaataaagaataccattgcatactttttttttatttcattctttattttctataaccctggttgtacctcacatgctactgaattctcttatatatatgatacatataagaggaagtatttcaatgagcccaaaaggctaaggagagagctgcaactgaagctagtgaagataaggggacaaggtctctaagggaatcttcagcaactactctaatgactacaccaatgtcatctccccctactattcccacacagacagaatagttctagaattcttggtggtaataaagagttgttgctgaagtaaatgcagttctttctgcagccaaaaaaactttagttggctttcacatgatatgtggcgatgaaaatatgttttcgtatgaatggcatcgtgaggaagaacttttgcatctagagtgtttgggtatatgtaatatgttgtatgccaaatgcaacttcaaaaaccttggtaacaatatagaattagtgtcttgatttatgctatttactaatatttttaacttagaatggggaattaattgcagaagcttcagaggagatttctgaaagaatggtttaatctagaaaataatgaattaatgttctttttgtatcaaatgccatatgcagaggtattgtttcattgaggacttccattcttctagtgacaatatgtatgtgtactggattgtgcaagcaattgctgattactttgatgtgtggattcatgcttacactttgcatcattcatggttctgtcatattgtctcccaagttgattcctatatgtcactatgtaatgcatgatttaatgtagatggccactagttatgtgtgcaaattctagttgatgaagtggcaatgtgttctcacttatcagtccctgataagctaaaatttcaccaaaacctggtcatatagaccaagtgcaggtaaccatatcataaaaaatgcaattatattatttttgttgtcgtgttattgaaatgttggaaatatattttgggctagaaggaggatggccagactatgtactctactactctgcttggccagactatgtactctactactctgcttcttccttttcagtaaactccctttagatacatatttgaaaaaaataagcttagattttattatggcactggcatacatgggcatgagaaaaattacggtgtaaacatttttaacaaatcattgagtaatgtagaaacaaggactttgagaattctgtatttctgtactaggaaaccatatgcttaggcaattcttcagaggccatctctatctgttcatagcccttgataaacttgctataccatttagcagacaattttggtgttcgctttagtgacttgaaattcacatgacaaagaccatactttacggtgtaaccagagatccattcgaagttatccatcaaagaccacacaaaataacctctcacatctgctcctttcctgcacaaaagtagcaaagttttattattacctggctggagagcagtttacatgaaaagataattgaggcatgcaacaaccttattgcaaagctcaagtaagtgaggtagtcacgaatgtaagttgatctttcaatatcattaattatttcttctgctgtagtgctaatattggctatttgggcataacctgaaagataaaaaaagggtgatcaagagatccatacagatattttttatggtaccagtgtactacaagtgtaatatatgtaaataagcatggaagtgaatcattgttatgcacaaaggcatatattttgtatctaatttgtagattttagggaacctagtaacccaccgttctctgtgatgtacaaaggtatgcttttatatctctgctttaaatacatgaccaacttctccatggagcttggaacgacataggtgtttgcaacaggtgtctgcaatattagtttagttgtgttagcttgtgcataattaatttgtaactaggattcttgttgaatagaataatgcaatatacaatgccgatttttaccggttttccaatgggtatcccatttcgttctgttgatatagaaactaaagcttcagaagggtaggcgtccatatcacatagagaatatatgcaatccttgacatagaatgtttggtagtgatttaccccgatgaagtcaatttggttcttcagtagtttcttctctccttctgtaaattttggcaagtttggacctaagatttggcgcatctggtgaggatagtcaccaaagaacaagggatccaagatcctgttttagcatatatcatcaagtgagcattcaatcgtgaagatcaaaagttagttccaatcgtaaaatgctagtatgatggaaggttactgaatcaattgataccatggagcatcgaaagacagagctcggcttactgccaagtggtcctctgtgatattccttagtggttcataccatcttagatgtaatgaaattcctacaaagccaccttgcttggactgagaaggatggggaacaaggaaaacaaattatacaactttcatgagtatttaagagcaagcacacgggctcagttgatgaattccctgaatcacatttcccatatggctcggaacaacggttgggtggaaatgccccaatggagtatgcaagctttacaataagatttggctcattgaatgtgacccagtgctttactcggtcaccaaacatcttgaagcaaagctcaacgaagtaggtgaagtcctccctgaatagaaataaagaaacaaccacatatgaacttacggcatcttcgtagataaagctataatataggatggcatttgtggagggaggtagctgcccgcataatagcagaacagaaggcgtacctttttctagcagtccgttgatgaggctattgtagaatttaacgcctgcctgattaacacctccgaagcgaccctctggccatggatatttgaaaggtacaagcatataatttaagttaaacaccggcactaaggaaggatcacgtgcgtgttgtcgagctggtagctgtgtcagaagtcattgacagttggtgtaattctgagaatgagctcacttggaagaattctcgaccacgacaatgagaatctgtaggagctgagaccaatcgaatgcatcatttctatgtcgtcctgccggtgctgactttgtgtgagattgttgaccccctcatctttcttgataaagtatctttttgtttctaatgatgcttaccttgtatcgatgataatggtcagcagctacgtcgccattgcttccatcgtcaatatttcctgatttatggttaatagccaagactaagacagcaacaaaatcaagcacgtctgtgattttcacgatttcagcactccacaggggcaaccggcccttcgtgacctcgtcgtgcagtcctcgctccggtagctcgaaggaacgtcgcgatccaacgcgcggtgtcctggcgtcgtgagcttagacgggcctagtgcaagctgagcggctggatgtgctggacagcgctgtcgagcggcgagagccgtcgagtaggccgacttcagacgatctgacgaatccgagccgaagagtcatcctaatcgggccctctatttcctaagcccggccctcccagttctagctagctaaacagaagatgcatcatgcattcactagccaaaaaaaaaaatgttcacttcctcccctgattcaagagcgtgaaatgattttctaactgagacaaaaagagaaagaggaaagcgcagtgcgcaatgaccttctaaatagatacgtctaattaacatgcaaaatgtatgagcgtcgaaattaggttaaaccatttaatttatgacatcaagaagagtgttgaaaaatatttagtacaacataattgaaagtaccaagcaaaaagagaaggagatggtattgccacctgctgatccggtctggctaattccatatatattgtctagaactggttaggatggttcattaaccggccgagccggtttgcttgctgtgtccgaaacttatcgtgcttaaatacgttaagcgacaaacaaacaacacaaattattagttggatatgtaatcatgtctagattataataatatataaacagatcattaagtggttatataatttataagttggattatataatcctgagaggaaacaaacatagcctaagttgatttataaattagtattggatctattttagcgtgtaggtcatattttggacttggtttttactatgatgataccaactctttctatatgtgagagcattatggctgattaaggataccaagctttcaatcgtcagaaaatacatcatctaatttatttaccatactttctctctatcttattgttcatcaggagattttataggtgaccttaacaaccctagagaaatcttcgcgtactattctctgatagatcttttcgagaggtgactaagagtaggggggcctgggtcgggcgcgtatcctctaacatcgactgcactgacgttgggtcactgcacgtggccctaggcccacgcgtcagtgacccaccttgacgtcagaggatctcgacccgtctggaccacccgggccatggcattgggacgtgaccccaaatttgttaactcccacgaaaatattaaaatattatatgattaatatttgttaaatggtttaagtgtttaatatatatatttcattcttgtactagattgtatctctagacttgaaataattgatgaaaaagaacaaaggtattactttacaatgatgttttttgtcatgtaacttttaaactacttgtttttgccatgctttcatcaaaaattggtccatatggctttagtcaatcttggttctgccattgccgagagtttaccgataaacgaaaaacggactcaatatcagcctaaccaagacctcaatctgtttagttgatccattgcatttttgttgcaatcaagattatttacaaccacaggcatactaattttaacaaaagctacgaaaatatcccaagaatccccttaactataagggctagttggagagccataaaaccggagtagattagaggggctaaaattcccttcttagggttgatttggtgacaaggagatcacgaggggattaaggaggaaattagatggactaatttccccctcaataccctccaatccccccgtgattcctggtcaccaatagggctagttggcacctccattttcctatga

SEQ ID NO: 19994 - DNA, 2189 bp, Zea Mays
gcaggttacaacgagagcaaggccatccctgattccctgatgccttcttccttgagaaggcctccgcggaggcgttcatggagcgagtcgagtcggtagtgggcgaggtattcaacatcgtcaggcagtggcaaactcagcagcagaagcaggtccaggagttccaggcactacacgacacacacttggctccagatgagcattcatagtatttcgtcttccatgtcaattaacctataaactctttaataattgacgtctcgatgatgtgttatcatccatgtttaacttaaatgtgttctagttctgaaataccaaagtttataaaacaaaagatatgcaacaaggaatcaacattgaactgtaggtgtatgtgtgatagcctaccaagtgtaaaagtagatatgttcccttggttaggtgtagctaaacatatggtgaaaattggcagaagggaaatggtcctaacattcattttttggaagaactatatggtatagactacagagttcagatgctcaaggtagacagtggctgtttggtttggaggtataacataaataaaatgttccatgttattattgataaatgcattacatacaataaagaataccattgcatactttttttttatttcattctttattttctataaccctggttgtacctcacatgctactgaattctcttatatatatgatacatataagaggaagtatttcaatgagcccaaaaggctaaggagagagctgcaactgaagctagtgaagataaggggacaaggtctctaagggaatcttcagcaactactctaatgactacaccaatgtcatctccccctactattcccacacagacagaatagttctagaattcttggtggtaataaagagttgttgctgaagtaaatgcagttctttctgcagccaaaaaaactttagttggctttcacatgatatgtggcgatgaaaatatgttttcgtatgaatggcatcgtgaggaagaacttttgcatctagagtgtttgggtatatgtaatatgttgtatgccaaatgcaacttcaaaaaccttggtaacaatatagaattagtgtcttgatttatgctatttactaatatttttaacttagaatggggaattaattgcagaagcttcagaggagatttctgaaagaatggtttaatctagaaaataatgaattaatgttctttttgtatcaaatgccatatgcagaggtattgtttcattgaggacttccattcttctagtgacaatatgtatgtgtactggattgtgcaagcaattgctgattactttgatgtgtggattcatgcttacactttgcatcattcatggttctgtcatattgtctcccaagttgattcctatatgtcactatgtaatgcatgatttaatgtagatggccactagttatgtgtgcaaattctagttgatgaagtggcaatgtgttctcacttatcagtccctgataagctaaaatttcaccaaaacctggtcatatagaccaagtgcaggtaaccatatcataaaaaatgcaattatattatttttgttgtcgtgttattgaaatgttggaaatatattttgggctagaaggaggatggccagactatgtactctactactctgcttggccagactatgtactctactactctgcttcttccttttcagtaaactccctttagatacatatttgaaaaaaataagcttagattttattatggcactggcatacatgggcatgagaaaaattacggtgtaaacatttttaacaaatcattgagtaatgtagaaacaaggactttgagaattctgtatttctgtactaggaaaccatatgcttaggcaattcttcagaggccatctctatctgttcatagcccttgataaacttgctataccatttagcagacaattttggtgttcgctttagtgacttgaaattcacatgacaaagaccatactttacggtgtaaccagagatccattcgaagttatccatcaaagaccacacaaaataacctctcacatctgctcctttcctgcacaaaagtagcaaagttttattattacctggctggagagcagtttacatgacaaagaccatactttacggtgtaaccagagatccattcaaagttatccatcaaagaccacacaaaat

SEQ ID NO: 19995 - DNA, 5348 bp, Zea Mays
caggttacaacgagagcaaggccatccctgattccctgatgccttcttccttgagaaggcctccgcggaggcgttcatggagcgagtcgagtcggtagtgggcgaggtattcaacatcgtcaggcagtggcaaactcagcagcagaagcaggtccaggagttccagaggaagtatttcaatgagcccaaaaggctaaggagagagctgcaactgaagctagtgaagataaggggacaaggtctctaagggaatcttcagcaactactctaatgactacaccaatgtcatctccccctactattcccacacagacagaatagttctagaattcttggtggtaataaagagttgttgctgaagtaaatgcagttctttctgcagccaaaaaaactttagttggctttcacatgatatgtggcgatgaaaatatgttttcgtatgaatggcatcgtgaggaagaacttttgcatctagagtgtttgggtatatgtaatatgttgtatgccaaatgcaacttcaaaaaccttggtaacaatatagaattagtgtcttgatttatgctatttactaatatttttaacttagaatggggaattaattgcagaagcttcagaggagatttctgaaagaatggtttaatctagaaaataatgaattaatgttctttttgtatcaaatgccatatgcagaggtattgtttcattgaggacttccattcttctagtgacaatatgtatgtgtactggattgtgcaagcaattgctgattactttgatgtgtggattcatgcttacactttgcatcattcatggttctgtcatattgtctcccaagttgattcctatatgtcactatgtaatgcatgatttaatgtagatggccactagttatgtgtgcaaattctagttgatgaagtggcaatgtgttctcacttatcagtccctgataagctaaaatttcaccaaaacctggtcatatagaccaagtgcaggtaaccatatcataaaaaatgcaattatattatttttgttgtcgtgttattgaaatgttggaaatatattttgggctagaaggaggatggccagactatgtactctactactctgcttcttccttttcagtaaactccctttagatacatatttgaaaaaaataagcttagattttattatggcactggcatacatgggcatgagaaaaattacggtgtaaacatttttaacaaatcattgagtaatgtagaaacaaggactttgagaattctgtatttctgtactaggaaaccatatgcttaggcaattcttcagaggccatctctatctgttcatagcccttgataaacttgctataccatttagcagacaattttggtgttcgctttagtgacttgaaattcacatgacaaagaccatactttacggtgtaaccagagatccattcgaagttatccatcaaagaccacacaaaataacctctcacatctgctcctttcctgcacaaaagtagcaaagttttattattacctggctggagagcagtttacatgaaaagataattgaggcatgcaacaaccttattgcaaagctcaagtaagtgaggtagtcacgaatgtaagttgatctttcaatatcattaattatttcttctgctgtagtgctaatattggctatttgggcataacctgaaagataaaaaaagggtgatcaagagatccatacagatattttttatggtaccagtgtactacaagtgtaatatatgtaaataagcatggaagtgaatcattgttatgcacaaaggcatatattttgtatctaatttgtagattttagggaacctagtaacccaccgttctctgtgatgtacaaaggtatgcttttatatctctgctttaaatacatgaccaacttctccatggagcttggaacgacataggtgtttgcaacaggtgtctgcaatattagtttagttgtgttagcttgtgcataattaatttgtaactaggattcttgttgaatagaataatgcaatatacaatgccgatttttaccggttttccaatgggtatcccatttcgttctgttgatatagaaactaaagcttcagaagggtaggcgtccatatcacatagagaatatatgcaatccttgacatagaatgtttggtagtgatttaccccgatgaagtcaatttggttcttcagtagtttcttctctccttctgtaaattttggcaagtttggacctaagatttggcgcatctggtgaggatagtcaccaaagaacaagggatccaagatcctgttttagcatatatcatcaagtgagcattcaatcgtgaagatcaaaagttagttccaatcgtaaaatgctagtatgatggaaggttactgaatcaattgataccatggagcatcgaaagacagagctcggcttactgccaagtggtcctctgtgatattccttagtggttcataccatcttagatgtaatgaaattcctacaaagccaccttgcttggactgagaaggatggggaacaaggaaaacaaattatacaactttcatgagtatttaagagcaagcacacgggctcagttgatgaattccctgaatcacatttcccatatggctcggaacaacggttgggtggaaatgccccaatggagtatgcaagctttacaataagatttggctcattgaatgtgacccagtgctttactcggtcaccaaacatcttgaagcaaagctcaacgaagtaggtgaagtcctccctgaatagaaataaagaaacaaccacatatgaacttacggcatcttcgtagataaagctataatataggtgactaactgaatttgacttactgaatctctgggttcaaccaagaattgtatctttcttggagttcttcaggatggcatttgtggagggaggtagctgcccgcataatagcagaacagaaggcgtacctttttctagcagtccgttgatgaggctattgtagaatttaacgcctgcctgattaacacctccgaagcgaccctctggccatggatatttgaaaggtacaagcatataatttaagttaaacaccggcactaaggaaggatcacgtgcgtgttgtcgagctggtagctgtgtcagaagtcattgacagttggtgtaattctgagaatgagctcacttggaagaattctcgaccacgacaatgagaatctgtaggagctgagaccaatcgaatgcatcatttctatgtcgtcctgccggtgctgactttgtgtgagattgttgaccccctcatctttcttgataaagtatctttttgtttctaatgatgcttaccttgtatcgatgataatggtcagcagctacgtcgccattgcttccatcgtcaatatttcctgatttatggttaatagccaagactaagacagcaacaaaatcaagcacgtctgtgattttcacgatttcagcactccacaggggcaaccggcccttcgtgacctcgtcgtgcagtcctcgctccggtagctcgaaggaacgtcgcgatccaacgcgcggtgtcctggcgtcgtgagcttagacgggcctagtgcaagctgagcggctggatgtgctggacagcgctgtcgagcggcgagagccgtcgagtaggccgacttcagacgatctgacgaatccgagccgaagagtcatcctaatcgggccctctatttcctaagcccggccctcccagttctagctagctaaacagaagatgcatcatgcattcactagccaaaaaaaaaaatgttcacttcctcccctgattcaagagcgtgaaatgattttctaactgagacaaaaagagaaagaggaaagcgcagtgcgcaatgaccttctaaatagatacgtctaattaacatgcaaaatgtatgagcgtcgaaattaggttaaaccatttaatttatgacatcaagaagagtgttgaaaaatatttagtacaacataattgaaagtaccaagcaaaaagagaaggagatggtattgccacctgctgatccggtctggctaattccatatatattgtctagaactggttaggatggttcattaaccggccgagccggtttgcttgctgtgtccgaaacttatcgtgcttaaatacgttaagcgacaaacaaacaacacaaattattagttggatatgtaatcatgtctagattataataatatataaacagatcattaagtggttatataatttataagttggattatataatcctgagaggaaacaaacatagcctaagttgatttataaattagtattggatctattttagcgtgtaggtcatattttggacttggtttttactatgatgataccaactctttctatatgtgagagcattatggctgattaaggataccaagctttcaatcgtcagaaaatacatcatctaatttatttaccatactttctctctatcttattgttcatcaggagattttataggtgaccttaacaaccctagagaaatcttcgcgtactattctctgatagatcttttcgagaggtgactaagagtaggggggcctgggtcgggcgcgtatcctctaacatcgactgcactgacgttgggtcactgcacgtggccctaggcccacgcgtcagtgacccaccttgacgtcagaggatctcgacccgtctggaccacccgggccatggcattgggacgtgaccccaaatttgttaactcccacgaaaatattaaaatattatatgattaatatttgttaaatggtttaagtgtttaatatatatatttcattcttgtactagattgtatctctagacttgaaataattgatgaaaaagaacaaaggtattactttacaatgatgttttttgtcatgtaacttttaaactacttgtttttgccatgctttcatcaaaaattggtccatatggctttagtcaatcttggttctgccattgccgagagtttaccgataaacgaaaaacggactcaatatcagcctaaccaagacctcaatctgtttagttgatccattgcatttttgttgcaatcaagattatttacaaccacaggcatactaattttaacaaaagctacgaaaatatcccaagaatccccttaactataagggctagttggagagccataaaaccggagtagattagaggggctaaaattcccttcttagggttgatttggtgacaaggagatcacgaggggattaaggaggaaattagatggactaatttccccctcaataccctccaatccccccgtgattcctggtcaccaatagggctagttggcacctccattttcctatga

SEQ ID NO: 19996 - DNA, 612 bp, Zea Mays
ctctggttgaccgcaacagacgcacgcacctcgcgctcctctagtcaattccttcccccgttcttaggcacttcgtgctgtaactgacgccggatctccagcctcgcccgccgccctggtggctctacccctttacatataagcatcttcctagaccactccctccatgctcggcctcgcctcggctgcgattcggactgcgctctggccagccatggttcgccggtaaactcctccagtgccggccatgctcgccctcctcgccgagatgttccgcaccgtgtgcggtcgaacgccgccaccttcaccactgtcatgcaccggctcgcgcggggaaaagcaatgtgggtttgccgccatcggcaaactgcgaaatcactcgcgcggggtccttgaacaccgacctgggagccttgtcaagatgcggggagggtctccttgggcttcctggactggattggaggctcggggcttcgaaatttctcgtcgtcgaccttcttgccgccgtagtgtcgctcgcgccgtgggccgtcctcgaacccgccttctccctcgtgaagtcacgaggatttgaagaatcatcctggtaactggaatctcaagtgacaggca

SEQ ID NO: 19997 - DNA, 615 bp, Zea Mays
ctctggttgaccgcaacagacgcacgcacctcgcgctcctctagtcaattccttcccccgttcttaggcacttcgtgctgtaactgacgccggatctccagcctcgcccgccgccctggtggctctacccctttacatataagcatcttcctagaccactccctccatgctcggcctcgcctcggctgcgattcggactgcgctctggccagccatggttcgccggtaaactcctccagtgccggccatgctcgccctcctcgccgagatgttccgcaccgtgtgcggtcgaacgccgccaccttcaccactgtcatgcaccggctcgcgcggggaaaagcaatgtgggtttgccgccatcggcaaactgcgaaatcactcgcgcggggtccttgaacaccgacctgggagccttgtcaagatgcggggagggtctccttgggcttcctggactggattggaggctcggggcttcgaaatttctcgtcgtcgaccttcttgccgccgtagtgtcgctcgcgccgtgggccgtcctcgaacccgccttctccctcgcagtgaagtcacgaggatttgaagaatcatcctggtaactggaatctcaagtgacaggca

SEQ ID NO: 19998 - DNA, 538 bp, Zea Mays
taacaactcagtgattccatttttttaaattataggcggctggacagtcgaggagcacaaggtaagaggtaagagaaatgggctgaggaggcatccagtttcgtgtatgcgtaaagtggatttgccctcgtcgttagtttgtgtatattaaaggcatccagtttaggaactaagatgtttgttgtagtatatattgcaacttctactttttatgaaaaaataaaagatgatttcaaggacgtggactctattgcgagaagctttgactatatagggtcggacgtataagttttgcaggaataaatgcacaaaaagtgactaggagcatgatgtaagctgcacaattcgagcaagaagccatcacaagctgacgatgaacaagaggagacgcgcgaatgcgcgatgtaaatctcgttcaagcgggatgccactgccatgagcgaagtgcccagttttccttgtcgttctcgagagaatttttcgtgcaataagacatgaaccaactcatcaaccaatttggtgagatgtgataaaagcc

SEQ ID NO: 19999 - DNA, 123 bp, Zea Mays
accgaatgacaaaaaaatggacgaactaagtaccggtacattgttgtggtggctccatgctgaagaaaaagaatggcggtctcccgtctccactctccacagaccacagtccagaatgtgctg

SEQ ID NO: 20000 - DNA, 2019 bp, Zea Mays
ttttttatgaggatccatcatctggcttgtcactgaaccctcgggtgtcgtatgactgttgtactatactatcaaatataattatataccgtggtaacagtaaagatatagtactgtagggtttaaaataggagatgtagacgagagggccataccagtgcctgcagccagcaacccggcaccctccacaatgtgccctcgtcggtcgtcgccagaagttgtggtcgaggtcgaccaacactacgcactcgacgccccggctccgcgctcgagcgccgcgccacctgtcgcacgcgtgctcgatgccccgacacggtgcgctctacacgggcaggactgggcatgggtactcccggtagccaaattgattttatccacattaactgcctatttaaagtggaagcatacaaagttctgattaacatttttgaaaaacatacgaagaatgtcacttagccattctaagttctaactcacaaatttaactcataaatttgaatacaaagttttgattcacattgatcatagttcatagactggcaggctggcagcatgaaaaatacattcaggttctctgcagtagtgctactgctattaccggttgcacacactcacagggagacagggacatcgccaatcgcaattcgccaagatccaagagcccaagacgccaaagccaaatagagacagggatatggctcatgcacacacagacaaagacacagtcgacagaggcagcagtgcagcacgccagcacctattgcagacttccagtgttgcacttgcacacagggagacagggagatcgccaacgccaaagggggacgtggacatgcacagacacacaggcagcaccggttgcacacagcacacttattatccagttatcctgtcattctgtccaacatacacaggttgaagcaaaatatatactccctccgtttcgttttagttgtcgctggatagtgcaaaattgaactatccagcgacaattaaaaagaaacggatggagtataagtaaacagtgcagctcatagcaataaacagtcatgcgctcatagtcataccagtaaacagttatgggctcatacaacaaaatatatatacctttggagaggcacctactgctagttgctgttgcttgagacttggaagtggaagcagactccttaatttttcctttgccaccattaccaaattcttcaattagctctgaaattaaaggaatgaaagcatgcggctatcaattagaaatgattgaacatcaaatacatacaaaaaatgatggatattattccacctttttctataatggccaattcctcaatattatcttgtatgtcaatgggagtagaccttcggggccaatcttgggtacatacaaggacctccaacatgaatagagtaagggaggtacgaaagtcttccaaaatacatccacttgtgctgaagacggactctaaagctactgttgatattggtattgcaaggacatcctgggccatgtgaaccaaaagcgacaatctgtgtgcattgtccttccaccaaatgagaatgacgattttttttttctgtatcttcacaatcttcagataaatatttgtcaagtaaatacgacgagttgtcaaagttttagaaaaaaatcaacggcataatatatttgtgaacggagggagcaaatgttatgagcatatggtcaaacatgagaagaaactgagataacagcccatgaaagatcttgattcagaaaaagattgctgcagggtgctcactcagtcaaatgattacaagtatgagtgttggtgctacattcaatacagctacacaatgcaaggtgatgctacatttaatatagtatgggtattggtgctatcattcagtgtttaccactgtcaaggtggacactgaggttggatgattaactatttaagcacacttcaagaatccatacctttctttattctttatgcaaggtggggataaggtgaccatgattcaacaatgaaaacataatttgag

SEQ ID NO: 20001 - DNA, 2575 bp, Zea Mays
cagaacaaaaaaatctcttcaactctatgccctgccgccgccgtggagatttttttctttcttccaccgctcaccgttctcctctgattttctttcactgcgtacggccaatggcctcatttcttcgctgctatttctgcagactgaccgcacgaatgtgccagccagtgttcttcaccgccgcgcgctcctcccttgccgcgtctctctggtgctctgcgctggccgcggatcggagcttcgcgcgtgtcttcctccctgagtccattcccagtgctcaccatggccgtcgcgcctgcttcccctgctgggatttggtacgtgccccgggctcccatggcgcccggttcagctcgtgcccagctccagctcgatcccttcctgcgcgcgctctgttcctccggtgccgtggcttcaagttcgccgagatccgttgccatgccggagctccctcaagctcgtcgtgcccctgcttttcacggccgtcgctctcccagcccggatctcgttcctgttcgccggccgccccttctccttgctccagctcgtcggccgtgtccttctgctcggccgccgtcgatcctccttggacggtctcaagcgccgtcgccttccggtggttttagcttgccgtcgactatccttgccgcgcgtgctttagtccgagcccgcccatatcgagctccctcggcgttactcccatgcccgtgcttgccagtggtcgcgcgcagtcgcccagctcggcctctgctctgtccccactgctgcgcgcgtgctcgtcagtgtccccagctcgcccgatcagagttttcctgcgcgcgccgttttccctagctcggatttcgccagccgccgttctctaacccgtgtgtcggtcggcgtcgtagagttttggtttggtcagctcgtcgttgacctcgccgatgtcatcgaaccgtcgaccccttcctcagtcacgtcgggtcttcatgccggttgtcgtcgttcgtcgtcgcgtcgttcgccgtcgagcctcactgccatcgcggagttccctactgtcagcctccgcacccgtcctagactgtcgtaaaattctagtgcttgtcactgatatccggtcgtctccaacctttgtcttgctatcatcgttcggtcaccccgtcttgatgtcggtccctacgtgatgtctctgaattgtgatcgcgcggacaaaagaatttccaagagaagatgtccaaagattggatggtggcgtgcgtaaagttcgtgtggtacctgccaagcgctcgacaaattattggagtcggaaaatcactatcgatctcgtggattcatgtcagctgtggaaacggtaagctgataaattattcagtatagttcgatcgttgaataaattaatgtgttagtgcgagacttattagggtgctcgataaattgcgtaagtcacgaaactctcgttgacttcgtggtttttgcaattatcgagccagattcagttatggcgagttatttcgctattctggtcaattagctgaattagtgtaccgagtagaattttagtaggcatgtgtgttgatgaaatattttaatcacttataaagatgtagtataatttataaagcaagggataagtttagaatttaattaattaattgataagttgtgattaggccaattgtatttcatgtatatagtttgttgtttgtgatgtttgcgttaggttcgagaagcgtaattattgtgtgtagtcgtatattaataactactgcttccgtacaaaattgtacaacgcatcgccgctaggtgtttaaattcgccatcgggtagcactatttagggtttttgatattcctgtctatatgcattcatatgcataatgcattccattcaggtgcgataattaatcacgcgatgcggagaaccagaactgagtcgaccacaagatgtcgctacgcgtgagccgctcgcgaggtgatgctgatggacaaaccggaagatggataatctgaacgagtgccaagccaaaggatactcgccaagtcgtcgtctaacaaacactaacctagtgtttcttacaggcaagccccggtgcatgcaacccctttccttgtgttttaaatacctttcgcacacttaagtctagtgaaatgtgcattaggttcataggagttgtttgaaaccctttgatgcattgctttccttgatatccatacctttatagatacttctgtgaagtatcaaaatatgatttacaaaaatgcttagccttgcttagatcttgtggatagaggttgtcctccatctaacccgggagaggatggcttctacctgcaagaatattttcatttggagcaatagtgggatcttactgcaaagttccctgtgatgctctttcatcctaaggaacagacacaatcctaaggatggaaatacttaaatcgagactcgggctaggaacaggtgatgctccgcccgggtcaattaaggattggatgcgtatgtaggcctgttgatcaaggactatcttatctagccacatgccctgagaatgggacagggtaagcttgaacccggctattccatacatgaaaag

SEQ ID NO: 20002 - DNA, 618 bp, Zea Mays
cagcttggtaaaaaaaaaaatcccatccatgattctggagcagcggagccgagccctggcccaacatcgtcccacaggaagcggcggtggcgaaggtgttcgggtctaggtccgtggagcgctacgggccgcgcctcaccctgctggaagctaccatgaggaccgacgatgccggtggcagcgccttcgtgaagctcgtgaagcaagggagcgccgccctcctcaacgcctacgcgaggagagggttccctttcgactcctgggaggtgaaggccctgctgctggaggcgctggtgtccgaggatgccgctgtggtccaggcggagcggtttgagcaggccaacgagtcctgcgtttgatcttcgatggatgaagatgcaacgatggtgccgctgtagtatcgtgttcctggttggtcaccacttctgtgactttggcgttgaggtttctgaagccgcaactctgtccaagtcggcatgtttctctagatgccgggctttgtgtaatgctgtgtgcactgatgtgtagtaggttgtaatctacggaccgtgattttttttttactatttcaatggtaatggaagttctatgttgtcgcacgcaccgtcgtgttcgtca

SEQ ID NO: 20003 - DNA, 2312 bp, Zea Mays
ccccatccccccatatcccttcgacccttccgccgagctcggcctcgggcggcgtcccggtctcaccgcgaccgggcggtgagaggtagaacggccaccagacatcaaccgtgaaggggtggcgtcaaggcagcgctgaagcggcggcgacgtcgaggctcgagctcccgtgccgcgctccgagctaacctagatgaacatactcgaaaggatacgtggaggtggcgacagggcggctgccacggagcgccccccgcggccggagtgctgggtggagatttcggagtccgtctcacggctctgcagcttcgacgccgccggcagcggtagccgcagcatctctgtaaaagttattcaggattctagacctatacatgacaaacttgttgattctttcttgaacaaaatttttccatcaggttatccatacagtgtgaatgaaggttacttaacttataccaaattccgtgtgctacagcatttctcgagtgctatgctacatgtgctatcaacacaggtttgcgacctaccccggcgcaagcaactgctgtaagttggattctaaaagatggaatgcagcacgcaggaaagctcatttgtagcagcatgggtgcaagaatggattctgaaccaaagagttggaggatacttgctgatgttctctacgatctcggtactgcattggaagttgtttcgccgctgtgcccacaacttttccttgaagtagcaggcttgggaaattttgcgaagggaatggccgttgttgcagcaagagcaacgaggcttccaatttactcttctttcgccaaagaaggcaatcttagtgatttatttgctaaaggggaagccatatcaacacttttcaatgtcatgggaattggagctggaattggattggcatctactgtttgttcaacaactcaagggaagttaattgcaggcccgttactttccgcagtgcatatatggggtcatccaagagatgagagcaactcctgtaaacacactcaacccacaaagaacagcaatgatcgtggctgattttatcaagctgaaaggagcttctcaaagcttaagttattgaagaattatttaagatctacaatgtctcaagaaaggttaaacgagctagcaactttatgtattgagaagaaattattagatgatgtcaatattgaagccatctgatgattttgcatctagaaatgttagacgacatttttaagttgatctctacaatatatttgaggtaataatcttacttctattttatactgcttacgtctttctgtggtacatcaagtataattagttgatatatatatatataataataataataataataataataataataataataataataataataataataataataataaacagttttatggtgttgaggcctctgtttataatcttatcccgggcccctcaaaagtcagaaacggccttgatgttgttgttcatgatccgtgtgctctatgtgttgtgcccatttcctagactcctctatttgaaaatgtcgctatactaatttatttttctatttcacgtacaatatgcttatgctatagtgtcggatagggcgctactattttctagtgtcctaaaaaggccaaaaggaacaaagatttaagacattcgcactaagtaacgccaaatgtttggttgcaccatgtagcgcctaaaacaaaggctgcagcacgacaggctaaaacctgtggtaaaatgccgtagtctccatagcccggagtgaaagtgctacggtacaaggttgtctatcgttgcattcatgctacacaagcattaaaatatatttttaattagggatgatagttggaagtatatagtagttggatatatggaaaagatatagagtaacatgggtacagaagaagctggtatagagaaaaatctttttgactgaactaaaatatttttaagtatatatatagagtacactagtacacagaggctctatagtggcggttctagagctgtttgcactggtgtttttcagtgccgccagtgctacgggctagtggaaatcgccatttccactggcggttattctaaaaacgccagtgaaaatataatttccactggcggttttcttaagcaaaccgccagtggaaatactggcggtgttttttatttagccgccagtggaagttttcccgcctttttttaaattttcaatcagtactaaaatttatatatatttacacacacaaatatatatatatatattgatattgataaacatgtagtattgatattaaaagcaacatggaattaaa

SEQ ID NO: 20004 - DNA, 2331 bp, Zea Mays
ccccatccccccatatcccttcgacccttccgccgagctcggcctcgggcggcgtcccggtctcaccgcgaccgggcggtgagaggtagaacggccaccagacatcaaccgtgaaggggtggcgtcaaggcagcgctgaagcggcggcgacgtcgaggctcgagctcccgtgccgcgctccgagctaacctagatgaacatactcgaaaggatacgtggaggtggcgacagggcggctgccacggagcgccccccgcggccggagtgctgggtggagatttcggagtccgtctcacggctctgcagcttcgacgccgccggcagcggtagccgcagcatctctgtaaaagttattcaggattctagacctatacatgacaaacttgttgattctttcttgaacaaaatttttccatcaggttatccatacagtgtgaatgaaggttacttaacttataccaaattccgtgtgctacagcatttctcgagtgctatgctacatgtgctatcaacacagtccttgctgtttgctgcaggtttgcgacctaccccggcgcaagcaactgctgtaagttggattctaaaagatggaatgcagcacgcaggaaagctcatttgtagcagcatgggtgcaagaatggattctgaaccaaagagttggaggatacttgctgatgttctctacgatctcggtactgcattggaagttgtttcgccgctgtgcccacaacttttccttgaagtagcaggcttgggaaattttgcgaagggaatggccgttgttgcagcaagagcaacgaggcttccaatttactcttctttcgccaaagaaggcaatcttagtgatttatttgctaaaggggaagccatatcaacacttttcaatgtcatgggaattggagctggaattggattggcatctactgtttgttcaacaactcaagggaagttaattgcaggcccgttactttccgcagtgcatatatggggtcatccaagagatgagagcaactcctgtaaacacactcaacccacaaagaacagcaatgatcgtggctgattttatcaagctgaaaggagcttctcaaagcttaagttattgaagaattatttaagatctacaatgtctcaagaaaggttaaacgagctagcaactttatgtattgagaagaaattattagatgatgtcaatattgaagccatctgatgattttgcatctagaaatgttagacgacatttttaagttgatctctacaatatatttgaggtaataatcttacttctattttatactgcttacgtctttctgtggtacatcaagtataattagttgatatatatatatataataataataataataataataataataataataataataataataataataataataataataaacagttttatggtgttgaggcctctgtttataatcttatcccgggcccctcaaaagtcagaaacggccttgatgttgttgttcatgatccgtgtgctctatgtgttgtgcccatttcctagactcctctatttgaaaatgtcgctatactaatttatttttctatttcacgtacaatatgcttatgctatagtgtcggatagggcgctactattttctagtgtcctaaaaaggccaaaaggaacaaagatttaagacattcgcactaagtaacgccaaatgtttggttgcaccatgtagcgcctaaaacaaaggctgcagcacgacaggctaaaacctgtggtaaaatgccgtagtctccatagcccggagtgaaagtgctacggtacaaggttgtctatcgttgcattcatgctacacaagcattaaaatatatttttaattagggatgatagttggaagtatatagtagttggatatatggaaaagatatagagtaacatgggtacagaagaagctggtatagagaaaaatctttttgactgaactaaaatatttttaagtatatatatagagtacactagtacacagaggctctatagtggcggttctagagctgtttgcactggtgtttttcagtgccgccagtgctacgggctagtggaaatcgccatttccactggcggttattctaaaaacgccagtgaaaatataatttccactggcggttttcttaagcaaaccgccagtggaaatactggcggtgttttttatttagccgccagtggaagttttcccgcctttttttaaattttcaatcagtactaaaatttatatatatttacacacacaaatatatatatatatattgatattgataaacatgtagtattgatattaaaagcaacatggaattaaa

SEQ ID NO: 20005 - DNA, 1611 bp, Zea Mays
  misc_feature (1610)..(1611): n is a, c, g, or t
ccccatccccccatatcccttcgacccttccgccgagctcggcctcgggcggcgtcccggtctcaccgcgaccgggcggtgagaggtagaacggccaccagacatcaaccgtgaaggggtggcgtcaaggcagcgctgaagcggcggcgacgtcgaggctcgagctcccgtgccgcgctccgagctaacctagatgaacatactcgaaaggatacgtggaggtggcgacagggcggctgccacggagcgccccccgcggccggagtgctgggtggagatttcggagtccgtctcacggctctgcagcttcgacgccgccggcagcggtagccgcagcatctctgtaaaagttattcaggattctagacctatacatgacaaacttgttgattctttcttgaacaaaatttttccatcaggttatccatacagtgtgaatgaaggttacttaacttataccaaattccgtgtgctacagcatttctcgagtgctatgctacatgtgctatcaacacagtccttgctgtttgctgcaggtttgcgacctaccccggcgcaagcaactgctgtaagttgggtaagcatatgatgtcagagatgctaaagtccaagcagcacgcaggaaagctcatttgtagcagcatgggtgcaagaatggattctgaaccaaagagttggaggatacttgctgatgttctctacgatcttggtactgcattggaagttgtttcgccgctgtgtccacaacttttccttgaagtagcaggcttgggaaattttgcgaagggaatggccgttgttgcagcaagagcaacgaggcttccaatttactcttctttcgccaaagaaggcaatcttagtgatttatttgctaaaggggaagccatatcaacacttttcaatgtcatgggaattggagctggaattggattggcatctactgtttgttcaacaactcaaggcaagttaattgcaggcccgttactttccgcagtgcatatatatggggtcatccaagagatgagagcaactcctgtaaacacactcaacccacaaagaacagcaatgatcgtggctgattttatcaagagtggaaaggtttctagccccgccgagctaaggtacaaggaagacctcctgtttcccaaccgagttatagaagaagccggcagtgtgaaaatcggtcagccacttcgcaaagtgttcagtccccggcttgttgagcagctgagggcgactttcccaggcgagaaatttctgctcagccagaaaagcaacaggacgtacatggttctggagcgaagcgcgagcggagaggacgcgctgagggggtggctggtcgccgcgttcgcttcggagatggagaggtcaggcgccggctcacgcgatgacgcggttctgagcgaggcctacgagaagatggagcgggtcttccccaccttcgtgtcagaagttaggagtagggggtggtacaccgatcagtttttggacgggaactgtagtcgagtctcgtttgccaagtttcggtagtcgcagagactgtatatggtctatgttttttggaggggagatgcggaaccatgaactcatgcatgcagggcagtgtagtnn

SEQ ID NO: 20006 - DNA, 1493 bp, Zea Mays
ccccatccccccatatcccttcgacccttccgccgagctcggcctcgggcggcgtcccggtctcaccgcgaccgggcggtgagaggtagaacggccaccagacatcaaccgtgaaggggtggcgtcaaggcagcgctgaagcggcggcgacgtcgaggctcgagctcccgtgccgcgctccgagctaacctagatgaacatactcgaaaggatacgtggaggtggcgacagggcggctgccacggagcgccccccgcggccggagtgctgggtggagatttcggagtccgtctcacggctctgcagcttcgacgccgccggcagcggtagccgcagcatctctgtaaaagttattcaggattctagacctatacatgacaaacttgttgattctttcttgaacaaaatttttccatcaggttatccatacagtgtgaatgaaggttacttaacttataccaaattccgtgtgctacagcatttctcgagtgctatgctacatgtgctatcaacacagtccttgctgtttgctgcaggtttgcgacctaccccggcgcaagcaactgctgtaagttggattctaaaagatggaatgcagcacgcaggaaagctcatttgtagcagcatgggtgcaagaatggattctgaaccaaagagttggaggatacttgctgatgttctctacgatctcggtactgcattggaagttgtttcgccgctgtgcccacaacttttccttgaagtagcaggcttgggaaattttgcgaagggaatggccgttgttgcagcaagagcaacgaggcttccaatttactcttctttcgccaaagaaggcaatcttagtgatttatttgctaaaggggaagccatatcaacacttttcaatgtcatgggaattggagctggaattggattggcatctactgtttgttcaacaactcaagggaagttaattgcaggcccgttactttccgcagtgcatatatggggtcatccaagagatgagagcaactcctgtaaacacactcaacccacaaagaacagcaatgatcgtggctgattttatcaagggcacccgtggatccagagcggaggcggaggccgagagctggtgcggccaacctgagcagccatatatcgaacgagacctgaaccgatcgagtatcatcgtagcagtccggtgggtgtgtactcccccgatgagtgttgtgcagacgtctctgtatatccagtaagcaggcggcggcggcggcggcgagtgtgagactggagatcgtcgtttcgccgcacctcgcccgtgtgtgtgtgtgtgtgatggtgacctgggccgttttcctcttttgccttgtgggccttttttcgggccgccctctttgcttgggagttaaacgtcgtgcgacgatgatctgttatgtccaaccgtccatgtacaaatgaagtttgagctttctcgatgatctgatcaaatcctgatgatactacttatccactga

SEQ ID NO: 20007 - DNA, 1693 bp, Zea Mays
atatgatgtcagagatgctaaagtccaagcagcacgcaggaaagctcatttgtagcagcatgggtgcaagaatggattctgaaccaaagagttggaggatacttgctgatgttctctacgatctcggtactgcattggaagttgtttcgccgctgtgcccacaacttttccttgaagtagcaggcttgggaaattttgcgaagggaatggccgttgttgcagcaagagcaacgaggcttccaatttactcttctttcgccaaagaaggcaatcttagtgatttatttgctaaaggggaagccatatcaacacttttcaatgtcatgggaattggagctggaattggattggcatctactgtttgttcaacaactcaagggaagttaattgcaggcccgttactttccgcagtgcatatatggggtcatccaagagatgagagcaactcctgtaaacacactcaacccacaaagaacagcaatgatcgtggctgattttatcaaggtttggtatctctgatctattaacgcaacctttttatccagtccagctacgacagtaacatttgtctattatttactataccaataaacacgacatttttaagttgatctctacaatatatttgaggtaataatcttacttctattttatactgcttacgtctttctgtggtacatcaagtataattagttgatatatatatatataataataataataataataataataataataataataataataataataataataataataataaacagttttatggtgttgaggcctctgtttataatcttatcccgggcccctcaaaagtcagaaacggccttgatgttgttgttcatgatccgtgtgctctatgtgttgtgcccatttcctagactcctctatttgaaaatgtcgctatactaatttatttttctatttcacgtacaatatgcttatgctatagtgtcggatagggcgctactattttctagtgtcctaaaaaggccaaaaggaacaaagatttaagacattcgcactaagtaacgccaaatgtttggttgcaccatgtagcgcctaaaacaaaggctgcagcacgacaggctaaaacctgtggtaaaatgccgtagtctccatagcccggagtgaaagtgctacggtacaaggttgtctatcgttgcattcatgctacacaagcattaaaatatatttttaattagggatgatagttggaagtatatagtagttggatatatggaaaagatatagagtaacatgggtacagaagaagctggtatagagaaaaatctttttgactgaactaaaatatttttaagtatatatatagagtacactagtacacagaggctctatagtggcggttctagagctgtttgcactggtgtttttcagtgccgccagtgctacgggctagtggaaatcgccatttccactggcggttattctaaaaacgccagtgaaaatataatttccactggcggttttcttaagcaaaccgccagtggaaatactggcggtgttttttatttagccgccagtggaagttttcccgcctttttttaaattttcaatcagtactaaaatttatatatatttacacacacaaatatatatatatatattgatattgataaacatgtagtattgatattaaaagcaacatggaattaaa

SEQ ID NO: 20008 - DNA, 1014 bp, Zea Mays
  misc_feature (1013)..(1014): n is a, c, g, or t
gtcagagatgctaaagtccaagcaggaaagctcatttgtagcagcatgggtgcaagaatggattctgaaccaaagagttggaggatacttgctgatgttctctacgatcttggtactgcattggaagttgtttcgccgctgtgtccacaacttttccttgaagtagcaggcttgggaaattttgcgaagggaatggccgttgttgcagcaagagcaacgaggcttccaatttactcttctttcgccaaagaaggcaatcttagtgatttatttgctaaaggggaagccatatcaacacttttcaatgtcatgggaattggagctggaattggattggcatctactgtttgttcaacaactcaaggcaagttaattgcaggcccgttactttccgcagtgcatatatatggggtcatccaagagatgagagcaactcctgtaaacacactcaacccacaaagaacagcaatgatcgtggctgattttatcaagagtggaaaggtttctagccccgccgagctaaggtacaaggaagacctcctgtttcccaaccgagttatagaagaagccggcagtgtgaaaatcggtcagccacttcgcaaagtgttcagtccccggcttgttgagcagctgagggcgactttcccaggcgagaaatttctgctcagccagaaaagcaacaggacgtacatggttctggagcgaagcgcgagcggagaggacgcgctgagggggtggctggtcgccgcgttcgcttcggagatggagaggtcaggcgccggctcacgcgatgacgcggttctgagcgaggcctacgagaagatggagcgggtcttccccaccttcgtgtcagaagttaggagtagggggtggtacaccgatcagtttttggacgggaactgtagtcgagtctcgtttgccaagtttcggtagtcgcagagactgtatatggtctatgttttttggaggggagatgcggaaccatgaactcatgcatgcagggcagtgtagtnn

SEQ ID NO: 20009 - DNA, 1000 bp, Zea Mays
  misc_feature (999)..(1000): n is a, c, g, or t
cagagatgctaaagtccaagcagcacgcaggaaagctcatttgtagcagcatgggtgcaagaatggattctgaaccaaagagttggaggatacttgctgatgttctctacgatctcggtactgcattggaagttgtttcgccgctgtgcccacaacttttccttgaagtagcaggcttgggaaattttgcgaagcaagagcaacgaggcttccaatttactcttctttcgccaaagaaggcaatcttagtgatttatttgctaaaggggaagccatatcaacacttttcaatgtcatgggaattggagctggaattggattggcatctactgtttgttcaacaactcaaggcaagttaattgcaggcccgttactttccgcagtgcatatatatggggtcatccaagagatgagagcaactcctgtaaacacactcaacccacaaagaacagcaatgatcgtggctgattttatcaagagtggaaaggtttctagccccgccgagctaaggtacaaggaagacctcctgtttcccaaccgagttatagaagaagccggcagtgtgaaaatcggtcagccacttcgcaaagtgttcagtccccggcttgttgagcagctgagggcgactttcccaggcgagaaatttctgctcagccagaaaagcaacaggacgtacatggttctggagcgaagcgcgagcggagaggacgcgctgagggggtggctggtcgccgcgttcgcttcggagatggagaggtcaggcgccggctcacgcgatgacgcggttctgagcgaggcctacgagaagatggagcgggtcttccccaccttcgtgtcagaagttaggagtagggggtggtacaccgatcagtttttggacgggaactgtagtcgagtctcgtttgccaagtttcggtagtcgcagagactgtatatggtctatgttttttggaggggagatgcggaaccatgaactcatgcatgcagggcagtgtagtnn

SEQ ID NO: 20010 - DNA, 1305 bp, Zea Mays
  misc_feature (1304)..(1305): n is a, c, g, or t
tgcaatcagtgctgtgatagaccatcttctcaacattccaaacatttttgttgggtaaaagttattcaggattctagacctatacatgacaaacttgttgattctttcttgaacaaatttttcccatcaggttatccatacagtgtgaatgaaggttacttaacttataccaaattccgtgtgctacagcatttctcgagtgctatgctacatgtgctatcaacacagtccttgctgtttgctgcaggtttgcgacctaccccggcgcaagcaactgctgtaagttggattctaaaagatggaatgcagcacgcaggaaagctcatttgtagcagcatgggtgcaagaatggattctgaaccaaagagttggaggatacttgctgatgttctctacgatcttggtactgcattggaagttgtttcgccgctgtgtccacaacttttccttgaagtagcaggcttgggaaattttgcgaagggaatggccgttgttgcagcaagagcaacgaggcttccaatttactcttctttcgccaaagaaggcaatcttagtgatttatttgctaaaggggaagccatatcaacacttttcaatgtcatgggaattggagctggaattggattggcatctactgtttgttcaacaactcaaggcaagttaattgcaggcccgttactttccgcagtgcatatatatggggtcatccaagagatgagagcaactcctgtaaacacactcaacccacaaagaacagcaatgatcgtggctgattttatcaagagtggaaaggtttctagccccgccgagctaaggtacaaggaagacctcctgtttcccaaccgagttatagaagaagccggcagtgtgaaaatcggtcagccacttcgcaaagtgttcagtccccggcttgttgagcagctgagggcgactttcccaggcgagaaatttctgctcagccagaaaagcaacaggacgtacatggttctggagcgaagcgcgagcggagaggacgcgctgagggggtggctggtcgccgcgttcgcttcggagatggagaggtcaggcgccggctcacgcgatgacgcggttctgagcgaggcctacgagaagatggagcgggtcttccccaccttcgtgtcagaagttaggagtagggggtggtacaccgatcagtttttggacgggaactgtagtcgagtctcgtttgccaagtttcggtagtcgcagagactgtatatggtctatgttttttggaggggagatgcggaaccatgaactcatgcatgcagggcagtgtagtnn

SEQ ID NO: 20011 - DNA, 1016 bp, Zea Mays
  misc_feature (1015)..(1016): n is a, c, g, or t
taaagtccaagcagatgcagcacgcaggaaagctcatttgtagcagcatgggtgcaagaatggattctgaaccaaagagttggaggatacttgctgatgttctctacgatcttggtactgcattggaagttgtttcgccgctgtgtccacaacttttccttgaagtagcaggcttgggaaattttgcgaagggaatggccgttgttgcagcaagagcaacgaggcttccaatttactcttctttcgccaaagaaggcaatcttagtgatttatttgctaaaggggaagccatatcaacacttttcaatgtcatgggaattggagctggaattggattggcatctactgtttgttcaacaactcaaggcaagttaattgcaggcccgttactttccgcagtgcatatatatggggtcatccaagagatgagagcaactcctgtaaacacactcaacccacaaagaacagcaatgatcgtggctgattttatcaagagtggaaaggtttctagccccgccgagctaaggtacaaggaagacctcctgtttcccaaccgagttatagaagaagccggcagtgtgaaaatcggtcagccacttcgcaaagtgttcagtccccggcttgttgagcagctgagggcgactttcccaggcgagaaatttctgctcagccagaaaagcaacaggacgtacatggttctggagcgaagcgcgagcggagaggacgcgctgagggggtggctggtcgccgcgttcgcttcggagatggagaggtcaggcgccggctcacgcgatgacgcggttctgagcgaggcctacgagaagatggagcgggtcttccccaccttcgtgtcagaagttaggagtagggggtggtacaccgatcagtttttggacgggaactgtagtcgagtctcgtttgccaagtttcggtagtcgcagagactgtatatggtctatgttttttggaggggagatgcggaaccatgaactcatgcatgcagggcagtgtagtnn

SEQ ID NO: 20012 - DNA, 1990 bp, Zea Mays
gttatacattcccggaagatctgtttccaatttttggtcggggccgaatgcccagcgttgagtggcccaatagaccagccctgtctttctcatgcgctcaaacagagtcgttgtctacctcggtcattcctcattcgcgaaaagaaaaacacaaggcgaccgcagagggcaggacaggacagagacgccgaggctaggcagtccatctgttggggtggccagtggggatctcgccggccgggaggtctggggggcgggggctgccaaacttcgccatattggtgaatcactgaatccgcccctgccagcaaccgttctgacgtggcggggtggggcaggatccaaatggcggcggcaatagaggaactgcggctcctgggatccatccctgtactggaaggtccgggagaggtcgacggcgtggtgggtgaggaagggcgaccgcgaggcggcggcgacgacgaggagatcctgcgattcatggactcggtggacagctacctgctcctcatggactccctatcctccgctcttcgtcagggctggcttgacctggcaagtgctcgccattctatgggcacatcacgcgtttcgagtacactgtttgatcacaaggagcagtctgctgccactaagcttcaagttgttgatcatgatggcctgaaatcatcagagtcaataccacactttgctctatcaaagtggtctttgcaagaagaatgtcactccacctatgatctcagtgagagagattttactgagccaaagatgaggcatcgaggatcagttactaccccagaaaagggaaaccatgaaagtgcaaacaccacaacactgtctacaggtgctgatgctagcaatcgttcaaagagcgagatcaaaagcattatcagtctttgggggattggtatccccaaaactaagaaccgcccaactttcatttgaaacagcacttgacttgattgtggagctagcaaattcaaggtcgaatatgttagctagtttctcccacttaaaagagtgaagacattatgttatgagattttgtaccttgggcaccatctattcagcactcatgagatcgcagcaactgtaaactaagttttgagatccagtatattttaagaacgactaaatagcatataatgcttgctatgctgattactcgctgcgaaggtgttgctaacatatctgtgaatgcgagaacacatgctggaagcagtcagaaattatggtttgattataaacctcctcattttctactatgaaaacatgattctcgtccatgacgatccgaccaatgtagctctgatatgtgattcaattcgacatacgcaaattctgaacatctcttgaccaaactgcatcggatacgtccgatgtccagaacgatgtattcttcgcaacaggcaccaaaatctcgtcaagcagcagctatacaattctagacagacaaaagaaacgcgaggtatgcctgccgcggcaatctgctgcgcacggtcgtcgggccgccggctacatcaagtaaccttcgacgctaccgtcgtccgaggggcgaccgtgctcgctcatgctccccctcagcctgtagaagctgcccctccccttggtgcgcagcgggccggaccagtcgtacatcgccagggactcgatcttgtccagcaccgcgctcgacgccgaccgtggcctgcgctcgtcggcgccggcagggtccgagccgtatcccagggggagcgccgggcccggagtggccggcgggtcgtcgttccacgagctcctgctgacgtcgttccacggggactcctctgttgcgccgcccacgaaggagccgctgcaggtctcgtcgccgcctccgccgctgtggatcagcttcagcgcctgcacgacctcgcccatgaacggccggtgcgacgcctcgacgtgcacgcacatggacgcgatggccgccgccttggccagcttctcgaagtcgtaaccggccgggagcgac

SEQ ID NO: 20013 - DNA, 1850 bp, Zea Mays
gtcattcctcattcgcgaaaagaaaaacacaaggcgaccgcagagggcaggacaggacagagacgccgaggctaggcagtccatctgttggggtggccagtggggatctcgccggccgggaggtctggggggcgggggctgccaaacttcgccatattggtgaatcactgaatccgcccctgccagcaaccgttctgacgtggcggggtggggcaggatccaaatggcggcggcaatagaggaactgcggctcctgggatccatccctgtactggaaggtccgggagaggtcgacggcgtggtgggtgaggaagggcgaccgcgaggcggcggcgacgacgaggagatcctgcgattcatggactcggtggacagctacctgctcctcatggactccctatcctccgctcttcgtcagggctggcttgacctggcaagtgctcgccattctatgggcacatcacgcgtttcgagtacactgtttgatcacaaggagcagtctgctgccactaagcttcaagttgttgatcatgatggcctgaaatcatcagagtcaataccacactttgctctatcaaagtggtctttgcaagaagaatgtcactccacctatgatctcagtgagagagattttactgagccaaagatgaggcatcgaggatcagttactaccccagaaaagggaaaccatgaaagtgcaaacaccacaacactgtctacaggttcaaagagcgagatcaaaagcattatcagtctttgggggattggtatccccaaaactaagaaccgcccaactttcatttgaaacagcacttgacttgattgtggagctagcaaattcaaggtcgaatatgttagctagtttctcccacttaaaagagtgaagacattatgttatgagattttgtaccttgggcaccatctattcagcactcatgagatcgcagcaactgtaaactaagttttgagatccagtatattttaagaacgactaaatagcatataatgcttgctatgctgattactcgctgcgaaggtgttgctaacatatctgtgaatgcgagaacacatgctggaagcagtcagaaattatggtttgattataaacctcctcattttctactatgaaaacatgattctcgtccatgacgatccgaccaatgtagctctgatatgtgattcaattcgacatacgcaaattctgaacatctcttgaccaaactgcatcggatacgtccgatgtccagaacgatgtattcttcgcaacaggcaccaaaatctcgtcaagcagcagctatacaattctagacagacaaaagaaacgcgaggtatgcctgccgcggcaatctgctgcgcacggtcgtcgggccgccggctacatcaagtaaccttcgacgctaccgtcgtccgaggggcgaccgtgctcgctcatgctccccctcagcctgtagaagctgcccctccccttggtgcgcagcgggccggaccagtcgtacatcgccagggactcgatcttgtccagcaccgcgctcgacgccgaccgtggcctgcgctcgtcggcgccggcagggtccgagccgtatcccagggggagcgccgggcccggagtggccggcgggtcgtcgttccacgagctcctgctgacgtcgttccacggggactcctctgttgcgccgcccacgaaggagccgctgcaggtctcgtcgccgcctccgccgctgtggatcagcttcagcgcctgcacgacctcgcccatgaacggccggtgcgacgcctcgacgtgcacgcacatggacgcgatggccgccgccttggccagcttctcgaagtcgtaaccggccgggagcgac

SEQ ID NO: 20014 - DNA, 1753 bp, Zea Mays
ctcattcgcgaaaagaaaaacacaaggcgaccgcagagggcaggacaggacagagacgccgaggctaggcagtccatctgttggggtggccagtggggatctcgccggccgggaggatccaaatggcggcggcaatagaggaactgcggctcctgggatccatccctgtactggaaggtccgggagaggtcgacggcgtggtgggtgaggaagggcgaccgcgaggcggcggcgacgacgaggagatcctgcgattcatggactcggtggacagctacctgctcctcatggactccctatcctccgctcttcgtcagggctggcttgacctggcaagtgctcgccattctatgggcacatcacgcgtttcgagtacactgtttgatcacaaggagcagtctgctgccactaagcttcaagttgttgatcatgatggcctgaaatcatcagagtcaataccacactttgctctatcaaagtggtctttgcaagaagaatgtcactccacctatgatctcagtgagagagattttactgagccaaagatgaggcatcgaggatcagttactaccccagaaaagggaaaccatgaaagtgcaaacaccacaacactgtctacaggtgctgatgctagcaatcgtgttcaaagagcgagatcaaaagcattatcagtctttgggggattggtatccccaaaactaagaaccgcccaactttcatttgaaacagcacttgacttgattgtggagctagcaaattcaaggtcgaatatgttagctagtttctcccacttaaaagagtgaagacattatgttatgagattttgtaccttgggcaccatctattcagcactcatgagatcgcagcaactgtaaactaagttttgagatccagtatattttaagaacgactaaatagcatataatgcttgctatgctgattactcgctgcgaaggtgttgctaacatatctgtgaatgcgagaacacatgctggaagcagtcagaaattatggtttgattataaacctcctcattttctactatgaaaacatgattctcgtccatgacgatccgaccaatgtagctctgatatgtgattcaattcgacatacgcaaattctgaacatctcttgaccaaactgcatcggatacgtccgatgtccagaacgatgtattcttcgcaacaggcaccaaaatctcgtcaagcagcagctatacaattctagacagacaaaagaaacgcgaggtatgcctgccgcggcaatctgctgcgcacggtcgtcgggccgccggctacatcaagtaaccttcgacgctaccgtcgtccgaggggcgaccgtgctcgctcatgctccccctcagcctgtagaagctgcccctccccttggtgcgcagcgggccggaccagtcgtacatcgccagggactcgatcttgtccagcaccgcgctcgacgccgaccgtggcctgcgctcgtcggcgccggcagggtccgagccgtatcccagggggagcgccgggcccggagtggccggcgggtcgtcgttccacgagctcctgctgacgtcgttccacggggactcctctgttgcgccgcccacgaaggagccgctgcaggtactgttaagatgctacgaaaattagcgtgctcaaataccatgtagatgagattcaacacttccgtttggaacgagctcaaaaaccaagcaccttgtgctccgctcaatgcatataccaatcagcttgacaaggtt

SEQ ID NO: 20015 - DNA, 263 bp, Zea Mays
tccaccctgcctgggagaattgaggaactcgacgcatctctgcaggtggaaaaggtgaattgctggaaaaaggtgaattgctgaaaactggaacccgttgacgcgtgagagagaggaagagtagcagtactgctagctagccgtggcgatggacgacggtgatggttacctgaacacctcgctgtcactgtaccccacgacgccaccagcgatagccgcagccgcctcgccaggccgctccggtagccgtgcgtccgcctcct

SEQ ID NO: 20016 - DNA, 2257 bp, Zea Mays
ccgccacctgactcatttttccttgctctggtgcgtcgtctcatggagctgctgaacgccgacgtcaccctgagctcattccacaccaggtcttagttttatgctgctgatggtggtgttaagtgtcggtgggctcgaccttcttataagtctaagtaacccttctatacttcttattaaggatggtctcttgagctagcatatatttcaaacttatacttttgtactcactccgatgaaaataatataaaatttttgtaacttctaaaatttggtaataaaattttcgctgcaaaaatattgatgtgtgtgattcgtgtttacttaatcttgcgatcttggtggtagtggtttatccgaagtcccctgggatactcggacagatcatgttaagttatcaggcatacatgcatagctgtttcaggtctttgagacaaggataggtgcatgtgggtcctataatttgggaggttctgccacatggactatggctacaaattaagcaaagtccctctccaatatgataatgagagtgcaatccgcttggcggataatgccattgaacacagccgcactaagcacatagacattcggtatcactttctgaggaatcatcagcaaagggggatatcgaaatagcttatgtaaacatcaagaatcaactagtcgatatctttaccaagccattagatgagaaaacctttagcaaacttaggaatgagctaaatatacttgattctcggaactttgattgaaacattgcacacatagctaatttatatacctttgatcatatctctttcattttggtacaaatgcatatttcttattattcttgcgccaagactacgactaatatgtttccaagtgtatttctatactaagtcgtagattgaaagggaattggagtatttgacgaagataaggcttccactccactctaacggtatcatttacccttcgtcgctactccgctctctctccaattggtataatccttcactcttatttacttgtaccaattggaaaaaagtaaaaacgggctctcaaagtctccgttttcggcaattaatgccaaaggagaagatattaagcccaaagcaaaaaggaccgcaccaccatttcaaaaaatttcaaaataaagttttaattgatgattttcacattggtatccacacaatggaaatctcttcaattggtatctttaaaggtagattttcaaaattggtatccaattctttagaagttcatctttaaattggtatctattttaaaaccctcttgaaagctaagaggagaatttcatttaggagttttttagtcaaaggaaaagcatttgaaacagggggagaaaattcaaatcttgaaaatgcttcttgcaatcttattcatatacctttgactacttgcaaaagactttgaaaagattttccaaaaggatttgcaaaaacaaaacaagtggtgcaaatgtggtccaaaatgttaaagaaaagaaaagcaatccattcatatctagtgagattatcaattggtttaatttcaagttacctatgcacttaccttatgcaaactagttcatctctgcacttattatttgctttggtttgtgttggtatcaatcacaaaaaaggtggagattgaaagggaaatagggttaaccttttcctataattagttttggtagttgatcgtcaacacaaacacatggactaactagtttgccaagaattcatgtattacaggtgcataaggttcaacacaaactaataaaagattcaagttagggactaaattgaaatggagcaaaggcttgagtgtgctgtgaactggcgcaccggacagtgtccggtgcaccatgcccgtacaactctgaagcagccactctcgggaaaacgcaggctagctccgctataattcaccggactgtctagtgtgccagtggagcaacggctaactcacgcaacggtccactctgataggagctacaatgagcaacagtgctacacagaagtcagagcagcgaagtcagaggggcaccagactgtccggtgtggcaccggactatccggtgccgcaagaggacaaagttccaacggtcgcccgagctccgaaccctaacggttggatgacatggcgacgcatcggacactggacaatgagtgtccggtggcacaccggactggtccggcggcgcaccgaactgtcccggtgcgcccatcgacaacagcctccccaacggccaccttggtggctgggg

SEQ ID NO: 20017 - DNA, 2372 bp, Zea Mays
ccgccacctgactcatttttccttgctctggtgcgtcgtctcatggagctgctgaacgccgacgtcaccctgagctcattccacaccagattacgttatccgtggatcaatcgcttggtgaaacaattttctggagacttgtcgtcaccttgaagacttgtgaaattttatttccttagtctttggctcttctatgcaacaaaggtcttagttttatgctgctgatggtggtgttaagtgtcggtgggctcgaccttcttataagtctaagtaacccttctatacttcttattaaggatggtctcttgagctagcatatatttcaaacttatacttttgtactcactccgatgaaaataatataaaatttttgtaacttctaaaatttggtaataaaattttcgctgcaaaaatattgatgtgtgtgattcgtgtttacttaatcttgcgatcttggtggtagtggtttatccgaagtcccctgggatactcggacagatcatgttaagttatcaggcatacatgcatagctgtttcaggtctttgagacaaggataggtgcatgtgggtcctataatttgggaggttctgccacatggactatggctacaaattaagcaaagtccctctccaatatgataatgagagtgcaatccgcttggcggataatgccattgaacacagccgcactaagcacatagacattcggtatcactttctgaggaatcatcagcaaagggggatatcgaaatagcttatgtaaacatcaagaatcaactagtcgatatctttaccaagccattagatgagaaaacctttagcaaacttaggaatgagctaaatatacttgattctcggaactttgattgaaacattgcacacatagctaatttatatacctttgatcatatctctttcattttggtacaaatgcatatttcttattattcttgcgccaagactacgactaatatgtttccaagtgtatttctatactaagtcgtagattgaaagggaattggagtatttgacgaagataaggcttccactccactctaacggtatcatttacccttcgtcgctactccgctctctctccaattggtataatccttcactcttatttacttgtaccaattggaaaaaagtaaaaacgggctctcaaagtctccgttttcggcaattaatgccaaaggagaagatattaagcccaaagcaaaaaggaccgcaccaccatttcaaaaaatttcaaaataaagttttaattgatgattttcacattggtatccacacaatggaaatctcttcaattggtatctttaaaggtagattttcaaaattggtatccaattctttagaagttcatctttaaattggtatctattttaaaaccctcttgaaagctaagaggagaatttcatttaggagttttttagtcaaaggaaaagcatttgaaacagggggagaaaattcaaatcttgaaaatgcttcttgcaatcttattcatatacctttgactacttgcaaaagactttgaaaagattttccaaaaggatttgcaaaaacaaaacaagtggtgcaaatgtggtccaaaatgttaaagaaaagaaaagcaatccattcatatctagtgagattatcaattggtttaatttcaagttacctatgcacttaccttatgcaaactagttcatctctgcacttattatttgctttggtttgtgttggtatcaatcacaaaaaaggtggagattgaaagggaaatagggttaaccttttcctataattagttttggtagttgatcgtcaacacaaacacatggactaactagtttgccaagaattcatgtattacaggtgcataaggttcaacacaaactaataaaagattcaagttagggactaaattgaaatggagcaaaggcttgagtgtgctgtgaactggcgcaccggacagtgtccggtgcaccatgcccgtacaactctgaagcagccactctcgggaaaacgcaggctagctccgctataattcaccggactgtctagtgtgccagtggagcaacggctaactcacgcaacggtccactctgataggagctacaatgagcaacagtgctacacagaagtcagagcagcgaagtcagaggggcaccagactgtccggtgtggcaccggactatccggtgccgcaagaggacaaagttccaacggtcgcccgagctccgaaccctaacggttggatgacatggcgacgcatcggacactggacaatgagtgtccggtggcacaccggactggtccggcggcgcaccgaactgtcccggtgcgcccatcgacaacagcctccccaacggccaccttggtggctgggg

SEQ ID NO: 20018 - DNA, 3322 bp, Zea Mays
ccgccacctgactcatttttccttgctctggtgcgtcgtctcatggagctgctgaacgccgacgtcaccctgagctcattccacaccagattacgttatccgtggatcaatcgcttggtgaaacaattttctggagacttgtcgtcaccttgaagacttgtgaaattttatttccttagtctttggctcttctatgcaacaaaggcaagccccggtgtactcaccactttccttgttgtttacaaaacttttatcacttgatatgctgcattaggtgataggagttgcgtgatcaaacaatttatgcattatcatccttgagaatttgaataatcattccttgatacctattttatgaaaaactagtgccgcttagccctgcttaaagtgataggattttgaaatttattttgattactggttattgttatgtgtgaatgaacttgagttagataattaatatgagaccagacgggtggcttgcatcgtgaaatgagtcggtgtagtgctccgtctgtgtcgattaaggatcgttcgatgtaggcctgttgtggttgagactttgcaactagccacatgcctcggtaagcctgaacccggctattccatacgtgaaaagacaaccgcgcattgggcgtgggagatggtgggagtagcgtgtaccctcctggctagaggttggacggaggagtattgtgctcccgggtagcgcggaccggttcacgttgtggaggatctgtgggaacggttgacatatgcaagggttaagtgctacatatgtcatgtggttaggaatccccagctgggtataattggttcgaattgtcgttgctcctcgattatggagacttgaccctccgaccactcatcgtagttaataagtgaaacacgaattggctaaaagaaagctagataggacaagtgaatgctctagttcaggaaaatctagaaacaggtaagaacgtaaattgataattaaaagatggcttaaggatccactattagtaagcgtttctgcaaaatgagtccttgattattgcttagccttaccttgactccctctagccagcatacccttgagagtcttttctttagtcggataagtcttgctgagtaattgcgtactcagggttttattccctgttgtttttcaggtcttagttttatgctgctgatggtggtgttaagtgtcggtgggctcgaccttcttataagtctaagtaacccttctatacttcttattaaggatggtctcttgagctagcatatatttcaaacttatacttttgtactcactccgatgaaaataatataaaatttttgtaacttctaaaatttggtaataaaattttcgctgcaaaaatattgatgtgtgtgattcgtgtttacttaatcttgcgatcttggtggtagtggtttatccgaagtcccctgggatactcggacagatcatgttaagttatcaggcatacatgcatagctgtttcaggtctttgagacaaggataggtgcatgtgggtcctataatttgggaggttctgccacatggactatggctacaaattaagcaaagtccctctccaatatgataatgagagtgcaatccgcttggcggataatgccattgaacacagccgcactaagcacatagacattcggtatcactttctgaggaatcatcagcaaagggggatatcgaaatagcttatgtaaacatcaagaatcaactagtcgatatctttaccaagccattagatgagaaaacctttagcaaacttaggaatgagctaaatatacttgattctcggaactttgattgaaacattgcacacatagctaatttatatacctttgatcatatctctttcattttggtacaaatgcatatttcttattattcttgcgccaagactacgactaatatgtttccaagtgtatttctatactaagtcgtagattgaaagggaattggagtatttgacgaagataaggcttccactccactctaacggtatcatttacccttcgtcgctactccgctctctctccaattggtataatccttcactcttatttacttgtaccaattggaaaaaagtaaaaacgggctctcaaagtctccgttttcggcaattaatgccaaaggagaagatattaagcccaaagcaaaaaggaccgcaccaccatttcaaaaaatttcaaaataaagttttaattgatgattttcacattggtatccacacaatggaaatctcttcaattggtatctttaaaggtagattttcaaaattggtatccaattctttagaagttcatctttaaattggtatctattttaaaaccctcttgaaagctaagaggagaatttcatttaggagttttttagtcaaaggaaaagcatttgaaacagggggagaaaattcaaatcttgaaaatgcttcttgcaatcttattcatatacctttgactacttgcaaaagactttgaaaagattttccaaaaggatttgcaaaaacaaaacaagtggtgcaaatgtggtccaaaatgttaaagaaaagaaaagcaatccattcatatctagtgagattatcaattggtttaatttcaagttacctatgcacttaccttatgcaaactagttcatctctgcacttattatttgctttggtttgtgttggtatcaatcacaaaaaaggtggagattgaaagggaaatagggttaaccttttcctataattagttttggtagttgatcgtcaacacaaacacatggactaactagtttgccaagaattcatgtattacaggtgcataaggttcaacacaaactaataaaagattcaagttagggactaaattgaaatggagcaaaggcttgagtgtgctgtgaactggcgcaccggacagtgtccggtgcaccatgcccgtacaactctgaagcagccactctcgggaaaacgcaggctagctccgctataattcaccggactgtctagtgtgccagtggagcaacggctaactcacgcaacggtccactctgataggagctacaatgagcaacagtgctacacagaagtcagagcagcgaagtcagaggggcaccagactgtccggtgtggcaccggactatccggtgccgcaagaggacaaagttccaacggtcgcccgagctccgaaccctaacggttggatgacatggcgacgcatcggacactggacaatgagtgtccggtggcacaccggactggtccggcggcgcaccgaactgtcccggtgcgcccatcgacaacagcctccccaacggccaccttggtggctgggg

SEQ ID NO: 20019 - DNA, 2329 bp, Zea Mays
gacgtctcgctcatctcgtcgtcaagctgtcgtgatatttagcatgattacgttatccgtggatcaatcgcttggtgaaacaattttctggagacttgtcgtcaccttgaagacttgtgaaattttatttccttagtctttggctcttctatgcaacaaaggtcttagttttatgctgctgatggtggtgttaagtgtcggtgggctcgaccttcttataagtctaagtaacccttctatacttcttattaaggatggtctcttgagctagcatatatttcaaacttatacttttgtactcactccgatgaaaataatataaaatttttgtaacttctaaaatttggtaataaaattttcgctgcaaaaatattgatgtgtgtgattcgtgtttacttaatcttgcgatcttggtggtagtggtttatccgaagtcccctgggatactcggacagatcatgttaagttatcaggcatacatgcatagctgtttcaggtctttgagacaaggataggtgcatgtgggtcctataatttgggaggttctgccacatggactatggctacaaattaagcaaagtccctctccaatatgataatgagagtgcaatccgcttggcggataatgccattgaacacagccgcactaagcacatagacattcggtatcactttctgaggaatcatcagcaaagggggatatcgaaatagcttatgtaaacatcaagaatcaactagtcgatatctttaccaagccattagatgagaaaacctttagcaaacttaggaatgagctaaatatacttgattctcggaactttgattgaaacattgcacacatagctaatttatatacctttgatcatatctctttcattttggtacaaatgcatatttcttattattcttgcgccaagactacgactaatatgtttccaagtgtatttctatactaagtcgtagattgaaagggaattggagtatttgacgaagataaggcttccactccactctaacggtatcatttacccttcgtcgctactccgctctctctccaattggtataatccttcactcttatttacttgtaccaattggaaaaaagtaaaaacgggctctcaaagtctccgttttcggcaattaatgccaaaggagaagatattaagcccaaagcaaaaaggaccgcaccaccatttcaaaaaatttcaaaataaagttttaattgatgattttcacattggtatccacacaatggaaatctcttcaattggtatctttaaaggtagattttcaaaattggtatccaattctttagaagttcatctttaaattggtatctattttaaaaccctcttgaaagctaagaggagaatttcatttaggagttttttagtcaaaggaaaagcatttgaaacagggggagaaaattcaaatcttgaaaatgcttcttgcaatcttattcatatacctttgactacttgcaaaagactttgaaaagattttccaaaaggatttgcaaaaacaaaacaagtggtgcaaatgtggtccaaaatgttaaagaaaagaaaagcaatccattcatatctagtgagattatcaattggtttaatttcaagttacctatgcacttaccttatgcaaactagttcatctctgcacttattatttgctttggtttgtgttggtatcaatcacaaaaaaggtggagattgaaagggaaatagggttaaccttttcctataattagttttggtagttgatcgtcaacacaaacacatggactaactagtttgccaagaattcatgtattacaggtgcataaggttcaacacaaactaataaaagattcaagttagggactaaattgaaatggagcaaaggcttgagtgtgctgtgaactggcgcaccggacagtgtccggtgcaccatgcccgtacaactctgaagcagccactctcgggaaaacgcaggctagctccgctataattcaccggactgtctagtgtgccagtggagcaacggctaactcacgcaacggtccactctgataggagctacaatgagcaacagtgctacacagaagtcagagcagcgaagtcagaggggcaccagactgtccggtgtggcaccggactatccggtgccgcaagaggacaaagttccaacggtcgcccgagctccgaaccctaacggttggatgacatggcgacgcatcggacactggacaatgagtgtccggtggcacaccggactggtccggcggcgcaccgaactgtcccggtgcgcccatcgacaacagcctccccaacggccaccttggtggctgggg

SEQ ID NO: 20020 - DNA, 3270 bp, Zea Mays
ctcatctcgtcgtcaagctgtcgtgatatttagcatgattacgttatccgtggatcaatcgcttggtgaaacaattttctggagacttgtcgtcaccttgaagacttgtgaaattttatttccttagtctttggctcttctatgcaacaaaggcaagccccggtgtactcaccactttccttgttgtttacaaaacttttatcacttgatatgctgcattaggtgataggagttgcgtgatcaaacaatttatgcattatcatccttgagaatttgaataatcattccttgatacctattttatgaaaaactagtgccgcttagccctgcttaaagtgataggattttgaaatttattttgattactggttattgttatgtgtgaatgaacttgagttagataattaatatgagaccagacgggtggcttgcatcgtgaaatgagtcggtgtagtgctccgtctgtgtcgattaaggatcgttcgatgtaggcctgttgtggttgagactttgcaactagccacatgcctcggtaagcctgaacccggctattccatacgtgaaaagacaaccgcgcattgggcgtgggagatggtgggagtagcgtgtaccctcctggctagaggttggacggaggagtattgtgctcccgggtagcgcggaccggttcacgttgtggaggatctgtgggaacggttgacatatgcaagggttaagtgctacatatgtcatgtggttaggaatccccagctgggtataattggttcgaattgtcgttgctcctcgattatggagacttgaccctccgaccactcatcgtagttaataagtgaaacacgaattggctaaaagaaagctagataggacaagtgaatgctctagttcaggaaaatctagaaacaggtaagaacgtaaattgataattaaaagatggcttaaggatccactattagtaagcgtttctgcaaaatgagtccttgattattgcttagccttaccttgactccctctagccagcatacccttgagagtcttttctttagtcggataagtcttgctgagtaattgcgtactcagggttttattccctgttgtttttcaggtcttagttttatgctgctgatggtggtgttaagtgtcggtgggctcgaccttcttataagtctaagtaacccttctatacttcttattaaggatggtctcttgagctagcatatatttcaaacttatacttttgtactcactccgatgaaaataatataaaatttttgtaacttctaaaatttggtaataaaattttcgctgcaaaaatattgatgtgtgtgattcgtgtttacttaatcttgcgatcttggtggtagtggtttatccgaagtcccctgggatactcggacagatcatgttaagttatcaggcatacatgcatagctgtttcaggtctttgagacaaggataggtgcatgtgggtcctataatttgggaggttctgccacatggactatggctacaaattaagcaaagtccctctccaatatgataatgagagtgcaatccgcttggcggataatgccattgaacacagccgcactaagcacatagacattcggtatcactttctgaggaatcatcagcaaagggggatatcgaaatagcttatgtaaacatcaagaatcaactagtcgatatctttaccaagccattagatgagaaaacctttagcaaacttaggaatgagctaaatatacttgattctcggaactttgattgaaacattgcacacatagctaatttatatacctttgatcatatctctttcattttggtacaaatgcatatttcttattattcttgcgccaagactacgactaatatgtttccaagtgtatttctatactaagtcgtagattgaaagggaattggagtatttgacgaagataaggcttccactccactctaacggtatcatttacccttcgtcgctactccgctctctctccaattggtataatccttcactcttatttacttgtaccaattggaaaaaagtaaaaacgggctctcaaagtctccgttttcggcaattaatgccaaaggagaagatattaagcccaaagcaaaaaggaccgcaccaccatttcaaaaaatttcaaaataaagttttaattgatgattttcacattggtatccacacaatggaaatctcttcaattggtatctttaaaggtagattttcaaaattggtatccaattctttagaagttcatctttaaattggtatctattttaaaaccctcttgaaagctaagaggagaatttcatttaggagttttttagtcaaaggaaaagcatttgaaacagggggagaaaattcaaatcttgaaaatgcttcttgcaatcttattcatatacctttgactacttgcaaaagactttgaaaagattttccaaaaggatttgcaaaaacaaaacaagtggtgcaaatgtggtccaaaatgttaaagaaaagaaaagcaatccattcatatctagtgagattatcaattggtttaatttcaagttacctatgcacttaccttatgcaaactagttcatctctgcacttattatttgctttggtttgtgttggtatcaatcacaaaaaaggtggagattgaaagggaaatagggttaaccttttcctataattagttttggtagttgatcgtcaacacaaacacatggactaactagtttgccaagaattcatgtattacaggtgcataaggttcaacacaaactaataaaagattcaagttagggactaaattgaaatggagcaaaggcttgagtgtgctgtgaactggcgcaccggacagtgtccggtgcaccatgcccgtacaactctgaagcagccactctcgggaaaacgcaggctagctccgctataattcaccggactgtctagtgtgccagtggagcaacggctaactcacgcaacggtccactctgataggagctacaatgagcaacagtgctacacagaagtcagagcagcgaagtcagaggggcaccagactgtccggtgtggcaccggactatccggtgccgcaagaggacaaagttccaacggtcgcccgagctccgaaccctaacggttggatgacatggcgacgcatcggacactggacaatgagtgtccggtggcacaccggactggtccggcggcgcaccgaactgtcccggtgcgcccatcgacaacagcctccccaacggccaccttggtggctgggg

SEQ ID NO: 20021 - DNA, 2198 bp, Zea Mays
cgtcgtcaagctgtcgtgatatttagcatggtcttagttttatgctgctgatggtggtgttaagtgtcggtgggctcgaccttcttataagtctaagtaacccttctatacttcttattaaggatggtctcttgagctagcatatatttcaaacttatacttttgtactcactccgatgaaaataatataaaatttttgtaacttctaaaatttggtaataaaattttcgctgcaaaaatattgatgtgtgtgattcgtgtttacttaatcttgcgatcttggtggtagtggtttatccgaagtcccctgggatactcggacagatcatgttaagttatcaggcatacatgcatagctgtttcaggtctttgagacaaggataggtgcatgtgggtcctataatttgggaggttctgccacatggactatggctacaaattaagcaaagtccctctccaatatgataatgagagtgcaatccgcttggcggataatgccattgaacacagccgcactaagcacatagacattcggtatcactttctgaggaatcatcagcaaagggggatatcgaaatagcttatgtaaacatcaagaatcaactagtcgatatctttaccaagccattagatgagaaaacctttagcaaacttaggaatgagctaaatatacttgattctcggaactttgattgaaacattgcacacatagctaatttatatacctttgatcatatctctttcattttggtacaaatgcatatttcttattattcttgcgccaagactacgactaatatgtttccaagtgtatttctatactaagtcgtagattgaaagggaattggagtatttgacgaagataaggcttccactccactctaacggtatcatttacccttcgtcgctactccgctctctctccaattggtataatccttcactcttatttacttgtaccaattggaaaaaagtaaaaacgggctctcaaagtctccgttttcggcaattaatgccaaaggagaagatattaagcccaaagcaaaaaggaccgcaccaccatttcaaaaaatttcaaaataaagttttaattgatgattttcacattggtatccacacaatggaaatctcttcaattggtatctttaaaggtagattttcaaaattggtatccaattctttagaagttcatctttaaattggtatctattttaaaaccctcttgaaagctaagaggagaatttcatttaggagttttttagtcaaaggaaaagcatttgaaacagggggagaaaattcaaatcttgaaaatgcttcttgcaatcttattcatatacctttgactacttgcaaaagactttgaaaagattttccaaaaggatttgcaaaaacaaaacaagtggtgcaaatgtggtccaaaatgttaaagaaaagaaaagcaatccattcatatctagtgagattatcaattggtttaatttcaagttacctatgcacttaccttatgcaaactagttcatctctgcacttattatttgctttggtttgtgttggtatcaatcacaaaaaaggtggagattgaaagggaaatagggttaaccttttcctataattagttttggtagttgatcgtcaacacaaacacatggactaactagtttgccaagaattcatgtattacaggtgcataaggttcaacacaaactaataaaagattcaagttagggactaaattgaaatggagcaaaggcttgagtgtgctgtgaactggcgcaccggacagtgtccggtgcaccatgcccgtacaactctgaagcagccactctcgggaaaacgcaggctagctccgctataattcaccggactgtctagtgtgccagtggagcaacggctaactcacgcaacggtccactctgataggagctacaatgagcaacagtgctacacagaagtcagagcagcgaagtcagaggggcaccagactgtccggtgtggcaccggactatccggtgccgcaagaggacaaagttccaacggtcgcccgagctccgaaccctaacggttggatgacatggcgacgcatcggacactggacaatgagtgtccggtggcacaccggactggtccggcggcgcaccgaactgtcccggtgcgcccatcgacaacagcctccccaacggccaccttggtggctgggg

SEQ ID NO: 20022 - DNA, 1248 bp, Zea Mays
  misc_feature (1)..(2): n is a, c, g, or t
nnaatgatgaggtcaccgtcgagagtgccgaggctacattgaagtataatgttgctgttaagtgtgcaacaattacgcctgacgagactcgagtaaaagagtttaaactcaagtctatgtggcggagtccaaatggcacaataaggaatattctaaatgggactgtttttcgtgagcccatcttgtgtaaaaacatcccaagaatcctttctggttggaagaaacctatttgcataggaaggcacgcctttggtgaccagtatcgagctactgatatgattattaatggtccaggaaagctcaagatggtatttgtgcctgatggagctgaccctatggagctggatgtttatgattttaagggacctggtgtggcattatcaatgtacaatgtcgacgagtctattagggctttcgctgagtcctccatggctatggctctttcaaaaaagtggcctctttatctcagcaccaagaatacaatcctcaagaagtatgacggcaggttcaaagacatcttccaggaggtatatgaagagcaatggaaggagaagtttgaagaaaactcaatatggtatgagcacaggttgattgatgacatggtggcctatgctgtgaaaagtgatggtgggtatgtttgggcttgcaaaaactatgacggagatgtacagagcgattttcttgcccaaggttttggttctctgggtttgatgacttctgtgctgacatttcaggctacatcagaaaggacaggagacaagtaccaacagtattgcctccatattcgcttggacccgtggacttgaacacagggcaaagctggataaaaatgatagtctgctggatttcacacacaaacttgaatctgcatgtgttgaaacggtggaatctgggaaaatgactaaggaccttgcgcttcttatccatggccccaaggtaacaagggagttctacctgagcaccgaggagttcatcgatgcagtcgcgcagcaactgcgaggaaagattcaactaccaactactgtgtaatcctgaacctgaagcctgaaaccgaacgaactggttcattgtgcattcggcgcacattttgatagggatggcgagatggatcagatctcaaaacattcttttttttttgcttcagccaaacatttcatggttgggtatataatgacccgttgatcaatgtattcagagcgatattgagttaaattattactagtcggtcgtcgtatttttcattttcca

SEQ ID NO: 20023 - DNA, 1410 bp, Zea Mays
aatgatgaggtcaccgtcgagagtgccgaggctacattgaagtataatgttgctgttaagtgtgcaacaattacgcctgacgagactcgagtaaaagagtttaaactcaagtctatgtggcggagtccaaatggcacaataaggaatattctaaatggaaagctcaagatggtatttgtgcctgatggagctgaccctatggagctggatgtttatgattttaagggacctggtgtggcattatcaatgtacaatgtcgacgagtctattagggctttcgctgagtcctccatggctatggctctttcaaaaaagtggcctctttatctcagcaccaagaatacaatcctcaagaagtatgacggcaggttcaaagacatcttccaggaggtatatgaagagcaatggaaggagaagtttgaagaaaactcaatatggtatgagcacaggttgattgatgacatggtggcctatgctgtgaaaagtgatggtgggtatgtttgggcttgcaaaaactatgacggagatgtacagagcgattttcttgcccaaggttttggttctctgggtttgatgacttctgtgctggtacgttgtgtacctgtgttatcttttactctgacgcagagcccaacataataataataatagtagtaaaaaacaaaagcatacaccagacgagatgtgtatttttttatttaagaaattggaatttggactcgaacccatggcctcaaatggacattcttgttatctagaccactgctgcatagatgtccctgatcttctttttattatattggattcttcattaccagtttctttttatagttgtcttctgacgggaaaacattagaggctgaggctgctcatgggactgtcactagacatttcaggctacatcagaaaggacaggagacaagtaccaacagtattgcctccatattcgcttggacccgtggacttgaacacagggcaaagctggataaaaatgatagtctgctggatttcacacacaaacttgaatctgcatgtgttgaaacggtggaatctgggaaaatgactaaggaccttgcgcttcttatccatggccccaaggtaacaagggagttctacctgagcaccgaggagttcatcgatgcagtcgcgcagcaactgcgaggaaagattcaactaccaactactgtgtaatcctgaacctgaagcctgaaaccgaacgaactggttcattgtgcattcggcgcacattttgatagggatggcgagatggatcagatctcaaaacattcttttttttttgcttcagccaaacatttcatggttgggtatataatgacccgttgatcaatgtattcagagcgatattgagttaaattattactagtcggtcgtcgtatttttcattttcca

SEQ ID NO: 20024 - DNA, 1993 bp, Zea Mays
gttcaagatgccgctatctcttgtattgaggcttatactgtgcttgaggttcttcgacctctctataattcccctaacatactagaacaaaaggatcattgcgtctctgcgagctaatcagttctgtgagcgtctccctagccccaatggcgagtcaactgttgattgccatcagatctcaaagatgccaaatcttgcattcaccatagcaaacaatactttcaccttaacaccagagcagtacatagtgaagttggagcaagcaggacaaactatctgcatcagtgggtttatggcatttgacgtagcgcctcctcgtggtcctctctgctacgctgaacatatctgtactactcttaagtgtgcaacgagggcgtccaccgagggcatcaccgtgcccccgctcgccccctccacgcccgcgcctgtctgcgtctgcccccttcgtctccccgcaacggccgcgtccccaccccagatttccgcgctcgtgagagccgcccagagattgctcccctggtcccccctctacccccggccctacccccgtcctcccgacacgaaccccacacacacatttgcttcgcccacccacatttgtgacccccgccccgcagcccctgccccagcacaggttaaacatgaagatagtgatcaccgtgcccccgcgagatccaggcggagatctagggcgtcggccatggcgagctttggactcgcctaccccatgtctacgacgacaaccaggtgcgtcctgtccggtccgatctgctcagtttctcacattgacacgaggtcggtaatactgactcttcttattagaggggagggtagtgcatagcttgggctgcatctttagaatgttgccttccctaataacatggctgatattgatctttgggaagagatcattgtcttcatgtttaacctgtggtgaaagttccacacttgccaataagaagcatgtttctttaggttaaagtgaactgaatacaagggatgaatggaatgcttgcagagttgtatcataagtggtctctcggcgtgtcgatgtaatgcacattattaactaatttaataattttatatggaataaaactaggtccatgtagtgtacaatgcattctcataaatatcgcatatacttgaattgcatattccacacctgagacccgctgagtccaagaggtccaagttgtcaaggaattgaagaactgaactgtccaaatggtgttctgtctagtactgcagttaaaaagagctgtgaaactgaagaactgttagccatgtcacaaatccaaaactgttaaacaacagttgtatgtgttggacaatccatccatcgatcaggaaaccataccaggatctattgaaccagcagttttcgcgattgaggtgtcatattccaaagaagctttatttgcacgaaacgaacagacagttgcatagatggagcttttgatggtaaggactgaggaggcagcagcccacacctatgatcttgcagcgctcaagtacagggaatcagactgcaaactcaacttcccagtatggttagagtgatggttacctagcttagaagaaggacattgacacaacaaggatagttatcttgggaagatgtgctgttggacaagtgtgatctgtgttttttatctgtgctgcaccgtggactacaatgtggatgaatgcagactataccactctcgttgattctatcgccacctcggagcaaacaggtggtgaaaccgagaccaccttggagaaaataggtggtgaaattgcagacaccttggagcaaacaggtggaaaaactgaagaactagccttcgatccaaagcatcatcttcgcgcaatggcgttgcgcgccgcagagttctccttcgagccgggactctcccgtgccgccaaacctcgatggggatgtcgtgcccatggcggtgggatgaccgcttccttcgtgagtgatattgatgagataactaaggaataa

SEQ ID NO: 20025 - DNA, 339 bp, Zea Mays
aaagcttggaagggagctttctatgatttatttttctgactgtttcgtcacatgttctttccctagatgaaagtattgatttatttttggttctgcaggatcattgcgtctctgcgagctaatcagttctgtgagcgtctccctagccccaatggcgagtcaactgttgattgccatcagatctcaaagatgccaaatcttgcattcaccatagcaaacaatactttcaccttaacaccagagcaggtatggttagagtgatggttacctagcttagaagaaggacattgacacaacaaggatagttatcttgggaagatgtgctgttggacaagtgtg

SEQ ID NO: 20026 - DNA, 1605 bp, Zea Mays
aaagcttggaagggagctttctatgatttatttttctgactgtttcgtcacatgttctttccctagatgaaagtattgatttatttttggttctgcaggatcattgcgtctctgcgagctaatcagttctgtgagcgtctccctagccccaatggcgagtcaactgttgattgccatcagatctcaaagatgccaaatcttgcattcaccatagcaaacaatactttcaccttaacaccagagcaggttaaacatgaagatagtgatcaccgtgcccccgcgagatccaggcggagatctagggcgtcggccatggcgagctttggactcgcctaccccatgtctacgacgacaaccaggtgcgtcctgtccggtccgatctgctcagtttctcacattgacacgaggtcggtaatactgactcttcttattagaggggagggtagtgcatagcttgggctgcatctttagaatgttgccttccctaataacatggctgatattgatctttgggaagagatcattgtcttcatgtttaacctgtggtgaaagttccacacttgccaataagaagcatgtttctttaggttaaagtgaactgaatacaagggatgaatggaatgcttgcagagttgtatcataagtggtctctcggcgtgtcgatgtaatgcacattattaactaatttaataattttatatggaataaaactaggtccatgtagtgtacaatgcattctcataaatatcgcatatacttgaattgcatattccacacctgagacccgctgagtccaagaggtccaagttgtcaaggaattgaagaactgaactgtccaaatggtgttctgtctagtactgcagttaaaaagagctgtgaaactgaagaactgttagccatgtcacaaatccaaaactgttaaacaacagttgtatgtgttggacaatccatccatcgatcaggaaaccataccaggatctattgaaccagcagttttcgcgattgaggtgtcatattccaaagaagctttatttgcacgaaacgaacagacagttgcatagatggagcttttgatggtaaggactgaggaggcagcagcccacacctatgatcttgcagcgctcaagtacagggaatcagactgcaaactcaacttcccagtatggttagagtgatggttacctagcttagaagaaggacattgacacaacaaggatagttatcttgggaagatgtgctgttggacaagtgtgatctgtgttttttatctgtgctgcaccgtggactacaatgtggatgaatgcagactataccactctcgttgattctatcgccacctcggagcaaacaggtggtgaaaccgagaccaccttggagaaaataggtggtgaaattgcagacaccttggagcaaacaggtggaaaaactgaagaactagccttcgatccaaagcatcatcttcgcgcaatggcgttgcgcgccgcagagttctccttcgagccgggactctcccgtgccgccaaacctcgatggggatgtcgtgcccatggcggtgggatgaccgcttccttcgtgagtgatattgatgagataactaaggaataa

SEQ ID NO: 20027 - DNA, 1417 bp, Zea Mays
ccgcaatgatggcggcgaggaggccgacctcaccaagcccatccagttcatctccaccagcaagttcaccctgcagatttccatctccaacacgtcggcgaagaagaagctctacggtctggaggagtaaaccctgctcgttgtctcgcgtcggttgcttggtgcgcggtcgagatctgggcagagatctagggcgccggccatggcgagctttggactcgcctaccccatgtctacgacgacaaccacgttaaacatgaagatagtgatcaccgtgcccccgcgagatccaggcggagatctagggcgtcggccatggcgagctttggactcgcctaccccatgtctacgacgacaaccaggtgcgtcctgtccggtccgatctgctcagtttctcacattgacacgaggtcggtaatactgactcttcttattagaggggagggtagtgcatagcttgggctgcatctttagaatgttgccttccctaataacatggctgatattgatctttgggaagagatcattgtcttcatgtttaacctgtggtgaaagttccacacttgccaataagaagcatgtttctttaggttaaagtgaactgaatacaagggatgaatggaatgcttgcagagttgtatcataagtggtctctcggcgtgtcgatgtaatgcacattattaactaatttaataattttatatggaataaaactaggtccatgtagtgtacaatgcattctcataaatatcgcatatacttgaattgcatattccacacctgagacccgctgagtccaagaggtccaagttgtcaaggaattgaagaactgaactgtccaaatggtgttctgtctagtactgcagttaaaaagaggagcttttgatggtaaggactgaggaggcagcagcccacacctatgatcttgcagcgctcaagtacagggaatcagactgcaaactcaacttcccagtatggttagagtgatggttacctagcttagaagaaggacattgacacaacaaggatagttatcttgggaagatgtgctgttggacaagtgtgatctgtgttttttatctgtgctgcaccgtggactacaatgtggatgaatgcagactataccactctcgttgattctatcgccacctcggagcaaacaggtggtgaaaccgagaccaccttggagaaaataggtggtgaaattgcagacaccttggagcaaacaggtggaaaaactgaagaactagccttcgatccaaagcatcatcttcgcgcaatggcgttgcgcgccgcagagttctccttcgagccgggactctcccgtgccgccaaacctcgatggggatgtcgtgcccatggcggtgggatgaccgcttccttcgtgagtgatattgatgagataactaaggaataa

SEQ ID NO: 20028 - DNA, 1429 bp, Zea Mays
cctaccccatgtctacgacgacaaccacgttaaacatgaagatagtgatcaccgtgcccccgcgagatccaggcggagatctagggcgtcggccatggcgagctttggactcgcctaccccatgtctacgacgacaaccaggtgcgtcctgtccggtccgatctgctcagtttctcacattgacacgaggtcggtaatactgactcttcttattagaggggagggtagtgcatagcttgggctgcatctttagaatgttgccttccctaataacatggctgatattgatctttgggaagagatcattgtcttcatgtttaacctgtggtgaaagttccacacttgccaataagaagcatgtttctttaggttaaagtgaactgaatacaagggatgaatggaatgcttgcagagttgtatcataagtggtctctcggcgtgtcgatgtaatgcacattattaactaatttaataattttatatggaataaaactaggtccatgtagtgtacaatgcattctcataaatatcgcatatacttgaattgcatattccacacctgagacccgctgagtccaagaggtccaagttgtcaaggaattgaagaactgaactgtccaaatggtgttctgtctagtactgcagttaaaaagagctgtgaaactgaagaactgttagccatgtcacaaatccaaaactgttaaacaacagttgtatgtgttggacaatccatccatcgatcaggaaaccataccaggatctattgaaccagcagttttcgcgattgaggtgtcatattccaaagaagctttatttgcacgaaacgaacagacagttgcatagatggtattacctttacaaatgcaaggacataggaatatatgagttaaaatcctttgtgttgttcgcttcggattaaagccagttgtttgagacaaaaacactgtagtagaagccagtacatattaaagtcaagcgaataggttgtaatcttctttctttttaggagcttttgatggtaaggactgaggaggcagcagcccacacctatgatcttgcagcgctcaagtacagggaatcagactgcaaactcaacttcccaccgtggactacaatgtggatgaatgcagactataccactctcgttgattctatcgccacctcggagcaaacaggtggtgaaaccgagaccaccttggagaaaataggtggtgaaattgcagacaccttggagcaaacaggtggaaaaactgaagaactagccttcgatccaaagcatcatcttcgcgcaatggcgttgcgcgccgcagagttctccttcgagccgggactctcccgtgccgccaaacctcgatggggatgtcgtgcccatggcggtgggatgaccgcttccttcgtgagtgatattgatgagataactaaggaataa

SEQ ID NO: 20029 - DNA, 1416 bp, Zea Mays
cctaccccatgtctacgacgacaaccacgttaaacatgaagatagtgatcaccgtgcccccgcgagatccaggcggagatctagggcgtcggccatggcgagctttggactcgcctaccccatgtctacgacgacaaccaggtgcgtcctgtccggtccgatctgctcagtttctcacattgacacgaggtcggtaatactgactcttcttattagaggggagggtagtgcatagcttgggctgcatctttagaatgttgccttccctaataacatggctgatattgatctttgggaagagatcattgtcttcatgtttaacctgtggtgaaagttccacacttgccaataagaagcatgtttctttaggttaaagtgaactgaatacaagggatgaatggaatgcttgcagagttgtatcataagtggtctctcggcgtgtcgatgtaatgcacattattaactaatttaataattttatatggaataaaactaggtccatgtagtgtacaatgcattctcataaatatcgcatatacttgaattgcatattccacacctgagacccgctgagtccaagaggtccaagttgtcaaggaattgaagaactgaactgtccaaatggtgttctgtctagtactgcagttaaaaagagagcctctacataatcaaccaatcctgcagctgtgaaactgaagaactgttagccatgtcacaaatccaaaactgttaaacaacagttgtatgtgttggacaatccatccatcgatcaggaaaccataccaggatctattgaaccagcagttttcgcgattgaggtgtcatattccaaagaagctttatttgcacgaaacgaacagacagttgcatagatggagcttttgatggtaaggactgaggaggcagcagcccacacctatgatcttgcagcgctcaagtacagggaatcagactgcaaactcaacttcccagtatggttagagtgatggttacctagcttagaagaaggacattgacacaacaaggatagttatcttgggaagatgtgctgttggacaagtgtgatctgtgttttttatctgtgctgcaccgtggactacaatgtggatgaatgcagactataccactctcgttgattctatcgccacctcggagcaaacaggtggtgaaaccgagaccaccttggagaaaataggtggtgaaattgcagacaccttggagcaaacaggtggaaaaactgaagaactagccttcgatccaaagcatcatcttcgcgcaatggcgttgcgcgccgcagagttctccttcgagccgggactctcccgtgccgccaaacctcgatggggatgtcgtgcccatggcggtgggatgaccgcttccttcgtgagtgatattgatgagataactaaggaataa

SEQ ID NO: 20030 - DNA, 5715 bp, Zea Mays
ggagcaagggcatgaactcaaaagtgccaggaaggaagccatccaaccgcggagatgtgggagcccaggaggtcgtagcgaggggtttccttgattggtgaatcttcgatcaaggatggagcaccgggctttgctgctcggcgtggcgctggcctttctgctggcctctggctcccagggcttgaaccatgaaggttggcttctcctagcgctgaagagccagatgaacgacactctccaccacctcgacaactgggacgcgagggatctaacaccatgcatctggaagggcgtcagctgctcgtcgacgcccaacccagtggtggtgtctctcgacctcagcaacatgaacctgtcaggcacagttgcgcctagcattggtagcctgtctgagctgaccctccttgatctgtcctttaatgggttctatggtaccatccctccagagattgggaacctgtcgaaattggaagtgcttaacttgtacaacaacagttttgttggtacaataccccctgagctcgggaagctagataggctggtcacgtttaatctgtgcaacaacaagcttcatggcccgatacctgatgaggttggaaatatgacagcacttcaggaattggtaggatacagtaataatctcactggctcactacctcgttcacttggcaagctgaagaacctgaaaaatattaggttgggtcagaatcttatatcaggcaacattcctgttgagataggtgcatgcctgaacataactgtgtttggtcttgcgcaaaacaagctcgagggtcctttacctaaagagattgggaggttgaccttgatgaccgacttaatcctatgggggaatcagctttctggtgttattcctccagagataggaaactgtacaagtctgagcacaattgccctctatgacaataatctagttggccccattcctgcaacaattgtgaaaattacgaatcttcagaagctatacctttacaggaattcattaaatggtacaattccatctgacattgggaatctttctcttgcaaaagagatcgacttttcagagaatttcttaactggagggataccaaaggagctggccgacatcccaggcttgaatttactctacctcttccagaaccagcttacaggccctattcctacagagttgtgtgggttgaaaaacttgagtaaacttgatctgtcgatcaattcactgaatggcacgattccagttggatttcagtacatgagaaatctaatccaactgcaactcttcaacaatatgctttctggcaacatacctccaaggtttggcatttatagccgtctttgggtggtggatttctcaaacaacagtataacagggcagataccgaaagatctttgcaggcaatcaaaccttattttgttgaatttggggtctaacatgcttacaggaaacattcctcgtgggatcactaactgtaaaacattggtgcagcttcgtctcagtgacaacagtctgacaggaagtttccccactgatctctgcaatctggtaaatttgacaacagttgaactaggtcgaaacaaatttagtgggcctattcctcctcagataggcagttgcaagtctcttcaaaggctggaccttacaaataattatttcacgtcagagttgcctcgagaaattggtaatttgtcaaaactcgttgtcttcaatatctcatctaatagactaggaggaaacataccactagagattttcaattgtacagtgttgcaacgccttgatctcagccagaatagctttgaaggttcgttgccaaatgaagttggtaggctgccacagctggagctgctatcttttgctgacaataggctaactggccagataccacccattcttggtgaactatcacatttaacagcactacagattggtggcaatcagttatctggtgaaataccaaaggagctgggtctgctgtcgagcttgcagatcgccctgaatttgagttacaacaacctctctggcgatattccatcagagcttggtaaccttgcactgttggaaagtttatttcttaataacaacaagctgatgggtgaaatcccaaccacatttgctaatctgtccagtttgcttgagctcaacgtctcctacaattatctctctggtgccctcccgccaataccgctttttgataatatgtctgtgacctgttttattggaaataaaggattatgtggtggacaacttggtagatgtggatcccgaccatcctctagttctcagtcatccaaatcagtcagtcccccattgggcaagatcatagcaattgttgctgctgtcattggagggatttcacttattcttattgcaataattgtgcaccatatcagaaaaccaatggagacagtggcccctttgcaagataagcaaccttttccagcttgttctaatgtgcatgtttctgctaaggatgcatatacatttcaggaattgctcaccgccacaaataactttgacgagagttgtgtgatcggaaggggtgcatgtgggacggtgtacagagccatcctgaaggctggacagacaattgcagtcaagaaacttgcttctaacagggaagggagcaacactgacaacagctttcgtgcagagatcatgactcttggaaagataagacatcgtaatattgtgaagctttacggttttgtataccaccagggttccaaccttctactctacgaatacatgtcaagaggtagtcttggtgagctacttcatggacaatcatcctcttcacttgattgggagacacgcttcctgatagcacttggtgcggctgaagggctttcatacctacatcacgactgcaagcctcgtatcatccaccgtgatatcaaatctaataacattttacttgatgaaaactttgaagcccatgttggtgattttgggttagcaaaggtgattgacatgccatactcgaagtcaatgtctgcaattgcaggttcatacggctatatagcaccagaatatgcttataccatgaaggttactgagaaatgtgatatatatagttatggcgtcgtgctgctggagctgctaactgggcgtgcccctgtgcaacccttggaactaggaggcgatctggtaacatgggtaaagaactacatcaaggacaattgtttgggtccagggatcctcgataaaaaaatggatttacaagatcaaagtgttgtcgatcatatgatcgaggtcatgaaaattgctttggtatgtactagcttgactccgtacgagagaccaccaatgcggcatgttgtagtcatgttaagcgagtctaaagataggacgagggtcagctctgcatcctcgcctgcctctgatgattcttcaaagaaggatgactcataatgtatttataatatgttcgattagccaaaggtaatacacatttttttactgacttttcctagtattgatagtaattagtagggttcttgtaatctgcattcattatttgtgtcagcatttcgtagggagaaatatgatagtggttcatagtttcgtagtgtcattgtatgccgttgtctcagaaaggtttcagactagcatgaagcatttgaggcacgtgacggtcttactgatgccgttgtctctcagaaaggcttcctcttctctgcagatgttcattgttcagttaattctatatgcgtcggtgcattcttactcgagttacaagtacactaggaacacctgtcaggtagccaattctgtaatattctccaacatgaactgcagtgcagatcatatgtaatcatcgatcatatgcaatcgctctttgtagctgttaacctgtagcctctgatcgttgttgctgagtcgtctttctcttccccttggcatgtccgtaccaaaaaataagttatgaaaccacgaagtcgcgcccaccaacggacgctgcctctaaaaaagcagatcagcgcgttgtcgcagcgtcggagcacaagcgacatcgctccccgggggccgtcggccggcgaccggcgacttccgcagtagaaccaactccacccacccatccacttggccagcagcttcttgcctgcatcaattgccatggcggcggtggaagcgaagaggagcccacactttgttctctttcccttcctggctcacggccacgtccctgtcttcctccgcctggctggcctcctccgcgcgctccgcccagggctcgaggtcacgctcgtctccaccccgcggctcctgggctccctcacgctcccgcctgcctccccacccatccaccagttcatcaccttcttcacggcctccgagtcgctccgccctgcgttcgagaagttcgtctccggcatcggttccccagtctgcatcgtcgccgatgccttcttcgggtggacggccgaagtcgcgcgcgcgcggggcgcgtcccacgcggtgttccttcccggcggcgcgttcggcaacgccgtgttcttctccgtgtgggagcacctcccgcacgcccttacggccgccgacgagttcccgctgccggatttcccagacgtcgttctccaccgcacgcagatcccgaggttcatcctctctgccacgggggcggacccctggacggccttcttccggcgcgtcatcgcctcctgccgcaagaccgacgctctccttgtcaacaccgtccgggaactggaaccctccggcctcgacatgctccggagaagcttcggcgtccagccatggccaatcgggccagtcctcgcagagccgacggccccgtcgtcagactcgcgggacgacgccagcatcatccggtggctggacacgcacccgccgcgctcggtgctgtacatatcattcggatcgcagaacagcatcagcgcggatcagatgatggagctcgcgctggggctggaggcgagcggtcgccccttcctctgggcgctccgcccgccgctggggttcgacgcgaaggacgtgttcaggcccgagtggctcccggctggcttcgaggagcgaacggcgagggcgaatgtgggactgctggcgcgcgggtgggcgccgcagatgcggatcctgtcgcacccgtccaccggcgcgttcctgagccactgcgggtggaactccgtcctcgagagcctgtcccgcggcgtgccgctgatcgggtggccgttgggcgccgagcagttcttcaacgcaaatctcgcggtcgagtggggcgtctgcgtggagctggcgcgcgggaacctggagagctccgcggtggagagcagggcggtggtcgaggccgagcggacggtgatgggggacacggcgaagggtgatgagatgaggagggtggtggcggcgatcgcacgcaccatggaggccgcgtgggaagcgcctggcgggtcggcggcggagagcctggaagggttcctgcgatgcgttgaaccctgagatgccccgctttgagatggttgcgcgaggaatctgcaactaagtacgcgcgcgggaaatctgtgttaagaattcctcaactacaaaggacgacggattgatgggattacggctcctgttgcattgtaacagaaacggatttgtttggttcattaacgtgtagcctgcaggattggatagcgcttctgggtagagataacgagcagacagtggtgcaaacgtttacgggcataaaaaacggtgaaccaaacaacaccttaaaa

SEQ ID NO: 20031 - DNA, 6086 bp, Zea Mays
cggacggattaggacgaaaagcaaaggcagggaaagcaaaagaggagagagagagggagggggcagaggaggctagatcgagggggagagggaccgcccgcgattgctacggcctccatcgcagcgagagcttgaaagcgtgcttgcctgccattcccagctcccagttcctttccttcttcttgctcgtccacccagtactccactgctcctcgtcctcgtcctcgtcctccctctcccgccatccccatccccgcgacgacgcgcatcggaccctgcgtcgtacgtgctcgcccattccctagccgtcagtggatgtgccgggctggccgcgggccgtccgagcctgcggcggcggcaggggagggcgacaacccggcgggcggcaggagtggcagcgggaaggaagccatccaaccgcggagatgtgggagcccaggaggtcgtagcgaggggtttccttgattggtgaatcttcgatcaaggatggagcaccgggctttgctgctcggcgtggcgctggcctttctgctggcctctggctcccagggcttgaaccatgaaggttggcttctcctagcgctgaagagccagatgaacgacactctccaccacctcgacaactgggacgcgagggatctaacaccatgcatctggaagggcgtcagctgctcgtcgacgcccaacccagtggtggtgtctctcgacctcagcaacatgaacctgtcaggcacagttgcgcctagcattggtagcctgtctgagctgaccctccttgatctgtcctttaatgggttctatggtaccatccctccagagattgggaacctgtcgaaattggaagtgcttaacttgtacaacaacagttttgttggtacaataccccctgagctcgggaagctagataggctggtcacgtttaatctgtgcaacaacaagcttcatggcccgatacctgatgaggttggaaatatgacagcacttcaggaattggtaggatacagtaataatctcactggctcactacctcgttcacttggcaagctgaagaacctgaaaaatattaggttgggtcagaatcttatatcaggcaacattcctgttgagataggtgcatgcctgaacataactgtgtttggtcttgcgcaaaacaagctcgagggtcctttacctaaagagattgggaggttgaccttgatgaccgacttaatcctatgggggaatcagctttctggtgttattcctccagagataggaaactgtacaagtctgagcacaattgccctctatgacaataatctagttggccccattcctgcaacaattgtgaaaattacgaatcttcagaagctatacctttacaggaattcattaaatggtacaattccatctgacattgggaatctttctcttgcaaaagagatcgacttttcagagaatttcttaactggagggataccaaaggagctggccgacatcccaggcttgaatttactctacctcttccagaaccagcttacaggccctattcctacagagttgtgtgggttgaaaaacttgagtaaacttgatctgtcgatcaattcactgaatggcacgattccagttggatttcagtacatgagaaatctaatccaactgcaactcttcaacaatatgctttctggcaacatacctccaaggtttggcatttatagccgtctttgggtggtggatttctcaaacaacagtataacagggcagataccgaaagatctttgcaggcaatcaaaccttattttgttgaatttggggtctaacatgcttacaggaaacattcctcgtgggatcactaactgtaaaacattggtgcagcttcgtctcagtgacaacagtctgacaggaagtttccccactgatctctgcaatctggtaaatttgacaacagttgaactaggtcgaaacaaatttagtgggcctattcctcctcagataggcagttgcaagtctcttcaaaggctggaccttacaaataattatttcacgtcagagttgcctcgagaaattggtaatttgtcaaaactcgttgtcttcaatatctcatctaatagactaggaggaaacataccactagagattttcaattgtacagtgttgcaacgccttgatctcagccagaatagctttgaaggttcgttgccaaatgaagttggtaggctgccacagctggagctgctatcttttgctgacaataggctaactggccagataccacccattcttggtgaactatcacatttaacagcactacagattggtggcaatcagttatctggtgaaataccaaaggagctgggtctgctgtcgagcttgcagatcgccctgaatttgagttacaacaacctctctggcgatattccatcagagcttggtaaccttgcactgttggaaagtttatttcttaataacaacaagctgatgggtgaaatcccaaccacatttgctaatctgtccagtttgcttgagctcaacgtctcctacaattatctctctggtgccctcccgccaataccgctttttgataatatgtctgtgacctgttttattggaaataaaggattatgtggtggacaacttggtagatgtggatcccgaccatcctctagttctcagtcatccaaatcagtcagtcccccattgggcaagatcatagcaattgttgctgctgtcattggagggatttcacttattcttattgcaataattgtgcaccatatcagaaaaccaatggagacagtggcccctttgcaagataagcaaccttttccagcttgttctaatgtgcatgtttctgctaaggatgcatatacatttcaggaattgctcaccgccacaaataactttgacgagagttgtgtgatcggaaggggtgcatgtgggacggtgtacagagccatcctgaaggctggacagacaattgcagtcaagaaacttgcttctaacagggaagggagcaacactgacaacagctttcgtgcagagatcatgactcttggaaagataagacatcgtaatattgtgaagctttacggttttgtataccaccagggttccaaccttctactctacgaatacatgtcaagaggtagtcttggtgagctacttcatggacaatcatcctcttcacttgattgggagacacgcttcctgatagcacttggtgcggctgaagggctttcatacctacatcacgactgcaagcctcgtatcatccaccgtgatatcaaatctaataacattttacttgatgaaaactttgaagcccatgttggtgattttgggttagcaaaggtgattgacatgccatactcgaagtcaatgtctgcaattgcaggttcatacggctatatagcaccagaatatgcttataccatgaaggttactgagaaatgtgatatatatagttatggcgtcgtgctgctggagctgctaactgggcgtgcccctgtgcaacccttggaactaggaggcgatctggtaacatgggtaaagaactacatcaaggacaattgtttgggtccagggatcctcgataaaaaaatggatttacaagatcaaagtgttgtcgatcatatgatcgaggtcatgaaaattgctttggtatgtactagcttgactccgtacgagagaccaccaatgcggcatgttgtagtcatgttaagcgagtctaaagataggacgagggtcagctctgcatcctcgcctgcctctgatgattcttcaaagaaggatgactcataatgtatttataatatgttcgattagccaaaggtaatacacatttttttactgacttttcctagtattgatagtaattagtagggttcttgtaatctgcattcattatttgtgtcagcatttcgtagggagaaatatgatagtggttcatagtttcgtagtgtcattgtatgccgttgtctcagaaaggtttcagactagcatgaagcatttgaggcacgtgacggtcttactgatgccgttgtctctcagaaaggcttcctcttctctgcagatgttcattgttcagttaattctatatgcgtcggtgcattcttactcgagttacaagtacactaggaacacctgtcaggtagccaattctgtaatattctccaacatgaactgcagtgcagatcatatgtaatcatcgatcatatgcaatcgctctttgtagctgttaacctgtagcctctgatcgttgttgctgagtcgtctttctcttccccttggcatgtccgtaccaaaaaataagttatgaaaccacgaagtcgcgcccaccaacggacgctgcctctaaaaaagcagatcagcgcgttgtcgcagcgtcggagcacaagcgacatcgctccccgggggccgtcggccggcgaccggcgacttccgcagtagaaccaactccacccacccatccacttggccagcagcttcttgcctgcatcaattgccatggcggcggtggaagcgaagaggagcccacactttgttctctttcccttcctggctcacggccacgtccctgtcttcctccgcctggctggcctcctccgcgcgctccgcccagggctcgaggtcacgctcgtctccaccccgcggctcctgggctccctcacgctcccgcctgcctccccacccatccaccagttcatcaccttcttcacggcctccgagtcgctccgccctgcgttcgagaagttcgtctccggcatcggttccccagtctgcatcgtcgccgatgccttcttcgggtggacggccgaagtcgcgcgcgcgcggggcgcgtcccacgcggtgttccttcccggcggcgcgttcggcaacgccgtgttcttctccgtgtgggagcacctcccgcacgcccttacggccgccgacgagttcccgctgccggatttcccagacgtcgttctccaccgcacgcagatcccgaggttcatcctctctgccacgggggcggacccctggacggccttcttccggcgcgtcatcgcctcctgccgcaagaccgacgctctccttgtcaacaccgtccgggaactggaaccctccggcctcgacatgctccggagaagcttcggcgtccagccatggccaatcgggccagtcctcgcagagccgacggccccgtcgtcagactcgcgggacgacgccagcatcatccggtggctggacacgcacccgccgcgctcggtgctgtacatatcattcggatcgcagaacagcatcagcgcggatcagatgatggagctcgcgctggggctggaggcgagcggtcgccccttcctctgggcgctccgcccgccgctggggttcgacgcgaaggacgtgttcaggcccgagtggctcccggctggcttcgaggagcgaacggcgagggcgaatgtgggactgctggcgcgcgggtgggcgccgcagatgcggatcctgtcgcacccgtccaccggcgcgttcctgagccactgcgggtggaactccgtcctcgagagcctgtcccgcggcgtgccgctgatcgggtggccgttgggcgccgagcagttcttcaacgcaaatctcgcggtcgagtggggcgtctgcgtggagctggcgcgcgggaacctggagagctccgcggtggagagcagggcggtggtcgaggccgagcggacggtgatgggggacacggcgaagggtgatgagatgaggagggtggtggcggcgatcgcacgcaccatggaggccgcgtgggaagcgcctggcgggtcggcggcggagagcctggaagggttcctgcgatgcgttgaaccctgagatgccccgctttgagatggttgcgcgaggaatctgcaactaagtacgcgcgcgggaaatctgtgttaagaattcctcaactacaaaggacgacggattgatgggattacggctcctgttgcattgtaacagaaacggatttgtttggttcattaacgtgtagcctgcaggattggatagcgcttctgggtagagataacgagcagacagtggtgcaaacgtttacgggcataaaaaacggtgaaccaaacaacaccttaaaa

SEQ ID NO: 20032 - DNA, 6524 bp, Zea Mays
cggattaggacgaaaagcaaaggcagggaaagcaaaagaggagagagagagggagggggcagaggaggctagatcgagggggagagggaccgcccgcgattgctacggcctccatcgcagcgagagcttgaaagcgtgcttgcctgccattcccagctcccagttcctttccttcttcttgctcgtccacccagtactccactgctcctcgtcctcgtcctcgtcctccctctcccgccatccccatccccgcgacgacgcgcatcggaccctgcgtcgtacgtgctcgcccattccctagccgtcagtggatgtgccgggctggccgcgggccgtccgagcctgcggcggcggcaggggagggcgacaacccggcgggcggcaggagtggcagcgggtgagttgagctccactcagggcccgcattaccagtgtgtccctccccggtggtgctctgcgctgttccccttgctcacttgtcgggcggggcgtgccctagcaccgtgtggactgtggagctcgcaccgcgcgggggaagtgaaaaagctcgcgcgcctttcgcggatctgcttcgggggcttgcgcggcggtgtgctcctgggtcccccagacggggccgggtatcccgtgatttgaggggacttctacttctctctctctctcctgctgcctcttcttctttatgatgggtacacggtgcgattggtgtgtgctcctgtttggggatcccctgtttggtcagtgaggagagttgagctgctatagcatttctgccggagaaatcggcttagagttgtctgggtgcttcttctcttcgtgagcttctcgatttccaggaggaaggaagccatccaaccgcggagatgtgggagcccaggaggtcgtagcgaggggtttccttgattggtgaatcttcgatcaaggatggagcaccgggctttgctgctcggcgtggcgctggcctttctgctggcctctggctcccagggcttgaaccatgaaggttggcttctcctagcgctgaagagccagatgaacgacactctccaccacctcgacaactgggacgcgagggatctaacaccatgcatctggaagggcgtcagctgctcgtcgacgcccaacccagtggtggtgtctctcgacctcagcaacatgaacctgtcaggcacagttgcgcctagcattggtagcctgtctgagctgaccctccttgatctgtcctttaatgggttctatggtaccatccctccagagattgggaacctgtcgaaattggaagtgcttaacttgtacaacaacagttttgttggtacaataccccctgagctcgggaagctagataggctggtcacgtttaatctgtgcaacaacaagcttcatggcccgatacctgatgaggttggaaatatgacagcacttcaggaattggtaggatacagtaataatctcactggctcactacctcgttcacttggcaagctgaagaacctgaaaaatattaggttgggtcagaatcttatatcaggcaacattcctgttgagataggtgcatgcctgaacataactgtgtttggtcttgcgcaaaacaagctcgagggtcctttacctaaagagattgggaggttgaccttgatgaccgacttaatcctatgggggaatcagctttctggtgttattcctccagagataggaaactgtacaagtctgagcacaattgccctctatgacaataatctagttggccccattcctgcaacaattgtgaaaattacgaatcttcagaagctatacctttacaggaattcattaaatggtacaattccatctgacattgggaatctttctcttgcaaaagagatcgacttttcagagaatttcttaactggagggataccaaaggagctggccgacatcccaggcttgaatttactctacctcttccagaaccagcttacaggccctattcctacagagttgtgtgggttgaaaaacttgagtaaacttgatctgtcgatcaattcactgaatggcacgattccagttggatttcagtacatgagaaatctaatccaactgcaactcttcaacaatatgctttctggcaacatacctccaaggtttggcatttatagccgtctttgggtggtggatttctcaaacaacagtataacagggcagataccgaaagatctttgcaggcaatcaaaccttattttgttgaatttggggtctaacatgcttacaggaaacattcctcgtgggatcactaactgtaaaacattggtgcagcttcgtctcagtgacaacagtctgacaggaagtttccccactgatctctgcaatctggtaaatttgacaacagttgaactaggtcgaaacaaatttagtgggcctattcctcctcagataggcagttgcaagtctcttcaaaggctggaccttacaaataattatttcacgtcagagttgcctcgagaaattggtaatttgtcaaaactcgttgtcttcaatatctcatctaatagactaggaggaaacataccactagagattttcaattgtacagtgttgcaacgccttgatctcagccagaatagctttgaaggttcgttgccaaatgaagttggtaggctgccacagctggagctgctatcttttgctgacaataggctaactggccagataccacccattcttggtgaactatcacatttaacagcactacagattggtggcaatcagttatctggtgaaataccaaaggagctgggtctgctgtcgagcttgcagatcgccctgaatttgagttacaacaacctctctggcgatattccatcagagcttggtaaccttgcactgttggaaagtttatttcttaataacaacaagctgatgggtgaaatcccaaccacatttgctaatctgtccagtttgcttgagctcaacgtctcctacaattatctctctggtgccctcccgccaataccgctttttgataatatgtctgtgacctgttttattggaaataaaggattatgtggtggacaacttggtagatgtggatcccgaccatcctctagttctcagtcatccaaatcagtcagtcccccattgggcaagatcatagcaattgttgctgctgtcattggagggatttcacttattcttattgcaataattgtgcaccatatcagaaaaccaatggagacagtggcccctttgcaagataagcaaccttttccagcttgttctaatgtgcatgtttctgctaaggatgcatatacatttcaggaattgctcaccgccacaaataactttgacgagagttgtgtgatcggaaggggtgcatgtgggacggtgtacagagccatcctgaaggctggacagacaattgcagtcaagaaacttgcttctaacagggaagggagcaacactgacaacagctttcgtgcagagatcatgactcttggaaagataagacatcgtaatattgtgaagctttacggttttgtataccaccagggttccaaccttctactctacgaatacatgtcaagaggtagtcttggtgagctacttcatggacaatcatcctcttcacttgattgggagacacgcttcctgatagcacttggtgcggctgaagggctttcatacctacatcacgactgcaagcctcgtatcatccaccgtgatatcaaatctaataacattttacttgatgaaaactttgaagcccatgttggtgattttgggttagcaaaggtgattgacatgccatactcgaagtcaatgtctgcaattgcaggttcatacggctatatagcaccagaatatgcttataccatgaaggttactgagaaatgtgatatatatagttatggcgtcgtgctgctggagctgctaactgggcgtgcccctgtgcaacccttggaactaggaggcgatctggtaacatgggtaaagaactacatcaaggacaattgtttgggtccagggatcctcgataaaaaaatggatttacaagatcaaagtgttgtcgatcatatgatcgaggtcatgaaaattgctttggtatgtactagcttgactccgtacgagagaccaccaatgcggcatgttgtagtcatgttaagcgagtctaaagataggacgagggtcagctctgcatcctcgcctgcctctgatgattcttcaaagaaggatgactcataatgtatttataatatgttcgattagccaaaggtaatacacatttttttactgacttttcctagtattgatagtaattagtagggttcttgtaatctgcattcattatttgtgtcagcatttcgtagggagaaatatgatagtggttcatagtttcgtagtgtcattgtatgccgttgtctcagaaaggtttcagactagcatgaagcatttgaggcacgtgacggtcttactgatgccgttgtctctcagaaaggcttcctcttctctgcagatgttcattgttcagttaattctatatgcgtcggtgcattcttactcgagttacaagtacactaggaacacctgtcaggtagccaattctgtaatattctccaacatgaactgcagtgcagatcatatgtaatcatcgatcatatgcaatcgctctttgtagctgttaacctgtagcctctgatcgttgttgctgagtcgtctttctcttccccttggcatgtccgtaccaaaaaataagttatgaaaccacgaagtcgcgcccaccaacggacgctgcctctaaaaaagcagatcagcgcgttgtcgcagcgtcggagcacaagcgacatcgctccccgggggccgtcggccggcgaccggcgacttccgcagtagaaccaactccacccacccatccacttggccagcagcttcttgcctgcatcaattgccatggcggcggtggaagcgaagaggagcccacactttgttctctttcccttcctggctcacggccacgtccctgtcttcctccgcctggctggcctcctccgcgcgctccgcccagggctcgaggtcacgctcgtctccaccccgcggctcctgggctccctcacgctcccgcctgcctccccacccatccaccagttcatcaccttcttcacggcctccgagtcgctccgccctgcgttcgagaagttcgtctccggcatcggttccccagtctgcatcgtcgccgatgccttcttcgggtggacggccgaagtcgcgcgcgcgcggggcgcgtcccacgcggtgttccttcccggcggcgcgttcggcaacgccgtgttcttctccgtgtgggagcacctcccgcacgcccttacggccgccgacgagttcccgctgccggatttcccagacgtcgttctccaccgcacgcagatcccgaggttcatcctctctgccacgggggcggacccctggacggccttcttccggcgcgtcatcgcctcctgccgcaagaccgacgctctccttgtcaacaccgtccgggaactggaaccctccggcctcgacatgctccggagaagcttcggcgtccagccatggccaatcgggccagtcctcgcagagccgacggccccgtcgtcagactcgcgggacgacgccagcatcatccggtggctggacacgcacccgccgcgctcggtgctgtacatatcattcggatcgcagaacagcatcagcgcggatcagatgatggagctcgcgctggggctggaggcgagcggtcgccccttcctctgggcgctccgcccgccgctggggttcgacgcgaaggacgtgttcaggcccgagtggctcccggctggcttcgaggagcgaacggcgagggcgaatgtgggactgctggcgcgcgggtgggcgccgcagatgcggatcctgtcgcacccgtccaccggcgcgttcctgagccactgcgggtggaactccgtcctcgagagcctgtcccgcggcgtgccgctgatcgggtggccgttgggcgccgagcagttcttcaacgcaaatctcgcggtcgagtggggcgtctgcgtggagctggcgcgcgggaacctggagagctccgcggtggagagcagggcggtggtcgaggccgagcggacggtgatgggggacacggcgaagggtgatgagatgaggagggtggtggcggcgatcgcacgcaccatggaggccgcgtgggaagcgcctggcgggtcggcggcggagagcctggaagggttcctgcgatgcgttgaaccctgagatgccccgctttgagatggttgcgcgaggaatctgcaactaagtacgcgcgcgggaaatctgtgttaagaattcctcaactacaaaggacgacggattgatgggattacggctcctgttgcattgtaacagaaacggatttgtttggttcattaacgtgtagcctgcaggattggatagcgcttctgggtagagataacgagcagacagtggtgcaaacgtttacgggcataaaaaacggtgaaccaaacaacaccttaaaa

SEQ ID NO: 20033 - DNA, 6152 bp, Zea Mays
gaaagcaaaagaggagagagagagggagggggcagaggaggctagatcgagggggagagggaccgcccgcgattgctacggcctccatcgcagcgagagcttgaaagcgtgcttgcctgccattcccagctcccagttcctttccttcttcttgctcgtccacccagtactccactgctcctcgtcctcgtcctcgtcctccctctcccgccatccccatccccgcgacgacgcgcatcggaccctgcgtcgtacgtgctcgcccattccctagccgtcagtggatgtgccgggctggccgcgggccgtccgagcctgcggcggcggcaggggagggcgacaacccggcgggcggcaggagtggcagcggctgctcgcgccctctacaggaaggaagccatccaaccgcggagatgtgggagcccaggaggtcgtagcgaggggtttccttgattggtgaatcttcgatcaaggatggagcaccgggctttgctgctcggcgtggcgctggcctttctgctggcctctggctcccagggcttgaaccatgaaggttggcttctcctagcgctgaagagccagatgaacgacactctccaccacctcgacaactgggacgcgagggatctaacaccatgcatctggaagggcgtcagctgctcgtcgacgcccaacccagtggtggtgtctctcgacctcagcaacatgaacctgtcaggcacagttgcgcctagcattggtagcctgtctgagctgaccctccttgatctgtcctttaatgggttctatggtaccatccctccagagattgggaacctgtcgaaattggaagtgcttaacttgtacaacaacagttttgttggtacaataccccctgagctcgggaagctagataggctggtcacgtttaatctgtgcaacaacaagcttcatggcccgatacctgatgaggttggaaatatgacagcacttcaggaattggtaggatacagtaataatctcactggctcactacctcgttcacttggcaagctgaagaacctgaaaaatattaggttgggtcagaatcttatatcaggcaacattcctgttgagataggtgcatgcctgaacataactgtgtttggtcttgcgcaaaacaagctcgagggtcctttacctaaagagattgggaggttgaccttgatgaccgacttaatcctatgggggaatcagctttctggtgttattcctccagagataggaaactgtacaagtctgagcacaattgccctctatgacaataatctagttggccccattcctgcaacaattgtgaaaattacgaatcttcagaagctatacctttacaggaattcattaaatggtacaattccatctgacattgggaatctttctcttgcaaaagagatcgacttttcagagaatttcttaactggagggataccaaaggagctggccgacatcccaggcttgaatttactctacctcttccagaaccagcttacaggccctattcctacagagttgtgtgggttgaaaaacttgagtaaacttgatctgtcgatcaattcactgaatggcacgattccagttggatttcagtacatgagaaatctaatccaactgcaactcttcaacaatatgctttctggcaacatacctccaaggtttggcatttatagccgtctttgggtggtggatttctcaaacaacagtataacagggcagataccgaaagatctttgcaggcaatcaaaccttattttgttgaatttggggtctaacatgcttacaggaaacattcctcgtgggatcactaactgtaaaacattggtgcagcttcgtctcagtgacaacagtctgacaggaagtttccccactgatctctgcaatctggtaaatttgacaacagttgaactaggtcgaaacaaatttagtgggcctattcctcctcagataggcagttgcaagtctcttcaaaggctggaccttacaaataattatttcacgtcagagttgcctcgagaaattggtaatttgtcaaaactcgttgtcttcaatatctcatctaatagactaggaggaaacataccactagagattttcaattgtacagtgttgcaacgccttgatctcagccagaatagctttgaaggttcgttgccaaatgaagttggtaggctgccacagctggagctgctatcttttgctgacaataggctaactggccagataccacccattcttggtgaactatcacatttaacagcactacagattggtggcaatcagttatctggtgaaataccaaaggagctgggtctgctgtcgagcttgcagatcgccctgaatttgagttacaacaacctctctggcgatattccatcagagcttggtaaccttgcactgttggaaagtttatttcttaataacaacaagctgatgggtgaaatcccaaccacatttgctaatctgtccagtttgcttgagctcaacgtctcctacaattatctctctggtgccctcccgccaataccgctttttgataatatgtctgtgacctgttttattggaaataaaggattatgtggtggacaacttggtagatgtggatcccgaccatcctctagttctcagtcatccaaatcagtcagtcccccattgggcaagatcatagcaattgttgctgctgtcattggagggatttcacttattcttattgcaataattgtgcaccatatcagaaaaccaatggagacagtggcccctttgcaagataagcaaccttttccagcttgttctaatgtgcatgtttctgctaaggatgcatatacatttcaggaattgctcaccgccacaaataactttgacgagagttgtgtgatcggaaggggtgcatgtgggacggtgtacagagccatcctgaaggctggacagacaattgcagtcaagaaacttgcttctaacagggaagggagcaacactgacaacagctttcgtgcagagatcatgactcttggaaagataagacatcgtaatattgtgaagctttacggttttgtataccaccagggttccaaccttctactctacgaatacatgtcaagaggtagtcttggtgagctacttcatggacaatcatcctcttcacttgattgggagacacgcttcctgatagcacttggtgcggctgaagggctttcatacctacatcacgactgcaagcctcgtatcatccaccgtgatatcaaatctaataacattttacttgatgaaaactttgaagcccatgttggtgattttgggttagcaaaggtgattgacatgccatactcgaagtcaatgtctgcaattgcaggttcatacggctatatagcaccagaatatgcttataccatgaaggttactgagaaatgtgatatatatagttatggcgtcgtgctgctggagctgctaactgggcgtgcccctgtgcaacccttggaactaggaggcgatctggtaacatgggtaaagaactacatcaaggacaattgtttgggtccagggatcctcgataaaaaaatggatttacaagatcaaagtgttgtcgatcatatgatcgaggtcatgaaaattgctttggtatgtactagcttgactccgtacgagagaccaccaatgcggcatgttgtagtcatgttaagcgagtctaaagataggacgagggtcagctctgcatcctcgcctgcctctgatgattcttcaaagaaggatgactcataatgtatttataatatgttcgattagccaaaggtaatacacatttttttactgacttttcctagtattgatagtaattagtagggttcttgtaatctgcattcattatttgtgtcagcatttcgtagggagaaatatgatagtggttcatagtttcgtagtgtcattgtatgccgttgtctcagaaaggtttcagactagcatgaagcatttgaggcacgtgacggtcttactgatgccgttgtctctcagaaaggcttcctcttctctgcagatgttcattgttcagttaattctatatgcgtcggtgcattcttactcgagttacaagtacactaggaacacctgtcaggtagccaattctgtaatattctccaacatgaactgcagtgcagatcatatgtaatcatcgatcatatgcaatcgctctttgtagctgttaacctgtagcctctgatcgttgttgctgagtcgtctttctcttccccttggcatgtccgtaccaaaaaataagttatgaaaccacgaagtcgcgcccaccaacggacgctgcctctaaaaaagcagatcagcgcgttgtcgcagcgtcggagcacaagcgacatcgctccccgggggccgtcggccggcgaccggcgacttccgcagtagaaccaactccacccacccatccacttggccagcagcttcttgcctgcatcaattgccatggcggcggtggaagcgaagaggagcccacactttgttctctttcccttcctggctcacggccacgtccctgtcttcctccgcctggctggcctcctccgcgcgctccgcccagggctcgaggtcacgctcgtctccaccccgcggctcctgggctccctcacgctcccgcctgcctccccacccgtgcgcctccacgcgctcccgttcgtccccgccgaccacggcctgcccccaggcgctgactccctcgccgatgtccagatccaccagttcatcaccttcttcacggcctccgagtcgctccgccctgcgttcgagaagttcgtctccggcatcggttccccagtctgcatcgtcgccgatgccttcttcgggtggacggccgaagtcgcgcgcgcgcggggcgcgtcccacgcggtgttccttcccggcggcgcgttcggcaacgccgtgttcttctccgtgtgggagcacctcccgcacgcccttacggccgccgacgagttcccgctgccggatttcccagacgtcgttctccaccgcacgcagatcccgaggttcatcctctctgccacgggggcggacccctggacggccttcttccggcgcgtcatcgcctcctgccgcaagaccgacgctctccttgtcaacaccgtccgggaactggaaccctccggcctcgacatgctccggagaagcttcggcgtccagccatggccaatcgggccagtcctcgcagagccgacggccccgtcgtcagactcgcgggacgacgccagcatcatccggtggctggacacgcacccgccgcgctcggtgctgtacatatcattcggatcgcagaacagcatcagcgcggatcagatgatggagctcgcgctggggctggaggcgagcggtcgccccttcctctgggcgctccgcccgccgctggggttcgacgcgaaggacgtgttcaggcccgagtggctcccggctggcttcgaggagcgaacggcgagggcgaatgtgggactgctggcgcgcgggtgggcgccgcagatgcggatcctgtcgcacccgtccaccggcgcgttcctgagccactgcgggtggaactccgtcctcgagagcctgtcccgcggcgtgccgctgatcgggtggccgttgggcgccgagcagttcttcaacgcaaatctcgcggtcgagtggggcgtctgcgtggagctggcgcgcgggaacctggagagctccgcggtggagagcagggcggtggtcgaggccgagcggacggtgatgggggacacggcgaagggtgatgagatgaggagggtggtggcggcgatcgcacgcaccatggaggccgcgtgggaagcgcctggcgggtcggcggcggagagcctggaagggttcctgcgatgcgttgaaccctgagatgccccgctttgagatggttgcgcgaggaatctgcaactaagtacgcgcgcgggaaatctgtgttaagaattcctcaactacaaaggacgacggattgatgggattacggctcctgttgcattgtaacagaaacggatttgtttggttcattaacgtgtagcctgcaggattggatagcgcttctgggtagagataacgagcagacagtggtgcaaacgtttacgggcataaaaaacggtgaaccaaacaacaccttaaaa

SEQ ID NO: 20034 - DNA, 6305 bp, Zea Mays
gggcagaggaggctagatcgagggggagagggaccgcccgcgattgctacggcctccatcgcagcgagagcttgaaagcgtgcttgcctgccattcccagctcccagttcctttccttcttcttgctcgtccacccagtactccactgctcctcgtcctcgtcctcgtcctccctctcccgccatccccatccccgcgacgacgcgcatcggaccctgcgtcgtacgtgctcgcccattccctagccgtcagtggatgtgccgggctggccgcgggccgtccgagcctgcggcggcggcaggggagggcgacaacccggcgggcggcaggagtggcagcgggtgagttgagctccactcagggcccgcattaccagtgtgtccctccccggtggtgctctgcgctgttccccttgctcacttgtcgggcggggcgtgccctagcaccgtgtggactgtggagctcgcaccgcgcgggggaagtgaaaaagctcgcgcgcctttcgcggatctgcttcgggggcttgcgcggcggtgtgctcctgggtcccccagacggggccgggtatcccgtgatttgaggggacttctacttctctctctctctcctgctgcctcttcttctttatgatgggtacacggtgcgattggtgtgtgctcctgtttggggatcccctgtttggtcagtgaggagagttgagctgctatagcatttctgccggagaaatcggcttagagttgtctgggtgcttcttctcttcgtgagcttctcgatttccaggaggaaggaagccatccaaccgcggagatgtgggagcccaggaggtcgtagcgaggggtttccttgattggtgaatcttcgatcaaggatggagcaccgggctttgctgctcggcgtggcgctggcctttctgctggcctctggctcccagggcttgaaccatgaaggttggcttctcctagcgctgaagagccagatgaacgacactctccaccacctcgacaactgggacgcgagggatctaacaccatgcatctggaagggcgtcagctgctcgtcgacgcccaacccagtggtggtgtctctcgacctcagcaacatgaacctgtcaggcacagttgcgcctagcattggtagcctgtctgagctgaccctccttgatctgtcctttaatgggttctatggtaccatccctccagagattgggaacctgtcgaaattggaagtgcttaacttgtacaacaacagttttgttggtacaataccccctgagctcgggaagctagataggctggtcacgtttaatctgtgcaacaacaagcttcatggcccgatacctgatgaggttggaaatatgacagcacttcaggaattggtaggatacagtaataatctcactggctcactacctcgttcacttggcaagctgaagaacctgaaaaatattaggttgggtcagaatcttatatcaggcaacattcctgttgagataggtgcatgcctgaacataactgtgtttggtcttgcgcaaaacaagctcgagggtcctttacctaaagagattgggaggttgaccttgatgaccgacttaatcctatgggggaatcagctttctggtgttattcctccagagataggaaactgtacaagtctgagcacaattgccctctatgacaataatctagttggccccattcctgcaacaattgtgaaaattacgaatcttcagaagctatacctttacaggaattcattaaatggtacaattccatctgacattgggaatctttctcttgcaaaagagatcgacttttcagagaatttcttaactggagggataccaaaggagctggccgacatcccaggcttgaatttactctacctcttccagaaccagcttacaggccctattcctacagagttgtgtgggttgaaaaacttgagtaaacttgatctgtcgatcaattcactgaatggcacgattccagttggatttcagtacatgagaaatctaatccaactgcaactcttcaacaatatgctttctggcaacatacctccaaggtttggcatttatagccgtctttgggtggtggatttctcaaacaacagtataacagggcagataccgaaagatctttgcaggcaatcaaaccttattttgttgaatttggggtctaacatgcttacaggaaacattcctcgtgggatcactaactgtaaaacattggtgcagcttcgtctcagtgacaacagtctgacaggaagtttccccactgatctctgcaatctggtaaatttgacaacagttgaactaggtcgaaacaaatttagtgggcctattcctcctcagataggcagttgcaagtctcttcaaaggctggaccttacaaataattatttcacgtcagagttgcctcgagaaattggtaatttgtcaaaactcgttgtcttcaatatctcatctaatagactaggaggaaacataccactagagattttcaattgtacagtgttgcaacgccttgatctcagccagaatagctttgaaggttcgttgccaaatgaagttggtaggctgccacagctggagctgctatcttttgctgacaataggctaactggccagataccacccattcttggtgaactatcacatttaacagcactacagattggtggcaatcagttatctggtgaaataccaaaggagctgggtctgctgtcgagcttgcagatcgccctgaatttgagttacaacaacctctctggcgatattccatcagagcttggtaaccttgcactgttggaaagtttatttcttaataacaacaagctgatgggtgaaatcccaaccacatttgctaatctgtccagtttgcttgagctcaacgtctcctacaattatctctctggtgccctcccgccaataccgctttttgataatatgtctgtgacctgttttattggaaataaaggattatgtggtggacaacttggtagatgtggatcccgaccatcctctagttctcagtcatccaaatcagtcagtcccccattgggcaagatcatagcaattgttgctgctgtcattggagggatttcacttattcttattgcaataattgtgcaccatatcagaaaaccaatggagacagtggcccctttgcaagataagcaaccttttccagcttgttctaatgtgcatgtttctgctaaggatgcatatacatttcaggaattgctcaccgccacaaataactttgacgagagttgtgtgatcggaaggggtgcatgtgggacggtgtacagagccatcctgaaggctggacagacaattgcagtcaagaaacttgcttctaacagggaagggagcaacactgacaacagctttcgtgcagagatcatgactcttggaaagataagacatcgtaatattgtgaagctttacggttttgtataccaccagggttccaaccttctactctacgaatacatgtcaagaggtagtcttggtgagctacttcatggacaatcatcctcttcacttgattgggagacacgcttcctgatagcacttggtgcggctgaagggctttcatacctacatcacgactgcaagcctcgtatcatccaccgtgatatcaaatctaataacattttacttgatgaaaactttgaagcccatgttggtgattttgggttagcaaaggtgattgacatgccatactcgaagtcaatgtctgcaattgcaggttcatacggctatatagcaccagaatatgcttataccatgaaggttactgagaaatgtgatatatatagttatggcgtcgtgctgctggagctgctaactgggcgtgcccctgtgcaacccttggaactaggaggcgatctggtaacatgggtaaagaactacatcaaggacaattgtttgggtccagggatcctcgataaaaaaatggatttacaagatcaaagtgttgtcgatcatatgatcgaggtcatgaaaattgctttggtatgtactagcttgactccgtacgagagaccaccaatgcggcatgttgtagtcatgttaagcgagtctaaagataggacgagggtcagctctgcatcctcgcctgcctctgatgattcttcaaagaaggatgactcataatgtatttataatatgttcgattagccaaagatgttcattgttcagttaattctatatgcgtcggtgcattcttactcgagttacaagtacactaggaacacctgtcaggtagccaattctgtaatattctccaacatgaactgcagtgcagatcatatgtaatcatcgatcatatgcaatcgctctttgtagctgttaacctgtagcctctgatcgttgttgctgagtcgtctttctcttccccttggcatgtccgtaccaaaaaataagttatgaaaccacgaagtcgcgcccaccaacggacgctgcctctaaaaaagcagatcagcgcgttgtcgcagcgtcggagcacaagcgacatcgctccccgggggccgtcggccggcgaccggcgacttccgcagtagaaccaactccacccacccatccacttggccagcagcttcttgcctgcatcaattgccatggcggcggtggaagcgaagaggagcccacactttgttctctttcccttcctggctcacggccacgtccctgtcttcctccgcctggctggcctcctccgcgcgctccgcccagggctcgaggtcacgctcgtctccaccccgcggctcctgggctccctcacgctcccgcctgcctccccacccgtgcgcctccacgcgctcccgttcgtccccgccgaccacggcctgcccccaggcgctgactccctcgccgatgtccagatccaccagttcatcaccttcttcacggcctccgagtcgctccgccctgcgttcgagaagttcgtctccggcatcggttccccagtctgcatcgtcgccgatgccttcttcgggtggacggccgaagtcgcgcgcgcgcggggcgcgtcccacgcggtgttccttcccggcggcgcgttcggcaacgccgtgttcttctccgtgtgggagcacctcccgcacgcccttacggccgccgacgagttcccgctgccggatttcccagacgtcgttctccaccgcacgcagatcccgaggttcatcctctctgccacgggggcggacccctggacggccttcttccggcgcgtcatcgcctcctgccgcaagaccgacgctctccttgtcaacaccgtccgggaactggaaccctccggcctcgacatgctccggagaagcttcggcgtccagccatggccaatcgggccagtcctcgcagagccgacggccccgtcgtcagactcgcgggacgacgccagcatcatccggtggctggacacgcacccgccgcgctcggtgctgtacatatcattcggatcgcagaacagcatcagcgcggatcagatgatggagctcgcgctggggctggaggcgagcggtcgccccttcctctgggcgctccgcccgccgctggggttcgacgcgaaggacgtgttcaggcccgagtggctcccggctggcttcgaggagcgaacggcgagggcgaatgtgggactgctggcgcgcgggtgggcgccgcagatgcggatcctgtcgcacccgtccaccggcgcgttcctgagccactgcgggtggaactccgtcctcgagagcctgtcccgcggcgtgccgctgatcgggtggccgttgggcgccgagcagttcttcaacgcaaatctcgcggtcgagtggggcgtctgcgtggagctggcgcgcgggaacctggagagctccgcggtggagagcagggcggtggtcgaggccgagcggacggtgatgggggacacggcgaagggtgatgagatgaggagggtggtggcggcgatcgcacgcaccatggaggccgcgtgggaagcgcctggcgggtcggcggcggagagcctggaagggttcctgcgatgcgttgaaccctgagatgccccgctttgagatggttgcgcgaggaatctgcaactaagtacgcgcgcgggaaatctgtgttaagaattcctcaactacaaaggacgacggattgatgggattacggctcctgttgcattgtaacagaaacggatttgtttggttcattaacgtgtagcctgcaggattggatagcgcttctgggtagagataacgagcagacagtggtgcaaacgtttacgggcataaaaaacggtgaaccaaacaacaccttaaaa

SEQ ID NO: 20035 - DNA, 1791 bp, Zea Mays
tcccgtcctccgcccccgccttcccttcccacgccgcccgtgccgccccagatcggcaaatccgcccgcatctaccccgcgcgcgtcccggatggccacttcttcctccgcccgccccggggttccgtagcatgggccactctctctcctcgcattccaaatccaccctctcctccccgccgcgccgcagcaggtcgctctcgccgatgagtccgccgccgctgcggctgaccgcgccgatgcagatcgctgcggaggacagcggcagtgacagttcctcctcgtttgcgccgcccgcccgggactacacccaggacctgcccgacgagatcctcgcgctcgtcttcgcgtcgctctcgcccaccgaccgcaacgcctgctccctcgcctgctcgcgctggatggaggtcgacgccaccacgcgccaccgcctctccctgctcaagctccgcggcctaaggcagctgtccgacgccggtctagcctcgctcgctgctgccgcgccagcgatccgcaagctctccgttgcgtcctgcaccttcggacccaaggcattcgtcgccgtgctccagtcctgccccctcctcgaggacctctccgtcaagcgcctcaggggcctaccagacacggccggtgccaccacttccattgctgaggacatcaaatttccaccggcttcgtccctgcgttctgtttgcctcaaggatctatatagcgctctatgctttgtgccgcttgtggcatcctcaccagaactccgctcgctcaagatactgcggtgctccggcgcctgggacctgccattggaggtcatcactgcacgtgctcctggacttgttgagcttcacctcgagaaactacaggtcggcgaccgtgggcttgctgcgctttctgcctgtgccaatctggaggtcctgttccttgtcaagacccctgagtgcactgattcgggcatcatcagtgttgccgagaagtgccacagactacgcaagctgcatgttgatgggtggcgcacaaaccggattggggattttggactcatggctgtggcacgaggatgtccaaatctgcaggagctcgttttgataggggtcaaccccaccgtgctgagcctccggatgcttggcgagcactgtcggacactggaacgacttgcactttgtgggtgtgaaactgtgggggatgctgagatcatttgcttggctgagcgctgggctgcgctcaagaagctctgcatcaaggggtgcccagtatcagatcgtgggatggaagcactgaatggtggttgtcctagtttagtcaaggtgaagctgaagagatgccgtggagtgtcatacgagtgcattgagaacctgaaggttactagggggggatcattttccatcagcttggatattgtgttggagcatgatgctaggagtgctagtgaaaatggtgcccaggagaacggacaagcacaaattactgcgctgactgatcaaatggcaggcatggaccttccagtcaatgctgctggcgcacaatcatcgactcatacaattaccaggatgaggagcgtcgtgtcagcactccggcgtagtgtagcaagttgaattggggactacatggcctccatgatgcatggtaccatctctagaactggatgggcattagggcagtgagtgcggtactgtgatcccaaagcttaaaacagtaatttctatgtctatttaatttatgtaaactgtttctatagaaactgtttctatgttccaaatggatagtttctattgaatgacgttttattcaatc

SEQ ID NO: 20036 - DNA, 2506 bp, Zea Mays
tcccgtcctccgcccccgccttcccttcccacgccgcccgtgccgccccagatcggcaaatccgcccgcatctaccccgcgcgcgtcccggatggccacttcttcctccgcccgccccggggttccgtagcatgggccactctctctcctcgcattccaaatccaccctctcctccccgccgcgccgcagcaggtcgctctcgccgatgagtccgccgccgctgcggctgaccgcgccgatgcagatcgctgcggaggacagcggcagtgacagttcctcctcgtttgcgccgcccgcccgggactacacccaggacctgcccgacgagatcctcgcgctcgtcttcgcgtcgctctcgcccaccgaccgcaacgcctgctccctcgcctgctcgcgctggatggaggtcgacgccaccaggctcaagctccgcggcctaaggcagctgtccgacgccggtctagcctcgctcgctgctgccgcgccagcgatccgcaagctctccgttgcgtcctgcaccttcggacccaaggcattcgtcgccgtgctccagtcctgccccctcctcgaggacctctccgtcaagcgcctcaggggcctaccagacacggccggtgccaccacttccattgctgaggacatcaaatttccaccggcttcgtccctgcgttctgtttgcctcaaggatctatatagcgctctatgctttgtgccgcttgtggcatcctcaccagaactccgctcgctcaagatactgcggtgctccggcgcctgggacctgccattggaggtcatcactgcacgtgctcctggacttgttgagcttcacctcgagaaactacaggtcggcgaccgtgggcttgctgcgctttctgcctgtgccaatctggaggtcctgttccttgtcaagacccctgagtgcactgattcgggcatcatcagtgttgccgagaagtgccacagactacgcaagctgcatgttgatgggtggcgcacaaaccggattggggattttggactcatggctgtggcacgaggatgtccaaatctgcaggagctcgttttgataggggtcaaccccaccgtgctgagcctccggatgcttggcgagcactgtcggacactggaacgacttgcactttgtgggtgtgaaactgtgggggatgctgagatcatttgcttggctgagcgctgggctgcgctcaagaagctctgcatcaaggggtgcccagtatcagatcgtgggatggaagcactgaatggtggttgtcctagtttagtcaaggtgaagctgaagagatgccgtggagtgtcatacgagtgcattgagaacctgaaggttactagggggggatcattttccatcagcttggatattgtgttggagcatgatgctaggagtgctagtgaaaatggtgcccaggagaacggacaagcacaaattactgcgctgactgatcaaatggcaggcatggaccttccagtcaatgctgctggcgcacaatcatcgactcatacaattaccaggatgaggagcgtcgtgtcagcactccggcgtaggtttggcaatcctccgccaccgtgatttgtgattgaaattaatgaactgtttttacagctttccattttctaatgaaacattcatgttgcctaagacttccattatttctggtcagtgcaagataaccgcctatggatgcttctgcatgtagtttttattaatccacatcagtctttcctgtgctctagaaccaaaatttactcctgttgctttgtttaccataactgtgtttccatatgcatctaaattaatcatctgttttttggggggttttgctgcttggtgttaagaaattgggtgctacagtccctatataaaccattatcctggaaagttggttagttgtagatggtggacgaacccattgaaatatacgcacactgacactggtaatagtagtgttcgcttctgtgttaggtttgaagaaaagatatgtttgaatttgtctccactttctgtatgggcaggagatcctctttgatttaattttccaaattttgtgttgcacgttcttccactgaaatgaatgcaaacaaaaatcaatggtgtatacatcaatgccattgttgctttctgctgttactcttggataacgatgtgctagttgttgcttagcagcgatggttgtttatgctgatagtgaaggatattcgttataaatagactagaatgcgtgtgtttgaggttgtctacatatttgctgcctttcataatataccaatttaatttcagtgtagcaagttgaattggggactacatggcctccatgatgcatggtaccatctctagaactggatgggcattagggcagtgagtgcggtactgtgatcccaaagcttaaaacagtaatttctatgtctatttaatttatgtaaactgtttctatagaaactgtttctatgttccaaatggatagtttctattgaatgacgttttattcaatc

SEQ ID NO: 20037 - DNA, 1786 bp, Zea Mays
tcccgtcctccgcccccgccttcccttcccacgccgcccgtgccgccccagatcggcaaatccgcccgcatctaccccgcgcgcgtcccggatggccacttcttcctccgcccgccccggggttccgtagcatgggccactctctctcctcgcattccaaatccaccctctcctccccgccgcgccgcagcaggtcgctctcgccgatgagtccgccgccgctgcggctgaccgcgccgatgcagatcgctgcggaggacagcggcagtgacagttcctcctcgtttgcgccgcccgcccgggactacacccaggacctgcccgacgagatcctcgcgctcgtcttcgcgtcgctctcgcccaccgaccgcaacgcctgctccctcgcctgctcgcgctggatggaggtcgacgccaccacgcgccaccgcctctccaggctcaagctccgcggcctaaggcagctgtccgacgccggtctagcctcgctcgctgctgccgcgccagcgatccgcaagctctccgttgcgtcctgcaccttcggacccaaggcattcgtcgccgtgctccagtcctgccccctcctcgaggacctctccgtcaagcgcctcaggggcctaccagacacggccggtgccaccacttccattgctgaggacatcaaatttccaccggcttcgtccctgcgttctgtttgcctcaaggatctatatagcgctctatgctttgtgccgcttgtggcatcctcaccagaactccgctcgctcaagatactgcggtgctccggcgcctgggacctgccattggaggtcatcactgcacgtgctcctggacttgttgagcttcacctcgagaaactacaggtcggcgaccgtgggcttgctgcgctttctgcctgtgccaatctggaggtcctgttccttgtcaagacccctgagtgcactgattcgggcatcatcagtgttgccgagaagtgccacagactacgcaagctgcatgttgatgggtggcgcacaaaccggattggggattttggactcatggctgtggcacgaggatgtccaaatctgcaggagctcgttttgataggggtcaaccccaccgtgctgagcctccggatgcttggcgagcactgtcggacactggaacgacttgcactttgtgggtgtgaaactgtgggggatgctgagatcatttgcttggctgagcgctgggctgcgctcaagaagctctgcatcaaggggtgcccagtatcagatcgtgggatggaagcactgaatggtggttgtcctagtttagtcaaggtgaagctgaagagatgccgtggagtgtcatacgagtgcattgagaacctgaaggttactagggggggatcattttccatcagcttggatattgtgttggagcatgatgctaggagtgctagtgaaaatggtgcccaggagaacggacaagcacaaattactgcgctgactgatcaaatggcaggcatggaccttccagtcaatgctgctggcgcacaatcatcgactcatacaattaccaggatgaggagcgtcgtgtcagcactccggcgtagcaagttgaattggggactacatggcctccatgatgcatggtaccatctctagaactggatgggcattagggcagtgagtgcggtactgtgatcccaaagcttaaaacagtaatttctatgtctatttaatttatgtaaactgtttctatagaaactgtttctatgttccaaatggatagtttctattgaatgacgttttattcaatc

SEQ ID NO: 20038 - DNA, 1797 bp, Zea Mays
tcccgtcctccgcccccgccttcccttcccacgccgcccgtgccgccccagatcggcaaatccgcccgcatctaccccgcgcgcgtcccggatggccacttcttcctccgcccgccccggggttccgtagcatgggccactctctctcctcgcattccaaatccaccctctcctccccgccgcgccgcagcaggtcgctctcgccgatgagtccgccgccgctgcggctgaccgcgccgatgcagatcgctgcggaggacagcggcagtgacagttcctcctcgtttgcgccgcccgcccgggactacacccaggacctgcccgacgagatcctcgcgctcgtcttcgcgtcgctctcgcccaccgaccgcaacgcctgctccctcgcctgctcgcgctggatggaggtcgacgccaccgcgctgccctcggggcgcctctccaggctcaagctccgcggcctaaggcagctgtccgacgccggtctagcctcgctcgctgctgccgcgccagcgatccgcaagctctccgttgcgtcctgcaccttcggacccaaggcattcgtcgccgtgctccagtcctgccccctcctcgaggacctctccgtcaagcgcctcaggggcctaccagacacggccggtgccaccacttccattgctgaggacatcaaatttccaccggcttcgtccctgcgttctgtttgcctcaaggatctatatagcgctctatgctttgtgccgcttgtggcatcctcaccagaactccgctcgctcaagatactgcggtgctccggcgcctgggacctgccattggaggtcatcactgcacgtgctcctggacttgttgagcttcacctcgagaaactacaggtcggcgaccgtgggcttgctgcgctttctgcctgtgccaatctggaggtcctgttccttgtcaagacccctgagtgcactgattcgggcatcatcagtgttgccgagaagtgccacagactacgcaagctgcatgttgatgggtggcgcacaaaccggattggggattttggactcatggctgtggcacgaggatgtccaaatctgcaggagctcgttttgataggggtcaaccccaccgtgctgagcctccggatgcttggcgagcactgtcggacactggaacgacttgcactttgtgggtgtgaaactgtgggggatgctgagatcatttgcttggctgagcgctgggctgcgctcaagaagctctgcatcaaggggtgcccagtatcagatcgtgggatggaagcactgaatggtggttgtcctagtttagtcaaggtgaagctgaagagatgccgtggagtgtcatacgagtgcattgagaacctgaaggttactagggggggatcattttccatcagcttggatattgtgttggagcatgatgctaggagtgctagtgaaaatggtgcccaggagaacggacaagcacaaattactgcgctgactgatcaaatggcaggcatggaccttccagtcaatgctgctggcgcacaatcatcgactcatacaattaccaggatgaggagcgtcgtgtcagcactccggcgtagtgtagcaagttgaattggggactacatggcctccatgatgcatggtaccatctctagaactggatgggcattagggcagtgagtgcggtactgtgatcccaaagcttaaaacagtaatttctatgtctatttaatttatgtaaactgtttctatagaaactgtttctatgttccaaatggatagtttctattgaatgacgttttattcaatc

SEQ ID NO: 20039 - DNA, 2867 bp, Zea Mays
ctcgcagcgagatgctgcatcccgcaatgcaggtgagcacatgcatacaggcaaccaaataccgcccctcagtccaccggatacagagacaagcaaccaaacaagcgtacgctgtctcaccagcctagtcggcccatatgcagcctaccaaacacgccataatggactgggccttgcgtacttgcggccccaaatcagtcttgtccgagcccgagctgatagtcggaaactcggaatcgagtctgaagcacagagccatcagagactgaccagagccgagaccaaggatcctgtctcctgtgcactccggcggccggaccacggcgagtccgggacgtagaagtcgccccgcccctccggatcgtgttgctcgggaaattgcttccgagtagttcccgacgccgcgggcctctaagccgctgcctccgacagtctcgtgagtccttgactcttgagaatcgagggaacgcatttacggacgcaagactggatctgaagaggcgctgacgaattggagggccgcgcaagcctggggatgggaaggctggtcgtcgcggcggcggtggccgtgtgggcgttcccgattgcggctttggtgaactccgtagtgccagagccctacatggatgagatcttccatatttcacaagcacagcagtattgccgtggagatttctggacatgggatcccatgatcaccacccctcctggcctcatatattgcttctttctttcctgttgcctggatgtttcgggtagcaaaaacatttgatgttctttgctccacagcagctctcagatcaactaatgttatcttggcaatggtctgcgctgttcttattcatgacctgcttttgtgcatccgaccaggaattggagaaaggaaggcaactgcctacgctattcttgtagcattgtatcctgttcactggttcttcacttttctttattacactgatgttgcatcattagctgcagttcttgcagtgtacctattctgcttgaagaaacagttctggatcagcacaatgtttggtgttttttcaatactttttcgtcagacaaatgtaatatggattatattttttgctgccaatggagctatcacatacgtaaaagacttgtatcccaaggataatgcttctcatgagaacagtgaaccaatacatcagtcaaaaaaagcttctgccagggataacaaaactagtgttcaaagcttgagaagacggcgaatcaatagtcccataaataaggtcattgtttgtgaatctgctaacccttacaacagtcttacagaggaagtgtgtgacatcagcttgaagttatggaactcaaagtgtgaaattttgattgcatttgcaccatttgtagttgtcatggcggcattcgtagcattcataatctggaatggtggtatagtactaggtgctaaggaagctcatgttgtttcgccacactttgcacagtttctgtactttggccttgtgtcagctgctgccctccttccatggcatttcactcccaaccgagtattggatctattccacttgtctggaaagaacaaaacctgtggttctctggcagtattaatgggtcttggtttaagctttgtcgctgtacattttttcaggtttattacctaggtgcttccttcatgacttttttttgtccaagcatgagaactgccacaatgacttcacactaaacctttagatgtttaccagtgatggctaaatgttttgttaaaaccataatgaagcgacaaggacagtagcaaagcagtttcaccaccttaatgcttcattttaagggcagagttagagttgtagtgcaatatatgccacaggaaccttgactctctttttttcttttagttagacaatgatgtttatcttctttatttgttcccaaattataatgaaccgatcatcttttgatgcagcattgcccatccgtatcttcttgctgacaatagacactataccttctatatttggaggaaggttatccaagtaaactggatgatgaagtacatgttgattccactttatgtgtactcatggctctcaatcatcaacatcttagggaaatcacagacaaggatttgggtgttatcatttgtgctgtcagttgcactggtccttgtacctgccccgctggttgaattcagatactacacaattccattcgtgatactggttcttcactctccatcaattggcaatggcaaattgcttgccatgggatcgctttatgcagccgttgacttgtctaccctggtgatgtttctgttccgaccattccgttgggaacatgagcctggaacacaaaggtttatgtggtagtttaggataaagcacgggaagttgggaatagagcaaaaccttcattgtaccgtcgttttggttcgaacttctaacaggacgattaagcatacatgtgtcaggcttatttggatccttgagtgaatttaatggtaggagtcaaaacaatagcgctgagtatcgtcattttctttttgccagcctttatgtattctaggcattctaatcaacgattgcacaagtcaaaaataggcagtggatacattgtttgatcacacggcttttaagggcaacagcaattatatggattgatattgaacaggaagtgcagtgttccttgcgatgagaggtggtgttgtgtgagctaatattcttgtattgttctccaaatcactgtcgtaattgaagaaatgtttgcaccgtcaacagaaactaactgggatcttgtgatggttttaacattagtttcgaatttgggttttggctgtatccaaattgagcatatttatcatgtttgtcgaatatgttggactggtttcttag

SEQ ID NO: 20040 - DNA, 2752 bp, Zea Mays
aaacaagcgtacgctgtctcaccagcctagtcggcccatatgcagcctaccaaacacgccataatggactgggccttgcgtacttgcggccccaaatcagtcttgtccgagcccgagctgatagtcggaaactcggaatcgagtctgaagcacagagccatcagagactgaccagagccgagaccaaggatcctgtctcctgtgcactccggcggccggaccacggcgagtccgggacgtagaagtcgccccgcccctccggatcgtgttgctcgggaaattgcttccgagtagttcccgacgccgcgggcctctaagccgctgcctccgacagtctcgtgagtccttgactcttgagaatcgagggaacgcatttacggacgcaagactggatctgaagaggcgctgacgaattggagggccgcgcaagcctggggatgggaaggctggtcgtcgcggcggcggtggccgtgtgggcgttcccgattgcggctttggtgaactccgtagtgccagagccctacatggatgagatcttccatatttcacaagcacagcagtattgccgtggagatttctggacatgggatcccatgatcaccacccctcctggcctgtattatgtttcactagcatatattgcttctttctttcctgttgcctggatgtttcgggtagcaaaaacatttgatgttctttgctccacagcagctctcagatcaactaatgttatcttggcaatggtctgcgctgttcttattcatgacctgcttttgtgcatccgaccaggaattggagaaaggaaggcaactgcctacgctattcttgtagcattgtatcctgttcactggttcttcacttttctttattacactgatgttgcatcattagctgcagttcttgcagtgtacctattctgcttgaagaaacagttctggatcagcacaatgtttggtgttttttcaatactttttcgtcagacaaatgtaatatggattatattttttgctgccaatggagctatcacatacgtaaaagacttgtatcccaaggataatgcttctcatgagaacagtgaaccaatacatcagtcaaaaaaagcttctgccagggataacaaaactagtgttcaaagcttgagaagacggcgaatcaatagtcccataaataaggtcttacagaggaagtgtgtgacatcagcttgaagttatggaactcaaagtgtgaaattttgattgcatttgcaccatttgtagttgtcatggcggcattcgtagcattcataatctggaatggtggtatagtactaggtgctaaggaagctcatgttgtttcgccacactttgcacagtttctgtactttggccttgtgtcagctgctgccctccttccatggcatttcactcccaaccgagtattggatctattccacttgtctggaaagaacaaaacctgtggttctctggcagtattaatgggtcttggtttaagctttgtcgctgtacattttttcaggtttattacctaggtgcttccttcatgacttttttttgtccaagcatgagaactgccacaatgacttcacactaaacctttagatgtttaccagtgatggctaaatgttttgttaaaaccataatgaagcgacaaggacagtagcaaagcagtttcaccaccttaatgcttcattttaagggcagagttagagttgtagtgcaatatatgccacaggaaccttgactctctttttttcttttagttagacaatgatgtttatcttctttatttgttcccaaattataatgaaccgatcatcttttgatgcagcattgcccatccgtatcttcttgctgacaatagacactataccttctatatttggaggaaggttatccaagtaaactggatgatgaagtacatgttgattccactttatgtgtactcatggctctcaatcatcaacatcttagggaaatcacagacaaggatttgggtgttatcatttgtgctgtcagttgcactggtccttgtacctgccccgctggttgaattcagatactacacaattccattcgtgatactggttcttcactctccatcaattggcaatggcaaattgcttgccatgggatcgctttatgcagccgttgacttgtctaccctggtgatgtttctgttccgaccattccgttgggaacatgagcctggaacacaaaggtttatgtggtagtttaggataaagcacgggaagttgggaatagagcaaaaccttcattgtaccgtcgttttggttcgaacttctaacaggacgattaagcatacatgtgtcaggcttatttggatccttgagtgaatttaatggtaggagtcaaaacaatagcgctgagtatcgtcattttctttttgccagcctttatgtattctaggcattctaatcaacgattgcacaagtcaaaaataggcagtggatacattgtttgatcacacggcttttaagggcaacagcaattatatggattgatattgaacaggaagtgcagtgttccttgcgatgagaggtggtgttgtgtgagctaatattcttgtattgttctccaaatcactgtcgtaattgaagaaatgtttgcaccgtcaacagaaactaactgggatcttgtgatggttttaacattagtttcgaatttgggttttggctgtatccaaattgagcatatttatcatgtttgtcgaatatgttggactggtttcttag

SEQ ID NO: 20041 - DNA, 2596 bp, Zea Mays
atcagtcttgtccgagcccgagctgatagtcggaaactcggaatcgagtctgaagcacagagccatcagagactgaccagagccgagaccaaggatcctgtctcctgtgcactccggcggccggaccacggcgagtccgggacgtagaagtcgccccgcccctccggatcgtgttgctcgggaaattgcttccgagtagttcccgacgccgcgggcctctaagccgctgcctccgacagtctcgtgagtccttgactcttgagaatcgagggaacgcatttacggacgcaagactggatctgaagaggcgctgacgaattggagggccgcgcaagcctggggatgggaaggctggtcgtcgcggcggcggtggccgtgtgggcgttcccgattgcggctttggtgaactccgtagtgccagagccctacatggatgagatcttccatatttcacaagcacagcagtattgccgtggagatttctggacatgggatcccatgatcaccacccctcctggcctctctcagatcaactaatgttatcttggcaatggtctgcgctgttcttattcatgacctgcttttgtgcatccgaccaggaattggagaaaggaaggcaactgcctacgctattcttgtagcattgtatcctgttcactggttcttcacttttctttattacactgatgttgcatcattagctgcagttcttgcagtgtacctattctgcttgaagaaacagttctggatcagcacaatgtttggtgttttttcaatactttttcgtcagacaaatgtaatatggattatattttttgctgccaatggagctatcacatacgtaaaagacttgtatcccaaggataatgcttctcatgagaacagtgaaccaatacatcagtcaaaaaaagcttctgccagggataacaaaactagtgttcaaagcttgagaagacggcgaatcaatagtcccataaataaggtcattgtttgtgaatctgctaacccttacaacagtcttacagaggaagtgtgtgacatcagcttgaagttatggaactcaaagtgtgaaattttgattgcatttgcaccatttgtagttgtcatggcggcattcgtagcattcataatctggaatggtggtatagtactaggtgctaaggaagctcatgttgtttcgccacactttgcacagtttctgtactttggccttgtgtcagctgctgccctccttccatggcatttcactcccaaccgagtattggatctattccacttgtctggaaagaacaaaacctgtggttctctggcagtattaatgggtcttggtttaagctttgtcgctgtacattttttcaggtttattacctaggtgcttccttcatgacttttttttgtccaagcatgagaactgccacaatgacttcacactaaacctttagatgtttaccagtgatggctaaatgttttgttaaaaccataatgaagcgacaaggacagtagcaaagcagtttcaccaccttaatgcttcattttaagggcagagttagagttgtagtgcaatatatgccacaggaaccttgactctctttttttcttttagttagacaatgatgtttatcttctttatttgttcccaaattataatgaaccgatcatcttttgatgcagcattgcccatccgtatcttcttgctgacaatagacactataccttctatatttggaggaaggttatccaagtaaactggatgatgaagtacatgttgattccactttatgtgtactcatggctctcaatcatcaacatcttagggaaatcacagacaaggatttgggtgttatcatttgtgctgtcagttgcactggtccttgtacctgccccgctggttgaattcagatactacacaattccattcgtgatactggttcttcactctccatcaattggcaatggcaaattgcttgccatgggatcgctttatgcagccgttgacttgtctaccctggtgatgtttctgttccgaccattccgttgggaacatgagcctggaacacaaaggtttatgtggtagtttaggataaagcacgggaagttgggaatagagcaaaaccttcattgtaccgtcgttttggttcgaacttctaacaggacgattaagcatacatgtgtcaggcttatttggatccttgagtgaatttaatggtaggagtcaaaacaatagcgctgagtatcgtcattttctttttgccagcctttatgtattctaggcattctaatcaacgattgcacaagtcaaaaataggcagtggatacattgtttgatcacacggcttttaagggcaacagcaattatatggattgatattgaacaggaagtgcagtgttccttgcgatgagaggtggtgttgtgtgagctaatattcttgtattgttctccaaatcactgtcgtaattgaagaaatgtttgcaccgtcaacagaaactaactgggatcttgtgatggttttaacattagtttcgaatttgggttttggctgtatccaaattgagcatatttatcatgtttgtcgaatatgttggactggtttcttag

SEQ ID NO: 20042 - DNA, 2565 bp, Zea Mays
ggaatcgagtctgaagcacagagccatcagagactgaccagagccgagaccaaggatcctgtctcctgtgcactccggcggccggaccacggcgagtccgggacgtagaagtcgccccgcccctccggatcgtgttgctcgggaaattgcttccgagtagttcccgacgccgcgggcctctaagccgctgcctccgacagtctcgtgagtccttgactcttgagaatcgagggaacgcatttacggacgcaagactggatctgaagaggcgctgacgaattggagggccgcgcaagcctggggatgggaaggctggtcgtcgcggcggcggtggccgtgtgggcgttcccgattgcggctttggtgaactccgtagtgccagagccctacatggatgagatcttccatatttcacaagcacagcagtattgccgtggagatttctggacatgggatcccatgatcaccacccctcctggcctcatatattgcttctttctttcctgttgcctggatgtttcgggtagcaaaaacatttgatgttctttgctccacagcagctctcagatcaactaatgttatcttggcaatggtctgcgctgttcttattcatgacctgcttttgtgcatccgaccaggaattggagaaaggaaggcaactgcctacgctattcttgtagcattgtatcctgttcactggttcttcacttttctttattacactgatgttgcatcattagctgcagttcttgcagtgtacctattctgcttgaagaaacagttctggatcagcacaatgctatcacatacgtaaaagacttgtatcccaaggataatgcttctcatgagaacagtgaaccaatacatcagtcaaaaaaagcttctgccagggataacaaaactagtgttcaaagcttgagaagacggcgaatcaatagtcccataaataaggtcattgtttgtgaatctgctaacccttacaacagtcttacagaggaagtgtgtgacatcagcttgaagttatggaactcaaagtgtgaaattttgattgcatttgcaccatttgtagttgtcatggcggcattcgtagcattcataatctggaatggtggtatagtactaggtgctaaggaagctcatgttgtttcgccacactttgcacagtttctgtactttggccttgtgtcagctgctgccctccttccatggcatttcactcccaaccgagtattggatctattccacttgtctggaaagaacaaaacctgtggttctctggcagtattaatgggtcttggtttaagctttgtcgctgtacattttttcaggtttattacctaggtgcttccttcatgacttttttttgtccaagcatgagaactgccacaatgacttcacactaaacctttagatgtttaccagtgatggctaaatgttttgttaaaaccataatgaagcgacaaggacagtagcaaagcagtttcaccaccttaatgcttcattttaagggcagagttagagttgtagtgcaatatatgccacaggaaccttgactctctttttttcttttagttagacaatgatgtttatcttctttatttgttcccaaattataatgaaccgatcatcttttgatgcagcattgcccatccgtatcttcttgctgacaatagacactataccttctatatttggaggaaggttatccaagtaaactggatgatgaagtacatgttgattccactttatgtgtactcatggctctcaatcatcaacatcttagggaaatcacagacaaggatttgggtgttatcatttgtgctgtcagttgcactggtccttgtacctgccccgctggttgaattcagatactacacaattccattcgtgatactggttcttcactctccatcaattggcaatggcaaattgcttgccatgggatcgctttatgcagccgttgacttgtctaccctggtgatgtttctgttccgaccattccgttgggaacatgagcctggaacacaaaggtttatgtggtagtttaggataaagcacgggaagttgggaatagagcaaaaccttcattgtaccgtcgttttggttcgaacttctaacaggacgattaagcatacatgtgtcaggcttatttggatccttgagtgaatttaatggtaggagtcaaaacaatagcgctgagtatcgtcattttctttttgccagcctttatgtattctaggcattctaatcaacgattgcacaagtcaaaaataggcagtggatacattgtttgatcacacggcttttaagggcaacagcaattatatggattgatattgaacaggaagtgcagtgttccttgcgatgagaggtggtgttgtgtgagctaatattcttgtattgttctccaaatcactgtcgtaattgaagaaatgtttgcaccgtcaacagaaactaactgggatcttgtgatggttttaacattagtttcgaatttgggttttggctgtatccaaattgagcatatttatcatgtttgtcgaatatgttggactggtttcttag

SEQ ID NO: 20043 - DNA, 2392 bp, Zea Mays
ggaatcgagtctgaagcacagagccatcagagactgaccagagccgagaccaaggatcctgtctcctgtgcactccggcggccggaccacggcgagtccgggacgtagaagtcgccccgcccctccggatcgtgttgctcgggaaattgcttccgagtagttcccgacgccgcgggcctctaagccgctgcctccgacagtctcgtgagtccttgactcttgagaatcgagggaacgcatttacggacgcaagactggatctgaagaggcgctgacgaattggagggccgcgcaagcctggggatgggaaggctggtcgtcgcggcggcggtggccgtgtgggcgttcccgattgcggctttggtgaactccgtagtgccagagccctacatggatgagatcttccatatttcacaagcacagcagtattgccgtggagatttctggacatgggatcccatgatcaccacccctcctggcctgtgagtttttgacaattcctcattgcttcaagctccaatttatcccatcatggatcgttgttgcaattttgcagtttggtgttttttcaatactttttcgtcagacaaatgtaatatggattatattttttgctgccaatggagctatcacatacgtaaaagacttgtatcccaaggataatgcttctcatgagaacagtgaaccaatacatcagtcaaaaaaagcttctgccagggataacaaaactagtgttcaaagcttgagaagacggcgaatcaatagtcccataaataaggtcattgtttgtgaatctgctaacccttacaacagtcttacagaggaagtgtgtgacatcagcttgaagttatggaactcaaagtgtgaaattttgattgcatttgcaccatttgtagttgtcatggcggcattcgtagcattcataatctggaatggtggtatagtactaggtgctaaggaagctcatgttgtttcgccacactttgcacagtttctgtactttggccttgtgtcagctgctgccctccttccatggcatttcactcccaaccgagtattggatctattccacttgtctggaaagaacaaaacctgtggttctctggcagtattaatgggtcttggtttaagctttgtcgctgtacattttttcaggtttattacctaggtgcttccttcatgacttttttttgtccaagcatgagaactgccacaatgacttcacactaaacctttagatgtttaccagtgatggctaaatgttttgttaaaaccataatgaagcgacaaggacagtagcaaagcagtttcaccaccttaatgcttcattttaagggcagagttagagttgtagtgcaatatatgccacaggaaccttgactctctttttttcttttagttagacaatgatgtttatcttctttatttgttcccaaattataatgaaccgatcatcttttgatgcagcattgcccatccgtatcttcttgctgacaatagacactataccttctatatttggaggaaggttatccaagtaaactggatgatgaagtacatgttgattccactttatgtgtactcatggctctcaatcatcaacatcttagggaaatcacagacaaggatttgggtgttatcatttgtgctgtcagttgcactggtccttgtacctgccccgctggttgaattcagatactacacaattccattcgtgatactggttcttcactctccatcaattggcaatggcaaattgcttgccatgggatcgctttatgcagccgttgacttgtctaccctggtgatgtttctgttccgaccattccgttgggaacatgagcctggaacacaaaggtttatgtggtagtttaggataaagcacgggaagttgggaatagagcaaaaccttcattgtaccgtcgttttggttcgaacttctaacaggacgattaagcatacatgtgtcaggcttatttggatccttgagtgaatttaatggtaggagtcaaaacaatagcgctgagtatcgtcattttctttttgccagcctttatgtattctaggcattctaatcaacgattgcacaagtcaaaaataggcagtggatacattgtttgatcacacggcttttaagggcaacagcaattatatggattgatattgaacaggaagtgcagtgttccttgcgatgagaggtggtgttgtgtgagctaatattcttgtattgttctccaaatcactgtcgtaattgaagaaatgtttgcaccgtcaacagaaactaactgggatcttgtgatggttttaacattagtttcgaatttgggttttggctgtatccaaattgagcatatttatcatgtttgtcgaatatgttggactggtttcttag

SEQ ID NO: 20044 - DNA, 2469 bp, Zea Mays
ggaatcgagtctgaagcacagagccatcagagactgaccagagccgagaccaaggatcctgtctcctgtgcactccggcggccggaccacggcgagtccgggacgtagaagtcgccccgcccctccggatcgtgttgctcgggaaattgcttccgagtagttcccgacgccgcgggcctctaagccgctgcctccgacagtctcgtgagtccttgactcttgagaatcgagggaacgcatttacggacgcaagactggatctgaagaggcgctgacgaattggagggccgcgcaagcctggggatgggaaggctggtcgtcgcggcggcggtggccgtgtgggcgttcccgattgcggctttggtgaactccgtagtgccagagccctacatggatgagatcttccatatttcacaagcacagcagtattgccgtggagatttctggacatgggatcccatgatcaccacccctcctggcctgtgagtttttgacaattcctcattgcttcaagctccaatttatcccatcatggatcgttgttgcaattttgcaggaattggagaaaggaaggcaactgcctacgctattcttgtagcattgtatcctgttcactggttcttcacttttctttattacactgatgttgcatcattagctgcagttcttgcagtgtacctattctgcttgaagaaacagttctggatcagcacaatgtttggtgttttttcaatactttttcgtcagacaaatgtaatatggattatattttttgctgccaatggagctatcacatacgtaaaagacttgtatcccaaggataatgcttctcatgagaacagtgaaccaatacatcagtcaaaaaaagcttctgccagggataacaaaactagtgttcaaagcttgagaagacggcgaatcaatagtcccataaataaggtcattgtttgtgaatctgctaacccttacaacattgtcatggcggcattcgtagcattcataatctggaatggtggtatagtactaggtgctaaggaagctcatgttgtttcgccacactttgcacagtttctgtactttggccttgtgtcagctgctgccctccttccatggcatttcactcccaaccgagtattggatctattccacttgtctggaaagaacaaaacctgtggttctctggcagtattaatgggtcttggtttaagctttgtcgctgtacattttttcaggtttattacctaggtgcttccttcatgacttttttttgtccaagcatgagaactgccacaatgacttcacactaaacctttagatgtttaccagtgatggctaaatgttttgttaaaaccataatgaagcgacaaggacagtagcaaagcagtttcaccaccttaatgcttcattttaagggcagagttagagttgtagtgcaatatatgccacaggaaccttgactctctttttttcttttagttagacaatgatgtttatcttctttatttgttcccaaattataatgaaccgatcatcttttgatgcagcattgcccatccgtatcttcttgctgacaatagacactataccttctatatttggaggaaggttatccaagtaaactggatgatgaagtacatgttgattccactttatgtgtactcatggctctcaatcatcaacatcttagggaaatcacagacaaggatttgggtgttatcatttgtgctgtcagttgcactggtccttgtacctgccccgctggttgaattcagatactacacaattccattcgtgatactggttcttcactctccatcaattggcaatggcaaattgcttgccatgggatcgctttatgcagccgttgacttgtctaccctggtgatgtttctgttccgaccattccgttgggaacatgagcctggaacacaaaggtttatgtggtagtttaggataaagcacgggaagttgggaatagagcaaaaccttcattgtaccgtcgttttggttcgaacttctaacaggacgattaagcatacatgtgtcaggcttatttggatccttgagtgaatttaatggtaggagtcaaaacaatagcgctgagtatcgtcattttctttttgccagcctttatgtattctaggcattctaatcaacgattgcacaagtcaaaaataggcagtggatacattgtttgatcacacggcttttaagggcaacagcaattatatggattgatattgaacaggaagtgcagtgttccttgcgatgagaggtggtgttgtgtgagctaatattcttgtattgttctccaaatcactgtcgtaattgaagaaatgtttgcaccgtcaacagaaactaactgggatcttgtgatggttttaacattagtttcgaatttgggttttggctgtatccaaattgagcatatttatcatgtttgtcgaatatgttggactggtttcttag

SEQ ID NO: 20045 - DNA, 2584 bp, Zea Mays
cacaaaaccggcagcgcgccccggtgctttctctctcttcctttgccttatcctcttcgcttccctgtgctgtgggctccaccatccctatcagccaccaacctaccagcaaacatagtcactgacaccaggaccgacgaaacccattccccacatgtcagtggtgaaaatctgctgttctagctgagtgtctactcacgacacgtggaactcacgccccgcttcgactctcagcttaacctttcttctccgcctctccctccttccctgtcgctctctccccgttctggttttcgtctaatctagattggatgggatgatgattcgaggcgttagcttattttagctgtaatcccagactaaaccctggctcgttggttcggcggcctcccggatggagacgaagaaagtggagtctgtccctggtcataatcacgcggggagtggatgataagatcataaaaatcagacaatcatcggtcacaactcatactgttgtgtctttttaacccctgagccaccgaggccaggagtgattgattggtttaagctcagcgcacccagagtctgtgacattcatgggtagtgcctgttcgaggaagaggggccagctggtccaagaggatgatctctacagtgcgaggttctccaagagcggcagcttcaagtggctgctgcatacgctgccccgcagcaactttgctgatgtgcagcggagagcacagggcccagctccaaaccggtgcccgtcgcttgtggagctgtgcgtggccaaagtctgcaaggacataaatatgtattctgatttatccctgctgcccagagatcttagtcagcagatattcaatgagctggtggaatgtggatgcctcacggaggcatcgcttggggctttccgtgattgcgatttgcaggatatttgtctgggagactaccctggagttactgatgcttggatggaagtagtggcttctcaagggcagtccttgctatctgttgacctctcttgctcggatgtcactgatagtggattcaatcttcttaaagattgctcaagcatgcaaagtttggcatgtgattattgtgatcaaatctcagaacatggacttaagacattatcaggcttttcaaacttgacatcactgagcattaagaaatgtgctgctgttactgctgaaggagcaaaagcctttgcaaacttagttaatttggtaaacttagacctcgagcgttgtccaaagattaatggtgggcttatacatttaaaaggcttgaaaaaactggaaaaactgaatctgagatactgtaatggcatcacagattcagacatgaaatatttgtcagatctcacgaatttgagagagctacagctctcttcctgcaaaatatctgcttttggtgtttcttatctgagaggtttgcacaagctaggtcatctaaacctggagggctgtgcagttactgcagtttgtttggaggttatatctgagcttgcttcgttggtcttgttgaatctgagtcggtgtggcatatgcgatgaaggctgtgagaacttgaaaggtcttacaaaattgaaggctctaagtttagggttcaaccaaattacagatgcatgtttaattcatttaaaagatttggtcaacttggagtgcttgaacttggactcatgtaagattggtgatgagggtctatttcacctaaaaggcctcatacagctaaaaaacctggagctttcagacactgaagttggaagcaatggacttcgtcatctttctggtctgcgtaatttgcagagcatcaatctctctttcacattggttactgacattggtttgaagaagatctctggcttgagttcactgaagtctcttaatcttgacaatcgccaaatcacagatactggtttagcgtctcttacaggtctcactggattgacacacctcgacctatttggagctcgcataactgattctggcatgagctgcttcagatttttcaagaatattcagtccctggaggtctgcggtgggttgattacggatgctggcgtgaagaacatcaaggacctgaaagctctgacgttgctcaacctatctcaaaacggcaagctcacggacaaaaccctggagctgatctccggcctgactgcgctagtgtcgttgaacgtgtccaactcccgggtctccaactcgggcctccaccacctgaaaccgctgcagaacctgcgctccctatccctggagtcctgcagggtgacggcaagcgagatggataagctccggctggtcgccctccccaaccttatcagtgtgcggccggagtgatacgaccgccagcgctcccacagcgacctgtaactgtggagcaagtggcgcctggctagagcaggccgccttgtacatacttttgcaaaaacgaggtgtctgtacatattgttcgtcgtgtcgtgtcgtgtcagtgtgcctgatggcaacgggctaatacgtccgtgccaacgtgtgcatggtatcccacggaccctgtggtagtaaggagcagttgtaaatatgccgtgcttcctctccattttccatgtaaattcgtg

SEQ ID NO: 20046 - DNA, 2378 bp, Zea Mays
ctcagcttaacctttcttctccgcctctccctccttccctgtcgctctctccccgttctggttttcgtctaatctagattggatgggatgatgattcgaggcgttagcttattttagctgtaatcccagactaaaccctggctcgttggttcggcggcctcccggtgagaatcgcatctccaatcaggatggagacgaagaaagtggagtctgtccctggtcataatcacgcggggagtggatgataagatcataaaaatcagacaatcatcggtcacaactcatactgttgtgtctttttaacccctgagccaccgaggccaggagtgattgattggtttaagctcagcgcacccagagtctgtgacattcatgggtagtgcctgttcgaggaagaggggccagctggtccaagaggatgatctctacagtgcgaggttctccaagagcggcagcttcaagtggctgctgcatacgctgccccgcagcaactttgctgatgtgcagcggagagcacagggcccagctccaaaccggtgcccgtcgcttgtggagctgtgcgtggccaaagtctgcaaggacataaatatgtattctgatttatccctgctgcccagagatcttagtcagcagatattcaatgagctggtggaatgtggatgcctcacggaggcatcgcttggggctttccgtgattgcgatttgcaggatatttgtctgggagactaccctggagttactgatgcttggatggaagtagtggcttctcaagggcagtccttgctatctgttgacctctcttgctcggatgtcactgatagtggattcaatcttcttaaagattgctcaagcatgcaaagtttggcatgtgattattgtgatcaaatctcagaacatggacttaagacattatcaggcttttcaaacttgacatcactgagcattaagaaatgtgctgctgttactgctgaaggagcaaaagcctttgcaaacttagttaatttggtaaacttagacctcgagcgttgtccaaagattaatggtgggcttatacatttaaaaggcttgaaaaaactggaaaaactgaatctgagatactgtaatggcatcacagattcagacatgaaatatttgtcagatctcacgaatttgagagagctacagctctcttcctgcaaaatatctgcttttggtgtttcttatctgagaggtttgcacaagctaggtcatctaaacctggagggctgtgcagttactgcagtttgtttggaggttatatctgagcttgcttcgttggtcttgttgaatctgagtcggtgtggcatatgcgatgaaggctgtgagaacttgaaaggtcttacaaaattgaaggctctaagtttagggttcaaccaaattacagatgcatgtttaattcatttaaaagatttggtcaacttggagtgcttgaacttggactcatgtaagattggtgatgagggtctatttcacctaaaaggcctcatacagctaaaaaacctggagctttcagacactgaagttggaagcaatggacttcgtcatctttctggtctgcgtaatttgcagagcatcaatctctctttcacattggttactgacattggtttgaagaagatctctggcttgagttcactgaagtctcttaatcttgacaatcgccaaatcacagatactggtttagcgtctcttacaggtctcactggattgacacacctcgacctatttggagctcgcataactgattctggcatgagctgcttcagatttttcaagaatattcagtccctggaggtctgcggtgggttgattacggatgctggcgtgaagaacatcaaggacctgaaagctctgacgttgctcaacctatctcaaaacggcaagctcacggacaaaaccctggagctgatctccggcctgactgcgctagtgtcgttgaacgtgtccaactcccgggtctccaactcgggcctccaccacctgaaaccgctgcagaacctgcgctccctatccctggagtcctgcagggtgacggcaagcgagatggataagctccggctggtcgccctccccaaccttatcagtgtgcggccggagtgatacgaccgccagcgctcccacagcgacctgtaactgtggagcaagtggcgcctggctagagcaggccgccttgtacatacttttgcaaaaacgaggtgtctgtacatattgttcgtcgtgtcgtgtcgtgtcagtgtgcctgatggcaacgggctaatacgtccgtgccaacgtgtgcatggtatcccacggaccctgtggtagtaaggagcagttgtaaatatgccgtgcttcctctccattttccatgtaaattcgtg

SEQ ID NO: 20047 - DNA, 2399 bp, Zea Mays
ctttcttctccgcctctccctccttccctgtcgctctctccccgttctggttttcgtctaatctagattggatgggatgatgattcgaggcgttagcttattttagctgtaatcccagactaaaccctggctcgttggttcggcggcctcccggatggagacgaagaaagtggagtctgtccctggtcataatcacgcggggagtggatgataagatcataaaaatcagacaatcatcggtcacaactcatactgttgtgtctttttaacccctgagccaccgaggccaggagtgattgattggtttaagctcagcgcacccagagtctgtgacattcatgggtagtgcctgttcgaggaagaggggccagctggtccaagaggatgatctctacagtgcgaggttctccaagagcggcagcttcaagtggctgctgcatacgctgccccgcagcaactttgctgatgtgcagcggagagcacagggcccagctccaaaccggtgcccgtcgcttgtggagctgtgcgtggccaaagtctgcaaggacataaatatgtattctgatttatccctgctgcccagagatcttagtcagcagatattcaatgagctggtggaatgtggatgcctcacggaggcatcgcttggggctttccgtgattgcgatttgcaggatatttgtctgggagactaccctggagttactgatgcttggatggaagtagtggcttctcaagggcagtccttgctatctgttgacctctcttgctcggatgtcactgatagtggattcaatcttcttaaagattgctcaagcatgcaaagtttggcatgtgattattgtgatcaaatctcagaacatggacttaagacattatcaggcttttcaaacttgacatcactgagcattaagaaatgtgctgctgttactgctgaaggagcaaaagcctttgcaaacttagttaatttggtaaacttagacctcgagcgttgtccaaagattaatggtgggcttatacatttaaaaggcttgaaaaaactggaaaaactgaatctgagatactgtaatggcatcacagattcagacatgaaatatttgtcagatctcacgaatttgagagagctacagctctcttcctgcaaaatatctgcttttggtgtttcttatctgagaggtttgcacaagctaggtcatctaaacctggagggctgtgcagttactgcagtttgtttggaggttatatctgagcttgcttcgttggtcttgttgaatctgagtcggtgtggcatatgcgatgaaggctgtgagaacttgaaaggtcttacaaaattgaaggctctaagtttagggttcaaccaaattacagatgcatgtttaattcatttaaaagtaatgctgataagatgaaaagcagatgccagcctggaatgacatcttcaaggaggatttggtcaacttggagtgcttgaacttggactcatgtaagattggtgatgagggtctatttcacctaaaaggcctcatacagctaaaaaacctggagctttcagacactgaagttggaagcaatggacttcgtcatctttctggtctgcgtaatttgcagagcatcaatctctctttcacattggttactgacattggtttgaagaagatctctggcttgagttcactgaagtctcttaatcttgacaatcgccaaatcacagatactggtttagcgtctcttacaggtctcactggattgacacacctcgacctatttggagctcgcataactgattctggcatgagctgcttcagatttttcaagaatattcagtccctggaggtctgcggtgggttgattacggatgctggcgtgaagaacatcaaggacctgaaagctctgacgttgctcaacctatctcaaaacggcaagctcacggacaaaaccctggagctgatctccggcctgactgcgctagtgtcgttgaacgtgtccaactcccgggtctccaactcgggcctccaccacctgaaaccgctgcagaacctgcgctccctatccctggagtcctgcagggtgacggcaagcgagatggataagctccggctggtcgccctccccaaccttatcagtgtgcggccggagtgatacgaccgccagcgctcccacagcgacctgtaactgtggagcaagtggcgcctggctagagcaggccgccttgtacatacttttgcaaaaacgaggtgtctgtacatattgttcgtcgtgtcgtgtcgtgtcagtgtgcctgatggcaacgggctaatacgtccgtgccaacgtgtgcatggtatcccacggaccctgtggtagtaaggagcagttgtaaatatgccgtgcttcctctccattttccatgtaaattcgtg

SEQ ID NO: 20048 - DNA, 2250 bp, Zea Mays
cttccctgtcgctctctccccgttctggttttcgtctaatctagattggatgggatgatgattcgaggcgttagcttattttagctgtaatcccagactaaaccctggctcgttggttcggcggcctcccggatggagacgaagaaagtggagtctgtccctggtcataatcacgcggggagtggatgataagatcataaaaatcagacaatcatcggtcacaactcatactgttgtgtctttttaacccctgagccaccgaggccaggagtgattgattggtttaagctcagcgcacccagagtctgtgacattcatgggtagtgcctgttcgaggaagaggggccagctggtccaagaggatgatctctacagtgcgaggttctccaagagcggcagcttcaagtggctgctgcatacgctgccccgcagcaactttgctgatgtgcagcggagagcacagggcccagctccaaaccggtgcccgtcgcttgtggagctgtgcgtggccaaagtctgcaaggacataaatatgtattctgatttatccctgctgcccagagatcttagtcagcagatattcaatgagctggtggaatgtggatgcctcacggaggcatcgcttggggctttccgtgattgcgatttgcaggatatttgtctgggagactaccctggagttactgatgcttggatggaagtagtggcttctcaagggcagtccttgctatctgttgacctctcttgctcggatgtcactgatagtggattcaatcttcttaaagattgctcaagcatgcaaagtttggcatgtgattattgtgatcaaatctcagaacatggacttaagacattatcaggcttttcaaacttgacatcactgagcattaagaaatgtgctgctgttactgctgaaggagcaaaagcctttgcaaacttagttaatttggtaaacttagacctcgagcgttgtccaaagattaatggtgggcttatacatttaaaaggcttgaaaaaactggaaaaactgaatctgagatactgtaatggcatcacagattcagacatgaaatatttgtcagatctcacgaatttgagagagctacagctctcttcctgcaaaatatctgcttttggtgtttcttatctgagaggtttgcacaagctaggtcatctaaacctggagggctgtgcagttactgcagtttgtttggaggttatatctgagcttgcttcgttggtcttgttgaatctgagtcggtgtggcatatgcgatgaaggctgtgagaacttgaaaggtcttacaaaattgaaggctctaagtttagggttcaaccaaattacagatgcatgtttaattcatttaaaagatttggtcaacttggagtgcttgaacttggactcatgtaagattggtgatgagggtctatttcacctaaaaggtctgcgtaatttgcagagcatcaatctctctttcacattggttactgacattggtttgaagaagatctctggcttgagttcactgaagtctcttaatcttgacaatcgccaaatcacagatactggtttagcgtctcttacaggtctcactggattgacacacctcgacctatttggagctcgcataactgattctggcatgagctgcttcagatttttcaagaatattcagtccctggaggtctgcggtgggttgattacggatgctggcgtgaagaacatcaaggacctgaaagctctgacgttgctcaacctatctcaaaacggcaagctcacggacaaaaccctggagctgatctccggcctgactgcgctagtgtcgttgaacgtgtccaactcccgggtctccaactcgggcctccaccacctgaaaccgctgcagaacctgcgctccctatccctggagtcctgcagggtgacggcaagcgagatggataagctccggctggtcgccctccccaaccttatcagtgtgcggccggagtgatacgaccgccagcgctcccacagcgacctgtaactgtggagcaagtggcgcctggctagagcaggccgccttgtacatacttttgcaaaaacgaggtgtctgtacatattgttcgtcgtgtcgtgtcgtgtcagtgtgcctgatggcaacgggctaatacgtccgtgccaacgtgtgcatggtatcccacggaccctgtggtagtaaggagcagttgtaaatatgccgtgcttcctctccattttccatgtaaattcgtg

SEQ ID NO: 20049 - DNA, 2273 bp, Zea Mays
cttccctgtcgctctctccccgttctggttttcgtctaatctagattggatgggatgatgattcgaggcgttagcttattttagctgtaatcccagactaaaccctggctcgttggttcggcggcctcccggtgagaatcgcatctccaatcaggatggagacgaagaaagtggagtctgtccctggtcataatcacgcggggagtggatgataagatcataaaaatcagacaatcatcggtcacaactcatactgttgtgtctttttaacccctgagccaccgaggccaggagtgattgattggtttaagctcagcgcacccagagtctgtgacattcatgggtagtgcctgttcgaggaagaggggccagctggtccaagaggatgatctctacagtgcgaggttctccaagagcggcagcttcaagtggctgctgcatacgctgccccgcagcaactttgctgatgtgcagcggagagcacagggcccagctccaaaccggtgcccgtcgcttgtggagctgtgcgtggccaaagtctgcaaggacataaatatgtattctgatttatccctgctgcccagagatcttagtcagcagatattcaatgagctggtggaatgtggatgcctcacggaggcatcgcttggggctttccgtgattgcgatttgcaggatatttgtctgggagactaccctggagttactgatgcttggatggaagtagtggcttctcaagggcagtccttgctatctgttgacctctcttgctcggatgtcactgatagtggattcaatcttcttaaagattgctcaagcatgcaaagtttggcatgtgattattgtgatcaaatctcagaacatggacttaagacattatcaggcttttcaaacttgacatcactgagcattaagaaatgtgctgctgttactgctgaaggagcaaaagcctttgcaaacttagttaatttggtaaacttagacctcgagcgttgtccaaagattaatggtgggcttatacatttaaaaggcttgaaaaaactggaaaaactgaatctgagatactgtaatggcatcacagattcagacatgaaatatttgtcagatctcacgaatttgagagagctacagctctcttcctgcaaaatatctgcttttggtgtttcttatctgagaggtttgcacaagctaggtcatctaaacctggagggctgtgcagttactgcagtttgtttggaggttatatctgagcttgcttcgttggtcttgttgaatctgagtcggtgtggcatatgcgatgaaggctgtgagaacttgaaaggtcttacaaaattgaaggctctaagtttagggttcaaccaaattacagatgcatgtttaattcatttaaaagatttggtcaacttggagtgcttgaacttggactcatgtaagattggtgatgagggtctatttcacctaaaaggtctgcgtaatttgcagagcatcaatctctctttcacattggttactgacattggtttgaagaagatctctggcttgagttcactgaagtctcttaatcttgacaatcgccaaatcacagatactggtttagcgtctcttacaggtctcactggattgacacacctcgacctatttggagctcgcataactgattctggcatgagctgcttcagatttttcaagaatattcagtccctggaggtctgcggtgggttgattacggatgctggcgtgaagaacatcaaggacctgaaagctctgacgttgctcaacctatctcaaaacggcaagctcacggacaaaaccctggagctgatctccggcctgactgcgctagtgtcgttgaacgtgtccaactcccgggtctccaactcgggcctccaccacctgaaaccgctgcagaacctgcgctccctatccctggagtcctgcagggtgacggcaagcgagatggataagctccggctggtcgccctccccaaccttatcagtgtgcggccggagtgatacgaccgccagcgctcccacagcgacctgtaactgtggagcaagtggcgcctggctagagcaggccgccttgtacatacttttgcaaaaacgaggtgtctgtacatattgttcgtcgtgtcgtgtcgtgtcagtgtgcctgatggcaacgggctaatacgtccgtgccaacgtgtgcatggtatcccacggaccctgtggtagtaaggagcagttgtaaatatgccgtgcttcctctccattttccatgtaaattcgtg

SEQ ID NO: 20050 - DNA, 934 bp, Zea Mays
caagcgagcgcggtgagatcgggcacgactacgccacacacgcgttctaggctaagtactacaagttgcacacttgccaccctcgtcaagtcgcttaggtaggagaaggtcacgctcgccgtgcaggtctgcgtaatttgcagagcatcaatctctctttcacattggttactgacattggtttgaagaagatctctggcttgagttcactgaagtctcttaatcttgacaatcgccaaatcacagatactggtttagcgtctcttacaggtctcactggattgacacacctcgacctatttggagctcgcataactgattctggcatgagctgcttcagatttttcaagaatattcagtccctggaggtctgcggtgggttgattacggatgctggcgtgaagaacatcaaggacctgaaagctctgacgttgctcaacctatctcaaaacggcaagctcacggacaaaaccctggagctgatctccggcctgactgcgctagtgtcgttgaacgtgtccaactcccgggtctccaactcgggcctccaccacctgaaaccgctgcagaacctgcgctccctatccctggagtcctgcagggtgacggcaagcgagatggataagctccggctggtcgccctccccaaccttatcagtgtgcggccggagtgatacgaccgccagcgctcccacagcgacctgtaactgtggagcaagtggcgcctggctagagcaggccgccttgtacatacttttgcaaaaacgaggtgtctgtacatattgttcgtcgtgtcgtgtcgtgtcagtgtgcctgatggcaacgggctaatacgtccgtgccaacgtgtgcatggtatcccacggaccctgtggtagtaaggagcagttgtaaatatgccgtgcttcctctccattttccatgtaaattcgtg

SEQ ID NO: 20051 - DNA, 3124 bp, Zea Mays
acagctcagctgctcaacctcagccaactcagatgttcccgttgcacgattcgaacggcggcgaatcgcaaaaaattgggagggagaggtcgagtgcgaacgcctcctcctcgccgccaccgccaccgccgccgccaccaccacaaccggcgtctcgtcggctataaaaccctaccccttctagtcttcccgtcgccaccagccgcctcgctgaaaccctaaacctctctccccgttaggtctcccccagcgccccgacgatggcggaggacgcaccgcctgcagcccctgtgatgacgccggaggaagtgcaggctgagaccgagctgcggatgcgcgacataggccagcgctttggtgctatcccagaggaccccgacgagctgctccggttactcgaagaagccgaaatctggttgtccagggtggatcaatctccgcccgagagcatgtacaatgctcttcgccccaccatggctgttttgattacaaatgagctactggagcaccctgatcccaacgtgaaggttgctctcacctcttgcttaacagaagttaccaggattactgcgccagaggccccctatgatgatgatgttatgaaggacgtgtttaagagagtcgtagagacttttgctgagttggatgatatgaacagcccctcctttgcaaggagggtttcgatccttgattctgttgcaagggttcgttgttgtgttctgatgttggatcttgacttggaccatatgatactggacatgttccgccatttttttaaaactgcctccaccaagcattcagaacaagtcacccactgtatggaaattataatgatgtttgtaattcaggagagcgatgatgtccatgctgaactggcatcattccttcttcagaaccttacaaaagaagcacaagaaactctcccggcatcttttggacttgcagagagggtactaggcctatgcagggacaagctcaaaccagtgtttcatgagttacttaaggccactctcttggatgaatacagcaatgttgttacgatgttgttccaagatgcttcagatgctggagagaacaatgtcgatgcatcaggaaaagacatggcagctgaaggtaaactttctgaaaagtctgtttctgatgagtcacgacaggaaacttcaaaggtagaccgaaatgtcaattgcctaggccaagaaggtactagcccaagtagtactccaacaactgccattagcaatggtggtgctccgattgacaatgtcaagtctccagatgaaccagattcttcaaaacagaagcaagaactgacttctggtgacgaacagacaccagattcttctaaacagaagcaagaactgacttctggtgatgagcagacaccaaattcttctaaacagaagccagaactgacttttcttgacaagcagaccaaaagttctgagcaattggtatcttgtgatgtagaagtacaagaaccagtgactgttggaactgaaaagctatctgatatcaattcaaagaaagatcacaagcttggttcttccaccggatctgagatgactgaacaacccaaggttgttaaagacaatgagagtctagtagcatctgagttatccccagagacaaatgatggtgataaaaagcagctaacagagtctggcaatataactgctgacgaatcatcaaaaccaatcgatactaaacctgcttctgttaaaccaaagaggggccgacctccagcagcaaagtctcaggagaaaaagcctgttggaaagaaacaggcatcaaacctaaaatctccaaaacttgatcctgtcactgattctgtagggagagctaccaggcaactgaataatgatgttgcaaagtcttcatcaactaaggctgttgatggagaatctgggaagaagcaacataaaaccagtatgaaatttcagaaagaagatgccgcctctgataaagacaccgatgatgatattagtttgaaggaaatggtgtccccaacaaggattgataaatcaaaaggccaacaagaagatagagggacgtcatcaaaaaggaaacgtctgctggaagctcaagatacccctgtatcgaagaaaaacaaaatgcttgacaaaaaccttattggctcaagaattaaagtttggtggccagatgacaaaatgttttatgcgggtgttgttgaatcattcgatgcctcgtcaaagaagcacaaggtttcgtatgatgatggtgatgttgaggtactagctcttaagaaggaaagatgggagttcattgctgaggaacaaggcgctgatcctgatgtggcatctaatatgccacgtggcaggaaagctaaagggagctcggttcaacaaatggagggaaaaacaggaacacctcaaagccagactgaagggaaaaagtgtcgagaaggatactgaagagacacctaagactggcagtaactctaagaaggaaggtgcaaaaccctctcgatctactggaaaggctaaggattctgttgtcaaggcaagcagcaaggatgaggctgatagcaccgacaactcaaaggatgctgctgccagtgaagacaaggattcaaaagatgaagtgaaatccagtgaagctatcgatggatccaagacaaatggcctttcaaccaaaaggaagccagatgagaatgaaggtgagtcatcagaggaggagaaggcgtctactaaaactactaccagaaagaagcgcagaagaaagagccgcaactagttgcccagaagctatgcagctcatcatctaagtggcgttccgcccttgcagtctcaagtctcaaagatgttggcatgaggcatgccatgtactgtacgctttatattcactggaccggttaccagcttagcgctttggtagttggccattatgagtcagctcgtagttatagcagtcttaaactctcaataggagctgtaatgtttggtcttactttttttttgtttctccttgccaacggctgtgcctctggcaaaaatggatttgattcttgcttgggttcaagcttttgtgttaaaacgtgatgcagtttgagttatctgctggcaaacagaaatacgttcctcttatgaagcgaatcttgcaaaag

SEQ ID NO: 20052 - DNA, 1276 bp, Zea Mays
gcgagcaaccccacctcgcaagcctagctagctagctgcctgcctccagcctcctcatattcctccactcaccgttgccatgccaaagctcccacacctctcatgcatgggcagagggttcatggccacggcagcagccgcccacgttcgccgccgcatccaccactcaccacccgatcgatggggagcaccggagcagagcagagagcagcgcgcgcgcgaaccctaaaagccttcggtcgacctgtatggatcggatcagccggagcgcgagcgtccagcctgccacgcctgggctggtgcgcgcgcgggcccacctccccgctataaagcgggaccgccgcgcgcggcatcgtcaggagcaggaatctaccggacggaggatccgtagttccctccaaggtgtttctgaccagatctatttattactagtaccactactcagttcttcccctaccgtactctgtctcttctttcctttccaggcttactgttaggctcgagagccgatccacaaacggcgccgcgtgtgtcagggataagatgagctcagcaagaggcagagtggaggaggaggtggtggtctggtggacatcgatccctggagaatggcttgaacctttcatttgcgtgattctagcatagacatctgaatatctgatggttagtgaaaggctggataccatcatatatacgtgtcatatgccatttgaagtgtgccatactaaaattgtagtcccaggagtattatgctttggctgtaattaaactttaaatagtgttctgtacatatgtattacagtgcctcattgtctcacacatgggctatcagggtagccccgaccatatatggatgaaggagaggaagaaaactatgtataaaagatatatagaggatcagagggagaagaaaaagagaggaagaaagagaaagaaaaggagaagaaaattgtgtatgatgttactattcagatttattcatggtcagctattcagagattgatgcatggtcatgtagccctttcatattctaccacataacaagagattcacaatcaaataaagcttaccaggactgctaggtatcgaatcttagggcatagctactcaagtttgatgtattaagaacaaggtcattccacattagctgataatcaaatgggggaaacttccagtgtcaaagcatctttgaaaaatacctgtggcgtgttcaatatctggttcaactcaaattgaatgctactctaccacccttttatatggtattattacaagc

SEQ ID NO: 20053 - DNA, 2648 bp, Zea Mays
cctcgcaagcctagctagctagctgcctgcctccagcctcctcatattcctccactcaccgttgccatgccaaagctcccacacctctcatgcatgggcagagggttcatggccacggcagcagccgcccacgttcgccgccgcatccaccactcaccacccgatcgatggggagcaccggagcagagcagagagcagcgcgcgcgcgaaccctaaaagccttcggtcgacctgtatggatcggatcagccggagcgcgagcgtccagcctgccacgcctgggctggtgcgcgcgcgggcccacctccccgctataaagcgggaccgccgcgcgcggcatcgtcaggagcaggaatctaccggacggaggatccgtagttccctccaaggtgtttctgaccagatctatttattactagtaccactactcagttcttcccctaccgtactctgtctcttctttcctttccaggcttactgttaggctcgagagccgatccacaaacggcgccgcgtgtgtcagggataagatgagctcagcaagaggcagagtggaggaggaggtgaggaaagagcaaggaaaggcacaatacggtggcacggtcggcagatctatcccggcctgccgccgtttccgcactaccatgcatgtcatcaggattgtgtctccatcggtcagttttatcttctactgtagtcctttctgttcttgaatagtcatgtcgctggggtggtattcaaagtaggagtaatggtgtatatggctccggatatatatatatatatatatatatatatatatatatatatatatatatatatatgtgcaggagatactgttgagatacagcttgctagcggctgttccattcatggtgcttgtgcttgcattgtactcgtcagaatccctggccgcacacgccattcgtttgactttctgctgtcggactagtaaattcacggaccgacgaccggcgatataataatacattcatggattacattaagtttatatatatatgctgcccttcgatgttcacaaaaaagagattgttttgaataatgaaaacaaatactcctagttccgcgcgaataataattggaggatttactttctactatgattaattatttggggtttataacttaacagtatatcctagcctcaccgttcctagcaatggaagtttcgttttttcttttgctgtttttatatatgggcaagcaatgaacttcgtccagctggataatgatgtgcacaacaacaaagcagggacgacacgtactagtctggtcatatattcgttaggaaataaacatttctggtacaatatagggcaaccatcgcgttgctaaatctgagcctgccagctcctcacgagcaggagaatgttgattttccacacacaaaatgacaattttgctgacctcaaaatttgtaagtttgcatatgttcttggctgaaaaggcatgggatcggtgcaagtgagtgcacatatgtttttctatatcaacaaaagaagggcgccaagctagttactgctattctttttgctggacaaccgttggactttcaactactacctaggttgcaatatcacatgcttccttcaatagtataataaagtcagattgttaccttaaaattgctagcctactagcaaaacaccaatatatatttttgttagtttttcccaagttccaacatgcctggcaccggctaatggcaattctattatacataaagtttcaagtatataaaggcctgggaccgatcatggtgatatatacttttttcataagcatgtaacaacctgtatcatctcactcccacttttattgttccataatgtttgtttgctcaaacttatctcaaatctactatgtgtggctatatgcacctgcacatcaaagcttccttttgctatggcaaggtggtcatgtagaggtggtggtctggtggacatcgatccctggagaatggcttgaacctttcatttgcgtgattctagcatagacatctgaatatctgatggttagtgaaaggctggataccatcatatatacgtgtcatatgccatttgaagtgtgccatactaaaattgtagtcccaggagtattatgctttggctgtaattaaactttaaatagtgttctgtacatatgtattacagtgcctcattgtctcacacatgggctatcagggtagccccgaccatatatggatgaaggagaggaagaaaactatgtataaaagatatatagaggatcagagggagaagaaaaagagaggaagaaagagaaagaaaaggagaagaaaattgtgtatgatgttactattcagatttattcatggtcagctattcagagattgatgcatggtcatgtagccctttcatattctaccacataacaagagattcacaatcaaataaagcttaccaggactgctaggtatcgaatcttagggcatagctactcaagtttgatgtattaagaacaaggtcattccacattagctgataatcaaatgggggaaacttccagtgtcaaagcatctttgaaaaatacctgtggcgtgttcaatatctggttcaactcaaattgaatgctactctaccacccttttatatggtattattacaagc

SEQ ID NO: 20054 - DNA, 1621 bp, Zea Mays
ccgctctccgccatcagcgctccccggttccccgcgcgccaccgctctccaccatcagtgctccccagtccctcgcgcgctctccaccatcgaccgcgtgaagctcccccgaaaacctcctccacatcagcgccccccgccatgccctgtatctcgcctagcacacgccgtgcccacgcaggtagccacggatcttgcccccaccgtcgagcttccatggtaggcatcccccttctatactaggcggccatggcatgaacccatcccctatccgtgcccccatcgcacgggcccaaatcctggaatgatgccttcctcctcctctgctgcctccgccctactcaggcctttgagacttccactggcgatacgcacccaccagggaattcttagaccaacctgaggagtaagaaatgcctcatgttattagtgttacaccagacgtacaggaggccattggatggcttgagtccatggggttcgactgagcatgtgttattgaagcattctttgcctgcgataggaatgaggagctatctgcaaactatcttcttgagcatgctagtgaggaagattaagccagagtagttttcatatgggtacaaacatagctttgcgtcaatcggtgctaggcgaatgcagaacgcttggtagccggtcagcgctatgtgtagaacacatactccagagatgaaattggatcacgagcactggaataattgttgtcagccatggacccatggcagcggcggtttcgcgcacctcaaagacatgggtggggaggcatcgcggctgctgcacgccctctggagaatgcttatcgatcatcaggttcctggaagtaccatgagagactcttttttggtgaatggtgttgcattcaagaagacgttttcatatgcaggatttgagcaacaaccaaagaagtgtggatggcttcagtttgcgctttgcctatatgaacataagccacttctacccgaacctgaaaacaatccaagctactcttgtcagtgcagccaagcaaagcaatggtgcctttaaattttcatgcagcttccagtttttgtttgggttctgtagggaccgagattctggatacctcactcccttgattcagaatgactccactgagtcattgctccgttggcaatgtcagcctgtttcacatcggaactacaggaccacccgagaaatccagataagaaggttccagggctcggcgaggaagtatgccgattacattccagtggaaacagctccatctgtcaatggggaaaacgaatctccaaggagcttgggcgatgctacagagcgagatgaagatggaggtagtgtggcagctgatgctttgctaactttagtgaactcagagggccaggcggctgggagccagaataatgttgagcaggccagttccaaaataaccgatgatcgccgtgttcttagtgccatgattgggattgttgatcctaaattcaggaagcaaatgtccaggagcggagctggaaacgaggagtcgatgtctgacgctgagacggatgaaggcgtcgaggaaggtgattcagattcaggttcagatggcagcgacagcgaggaggcccgtgcgttgtgtacctga

SEQ ID NO: 20055 - DNA, 338 bp, Zea Mays
gtccctcgcgcgctctccaccatcgaccgcgtgaagctcccccgaaaacctcctccacatcagcgccccccgccatgccctgtatctcgcctagcacacgccgtgcccacgcaggtagccacggatcttgcccccaccgtcgagcttccatggtaggcatcccccttctatactaggcggccatggcatgaacccatcccctatccgtgcccccatcgcacgggcccaaatcctggaatgatgccttcctcctcctctgctgcctccgccctactcaggcctttgagacttccactggcgatacgcacccaccagacacaactgatcgaactcctatt

SEQ ID NO: 20056 - DNA, 1408 bp, Zea Mays
gactgagcatgtgttattgaagcattctttgcctgcgataggaatgaggagctatctgcaaactatcttcttgagcatgctagtgaggaagattaagccagagtagttttcatatgggtacaaacatagctttgcgtcaatcggtgctaggcgaatgcagaacgcttggtagccggtcagcgctatgtgtagaacacatactccagagatgaaattggatcacgagcactggaataattgttgtcaggtttttctcattacctgaactccattatgtgattgggttaaccctaccaagatgtaacactgtctgtctcccgttttcttaccaagcaaagttagctccaaatgaaatgttatgttctctgaattctaatgcatataagccacacaaatgaaattttacatccaaagtcacctgaccatgaatctgttgagtttttattgctcttttatgccagctgcattgaaacaggcagatcctattaacaactccgcattggctctctgccccagccatggacccatggcagcggcggtttcgcgcacctcaaagacatgggtggggaggcatcgcggctgctgcacgccctctggagaatgcttatcgatcatcaggttcctggaagtaccatgagagactcttttttggtgaatggtgttgcattcaagaagacgttttcatatgcaggatttgagcaacaaccaaagaagtgtggatggcttcagtttgcgctttgcctatatgaacataagccacttctacccgaacctgaaaacaatccaagctactcttgtcagtgcagccaagcaaagcaatggtgcctttaaattttcatgcagcttccagtttttgtttgggttctgtagggaccgagattctggatacctcactcccttgattcagaatgactccactgagtcattgctccgttggcaatgtcagcctgtttcacatcggaactacaggaccacccgagaaatccagataagaaggttccagggctcggcgaggaagtatgccgattacattccagtggaaacagctccatctgtcaatggggaaaacgaatctccaaggagcttgggcgatgctacagagcgagatgaagatggaggtagtgtggcagctgatgctttgctaactttagtgaactcagagggccaggcggctgggagccagaataatgttgagcaggccagttccaaaataaccgatgatcgccgtgttcttagtgccatgattgggattgttgatcctaaattcaggaagcaaatgtccaggagcggagctggaaacgaggagtcgatgtctgacgctgagacggatgaaggcgtcgaggaaggtgattcagattcaggttcagatggcagcgacagcgaggaggcccgtgcgttgtgtacctga

SEQ ID NO: 20057 - DNA, 936 bp, Zea Mays
tttcgcagggtacaaacatagctttgcgtcaatcggtgctaggcgaatgcagaacgcttggtagccggtcagcgctatgtgtagaacacatactccagagatgaaattggatcacgagcactggaataattgttgtcagccatggacccatggcagcggcggtttcgcgcacctcaaagacatgggtggggaggcatcgcggctgctgcacgccctctggagaatgcttatcgatcatcaggttcctggaagtaccatgagagactcttttttggtgaatggtgttgcattcaagaagacgttttcatatgcaggatttgagcaacaaccaaagaagtgtggatggcttcagtttgcgctttgcctatatgaacataagccacttctacccgaacctgaaaacaatccaagctactcttgtcagtgcagccaagcaaagcaatggtgcctttaaattttcatgcagcttccagtttttgtttgggttctgtagggaccgagattctggatacctcactcccttgattcagaatgactccactgagtcattgctccgttggcaatgtcagcctgtttcacatcggaactacaggaccacccgagaaatccagataagaaggttccagggctcggcgaggtattcgagagtagcatcgccgtcgcctcggagactgctgcagccgcaaacaacattccacctgatcagtatctacaccgatggaggagactgatccgtgtgacgcgcgccaagctaaggaagcgcacggccaccgaagttcctgttgggaattagctgcaggccattgtttttcctttccctgcacattgtgttgatctttttatttttttggggttttaggatgtcatgttgtttggtggaatggagatgtgctattgaattggttctttgtgacacagttgattatcttgtttctg

SEQ ID NO: 20058 - DNA, 977 bp, Zea Mays
tttcgcagggtacaaacatagctttgcgtcaatcggtgctaggcgaatgcagaacgcttggtagccggtcagcgctatgtgtagaacacatactccagagatgaaattggatcacgagcactggaataattgttgtcaggcagatcctattaacaactccgcattggctctctgccccagccatggacccatggcagcggcggtttcgcgcacctcaaagacatgggtggggaggcatcgcggctgctgcacgccctctggagaatgcttatcgatcatcaggttcctggaagtaccatgagagactcttttttggtgaatggtgttgcattcaagaagacgttttcatatgcaggatttgagcaacaaccaaagaagtgtggatggcttcagtttgcgctttgcctatatgaacataagccacttctacccgaacctgaaaacaatccaagctactcttgtcagtgcagccaagcaaagcaatggtgcctttaaattttcatgcagcttccagtttttgtttgggttctgtagggaccgagattctggatacctcactcccttgattcagaatgactccactgagtcattgctccgttggcaatgtcagcctgtttcacatcggaactacaggaccacccgagaaatccagataagaaggttccagggctcggcgaggtattcgagagtagcatcgccgtcgcctcggagactgctgcagccgcaaacaacattccacctgatcagtatctacaccgatggaggagactgatccgtgtgacgcgcgccaagctaaggaagcgcacggccaccgaagttcctgttgggaattagctgcaggccattgtttttcctttccctgcacattgtgttgatctttttatttttttggggttttaggatgtcatgttgtttggtggaatggagatgtgctattgaattggttctttgtgacacagttgattatcttgtttctg

SEQ ID NO: 20059 - DNA, 992 bp, Zea Mays
tttcgcagggtacaaacatagctttgcgtcaatcggtgctaggcgaatgcagaacgcttggtagccggtcagcgctatgtgtagaacacatactccagagatgaaattggatcacgagcactggaataattgttgtcagccatggacccatggcagcggcggtttcgcgcacctcaaagacatgggtggggaggcatcgcggctgctgcacgccctctggagaatgcttatcgatcatcaggttcctggaagtaccatgagagactcttttttggtgaatggtgttgcattcaagaagacgttttcatatgcaggatttgagcaacaaccaaagaagtgtggatggcttcagtttgcgctttgcctatatgaacataagccacttctacccgaacctgaaaacaatccaagctactcttgtcagtgcagccaagcaaagcaatgggttctgtagggaccgagattctggatacctcactcccttgattcagaatgactccactgagtcattgctccgttggcaatgtcagcctgtttcacatcggaactacaggaccacccgagaaatccagataagaaggttccagggctcggcgaggaagtatgccgattacattccagtggaaacagctccatctgtcaatggggaaaacgaatctccaaggagcttgggcgatgctacagagcgagatgaagatggaggtagtgtggcagctgatgctttgctaactttagtgaactcagagggccaggcggctgggagccagaataatgttgagcaggccagttccaaaataaccgatgatcgccgtgttcttagtgccatgattgggattgttgatcctaaattcaggaagcaaatgtccaggagcggagctggaaacgaggagtcgatgtctgacgctgagacggatgaaggcgtcgaggaaggtgattcagattcaggttcagatggcagcgacagcgaggaggcccgtgcgttgtgtacctga

SEQ ID NO: 20060 - DNA, 1192 bp, Zea Mays
tctatgatctattaaagtacctcacaagagatccaattaatgattcacacctgcaagataacacctgtagtggaaatccagttttctggcgtgagtctgaaaatttcagaaacaatgaaagcatagaaaaaaatgttgttgttggatagtacctaattatcatgtgcatgcccctagaccctccatttttctcttagcgaggaagcagaaaaccaaactcatatacaagaaatattagtcaatacaaagtgaccaaatttctcgagacagaaaaagacatgtgggatgcagaaagggacttgaaagttgaaaccattggctgcatgtactgcggcaaaatatttctcttcttctggcagtacagtagcctgcatcatatctgacatcctttgtatagtataggaagtctacatgctcccaactacattaccccttctttgaagtggtgagcaaagccagaagtttgagtggggcccaaaacctgagtgggggcctaaatagaaacctacttactaatggacctttatagctacaatgaataagataaaactccactgaaaccagaaaattgagtgggaccccatgccccagtcagcccaacgtgagcccgcccttgcttctctgctcagacatgcacataaaccgaattcgtctcatttatttatgtttaaggttcatgggtcttatgtccagaaacttagctggtctccaaaactcccatctaaccgaccatttgcagggttctgtagggaccgagattctggatacctcactcccttgattcagaatgactccactgagtcattgctccgttggcaatgtcagcctgtttcacatcggaactacaggaccacccgagaaatccagataagaaggttccagggctcggcgaggtattcgagagtagcatcgccgtcgcctcggagactgctgcagccgcaaacaacattccacctgatcagtatctacaccgatggaggagactgatccgtgtgacgcgcgccaagctaaggaagcgcacggccaccgaagttcctgttgggaattagctgcaggccattgtttttcctttccctgcacattgtgttgatctttttatttttttggggttttaggatgtcatgttgtttggtggaatggagatgtgctattgaattggttctttgtgacacagttgattatcttgtttctg

SEQ ID NO: 20061 - DNA, 3095 bp, Zea Mays
acagccctagctccaccgataaaaccccacctcctcccgtaacccgcgcctcccttcccttctcctctcttccccgaaagagaggtcgcggacggaacccttccaccctcacctcatcccacaaccttcgattccttcacgatcttacctcgcgcgctcgccgattcctcgatcgagtcccgcgcgattcgctttctggtcggattctctcccccgaagcatgcagccggaccagcctgtgatcagcttgcgccccggcggcggcggcggcccgcgcgccggccgcctcttctcccccgccttcgccacctccgtctctggagacttcctccgcccgcacggcgggggcgcctccggcatctccaagatcggagattcacattttgagccacgtgagcgtgttcgatacacaagagatcaacttctcgagctgcgtgagattgttgatgtgtctgaggaaattttaagaatcaagcaagagattgatgtagagcttcatggtgaagaccagagctgggttcgcaatgattcaactgttcaaggacaagcacaagctcaaacacaagcacagaatcgctatgctgagactgatagccgtgattggcgtgcacggtctgcacagctgactccgactaatgaagaaaaatcttgggacaacataagggaggctaaagaagcctatgcctctagcggtaggcagcaagagcaagctaacaggcaagatcagttaagctcccagtttgcttcgaaagctcaggttggccctacccctgctcttattaaggctgaagtgccctggtcagcccgaagaggcaatctctcggagaaagaaagagtcttgaaaacggtgaaaggtatactgaacaaacttacaccagagaaattcgatcttttaaagggtcaactaatggaagctggaattactactgctgatatattgaaggcagtttttgagcccactttctgtccaatgtatgctcaactttgttctgatctcaatgaaaagcttccgacattcccttctgaagagccaggtggcaaagagatcacattcaagcgcgtgatattgaacaattgtcaggaagcctttgaaggtgctagcaacttaagagctgagatttctaaattaactggccctgaccaagggatggaaagaagagacaaagaacggttggtcaaacttagaacacttggaaatattcggctaattggtgagctactcaagcaaaaaatggttcctgagaagatagttcatcacattgttatggagctattggggtctgggactgataaaaaaccatgccctgaagaggaagatgttgaggctatctgtcatttcttcaatacgattggtaaacagcttgacgagaacacaaagtctcggcggatcaatgacacatacttcatccagatgaaggagctaacaatgaatccccagcttgcaccacgtttgaggtttatggttcgtgatgtgattgatctccggtcaaataactgggtgcctcgacgtgaggagattaaggccaagacaatcagtgaaattcactctgaggcagaaaagaatcttggattacgtcctggagcagcatctgtcattaggaatggccgtagctcaccaggagggccactttcacctggagggggatttccaatgaatcggccaggaactggaggcatgatgcctgggatgcctggttcaagaaagatgcctggaatgcctggtttggacaatgataactgggaagttccccgttctaaatcaatgccaagaggtgactcgattcgcaaccagggattgttgcttaataaaccatcaacagttcacaagacatcatctattaacacgaggcttcttcctcaaggcagtggtgcggcactaataggcaagagtgcacttttgggaaccggtgtctcagcatctcgtcctctcagctttacgcctgggcccacaccagctcaaactacaccaaaaccaatacgtgcagcaccagctgttgtccctgctcctgataaacaggccagtgctcccaaggggaacactgctgagcttcagaagaaaacaatagctcttcttgaggagtattttggcatacgtattttagatgaagcccatcaatgtatcgtggagctgcagagtcctgattactacccagaaattgttaaagaagctgtcaatcttgccctagataaaggcaccaattttgttgatcctcttgttaggctactggagcatttgtacacaaagaaaattttcaagactcaagacctggaatccggttgcttgttatatggtactctgctggatgacattggcattgaccttcctaaagctccagcacaatttggtgagatcattgctcgcctgactttgttgggtgccttgagatttgaagctctggaggttattttaaagaaaatggaggatacctacaaccgcaaagcagtttctaatgctttcatgaaaaccttggaagcaaacccatcaggtcaggctatcttaggctcacctgctgctgctgcagtaatagacgcttgcaacagccttttggaataatcttcctagcagctttggcctatcaaccttttcagattctgtatcttgcgaaagacggtctcgtgtactctctatagtttaggtgtcaaggaattgaggaacagacaattttgagctgtataattttgcgagatcagatgagtgttgattgttattgtttcggccaagaaggaaagaaagaagccatgaattttggtcttgggcgaccaacttaatttgcaggagtcctagatgaacaaggctaaatatgttgttactatgtccacctaaaatgttgttagttattttcctgtgactacacatttttgtaacgttgtactatgattttggaatgttttattgggtacaatatattgtgttatttaggagtcaaaactatctctaggtcctggtttaccctgttgctgccgtgatgttggctccctaattcctttgggcgacttagcgtatgttggctccaattcgtttgggctttgtatttccatgctgtttgactggatatttgatgggtctctttgtttgggtttgttcagcttcttgc

SEQ ID NO: 20062 - DNA, 3066 bp, Zea Mays
acagccctagctccaccgataaaaccccacctcctcccgtaacccgcgcctcccttcccttctcctctcttccccgaaagagaggtcgcggacggaacccttccaccctcacctcatcccacaaccttcgattccttcacgatcttacctcgcgcgctcgccgattcctcgatcgagtcccgcgcgattcgctttctggtcggattctctcccccgaagcatgcagccggaccagcctgtgatcagcttgcgccccggcggcggcggcggcccgcgcgccggccgcctcttctcccccgccttcgccacctccgtctctggagacttcctccgcccgcacggcgggggcgcctccggcatctccaagatcggagattcacattttgagccacgtgagcgtgttcgatacacaagagatcaacttctcgagctgcgtgagattgttgatgtgtctgaggaaattttaagaatcaagcaagagattgatgtagagcttcatggtgaagaccagagctgggttcgcaatgattcaactgttcaaggacaagcacaagctcaaacacaagcacagaatcgctatgctgagactgatagccgtgattggcgtgcacggtctgcacagctgactccgactaatgaagaaaaatcttgggacaacataagggaggctaaagaagcctatgcctctagcggtaggcagcaagagcaagctaacaggcaagatcagttaagctcccagtttgcttcgaaagctcaggttggccctacccctgctcttattaaggctgaagtgccctggtcagcccgaagaggcaatctctcggagaaagaaagagtcttgaaaacggtgaaaggtatactgaacaaacttacaccagagaaattcgatcttttaaagggtcaactaatggaagctggaattactactgctgatatattgaaggatgttatatctctcatatttgagaaggcagtttttgagcccactttctgtccaatgtatgctcaactttgttctgatctcaatgaaaagcttccgacattcccttctgaagagccaggtggcaaagagatcacattcaagcgcgtgatattgaacaattgtcaggaagcctttgaaggtgctagcaacttaagagctgagatttctaaattaactggccctgaccaagggatggaaagaagagacaaagaacggttggtcaaacttagaacacttggaaatattcggctaattggagctattggggtctgggactgataaaaaaccatgccctgaagaggaagatgttgaggctatctgtcatttcttcaatacgattggtaaacagcttgacgagaacacaaagtctcggcggatcaatgacacatacttcatccagatgaaggagctaacaatgaatccccagcttgcaccacgtttgaggtttatggttcgtgatgtgattgatctccggtcaaataactgggtgcctcgacgtgaggagattaaggccaagacaatcagtgaaattcactctgaggcagaaaagaatcttggattacgtcctggagcagcatctgtcattaggaatggccgtagctcaccaggagggccactttcacctggagggggatttccaatgaatcggccaggaactggaggcatgatgcctgggatgcctggttcaagaaagatgcctggaatgcctggtttggacaatgataactgggaagttccccgttctaaatcaatgccaagaggtgactcgattcgcaaccagggattgttgcttaataaaccatcaacagttcacaagacatcatctattaacacgaggcttcttcctcaaggcagtggtgcggcactaataggcaagagtgcacttttgggaaccggtgtctcagcatctcgtcctctcagctttacgcctgggcccacaccagctcaaactacaccaaaaccaatacgtgcagcaccagctgttgtccctgctcctgataaacaggccagtgctcccaaggggaacactgctgagcttcagaagaaaacaatagctcttcttgaggagtattttggcatacgtattttagatgaagcccatcaatgtatcgtggagctgcagagtcctgattactacccagaaattgttaaagaagctgtcaatcttgccctagataaaggcaccaattttgttgatcctcttgttaggctactggagcatttgtacacaaagaaaattttcaagactcaagacctggaatccggttgcttgttatatggtactctgctggatgacattggcattgaccttcctaaagctccagcacaatttggtgagatcattgctcgcctgactttgttgggtgccttgagatttgaagctctggaggttattttaaagaaaatggaggatacctacaaccgcaaagcagtttctaatgctttcatgaaaaccttggaagcaaacccatcaggtcaggctatcttaggctcacctgctgctgctgcagtaatagacgcttgcaacagccttttggaataatcttcctagcagctttggcctatcaaccttttcagattctgtatcttgcgaaagacggtctcgtgtactctctatagtttaggtgtcaaggaattgaggaacagacaattttgagctgtataattttgcgagatcagatgagtgttgattgttattgtttcggccaagaaggaaagaaagaagccatgaattttggtcttgggcgaccaacttaatttgcaggagtcctagatgaacaaggctaaatatgttgttactatgtccacctaaaatgttgttagttattttcctgtgactacacatttttgtaacgttgtactatgattttggaatgttttattgggtacaatatattgtgttatttaggagtcaaaactatctctaggtcctggtttaccctgttgctgccgtgatgttggctccctaattcctttgggcgacttagcgtatgttggctccaattcgtttgggctttgtatttccatgctgtttgactggatatttgatgggtctctttgtttgggtttgttcagcttcttgc

SEQ ID NO: 20063 - DNA, 2790 bp, Zea Mays
tttgaagattgctacagatgtcttcctagatgggtcacttatatggttttaaagaatagcacatataatgtagcttgtcatatctgaagattgcagaaattctcttggaatattattgtatatcgggcctgtggcaaaaagagcacacacacattgagaaaatattgttgatgtgtctgaggaaattttaagaatcaagcaagagattgatgtagagcttcatggtgaagaccagagctgggttcgcaatgattcaactgttcaaggacaagcacaagctcaaacacaagcacagaatcgctatgctgagactgatagccgtgattggcgtgcacggtctgcacagctgactccgactaatgaagaaaaatcttgggacaacataagggaggctaaagaagcctatgcctctagcggtaggcagcaagagcaagctaacaggcaagatcagttaagctcccagtttgcttcgaaagctcaggttggccctacccctgctcttattaaggctgaagtgccctggtcagcccgaagaggcaatctctcggagaaagaaagagtcttgaaaacggtgaaaggtatactgaacaaacttacaccagagaaattcgatcttttaaagggtcaactaatggaagctggaattactactgctgatatattgaaggatgttatatctctcatatttgagaaggcagtttttgagcccactttctgtccaatgtatgctcaactttgttctgatctcaatgaaaagcttccgacattcccttctgaagagccaggtggcaaagagatcacattcaagcgcgtgatattgaacaattgtcaggaagcctttgaaggtgctagcaacttaagagctgagatttctaaattaactggccctgaccaagggatggaaagaagagacaaagaacggttggtcaaacttagaacacttggaaatattcggctaattggagctattggggtctgggactgataaaaaaccatgccctgaagaggaagatgttgaggctatctgtcatttcttcaatacgattggtaaacagcttgacgagaacacaaagtctcggcggatcaatgacacatacttcatccagatgaaggagctaacaatgaatccccagcttgcaccacgtttgaggtttatggttcgtgatgtgattgatctccggtcaaataactgggtgcctcgacgtgaggagattaaggccaagacaatcagtgaaattcactctgaggcagaaaagaatcttggattacgtcctggagcagcatctgtcattaggaatggccgtagctcaccaggagggccactttcacctggagggggatttccaatgaatcggccaggaactggaggcatgatgcctgggatgcctggttcaagaaagatgcctggaatgcctggtttggacaatgataactgggaagttccccgttctaaatcaatgccaagaggtgactcgattcgcaaccagggattgttgcttaataaaccatcaacagttcacaagacatcatctattaacacgaggcttcttcctcaaggcagtggtgcggcactaataggcaagagtgcacttttgggaaccggtgtctcagcatctcgtcctctcagctttacgcctgggcccacaccagctcaaactacaccaaaaccaatacgtgcagcaccagctgttgtccctgctcctgataaacaggccagtgctcccaaggggaacactgctgagcttcagaagaaaacaatagctcttcttgaggagtattttggcatacgtattttagatgaagcccatcaatgtatcgtggagctgcagagtcctgattactacccagaaattgttaaagaagctgtcaatcttgccctagataaaggcaccaattttgttgatcctcttgttaggctactggagcatttgtacacaaagaaaattttcaagactcaagacctggaatccggttgcttgttatatggtactctgctggatgacattggcattgaccttcctaaagctccagcacaatttggtgagatcattgctcgcctgactttgttgggtgccttgagatttgaagctctggaggttattttaaagaaaatggaggatacctacaaccgcaaagcagtttctaatgctttcatgaaaaccttggaagcaaacccatcaggtcaggctatcttaggctcacctgctgctgctgcagtaatagacgcttgcaacagccttttggaataatcttcctagcagctttggcctatcaaccttttcagattctgtatcttgcgaaagacggtctcgtgtactctctatagtttaggtgtcaaggaattgaggaacagacaattttgagctgtataattttgcgagatcagatgagtgttgattgttattgtttcggccaagaaggaaagaaagaagccatgaattttggtcttgggcgaccaacttaatttgcaggagtcctagatgaacaaggctaaatatgttgttactatgtccacctaaaatgttgttagttattttcctgtgactacacatttttgtaacgttgtactatgattttggaatgttttattgggtacaatatattgtgttatttaggagtcaaaactatctctaggtcctggtttaccctgttgctgccgtgatgttggctccctaattcctttgggcgacttagcgtatgttggctccaattcgtttgggctttgtatttccatgctgtttgactggatatttgatgggtctctttgtttgggtttgttcagcttcttgc

SEQ ID NO: 20064 - DNA, 2711 bp, Zea Mays
aaaaagagcacacacacattgagaaaatattgttgatgtgtctgaggaaattttaagaatcaagcaagagattgatgtagagcttcatggtgaagaccagagctgggttcgcaatgattcaactgttcaaggacaagcacaagctcaaacacaagcacagaatcgctatgctgagactgatagccgtgattggcgtgcacggtctgcacagctgactccgactaatgaagaaaaatcttgggacaacataagggaggctaaagaagcctatgcctctagcggtaggcagcaagagcaagctaacaggcaagatcagttaagctcccagtttgcttcgaaagctcaggttggccctacccctgctcttattaaggctgaagtgccctggtcagcccgaagaggcaatctctcggagaaagaaagagtcttgaaaacggtgaaaggtatactgaacaaacttacaccagagaaattcgatcttttaaagggtcaactaatggaagctggaattactactgctgatatattgaaggatgttatatctctcatatttgagaaggcagtttttgagcccactttctgtccaatgtatgctcaactttgttctgatctcaatgaaaagcttccgacattcccttctgaagagccaggtggcaaagagatcacattcaagcgcgtgatattgaacaattgtcaggaagcctttgaaggtgctagcaacttaagagctgagatttctaaattaactggccctgaccaagggatggaaagaagagacaaagaacggttggtcaaacttagaacacttggaaatattcggctaattggtgagctactcaagcaaaaaatggttcctgagaagatagttcatcacattgttatggagctattggggtctgggactgataaaaaaccatgccctgaagaggaagatgttgaggctatctgtcatttcttcaatacgattggtaaacagcttgacgagaacacaaagtctcggcggatcaatgacacatacttcatccagatgaaggagctaacaatgaatccccagcttgcaccacgtttgaggtttatggttcgtgatgtgattgatctccggtcaaataactgggtgcctcgacgtgaggagattaaggccaagacaatcagtgaaattcactctgaggcagaaaagaatcttggattacgtcctggagcagcatctgtcattaggaatggccgtagctcaccaggagggccactttcacctggagggggatttccaatgaatcggccaggaactggaggcatgatgcctgggatgcctggttcaagaaagatgcctggaatgcctggtttggacaatgataactgggaagttccccgttctaaatcaatgccaagaggtgactcgattcgcaaccagggattgttgcttaataaaccatcaacagttcacaagacatcatctattaacacgaggcttcttcctcaaggcagtggtgcggcactaataggcaagagtgcacttttgggaaccggtgtctcagcatctcgtcctctcagctttacgcctgggcccacaccagctcaaactacaccaaaaccaatacgtgcagcaccagctgttgtccctgctcctgataaacaggccagtgctcccaaggggaacactgctgagcttcagaagaaaacaatagctcttcttgaggagtattttggcatacgtattttagatgaagcccatcaatgtatcgtggagctgcagagtcctgattactacccagaaattgttaaagaagctgtcaatcttgccctagataaaggcaccaattttgttgatcctcttgttaggctactggagcatttgtacacaaagaaaattttcaagactcaagacctggaatccggttgcttgttatatggtactctgctggatgacattggcattgaccttcctaaagctccagcacaatttggtgagatcattgctcgcctgactttgttgggtgccttgagatttgaagctctggaggttattttaaagaaaatggaggatacctacaaccgcaaagcagtttctaatgctttcatgaaaaccttggaagcaaacccatcaggtcaggctatcttaggctcacctgctgctgctgcagtaatagacgcttgcaacagccttttggaataatcttcctagcagctttggcctatcaaccttttcagattctgtatcttgcgaaagacggtctcgtgtactctctatagtttaggtgtcaaggaattgaggaacagacaattttgagctgtataattttgcgagatcagatgagtgttgattgttattgtttcggccaagaaggaaagaaagaagccatgaattttggtcttgggcgaccaacttaatttgcaggagtcctagatgaacaaggctaaatatgttgttactatgtccacctaaaatgttgttagttattttcctgtgactacacatttttgtaacgttgtactatgattttggaatgttttattgggtacaatatattgtgttatttaggagtcaaaactatctctaggtcctggtttaccctgttgctgccgtgatgttggctccctaattcctttgggcgacttagcgtatgttggctccaattcgtttgggctttgtatttccatgctgtttgactggatatttgatgggtctctttgtttgggtttgttcagcttcttgc

SEQ ID NO: 20065 - DNA, 840 bp, Zea Mays
attctgttgaggatgtgcaaaaggtgcactgcagagtctgagaagctggaaggcataccatcattctcatgcaaccatcacagaacagatcgacgaggacatttatggactacgattcagttaaccacgcgctggatggaatatgtggtctttacgaaaggaaaatcagaaacatcaacccgatggtcaggaacttgacttatgatatcggtgacctgtacaacttcatcgatggcctgaccgacataagtgcactggtgtacgacgattcacttcacgctttcctgccgtatgaccgccagtggataaaacagaagctgtttcagcacctgaagcggctggcgcagcagtagggtatcatcaccgctggcttttgacgtgcatgcgtcgtggggagaaccccctcacctaagccttaaggctttgtttgggtgctctagtattaacctcaattcatatgtattgaggtgaattaaggtgtacattagtttaatttacaactcagggcttgttcggttagctctcaatccatgtggattgagtggaattggataggttttaatcccaaacaagtcaaacttattctcaattttttctaatctcatccaatccatatgtattgggaataaccgaacaagccctcaatccatctcaacacatgtggattatggtcaatactagagcatccaaactagcctatggttcgggcttggatccaaatgcccaggatgtgtgtatagaaataagacctgtatcccgtgtttgatgtagaacatgtggtcatgctgcggcttgcttctgaagatgattggttgaacaatgcagatttcatgtttgtca

SEQ ID NO: 20066 - DNA, 380 bp, Zea Mays
ctggtgaataataggacagccagcgccagtgaaatagttgcttcatcacttcatgacaattgcaaagctgttcttgttggcgaaaggacttttggcaagggcttaatccaatctgtatttgaacttcatgatggttctggtattgtcgtcacagttggcaaatacgtgacaccaaaccacaaggatatcaatgggaatggaatagagccggattacaatcgtcttcctgatttcaatgaagccagagattacctttcatgttgcggaattaaagaattaagctgacagacgtttgtggcaaatttcaatgaagcattatattctaaaggttctctcacgggtcagacgacctaatatgatagaattgatatggaacaaag

SEQ ID NO: 20067 - DNA, 2018 bp, Zea Mays
cgcacacagaccgaccagccgcagcccgtagcgcacctgcctgcgcccgccgcctccgtcatccactcaacctcgcccctcggccactgccgcccggcgcccgcccgcctgccgcaccggccgaatcatccgacggcccttaagctgaggcggtgtggcctaagttgcagcgcggcggtcgccccgagtcgtccacttcggccccgacaggctgtccacggtggcgcgaactgcccctcgccggttcggccccgcccgcccgtagcagctcaccagagaactagcctctcgtcggccttccccaggtctgcgcgtggcgcggcgccgcagcaaagctccacgcgtgcgtgtccgccacccgccgtcccgcccgggccgccgtcgttgctcgtcggtgaacgacgtctcgctgggtatcagcgcgttcttcgagcggcagcaacgacaaacgggagaaggaagagaactcgtggagaaggcgaagcgggacgatgcagcccaagatcagcgcgttcttcgagcggcaggagacggacccagatccgattagtggcgacggtgaggggaacgggcagggaaacgtcggcgcggcgacggaggcgaagcggaaggccaatggctgcaggctcgatgggctcgtcagcaagaagaggaactacgcgcagctccatctggaactagggcagcctgatttcgtcctccacacgtgctccgtgtgcggcatgatgtacgcccgagggaacgacgaagacgagaaggttcacagggcgtaccacaagagctactccgagggagtccctttcaagggttggaaaaaagagacagtgatagcgaggtccgagggcggtgatcgggttgttcttgcaactgacgagaactcttgtatgtcgaaaagtcagagaggtgatcacagtggtggagaaggagctgggatttggtgaagggaaactcctgcataagctttgcaaggtgtatctatacatatctgcacaaaggatcgtggggtgccttgtcactgaaccgataaaaacaggacatagagttatcccaagctccacggaaggaagccctaatgatttgccagttagtagtactgagcgaggaaaaaatggtcatacattagagttcggcagtattagtttcaagagggaaatcataaggcggcacagtcgttcggtcaagaacaaagaagagtgccaggaccctggtgccatactttgcgaaacggaagctgttcctgcgctttgtggattcgagccatctgggtggcaccatcgtgcagaagaaaacgaattgcctcaaaactaatggacgttgcaaggaaaaccttctgcgaaggcaggactttggggatttcacagtttgctttctctcccccgacctcctctggcaaggggctagcatgccgttactgcaagaccagtgcattcttagtctacaaagacggaccggtgtaacacttgtactctaagaaagccctctctgaaacttttcttcctcttgtaaaatacgcttatcttgttggagcatttgacaaaaaaatgtaaacaattagatcaatatgtattcaggtagaccagaaattagcgatgctttgtaacaatgtagctttttcttttgagtggtgacaatagctttcttgtgatcttcataaataacttttcatggtctcacatgctccgttgcagcaatgctgctgcagctgcaccaagcatggaactaggagagtgcatctacaagatggatgttttgagcaagaaaatgacagactgtagcagcagagtgacaatacatcaatgaatgaatcatgtatcactgatggctgatacgtgctgtttctgaggataagaaaaggaattcttagaatttttattacaaggacctagcagtcttgtagaatacaggaatacactcaggaatcattctagctcaggaattgttctagctgattaaaacttgtataaatcagataagcaattcggccaggaattgtttcggtcgatggccccttaatgtct

SEQ ID NO: 20068 - DNA, 2248 bp, Zea Mays
cgcacacagaccgaccagccgcagcccgtagcgcacctgcctgcgcccgccgcctccgtcatccactcaacctcgcccctcggccactgccgcccggcgcccgcccgcctgccgcaccggccgaatcatccgacggcccttaagctgaggcggtgtggcctaagttgcagcgcggcggtcgccccgagtcgtccacttcggccccgacaggctgtccacggtggcgcgaactgcccctcgccggttcggccccgcccgcccgtagcagctcaccagagaactagcctctcgtcggccttccccaggtctgcgcgtggcgcggcgccgcagcaaagctccacgcgtgcgtgtccgccacccgccgtcccgcccgggccgccgtcgttgctcgtcggtgaacgacgtctcgctggcttcagggtatcagcgcgttcttcgagcggcagcaacgacaaacgggagaaggaagagaactcgtggagaaggcgaagcgggacgatgcagcccaagatcagcgcgttcttcgagcggcaggagacggacccagatccgattagtggcgacggtgaggggaacgggcagggaaacgtcggcgcggcgacggaggcgaagcggaaggccaatggctgcaggctcgatgggctcgtcagcaagaagaggaactacgcgcagctccatctggaactagggcagcctgatttcgtcctccacacgtgctccgtgtgcggcatgatgtacgcccgagggaacgacgaagacgagaaggttcacagggcgtaccacaagagctactccgagggagtccctttcaagggttggaaaaaagagacagtgatagcgaggtccgagggcggtgatcgggttgttcttgcaactgacgagaactcttgtatgtcgaaaagtaaggtacaagtctgcccaactgagttccttaggttaaatttctaaatgctagcgccccgacttctgaagaaatgcagactgtaaagcggtattatttagctgttatatatatgtctgtttttgctaactgcttgcaattgtctatgcaatcctaacttcacaaatgtggatgccagtggtatggtctatgcaagttatgtgatgtcaaacaaatatggcaggtcagagaggtgatcacagtggtggagaaggagctgggatttggtgaagggaaactcctgcataagctttgcaaggtgtatctatacatatctgcacaaaggatcgtggggtgccttgtcactgaaccgataaaaacaggacatagagttatcccaagctccacggaaggaagccctaatgatttgccagttagtagtactgagcgaggaaaaaatggtcatacattagagttcggcagtattagtttcaagagggaaatcataaggcggcacagtcgttcggtcaagaacaaagaagagtgccaggaccctggtgccatactttgcgaaacggaagctgttcctgcgctttgtggattcgagccatctgggtggcaccatcgtgcagaagaaaacgaattgcctcaaaactaatggacgttgcaaggaaaaccttctgcgaaggcaggactttggggatttcacagtttgctttctctcccccgacctcctctggcaaggggctagcatgccgttactgcaagaccagtgcattcttagtctacaaagacggaccggtgtaacacttgtactctaagaaagccctctctgaaacttttcttcctcttgtaaaatacgcttatcttgttggagcatttgacaaaaaaatgtaaacaattagatcaatatgtattcaggtagaccagaaattagcgatgctttgtaacaatgtagctttttcttttgagtggtgacaatagctttcttgtgatcttcataaataacttttcatggtctcacatgctccgttgcagcaatgctgctgcagctgcaccaagcatggaactaggagagtgcatctacaagatggatgttttgagcaagaaaatgacagactgtagcagcagagtgacaatacatcaatgaatgaatcatgtatcactgatggctgatacgtgctgtttctgaggataagaaaaggaattcttagaatttttattacaaggacctagcagtcttgtagaatacaggaatacactcaggaatcattctagctcaggaattgttctagctgattaaaacttgtataaatcagataagcaattcggccaggaattgtttcggtcgatggccccttaatgtct

SEQ ID NO: 20069 - DNA, 766 bp, Zea Mays
ctcccttttgggcggcgacaccgtggggagctgtcgcggcgcgctccgctcctccctgcacctcatccccttcccccgctccccctcacacgtcgctgtgttggaagtctagaaccttccccaatcacccacacagccacacctgggcacctggccccgcccaacttccatttatgcacaggcggactggaaaaaaaggcccagaggcagtgccgtgaccgattcaagacgcaagagaaggatcgagacgaggcggcggttttccgggggcagcatcgtctcggccacaaaggccttcgacgaagttatttcagagctggatagtcttggggaagagtcgtacaaggatagcaccctcatcatgcagctttttcgtgacaacctcaccttgtggacttctgacatgcagtacgtaagtgatgctaatcatgctgtgtatcaggaggatggtggcgatgaaatgcgggaccagtacatgatcatttacatgtataggaacattcaatctgtacgataaacacagttagactcatatactctacctttaaagtagagatgaagtgactcatagaggcagagattttattatccaaaatctagattctagagatctggattctagaattccctaggaatcaccctccgcggcgagtgccagcgtgtcacgctcgtggagtaaactgtgcaaaaaaggatctagattactgcaaaatggaagttcttctgtgcacatgtgtcatacatatttctgacatttaacaaccag

SEQ ID NO: 20070 - DNA, 181 bp, Zea Mays
caaagatcatcatcaacaggtagcatagtaaatacatggctataatggtgtgtgccagaaaagaaaactatattaggtgcgggcacaccctctcaatggcatgtcattttgcattgcagccacttcgatctggatttacttaaaacgctaaaagtcaacatatttccatcgtgcttttatg

SEQ ID NO: 20071 - DNA, 357 bp, Zea Mays
atataaggcccagcccaccgatcctcctcttctgtcttctcccctgcgtcaaagacgacgcaagcccttgcctctccctactccaaaccctcgccgactcagatccagcttcctcgcaccgccgtcgccatgccgttcactccaggcccctactctggcgtcagcaccctcgcccttgtaagtacctgttctcccagatgattctgtcctggttgcttccggatcggatctgaatccctcatcgcgcttcctcgtcttgtctctgcaggtggcgagggcgtcggcctttggcgtcggtgtcgtctacgggagcatcaagctctcaatcctaaagaacttgaacagggagcacggagt

SEQ ID NO: 20072 - DNA, 954 bp, Zea Mays
tacatgtcggcgttgcaattgcatagatcaatatgtgggcacgacgccgtagtccgcatcggctccgccgggggccatgagcgcagccacggcggcagcggcggaggagtacatctcctcgtgctcctccagcgtgtcctccccagccccgggcgtgcgcttggcgaaccggcccttgatgcgcggccgcgtctccgcgtacgccttgcgggacgcgtaccggatcgtcttctcgaaccgcctgctcttgcgcttctcccggtaccgcatcagccgcgcctctcgctccaggcccctgctgaccactgccaccatgggcgccatgccagacgccgcgtcgggcacaaccgctgcctccgacgatgacacctgcaatcgtatccgtgtactgtggttcacggagtgatcggagtagaagagcttggtgccggcgaggtcgagctctggtgacccgctctgctggacgccgatggtcttgatttcgtccatggaacgcgcgaagtcgaggtcgaggtacgggtcagagtccgcgaagaacacctccgtcgtggcgccttctttctgcccgtggtcgggctcggggaggagccacgacgccgcctcgtcctcgttgctcccgtcgtcgtcggttgctttgggcggcgccgccgaggcgaagggcttgggcgcgtcggccagcgcgccgaagaagggcgccacgtggaggcgctcgtggcggcgcgcgagcgggttcgccgagtggatgtcggcgtcgcaggaggcgcagagcgcggcagcgtccgcgcggcacgtgaccgccgccggcgcgtgctcgcagacctcgcagagccagacccgcgcgtggcgcgacccggcgccgtgcgcccgcgcgtcgcacccggcgcacaggaacgccgcgtccgcgcggcagtagaggcgcgccgcctcggcgccgcacgcgtcgcagggccgcgc

SEQ ID NO: 20073 - DNA, 3147 bp, Zea Mays
gttcaatctcgacggcttccctgccttccactacactcgcagagtcgcaggcagtcactttgcggcgagacgcttgtgtcgctcctttccaccctcagtctcagtcctctcatgatctcattccccaatcggcgacatttccagcaatttggtagtttcccacgcaggctgcgcgcaagcaaccatcccacccctcttccgcggcagtccactgcctcccggaaaatcccacctcgctccgatccaacccgtccccgcaaccagcgcagccgccgcgacggggtccgactcccggccgatctcccgcctccaccagcgccacgtgttctacctggaagggcatgattctggagtttccttgagaaagggagtaagtgctcaaggatggcctcaagggctatcatcaggaggaggaatgacattctacggcacactcatgtgcctattttgtccccttcattcactagcacaattgggcaaggacaatttgattgtgaggttgatcatcaaagatctgtatgttacttttcaaaggaaagtttagcagattctaatcatgctatggcacattgtactttaaataagcgaaagctttgtcatctcagtagcggtttcgcatggcatccagcttgtgaggtttctcttcctacttatggttctagagcacagaactttgtattcccattgggagtcaggtgtttcctgcagtcagtccgcaccacatcaaacacaactgcacagggtcaagttcatattatggacaagaagagtgaggatgagaagcagaagcaacaaaaaaaggaggcatcccctgaagaatgtgatcaggcagtggaaggattaagcactgcaaaagcgaaagcaaaagctaagctggaggaagtgcaaaagactgaccaatcagtggtacagaaattatgggcaaagcttcttggtattggccctgctttacgaattattgcttcaatgagcagagctgattgggctgcaaagttgaagcattggaaggatgaatttatttctacactgcagcattattggttgggcactaagctactctgggcagatgttagaatctcatcaaggctgttagttaaacttgctagtggaaagagcctcacaagacgagagaggcagcagctcacacgcacaacagcagatctattcaggctagtaccttttgcagtttttattatcgttccattcatggagctcttgctgccagtgttcctcaagttgttcccaaacatgttgccatccactttccaggacaaaatgaaagaagaggaggccctaaaaaggaaactgaaagcaaggatggaatatgcaaagtttttacaagacactgctaaagaaatggcgaaggaagttcaaacatcacgcagtggagaaatgaaacagactgctgaagatctggatgagttcttgaataaggtttgcgcttcatatgcttaatcccttgatcataccagttggctgatcatccgtattctgcagaccacggcttgttaatatgtgtaaatacatggggatccaaccttttggcacagaccactacttgcgattcatgcttcggaagaaactacaagacattaagaatgatgataagatgattcaagctgagggtgtggagtctctttctgaatatgagcttcgacaagcatgtcgtgagcgtgggcaccttggtttgttgtcaacagaggagatgcgtcaacagctcagagactggctggatctatcactcaatcattctgtgccatcgtctcttctaatactctcaagagcttttactgtatctggtaaaatgaaacctgaggaggccgttgtagcaaccttatcttccctgccagatgaagttgtcgatacagttgggactgtactgccttctgaagattctgtttcagagaggaagagaaaattggaatttctggagatgcaggaagagcttatcaaggaagaggagaaaaggcaagagaaagatgacaaggcaaaactggaggagccaaaggctactgaagaagatttggctttgaaggaaatgactgagcctactgttagggagaaagaggaactaaagaaagcaaaaacccacgataagaaagagcagctttgtaatatcagtcaagcattggctgtgcttgcatctgtttcttctgttaccaaggagcgacaagagtttttaagccttgtcaacaaggagatagaactatataataacatgctcgcaaaggagggtacagatggtgaagaagaagccaggagagcgtacaaggctgctagggaggaatcagaccatgctgcagaggcagctgtgggagaaaaggtctcttcagctttgattgatagggttgatgctatgcttcaaaagttagaaaaggagattgatgatgttgatgctcgaattggcaatcgctggcagctgctggatagggactgcgatggcaaggtgactcctgaagaggtagctgcagctgcaaattatctcaaagacaccataggagcagaaggcgtccaggagcttatcagcaatctttctaaagacaacgaagggaatatccttgtggaagacattgtgaagctggcgtcacaaacagaggaaaacaacgaagctgaagaaactgcacgatgatttggaatagcagccacattcttggctcttaaaactcgacggtccattccttttttaaaaggaaccgcacataataaagctagttcctggcagtctcatgcaaaaatcaccaagcaggatggtcattctttttgttctgactggcggctgcagagaaaattgtatcctgctgttgaaagatattcatttatacagttaagtcccagcacaaccgatcgttaggttaggaattctgtccgaaatggcaacttgcatttcaaacgtctgccatgaaaatgagaataaattcggcgggctctacagatttttcatctattgtctgaacaaaagtataggcatcaaataagtatctgggtaagtttatactatttgaataagaatcagctggatttgtttaaattcttaacaagaccgttttagcagtttgactatatggtcaatcaaaacactattttgtattgtatattgtactatgtgcacttttgcagtgagatttaaatatgggtatagagatagat

SEQ ID NO: 20074 - DNA, 3173 bp, Zea Mays
gttcaatctcgacggcttccctgccttccactacactcgcagagtcgcaggcagtcactttgcggcgagacgcttgtgtcgctcctttccaccctcagtctcagtcctctcatgatctcattccccaatcggcgacatttccagcaatttggtagtttcccacgcaggctgcgcgcaagcaaccatcccacccctcttccgcggcagtccactgcctcccggaaaatcccacctcgctccgatccaacccgtccccgcaaccagcgcagccgccgcgacggggtccgactcccggccgatctcccgcctccaccagcgccacgtgttctacctggaagggcatgattctggagtttccttgagaaagggagtaagtgctcaaggatggcctcaagggctatcatcaggaggaggaatgacattctacggcacactcatgtgcctattttgtccccttcattcactagcacaattgggcaaggacaatttgattgtgaggttgatcatcaaagatctgtatgttacttttcaaaggaaagtttagcagattctaatcatgctatggcacattgtactttaaataagcgaaagctttgtcatctcagtagcggtttcgcatggcatccagcttgtgaggtttctcttcctacttatggttctagagcacagaactttgtattcccattgggagtcaggtgtttcctgcagtcagtccgcaccacatcaaacacaactgcacagggtcaagttcatattatggacaagaagagtgaggatgagaagcagaagcaacaaaaaaaggaggcatcccctgaagaatgtgatcaggcagtggaaggattaagcactgcaaaagcgaaagcaaaagctaagctggaggaagtgcaaaagactgaccaatcagtggtacagaaattatgggcaaagcttcttggtattggccctgctttacgaattattgcttcaatgagcagagctgattgggctgcaaagttgaagcattggaaggatgaatttatttctacactgcagcattattggttgggcactaagctactctgggcagatgttagaatctcatcaaggctgttagttaaacttgctagtggaaagagcctcacaagacgagagaggcagcagctcacacgcacaacagcagatctattcaggctagtaccttttgcagtttttattatcgttccattcatggagctcttgctgccagtgttcctcaagttgttcccaaacatgttgccatccactttccaggacaaaatgaaagaagaggaggccctaaaaaggaaactgaaagcaaggatggaatatgcaaagtttttacaagacactgctaaagaaatggcgaaggaagttcaaacatcacgcagtggagaaatgaaacagactgctgaagatctggatgagttcttgaataaggttaggaaaggtgggcatgcctccaatgacgaaattttgagctttgcaaagctatttaatgacgagctgactttggataacatgagcagaccacggcttgttaatatgtgtaaatacatggggatccaaccttttggcacagaccactacttgcgattcatgcttcggaagaaactacaagacattaagaatgatgataagatgattcaagctgagggtgtggagtctctttctgaatatgagcttcgacaagcatgtcgtgagcgtgggcaccttggtttgttgtcaacagaggagatgcgtcaacagctcagagactggctggatctatcactcaatcattctgtgccatcgtctcttctaatactctcaagagcttttactgtatctggtaaaatgaaacctgaggaggccgttgtagcaaccttatcttccctgccagatgaagttgtcgatacagttgggactgtactgccttctgaagattctgtttcagagaggaagagaaaattggaatttctggagatgcaggaagagcttatcaaggaagaggagaaaaggcaagagaaagatgacaaggcaaaactggaggagccaaaggctactgaagaagatttggctttgaaggaaatgactgagcctactgttagggagaaagaggaactaaagaaagcaaaaacccacgataagaaagagcagctttgtaatatcagtcaagcattggctgtgcttgcatctgtttcttctgttaccaaggagcgacaagagtttttaagccttgtcaacaaggagatagaactatataataacatgctcgcaaaggagggtacagatggtgaagaagaagccaggagagcgtacaaggctgctagggaggaatcagaccatgctgcagaggcagctgtgggagaaaaggtctcttcagctttgattgatagggttgatgctatgcttcaaaagttagaaaaggagattgatgatgttgatgctcgaattggcaatcgctggcagctgctggatagggactgcgatggcaaggtgactcctgaagaggtagctgcagctgcaaattatctcaaagacaccataggagcagaaggcgtccaggagcttatcagcaatctttctaaagacaacgaagggaatatccttgtggaagacattgtgaagctggcgtcacaaacagaggaaaacaacgaagctgaagaaactgcacgatgatttggaatagcagccacattcttggctcttaaaactcgacggtccattccttttttaaaaggaaccgcacataataaagctagttcctggcagtctcatgcaaaaatcaccaagcaggatggtcattctttttgttctgactggcggctgcagagaaaattgtatcctgctgttgaaagatattcatttatacagttaagtcccagcacaaccgatcgttaggttaggaattctgtccgaaatggcaacttgcatttcaaacgtctgccatgaaaatgagaataaattcggcgggctctacagatttttcatctattgtctgaacaaaagtataggcatcaaataagtatctgggtaagtttatactatttgaataagaatcagctggatttgtttaaattcttaacaagaccgttttagcagtttgactatatggtcaatcaaaacactattttgtattgtatattgtactatgtgcacttttgcagtgagatttaaatatgggtatagagatagat

SEQ ID NO: 20075 - DNA, 3042 bp, Zea Mays
ggcttccctgccttccactacactcgcagagtcgcaggcagtcactttgcggcgagacgcttgtgtcgctcctttccaccctcagtctcagtcctctcatgatctcattccccaatcggcgacatttccagcaatttggtagtttcccacgcaggctgcgcgcaagcaaccatcccacccctcttccgcggcagtccactgcctcccggaaaatcccacctcgctccgatccaacccgtccccgcaaccagcgcagccgccgcgacggggtccgactcccggccgatctcccgcctccaccagcgccacgtgttctacctggaagggcatgattctggagtttccttgagaaagggagtaagtgctcaaggatggcctcaagggctatcatcaggaggaggaatgacattctacggcacactcatgtgcctattttgtccccttcattcactagcacaattgggcaaggacaatttgattgtgaggttgatcatcaaagatctgtatgttacttttcaaaggaaagtttagcagattctaatcatgctatggcacattgtactttaaataagcgaaagctttgtcatctcagtagcggtttcgcatggcatccagcttgtgaggtttctcttcctacttatggttctagagcacagaactttgtattcccattgggagtcaggtgtttcctgcagtcagtccgcaccacatcaaacacaactgcacagggtcaagttcatattatggacaagaagagtgaggatgagaagcagaagcaacaaaaaaaggaggcatcccctgaagaatgtgatcaggcagtggaaggattaagcactgcaaaagcgaaagcaaaagctaagctggaggaagtgcaaaagactgaccaatcagtggtacagaaattatgggcaaagcttcttggtattggccctgctttacgaattattgcttcaatgagcagagctgattgggctgcaaagttgaagcattggaaggatgaatttatttctacactgcagcattattggttgggcactaagctactctgggcagatgttagaatctcatcaaggctgttagttaaacttgctagtggaaagagcctcacaagacgagagaggcagcagctcacacgcacaacagcagatctattcaggaggccctaaaaaggaaactgaaagcaaggatggaatatgcaaagtttttacaagacactgctaaagaaatggcgaaggaagttcaaacatcacgcagtggagaaatgaaacagactgctgaagatctggatgagttcttgaataaggttaggaaaggtgggcatgcctccaatgacgaaattttgagctttgcaaagctatttaatgacgagctgactttggataacatgagcagaccacggcttgttaatatgtgtaaatacatggggatccaaccttttggcacagaccactacttgcgattcatgcttcggaagaaactacaagacattaagaatgatgataagatgattcaagctgagggtgtggagtctctttctgaatatgagcttcgacaagcatgtcgtgagcgtgggcaccttggtttgttgtcaacagaggagatgcgtcaacagctcagagactggctggatctatcactcaatcattctgtgccatcgtctcttctaatactctcaagagcttttactgtatctggtaaaatgaaacctgaggaggccgttgtagcaaccttatcttccctgccagatgaagttgtcgatacagttgggactgtactgccttctgaagattctgtttcagagaggaagagaaaattggaatttctggagatgcaggaagagcttatcaaggaagaggagaaaaggcaagagaaagatgacaaggcaaaactggaggagccaaaggctactgaagaagatttggctttgaaggaaatgactgagcctactgttagggagaaagaggaactaaagaaagcaaaaacccacgataagaaagagcagctttgtaatatcagtcaagcattggctgtgcttgcatctgtttcttctgttaccaaggagcgacaagagtttttaagccttgtcaacaaggagatagaactatataataacatgctcgcaaaggagggtacagatggtgaagaagaagccaggagagcgtacaaggctgctagggaggaatcagaccatgctgcagaggcagctgtgggagaaaaggtctcttcagctttgattgatagggttgatgctatgcttcaaaagttagaaaaggagattgatgatgttgatgctcgaattggcaatcgctggcagctgctggatagggactgcgatggcaaggtgactcctgaagaggtagctgcagctgcaaattatctcaaagacaccataggagcagaaggcgtccaggagcttatcagcaatctttctaaagacaacgaagggaatatccttgtggaagacattgtgaagctggcgtcacaaacagaggaaaacaacgaagctgaagaaactgcacgatgatttggaatagcagccacattcttggctcttaaaactcgacggtccattccttttttaaaaggaaccgcacataataaagctagttcctggcagtctcatgcaaaaatcaccaagcaggatggtcattctttttgttctgactggcggctgcagagaaaattgtatcctgctgttgaaagatattcatttatacagttaagtcccagcacaaccgatcgttaggttaggaattctgtccgaaatggcaacttgcatttcaaacgtctgccatgaaaatgagaataaattcggcgggctctacagatttttcatctattgtctgaacaaaagtataggcatcaaataagtatctgggtaagtttatactatttgaataagaatcagctggatttgtttaaattcttaacaagaccgttttagcagtttgactatatggtcaatcaaaacactattttgtattgtatattgtactatgtgcacttttgcagtgagatttaaatatgggtatagagatagat

SEQ ID NO: 20076 - DNA, 3056 bp, Zea Mays
cttccactacactcgcagagtcgcaggcagtcactttgcggcgagacgcttgtgtcgctcctttccaccctcagtctcagtcctctcatgatctcattccccaatcggcgacatttccagcaatttggtagtttcccacgcaggctgcgcgcaagcaaccatcccacccctcttccgcggcagtccactgcctcccggaaaatcccacctcgctccgatccaacccgtccccgcaaccagcgcagccgccgcgacggggtccgactcccggccgatctcccgcctccaccagcgccacgtgttctacctggaagggcatgattctggagtttccttgagaaagggagtaagtgctcaaggatggcctcaagggctatcatcaggaggaggaatgacattctacggcacactcatgtgcctattttgtccccttcattcactagcacaattgggcaaggacaatttgattgtgaggttgatcatcaaagatctgtatgttacttttcaaaggaaagtttagcagattctaatcatgctatggcacattgtactttaaataagcgaaagctttgtcatctcagtagcggtttcgcatggcatccagcttgtgaggtttctcttcctacttatggttctagagcacagaactttgtattcccattgggagtcaggtgtttcctgcagtcagtccgcaccacatcaaacacaactgcacagggtcaagttcatattatggacaagaagagtgaggatgagaagcagaagcaacaaaaaaaggaggcatcccctgaagaatgtgatcaggcagtggaaggattaagcactgcaaaagcgaaagcaaaagctaagctggaggaagtgcaaaagactgaccaatcagtggtacagaaattatgggcaaagcttcttggtattggccctgctttacgaattattgcttcaatgagcagagctgattgggctgcaaagttgaagcattggaaggatgaatttatttctacactgcagcattattggttgggcactaagctactctgggcagatgttagaatctcatcaaggctgttagttaaacttgctagtggaaagagcctcacaagacgagagaggcagcagctcacacgcacaacagcagatctattcaggctagtaccttttgcagtttttattatcgttccattcatggagctcttgctgccagtgttcctcaagttgttcccaaacatgttgccatccactttccaggacaaaatgaaagaagaggaggccctaaaaaggaaactgaaagcaaggatggaatatgcaaagtttttacaagacactgctaaagaaatggcgaaggaagttcaaacatcacgcagtggagaaatgaaacagactgctgaagatctggatgagttcttgaataaggttaggaaaggtgggcatgcctccaatgacgaaattttgagctttgcaaagctatttaatgacgagctgactttggataacatgagcagcattaagaatgatgataagatgattcaagctgagggtgtggagtctctttctgaatatgagcttcgacaagcatgtcgtgagcgtgggcaccttggtttgttgtcaacagaggagatgcgtcaacagctcagagactggctggatctatcactcaatcattctgtgccatcgtctcttctaatactctcaagagcttttactgtatctggtaaaatgaaacctgaggaggccgttgtagcaaccttatcttccctgccagatgaagttgtcgatacagttgggactgtactgccttctgaagattctgtttcagagaggaagagaaaattggaatttctggagatgcaggaagagcttatcaaggaagaggagaaaaggcaagagaaagatgacaaggcaaaactggaggagccaaaggctactgaagaagatttggctttgaaggaaatgactgagcctactgttagggagaaagaggaactaaagaaagcaaaaacccacgataagaaagagcagctttgtaatatcagtcaagcattggctgtgcttgcatctgtttcttctgttaccaaggagcgacaagagtttttaagccttgtcaacaaggagatagaactatataataacatgctcgcaaaggagggtacagatggtgaagaagaagccaggagagcgtacaaggctgctagggaggaatcagaccatgctgcagaggcagctgtgggagaaaaggtctcttcagctttgattgatagggttgatgctatgcttcaaaagttagaaaaggagattgatgatgttgatgctcgaattggcaatcgctggcagctgctggatagggactgcgatggcaaggtgactcctgaagaggtagctgcagctgcaaattatctcaaagacaccataggagcagaaggcgtccaggagcttatcagcaatctttctaaagacaacgaagggaatatccttgtggaagacattgtgaagctggcgtcacaaacagaggaaaacaacgaagctgaagaaactgcacgatgatttggaatagcagccacattcttggctcttaaaactcgacggtccattccttttttaaaaggaaccgcacataataaagctagttcctggcagtctcatgcaaaaatcaccaagcaggatggtcattctttttgttctgactggcggctgcagagaaaattgtatcctgctgttgaaagatattcatttatacagttaagtcccagcacaaccgatcgttaggttaggaattctgtccgaaatggcaacttgcatttcaaacgtctgccatgaaaatgagaataaattcggcgggctctacagatttttcatctattgtctgaacaaaagtataggcatcaaataagtatctgggtaagtttatactatttgaataagaatcagctggatttgtttaaattcttaacaagaccgttttagcagtttgactatatggtcaatcaaaacactattttgtattgtatattgtactatgtgcacttttgcagtgagatttaaatatgggtatagagatagat

SEQ ID NO: 20077 - DNA, 3144 bp, Zea Mays
cttccactacactcgcagagtcgcaggcagtcactttgcggcgagacgcttgtgtcgctcctttccaccctcagtctcagtcctctcatgatctcattccccaatcggcgacatttccagcaatttggtagtttcccacgcaggctgcgcgcaagcaaccatcccacccctcttccgcggcagtccactgcctcccggaaaatcccacctcgctccgatccaacccgtccccgcaaccagcgcagccgccgcgacggggtccgactcccggccgatctcccgcctccaccagcgccacgtgttctacctggaagggcatgattctggagtttccttgagaaagggagtaagtgctcaaggatggcctcaagggctatcatcaggaggaggaatgacattctacggcacactcatgtgcctattttgtccccttcattcactagcacaattgggcaaggacaatttgattgtgaggttgatcatcaaagatctgtatgttacttttcaaaggaaagtttagcagattctaatcatgctatggcacattgtactttaaataagcgaaagctttgtcatctcagtagcggtttcgcatggcatccagcttgtgaggtttctcttcctacttatggttctagagcacagaactttgtattcccattgggagtcaggtgtttcctgcagtcagtccgcaccacatcaaacacaactgcacagggtcaagttcatattatggacaagaagagtgaggatgagaagcagaagcaacaaaaaaaggaggcatcccctgaagaatgtgatcaggcagtggaaggattaagcactgcaaaagcgaaagcaaaagctaagctggaggaagtgcaaaagactgaccaatcagtggtacagaaattatgggcaaagcttcttggtattggccctgctttacgaattattgcttcaatgagcagagctgattgggctgcaaagttgaagcattggaaggatgaatttatttctacactgcagcattattggttgggcactaagctactctgggcagatgttagaatctcatcaaggctgttagttaaacttgctagtggaaagagcctcacaagacgagagaggcagcagctcacacgcacaacagcagatctattcaggctagtaccttttgcagtttttattatcgttccattcatggagctcttgctgccagtgttcctcaagttgttcccaaacatgttgccatccactttccaggacaaaatgaaagaagaggaggccctaaaaaggaaactgaaagcaaggatggaatatgcaaagtttttacaagacactgctaaagaaatggcgaaggaagttcaaacatcacgcagtggagaaatgaaacagactgctgaagatctggatgagttcttgaataaggaaaggtgggcatgcctccaatgacgaaattttgagctttgcaaagctatttaatgacgagctgactttggataacatgagcagaccacggcttgttaatatgtgtaaatacatggggatccaaccttttggcacagaccactacttgcgattcatgcttcggaagaaactacaagacattaagaatgatgataagatgattcaagctgagggtgtggagtctctttctgaatatgagcttcgacaagcatgtcgtgagcgtgggcaccttggtttgttgtcaacagaggagatgcgtcaacagctcagagactggctggatctatcactcaatcattctgtgccatcgtctcttctaatactctcaagagcttttactgtatctggtaaaatgaaacctgaggaggccgttgtagcaaccttatcttccctgccagatgaagttgtcgatacagttgggactgtactgccttctgaagattctgtttcagagaggaagagaaaattggaatttctggagatgcaggaagagcttatcaaggaagaggagaaaaggcaagagaaagatgacaaggcaaaactggaggagccaaaggctactgaagaagatttggctttgaaggaaatgactgagcctactgttagggagaaagaggaactaaagaaagcaaaaacccacgataagaaagagcagctttgtaatatcagtcaagcattggctgtgcttgcatctgtttcttctgttaccaaggagcgacaagagtttttaagccttgtcaacaaggagatagaactatataataacatgctcgcaaaggagggtacagatggtgaagaagaagccaggagagcgtacaaggctgctagggaggaatcagaccatgctgcagaggcagctgtgggagaaaaggtctcttcagctttgattgatagggttgatgctatgcttcaaaagttagaaaaggagattgatgatgttgatgctcgaattggcaatcgctggcagctgctggatagggactgcgatggcaaggtgactcctgaagaggtagctgcagctgcaaattatctcaaagacaccataggagcagaaggcgtccaggagcttatcagcaatctttctaaagacaacgaagggaatatccttgtggaagacattgtgaagctggcgtcacaaacagaggaaaacaacgaagctgaagaaactgcacgatgatttggaatagcagccacattcttggctcttaaaactcgacggtccattccttttttaaaaggaaccgcacataataaagctagttcctggcagtctcatgcaaaaatcaccaagcaggatggtcattctttttgttctgactggcggctgcagagaaaattgtatcctgctgttgaaagatattcatttatacagttaagtcccagcacaaccgatcgttaggttaggaattctgtccgaaatggcaacttgcatttcaaacgtctgccatgaaaatgagaataaattcggcgggctctacagatttttcatctattgtctgaacaaaagtataggcatcaaataagtatctgggtaagtttatactatttgaataagaatcagctggatttgtttaaattcttaacaagaccgttttagcagtttgactatatggtcaatcaaaacactattttgtattgtatattgtactatgtgcacttttgcagtgagatttaaatatgggtatagagatagat

SEQ ID NO: 20078 - DNA, 3130 bp, Zea Mays
gcagagtcgcaggcagtcactttgcggcgagacgcttgtgtcgctcctttccaccctcagtctcagtcctctcatgatctcattccccaatcggcgacatttccagcaatttggtagtttcccacgcaggctgcgcgcaagcaaccatcccacccctcttccgcggcagtccactgcctcccggaaaatcccacctcgctccgatccaacccgtccccgcaaccagcgcagccgccgcgacggggtccgactcccggccgatctcccgcctccaccagcgccacgtgttctacctggaagggcatgattctggagtttccttgagaaagggagtaagtgctcaaggatggcctcaagggctatcatcaggaggaggaatgacattctacggcacactcatgtgcctattttgtccccttcattcactagcacaattgggcaaggacaatttgattgtgaggttgatcatcaaagatctgtatgttacttttcaaaggaaagtttagcagattctaatcatgctatggcacattgtactttaaataagcgaaagctttgtcatctcagtagcggtttcgcatggcatccagcttgtgaggtttctcttcctacttatggttctagagcacagaactttgtattcccattgggagtcaggtgtttcctgcagtcagtccgcaccacatcaaacacaactgcacagggtcaagttcatattatggacaagaagagtgaggatgagaagcagaagcaacaaaaaaaggaggcatcccctgaagaatgtgatcaggcagtggaaggattaagcactgcaaaagcgaaagcaaaagctaagctggaggaagtgcaaaagactgaccaatcagtggtacagaaattatgggcaaagcttcttggtattggccctgctttacgaattattgcttcaatgagcagagctgattgggctgcaaagttgaagcattggaaggatgaatttatttctacactgcagcattattggttgggcactaagctactctgggcagatgttagaatctcatcaaggctgttagttaaacttgctagtggaaagagcctcacaagacgagagaggcagcagctcacacgcacaacagcagatctattcaggctagtaccttttgcagtttttattatcgttccattcatggagctcttgctgccagtgttcctcaagttgttcccaaacatgttgccatccactttccaggacaaaatgaaagaagaggaggccctaaaaaggaaactgaaagcaaggatggaatatgcaaagtttttacaagacactgctaaagaaatggcgaaggaagttcaaacatcacgcagtggagaaatgaaacagactgctgaagatctggatgagttcttgaataaggttaggaaaggtgggcatgcctccaatgacgaaattttgagctttgcaaagctatttaatgacgagctgactttggataacatgagcagaccacggcttgttaatatgtgtaaatacatggggatccaaccttttggcacagaccactacttgcgattcatgcttcggaagaaactacaagacattaagaatgatgataagatgattcaagctgagggtgtggagtctctttctgaatatgagcttcgacaagcatgtcgtgagcgtgggcaccttggtttgttgtcaacagaggagatgcgtcaacagagactggctggatctatcactcaatcattctgtgccatcgtctcttctaatactctcaagagcttttactgtatctggtaaaatgaaacctgaggaggccgttgtagcaaccttatcttccctgccagatgaagttgtcgatacagttgggactgtactgccttctgaagattctgtttcagagaggaagagaaaattggaatttctggagatgcaggaagagcttatcaaggaagaggagaaaaggcaagagaaagatgacaaggcaaaactggaggagccaaaggctactgaagaagatttggctttgaaggaaatgactgagcctactgttagggagaaagaggaactaaagaaagcaaaaacccacgataagaaagagcagctttgtaatatcagtcaagcattggctgtgcttgcatctgtttcttctgttaccaaggagcgacaagagtttttaagccttgtcaacaaggagatagaactatataataacatgctcgcaaaggagggtacagatggtgaagaagaagccaggagagcgtacaaggctgctagggaggaatcagaccatgctgcagaggcagctgtgggagaaaaggtctcttcagctttgattgatagggttgatgctatgcttcaaaagttagaaaaggagattgatgatgttgatgctcgaattggcaatcgctggcagctgctggatagggactgcgatggcaaggtgactcctgaagaggtagctgcagctgcaaattatctcaaagacaccataggagcagaaggcgtccaggagcttatcagcaatctttctaaagacaacgaagggaatatccttgtggaagacattgtgaagctggcgtcacaaacagaggaaaacaacgaagctgaagaaactgcacgatgatttggaatagcagccacattcttggctcttaaaactcgacggtccattccttttttaaaaggaaccgcacataataaagctagttcctggcagtctcatgcaaaaatcaccaagcaggatggtcattctttttgttctgactggcggctgcagagaaaattgtatcctgctgttgaaagatattcatttatacagttaagtcccagcacaaccgatcgttaggttaggaattctgtccgaaatggcaacttgcatttcaaacgtctgccatgaaaatgagaataaattcggcgggctctacagatttttcatctattgtctgaacaaaagtataggcatcaaataagtatctgggtaagtttatactatttgaataagaatcagctggatttgtttaaattcttaacaagaccgttttagcagtttgactatatggtcaatcaaaacactattttgtattgtatattgtactatgtgcacttttgcagtgagatttaaatatgggtatagagatagat

SEQ ID NO: 20079 - DNA, 2173 bp, Zea Mays
cgcaggcagtcactttgcggcgagacgcttgtgtcgctcctttccaccctcagtctcagtcctctcatgatctcattccccaatcggcgacatttccagcaatttggtagtttcccacgcaggctgcgcgcaagcaaccatcccacccctcttccgcggcagtccactgcctcccggaaaatcccacctcgctccgatccaacccgtccccgcaaccagcgcagccgccgcgacggggtccgactcccggccgatctcccgcctccaccagcgccacgtgttctacctggaagggcatgattctggagtttccttgagaaagggagtaagtgctcaaggatggcctcaagggctatcatcaggaggaggaatgacattctacggcacactcatgtgcctattttgtccccttcattcactagcacaattgggcaaggacaatttgattgtgaggttgatcatcaaagatctgtatgttacttttcaaaggaaagtttagcagattctaatcatgctatggcacattgtactttaaataagcgaaagctttgtcatctcagtagcggtttcgcatggcatccagcttgtgaggtttctcttcctacttatggttctagagcacagaactttgtattcccattgggagtcaggtgtttcctgcagtcagtccgcaccacatcaaacacaactgcacagggtcaagttcatattatggacaagaagagtgaggatgagaagcagaagcaacaaaaaaaggaggcatcccctgaagaatgtgatcaggcagtggaaggattaagcactgcaaaagcgaaagcaaaagctaagctggaggaagtgcaaaagactgaccaatcagtggtacagaaattatgggcaaagcttcttggtattggccctgctttacgaattattgcttcaatgagcagagctgattgggctgcaaagttgaagcattggaaggatgaatttatttctacactgcagcattattggttgggcactaagctactctgggcagatgttagaatctcatcaaggctgttagttaaacttgctagtggaaagagcctcacaagacgagagaggcagcagctcacacgcacaacagcagatctattcaggctagtaccttttgcagtttttattatcgttccattcatggagctcttgctgccagtgttcctcaagttgttcccaaacatgttgccatccactttccaggacaaaatgaaagaagaggaggccctaaaaaggaaactgaaagcaaggatggaatatgcaaagtttttacaagacactgctaaagaaatggcgaaggaagttcaaacatcacgcagtggagaaatgaaacagactgctgaagatctggatgagttcttgaataaggtttgcgcttcatatgcttaatcccttgatcataccagttggctgatcatccgtattctgcagaccacggcttgttaatatgtgtaaatacatggggatccaaccttttggcacagaccactacttgcgattcatgcttcggaagaaactacaagacattaagaatgatgataagatgattcaagctgagggtgtggagtctctttctgaatatgagcttcgacaagcatgtcgtgagcgtgggcaccttggtttgttgtcaacagaggagatgcgtcaacagagactggctggatctatcactcaatcattctgtgccatcgtctcttctaatactctcaagagcttttactgtatctggtaaaatgaaacctgaggaggccgttgtagcaaccttatcttccctgccagatgaagttgtcgatacagttgggactgtactgccttctgaagattctgtttcagagaggaagagaaaattggaatttctggagatgcaggaagagcttatcaaggaagaggagaaaaggcaagagaaagatgacaaggcaaaactggaggagccaaaggctactgaagaagatttggctttgaaggaaatgactgagcctactgttagggagaaagaggaactaaagaaagcaaaaacccacgataagaaagagcagctttgtaatatcagtcaagcattggctgtgcttgcatctgtttcttctgttaccaaggagcgacaagagtttttaagccttgtcaacaaggagatccccactcatgtggaatacag

SEQ ID NO: 20080 - DNA, 3088 bp, Zea Mays
cgcaggcagtcactttgcggcgagacgcttgtgtcgctcctttccaccctcagtctcagtcctctcatgatctcattccccaatcggcgacatttccagcaatttggtagtttcccacgcaggctgcgcgcaagcaaccatcccacccctcttccgcggcagtccactgcctcccggaaaatcccacctcgctccgatccaacccgtccccgcaaccagcgcagccgccgcgacggggtccgactcccggccgatctcccgcctccaccagcgccacgtgttctacctggaagggcatgattctggagtttccttgagaaagggagtaagtgctcaaggatggcctcaagggctatcatcaggaggaggaatgacattctacggcacactcatgtgcctattttgtccccttcattcactagcacaattgggcaaggacaatttgattgtgaggttgatcatcaaagatctgtatgttacttttcaaaggaaagtttagcagattctaatcatgctatggcacattgtactttaaataagcgaaagctttgtcatctcagtagcggtttcgcatggcatccagcttgtgaggtttctcttcctacttatggttctagagcacagaactttgtattcccattgggagtcaggtgtttcctgcagtcagtccgcaccacatcaaacacaactgcacagggtcaagttcatattatggacaagaagagtgaggatgagaagcagaagcaacaaaaaaaggaggcatcccctgaagaatgtgatcaggcagtggaaggattaagcactgcaaaagcgaaagcaaaagctaagctggaggaagtgcaaaagactgaccaatcagtggtacagaaattatgggcaaagcttcttggtattggccctgctttacgaattattgcttcaatgagcagagctgattgggctgcaaagttgaagcattggaaggatgaatttatttctacactgcagcattattggttgggcactaagctactctgggcagatgttagaatctcatcaaggctgttagttaaacttgctagtggaaagagcctcacaagacgagagaggcagcagctcacacgcacaacagcagatctattcaggctagtaccttttgcagtttttattatcgttccattcatggagctcttgctgccagtgttcctcaagttgttcccaaacatgttgccatccactttccaggacaaaatgaaagaagaggaggccctaaaaaggaaactgaaagcaaggatggaatatgcaaagtttttacaagacactgctaaagaaatggcgaaggaagttcaaacatcacgcagtggagaaatgaaacagactgctgaagatctggatgagttcttgaataaggttaggaaaggtgggcatgcctccaatgacgaaattttgagctttgcaaagctatttaatgacgagctgactttggataacatgagcagaccacggcttgttaatatgtgtaaatacatggggatccaaccttttggcacagaccactacttgcgattcatgcttcggaagaaactacaagacattaagaatgatgataagatgattcaagctgagggtgtggagtctctttctgaatatgagcttcgacaagcatgtcgtgagcgtgggcaccttggtttgttgtcaacagaggagatgcgtcaacagctcagagactggctggatctatcactcaatcattctgtgccatcgtctcttctaatactctcaagagcttttactgtatctggtaaaatgaaacctgaggaggccgttgtagcaaccttatcttccctgccagatgaagttgtcgatacagttgggactgtactgccttctgaagattctgtttcagagaggaagagaaaattggaatttctggagatgcaggaagagcttatcaaggaagaggagaaaaggcaagagaaagatgacaaggcaaaactggaggagccaaaggctactgaagaagatttggctttgaaggaaatgactgagcctactgttagggagaaagaggaactaaagaaagcaaaaacccacgataagaaagagcagctttgtaatatcagtcaagcattggctgtgcttgcatctgtttcttctgttaccaaggagcgacaagagtttttaagccttgtcaacaaggagatggtgaagaagaagccaggagagcgtacaaggctgctagggaggaatcagaccatgctgcagaggcagctgtgggagaaaaggtctcttcagctttgattgatagggttgatgctatgcttcaaaagttagaaaaggagattgatgatgttgatgctcgaattggcaatcgctggcagctgctggatagggactgcgatggcaaggtgactcctgaagaggtagctgcagctgcaaattatctcaaagacaccataggagcagaaggcgtccaggagcttatcagcaatctttctaaagacaacgaagggaatatccttgtggaagacattgtgaagctggcgtcacaaacagaggaaaacaacgaagctgaagaaactgcacgatgatttggaatagcagccacattcttggctcttaaaactcgacggtccattccttttttaaaaggaaccgcacataataaagctagttcctggcagtctcatgcaaaaatcaccaagcaggatggtcattctttttgttctgactggcggctgcagagaaaattgtatcctgctgttgaaagatattcatttatacagttaagtcccagcacaaccgatcgttaggttaggaattctgtccgaaatggcaacttgcatttcaaacgtctgccatgaaaatgagaataaattcggcgggctctacagatttttcatctattgtctgaacaaaagtataggcatcaaataagtatctgggtaagtttatactatttgaataagaatcagctggatttgtttaaattcttaacaagaccgttttagcagtttgactatatggtcaatcaaaacactattttgtattgtatattgtactatgtgcacttttgcagtgagatttaaatatgggtatagagatagat

SEQ ID NO: 20081 - DNA, 3088 bp, Zea Mays
cgcaggcagtcactttgcggcgagacgcttgtgtcgctcctttccaccctcagtctcagtcctctcatgatctcattccccaatcggcgacatttccagcaatttggtagtttcccacgcaggctgcgcgcaagcaaccatcccacccctcttccgcggcagtccactgcctcccggaaaatcccacctcgctccgatccaacccgtccccgcaaccagcgcagccgccgcgacggggtccgactcccggccgatctcccgcctccaccagcgccacgtgttctacctggaagggcatgattctggagtttccttgagaaagggagtaagtgctcaaggatggcctcaagggctatcatcaggaggaggaatgacattctacggcacactcatgtgcctattttgtccccttcattcactagcacaattgggcaaggacaatttgattgtgaggttgatcatcaaagatctgtatgttacttttcaaaggaaagtttagcagattctaatcatgctatggcacattgtactttaaataagcgaaagctttgtcatctcagtagcggtttcgcatggcatccagcttgtgaggtttctcttcctacttatggttctagagcacagaactttgtattcccattgggagtcaggtgtttcctgcagtcagtccgcaccacatcaaacacaactgcacagggtcaagttcatattatggacaagaagagtgaggatgagaagcagaagcaacaaaaaaaggaggcatcccctgaagaatgtgatcaggcagtggaaggattaagcactgcaaaagcgaaagcaaaagctaagctggaggaagtgcaaaagactgaccaatcagtggtacagaaattatgggcaaagcttcttgagctgattgggctgcaaagttgaagcattggaaggatgaatttatttctacactgcagcattattggttgggcactaagctactctgggcagatgttagaatctcatcaaggctgttagttaaacttgctagtggaaagagcctcacaagacgagagaggcagcagctcacacgcacaacagcagatctattcaggctagtaccttttgcagtttttattatcgttccattcatggagctcttgctgccagtgttcctcaagttgttcccaaacatgttgccatccactttccaggacaaaatgaaagaagaggaggccctaaaaaggaaactgaaagcaaggatggaatatgcaaagtttttacaagacactgctaaagaaatggcgaaggaagttcaaacatcacgcagtggagaaatgaaacagactgctgaagatctggatgagttcttgaataaggttaggaaaggtgggcatgcctccaatgacgaaattttgagctttgcaaagctatttaatgacgagctgactttggataacatgagcagaccacggcttgttaatatgtgtaaatacatggggatccaaccttttggcacagaccactacttgcgattcatgcttcggaagaaactacaagacattaagaatgatgataagatgattcaagctgagggtgtggagtctctttctgaatatgagcttcgacaagcatgtcgtgagcgtgggcaccttggtttgttgtcaacagaggagatgcgtcaacagctcagagactggctggatctatcactcaatcattctgtgccatcgtctcttctaatactctcaagagcttttactgtatctggtaaaatgaaacctgaggaggccgttgtagcaaccttatcttccctgccagatgaagttgtcgatacagttgggactgtactgccttctgaagattctgtttcagagaggaagagaaaattggaatttctggagatgcaggaagagcttatcaaggaagaggagaaaaggcaagagaaagatgacaaggcaaaactggaggagccaaaggctactgaagaagatttggctttgaaggaaatgactgagcctactgttagggagaaagaggaactaaagaaagcaaaaacccacgataagaaagagcagctttgtaatatcagtcaagcattggctgtgcttgcatctgtttcttctgttaccaaggagcgacaagagtttttaagccttgtcaacaaggagatagaactatataataacatgctcgcaaaggagggtacagatggtgaagaagaagccaggagagcgtacaaggctgctagggaggaatcagaccatgctgcagaggcagctgtgggagaaaaggtctcttcagctttgattgatagggttgatgctatgcttcaaaagttagaaaaggagattgatgatgttgatgctcgaattggcaatcgctggcagctgctggatagggactgcgatggcaaggtgactcctgaagaggtagctgcagctgcaaattatctcaaagacaccataggagcagaaggcgtccaggagcttatcagcaatctttctaaagacaacgaagggaatatccttgtggaagacattgtgaagctggcgtcacaaacagaggaaaacaacgaagctgaagaaactgcacgatgatttggaatagcagccacattcttggctcttaaaactcgacggtccattccttttttaaaaggaaccgcacataataaagctagttcctggcagtctcatgcaaaaatcaccaagcaggatggtcattctttttgttctgactggcggctgcagagaaaattgtatcctgctgttgaaagatattcatttatacagttaagtcccagcacaaccgatcgttaggttaggaattctgtccgaaatggcaacttgcatttcaaacgtctgccatgaaaatgagaataaattcggcgggctctacagatttttcatctattgtctgaacaaaagtataggcatcaaataagtatctgggtaagtttatactatttgaataagaatcagctggatttgtttaaattcttaacaagaccgttttagcagtttgactatatggtcaatcaaaacactattttgtattgtatattgtactatgtgcacttttgcagtgagatttaaatatgggtatagagatagat

SEQ ID NO: 20082 - DNA, 3030 bp, Zea Mays
cgcaggcagtcactttgcggcgagacgcttgtgtcgctcctttccaccctcagtctcagtcctctcatgatctcattccccaatcggcgacatttccagcaatttggtagtttcccacgcaggctgcgcgcaagcaaccatcccacccctcttccgcggcagtccactgcctcccggaaaatcccacctcgctccgatccaacccgtccccgcaaccagcgcagccgccgcgacggggtccgactcccggccgatctcccgcctccaccagcgccacgtgttctacctggaagggcatgattctggagtttccttgagaaagggagtaagtgctcaaggatggcctcaagggctatcatcaggaggaggaatgacattctacggcacactcatgtgcctattttgtccccttcattcactagcacaattgggcaaggacaatttgattgtgaggttgatcatcaaagatctgtatgttacttttcaaaggaaagtttagcagattctaatcatgctatggcacattgtactttaaataagcgaaagctttgtcatctcagtagcggtttcgcatggcatccagcttgtgaggtttctcttcctacttatggttctagagcacagaactttgtattcccattgggagtcaggtgtttcctgcagtcagtccgcaccacatcaaacacaactgcacagggtcaagttcatattatggacaagaagagtgaggatgagaagcagaagcaacaaaaaaaggaggcatcccctgaagaatgtgatcaggcagtggaaggattaagcactgcaaaagcgaaagcaaaagctaagctggaggaagtgcaaaagactgaccaatcagtggtacagaaattatgggcaaagcttcttggtattggccctgctttacgaattattgcttcaatgagcagagctgattgggctgcaaagttgaagcattggaaggatgaatttatttctacactgcagcattattggttgggcactaagctactctgggcagatgttagaatctcatcaaggctgttagttaaacttgctagtggaaagagcctcacaagacgagagaggcagcagctcacacgcacaacagcagatctattcaggctagtaccttttgcagtttttattatcgttccattcatggagctcttgctgccagtgttcctcaagttgttcccaaacatgttgccatccactttccaggacaaaatgaaagaagaggaggccctaaaaaggaaactgaaagcaaggatggaatatgcaaagtttttacaagacactgctaaagaaatggcgaaggaagttcaaacatcacgcagtggagaaatgaaacagactgctgaagatctggatgagttcttgaataaggttaggaaaggtgggcatgcctccaatgacgaaattttgagctttgcaaagctatttaatgacgagctgactttggataacatgagcagcattaagaatgatgataagatgattcaagctgagggtgtggagtctctttctgaatatgagcttcgacaagcatgtcgtgagcgtgggcaccttggtttgttgtcaacagaggagatgcgtcaacagagactggctggatctatcactcaatcattctgtgccatcgtctcttctaatactctcaagagcttttactgtatctggtaaaatgaaacctgaggaggccgttgtagcaaccttatcttccctgccagatgaagttgtcgatacagttgggactgtactgccttctgaagattctgtttcagagaggaagagaaaattggaatttctggagatgcaggaagagcttatcaaggaagaggagaaaaggcaagagaaagatgacaaggcaaaactggaggagccaaaggctactgaagaagatttggctttgaaggaaatgactgagcctactgttagggagaaagaggaactaaagaaagcaaaaacccacgataagaaagagcagctttgtaatatcagtcaagcattggctgtgcttgcatctgtttcttctgttaccaaggagcgacaagagtttttaagccttgtcaacaaggagatagaactatataataacatgctcgcaaaggagggtacagatggtgaagaagaagccaggagagcgtacaaggctgctagggaggaatcagaccatgctgcagaggcagctgtgggagaaaaggtctcttcagctttgattgatagggttgatgctatgcttcaaaagttagaaaaggagattgatgatgttgatgctcgaattggcaatcgctggcagctgctggatagggactgcgatggcaaggtgactcctgaagaggtagctgcagctgcaaattatctcaaagacaccataggagcagaaggcgtccaggagcttatcagcaatctttctaaagacaacgaagggaatatccttgtggaagacattgtgaagctggcgtcacaaacagaggaaaacaacgaagctgaagaaactgcacgatgatttggaatagcagccacattcttggctcttaaaactcgacggtccattccttttttaaaaggaaccgcacataataaagctagttcctggcagtctcatgcaaaaatcaccaagcaggatggtcattctttttgttctgactggcggctgcagagaaaattgtatcctgctgttgaaagatattcatttatacagttaagtcccagcacaaccgatcgttaggttaggaattctgtccgaaatggcaacttgcatttcaaacgtctgccatgaaaatgagaataaattcggcgggctctacagatttttcatctattgtctgaacaaaagtataggcatcaaataagtatctgggtaagtttatactatttgaataagaatcagctggatttgtttaaattcttaacaagaccgttttagcagtttgactatatggtcaatcaaaacactattttgtattgtatattgtactatgtgcacttttgcagtgagatttaaatatgggtatagagatagat

SEQ ID NO: 20083 - DNA, 2865 bp, Zea Mays
cgcaggcagtcactttgcggcgagacgcttgtgtcgctcctttccaccctcagtctcagtcctctcatgatctcattccccaatcggcgacatttccagcaatttggtagtttcccacgcaggctgcgcgcaagcaaccatcccacccctcttccgcggcagtccactgcctcccggaaaatcccacctcgctccgatccaacccgtccccgcaaccagcgcagccgccgcgacggggtccgactcccggccgatctcccgcctccaccagcgccacgtgttctacctggaagggcatgattctggagtttccttgagaaagggagtaagtgctcaaggatggcctcaagggctatcatcaggaggaggaatgacattctacggcacactcatgtgcctattttgtccccttcattcactagcacaattgggcaaggacaatttgattgtgaggttgatcatcaaagatctgtatgttacttttcaaaggaaagtttagcagattctaatcatgctatggcacattgtactttaaataagcgaaagctttgtcatctcagtagcggtttcgcatggcatccagcttgtgaggtttctcttcctacttatggttctagagcacagaactttgtattcccattgggagtcaggtgtttcctgcagtcagtccgcaccacatcaaacacaactgcacagggtcaagttcatattatggacaagaagagtgaggatgagaagcagaagcaacaaaaaaaggaggcatcccctgaagaatgtgatcaggcagtggaaggattaagcactgcaaaagcgaaagcaaaagctaagctggaggaagtgcaaaagactgaccaatcagtggtacagaaattatgggcaaagcttcttggtattggccctgctttacgaattattgcttcaatgagcagagctgattgggctgcaaagttgaagcattggaaggatgaatttatttctacactgcagcattattggttgggcactaagctactctgggcagatgttagaatctcatcaaggctgttagttaaacttgctagtggaaagagcctcacaagacgagagaggcagcagctcacacgcacaacagcagatctattcaggctagtaccttttgcagtttttattatcgttccattcatggagctcttgctgccagtgttcctcaagttgttcccaaacatgttgccatccactttccaggacaaaatgaaagaagaggaggccctaaaaaggaaactgaaagcaaggatggaatatgcaaagtttttacaagacactgctaaagaaatggcgaaggaagttcaaacatcacgcagtggagaaatgaaacagactgctgaagatctggatgagttcttgaataaggtttgcgcttcatatgcttaatcccttgatcataccagttggctgatcatccgtattctgcagaccacggcttgttaatatgtgtaaatacatggggatccaaccttttggcacagaccactacttgcgattcatgcttcggaagaaactacaagacattaagaatgatgataagatgattcaagctgagggtgtggagtctctttctgaatatgagcttcgacaagcatgtcgtgagcgtgggcaccttggtttgttgtcaacagaggagatgcgtcaacaggaagaggagaaaaggcaagagaaagatgacaaggcaaaactggaggagccaaaggctactgaagaagatttggctttgaaggaaatgactgagcctactgttagggagaaagaggaactaaagaaagcaaaaacccacgataagaaagagcagctttgtaatatcagtcaagcattggctgtgcttgcatctgtttcttctgttaccaaggagcgacaagagtttttaagccttgtcaacaaggagatagaactatataataacatgctcgcaaaggagggtacagatggtgaagaagaagccaggagagcgtacaaggctgctagggaggaatcagaccatgctgcagaggcagctgtgggagaaaaggtctcttcagctttgattgatagggttgatgctatgcttcaaaagttagaaaaggagattgatgatgttgatgctcgaattggcaatcgctggcagctgctggatagggactgcgatggcaaggtgactcctgaagaggtagctgcagctgcaaattatctcaaagacaccataggagcagaaggcgtccaggagcttatcagcaatctttctaaagacaacgaagggaatatccttgtggaagacattgtgaagctggcgtcacaaacagaggaaaacaacgaagctgaagaaactgcacgatgatttggaatagcagccacattcttggctcttaaaactcgacggtccattccttttttaaaaggaaccgcacataataaagctagttcctggcagtctcatgcaaaaatcaccaagcaggatggtcattctttttgttctgactggcggctgcagagaaaattgtatcctgctgttgaaagatattcatttatacagttaagtcccagcacaaccgatcgttaggttaggaattctgtccgaaatggcaacttgcatttcaaacgtctgccatgaaaatgagaataaattcggcgggctctacagatttttcatctattgtctgaacaaaagtataggcatcaaataagtatctgggtaagtttatactatttgaataagaatcagctggatttgtttaaattcttaacaagaccgttttagcagtttgactatatggtcaatcaaaacactattttgtattgtatattgtactatgtgcacttttgcagtgagatttaaatatgggtatagagatagat

SEQ ID NO: 20084 - DNA, 2891 bp, Zea Mays
cgcaggcagtcactttgcggcgagacgcttgtgtcgctcctttccaccctcagtctcagtcctctcatgatctcattccccaatcggcgacatttccagcaatttggtagtttcccacgcaggctgcgcgcaagcaaccatcccacccctcttccgcggcagtccactgcctcccggaaaatcccacctcgctccgatccaacccgtccccgcaaccagcgcagccgccgcgacggggtccgactcccggccgatctcccgcctccaccagcgccacgtgttctacctggaagggcatgattctggagtttccttgagaaagggagtaagtgctcaaggatggcctcaagggctatcatcaggaggaggaatgacattctacggcacactcatgtgcctattttgtccccttcattcactagcacaattgggcaaggacaatttgattgtgaggttgatcatcaaagatctgtatgttacttttcaaaggaaagtttagcagattctaatcatgctatggcacattgtactttaaataagcgaaagctttgtcatctcagtagcggtttcgcatggcatccagcttgtgaggtttctcttcctacttatggttctagagcacagaactttgtattcccattgggagtcaggtgtttcctgcagtcagtccgcaccacatcaaacacaactgcacagggtcaagttcatattatggacaagaagagtgaggatgagaagcagaagcaacaaaaaaaggaggcatcccctgaagaatgtgatcaggcagtggaaggattaagcactgcaaaagcgaaagcaaaagctaagctggaggaagtgcaaaagactgaccaatcagtggtacagaaattatgggcaaagcttcttggtattggccctgctttacgaattattgcttcaatgagcagagctgattgggctgcaaagttgaagcattggaaggatgaatttatttctacactgcagcattattggttgggcactaagctactctgggcagatgttagaatctcatcaaggctgttagttaaacttgctagtggaaagagcctcacaagacgagagaggcagcagctcacacgcacaacagcagatctattcaggctagtaccttttgcagtttttattatcgttccattcatggagctcttgctgccagtgttcctcaagttgttcccaaacatgttgccatccactttccaggacaaaatgaaagaagaggaggccctaaaaaggaaactgaaagcaaggatggaatatgcaaagtttttacaagacactgctaaagaaatggcgaaggaagttcaaacatcacgcagtggagaaatgaaacagactgctgaagatctggatgagttcttgaataaggttaggaaaggtgggcatgcctccaatgacgaaattttgagctttgcaaagctatttaatgacgagctgactttggataacatgagcagaccacggcttgttaatatgtgtaaatacatggggatccaaccttttggcacagaccactacttgcgattcatgcttcggaagaaactacaagacattaagaatgatgataagatgattcaagctgagggtgtggagtctctttctgaatatgagcttcgacaagcatgtcgtgagcgtgggcaccttggtttgttgtcaacagaggagatgcgtcaacaggaagaggagaaaaggcaagagaaagatgacaaggcaaaactggaggagccaaaggctactgaagaagatttggctttgaaggaaatgactgagcctactgttagggagaaagaggaactaaagaaagcaaaaacccacgataagaaagagcagctttgtaatatcagtcaagcattggctgtgcttgcatctgtttcttctgttaccaaggagcgacaagagtttttaagccttgtcaacaaggagatagaactatataataacatgctcgcaaaggagggtacagatggtgaagaagaagccaggagagcgtacaaggctgctagggaggaatcagaccatgctgcagaggcagctgtgggagaaaaggtctcttcagctttgattgatagggttgatgctatgcttcaaaagttagaaaaggagattgatgatgttgatgctcgaattggcaatcgctggcagctgctggatagggactgcgatggcaaggtgactcctgaagaggtagctgcagctgcaaattatctcaaagacaccataggagcagaaggcgtccaggagcttatcagcaatctttctaaagacaacgaagggaatatccttgtggaagacattgtgaagctggcgtcacaaacagaggaaaacaacgaagctgaagaaactgcacgatgatttggaatagcagccacattcttggctcttaaaactcgacggtccattccttttttaaaaggaaccgcacataataaagctagttcctggcagtctcatgcaaaaatcaccaagcaggatggtcattctttttgttctgactggcggctgcagagaaaattgtatcctgctgttgaaagatattcatttatacagttaagtcccagcacaaccgatcgttaggttaggaattctgtccgaaatggcaacttgcatttcaaacgtctgccatgaaaatgagaataaattcggcgggctctacagatttttcatctattgtctgaacaaaagtataggcatcaaataagtatctgggtaagtttatactatttgaataagaatcagctggatttgtttaaattcttaacaagaccgttttagcagtttgactatatggtcaatcaaaacactattttgtattgtatattgtactatgtgcacttttgcagtgagatttaaatatgggtatagagatagat

SEQ ID NO: 20085 - DNA, 3072 bp, Zea Mays
cgcaggcagtcactttgcggcgagacgcttgtgtcgctcctttccaccctcagtctcagtcctctcatgatctcattccccaatcggcgacatttccagcaatttggtagtttcccacgcaggctgcgcgcaagcaaccatcccacccctcttccgcggcagtccactgcctcccggaaaatcccacctcgctccgatccaacccgtccccgcaaccagcgcagccgccgcgacggggtccgactcccggccgatctcccgcctccaccagcgccacggattgccagcatttccccttgctacctgacacccgcagagagctaaaatagctctcctggctaagcaagcttcccggggcatgtgccgataagtgttctacctggaagggcatgattctggagtttccttgagaaagggagtaagtgctcaaggatggcctcaagggctatcatcaggaggaggaatgacattctacggcacactcatgtgcctattttgtccccttcattcactagcacaattgggcaaggacaatttgattgtgaggttgatcatcaaagatctgtatgttacttttcaaaggaaagtttagcagattctaatcatgctatggcacattgtactttaaataagcgaaagctttgtcatctcagtagcggtttcgcatggcatccagcttgtgaggtttctcttcctacttatggttctagagcacagaactttgtattcccattgggagtcaggtgtttcctgcagtcagtccgcaccacatcaaacacaactgcacagggtcaagttcatattatggacaagaagagtgaggatgagaagcagaagcaacaaaaaaaggaggcatcccctgaagaatgtgatcaggcagtggaaggattaagcactgcaaaagcgaaagcaaaagctaagctggaggaagtgcaaaagactgaccaatcagtggtacagaaattatgggcaaagcttcttggtattggccctgctttacgaattattgcttcaatgagcagagctgattgggctgcaaagttgaagcattggaaggatgaatttatttctacactgcagcattattggttgggcactaagctactctgggcagatgttagaatctcatcaaggctgttagttaaacttgctagtggaaagagcctcacaagacgagagaggcagcagctcacacgcacaacagcagatctattcaggaggccctaaaaaggaaactgaaagcaaggatggaatatgcaaagtttttacaagacactgctaaagaaatggcgaaggaagttcaaacatcacgcagtggagaaatgaaacagactgctgaagatctggatgagttcttgaataaggtttgcgcttcatatgcttaatcccttgatcataccagttggctgatcatccgtattctgcagaccacggcttgttaatatgtgtaaatacatggggatccaaccttttggcacagaccactacttgcgattcatgcttcggaagaaactacaagacattaagaatgatgataagatgattcaagctgagggtgtggagtctctttctgaatatgagcttcgacaagcatgtcgtgagcgtgggcaccttggtttgttgtcaacagaggagatgcgtcaacagagactggctggatctatcactcaatcattctgtgccatcgtctcttctaatactctcaagagcttttactgtatctggtaaaatgaaacctgaggaggccgttgtagcaaccttatcttccctgccagatgaagttgtcgatacagttgggactgtactgccttctgaagattctgtttcagagaggaagagaaaattggaatttctggagatgcaggaagagcttatcaaggaagaggagaaaaggcaagagaaagatgacaaggcaaaactggaggagccaaaggctactgaagaagatttggctttgaaggaaatgactgagcctactgttagggagaaagaggaactaaagaaagcaaaaacccacgataagaaagagcagctttgtaatatcagtcaagcattggctgtgcttgcatctgtttcttctgttaccaaggagcgacaagagtttttaagccttgtcaacaaggagatagaactatataataacatgctcgcaaaggagggtacagatggtgaagaagaagccaggagagcgtacaaggctgctagggaggaatcagaccatgctgcagaggcagctgtgggagaaaaggtctcttcagctttgattgatagggttgatgctatgcttcaaaagttagaaaaggagattgatgatgttgatgctcgaattggcaatcgctggcagctgctggatagggactgcgatggcaaggtgactcctgaagaggtagctgcagctgcaaattatctcaaagacaccataggagcagaaggcgtccaggagcttatcagcaatctttctaaagacaacgaagggaatatccttgtggaagacattgtgaagctggcgtcacaaacagaggaaaacaacgaagctgaagaaactgcacgatgatttggaatagcagccacattcttggctcttaaaactcgacggtccattccttttttaaaaggaaccgcacataataaagctagttcctggcagtctcatgcaaaaatcaccaagcaggatggtcattctttttgttctgactggcggctgcagagaaaattgtatcctgctgttgaaagatattcatttatacagttaagtcccagcacaaccgatcgttaggttaggaattctgtccgaaatggcaacttgcatttcaaacgtctgccatgaaaatgagaataaattcggcgggctctacagatttttcatctattgtctgaacaaaagtataggcatcaaataagtatctgggtaagtttatactatttgaataagaatcagctggatttgtttaaattcttaacaagaccgttttagcagtttgactatatggtcaatcaaaacactattttgtattgtatattgtactatgtgcacttttgcagtgagatttaaatatgggtatagagatagat

SEQ ID NO: 20086 - DNA, 3075 bp, Zea Mays
cgcaggcagtcactttgcggcgagacgcttgtgtcgctcctttccaccctcagtctcagtcctctcatgatctcattccccaatcggcgacatttccagcaatttggtagtttcccacgcaggctgcgcgcaagcaaccatcccacccctcttccgcggcagtccactgcctcccggaaaatcccacctcgctccgatccaacccgtccccgcaaccagcgcagccgccgcgacggggtccgactcccggccgatctcccgcctccaccagcgccacgtgttctacctggaagggcatgattctggagtttccttgagaaagggagtaagtgctcaaggatggcctcaagggctatcatcaggaggaggaatgacattctacggcacactcatgtgcctattttgtccccttcattcactagcacaattgggcaaggacaatttgattgtgaggttgatcatcaaagatctgtatgttacttttcaaaggaaagtttagcagattctaatcatgctatggcacattgtactttaaataagcgaaagctttgtcatctcagtagcggtttcgcatggcatccagcttgtgaggtttctcttcctacttatggttctagagcacagaactttgtattcccattgggagtcaggtgtttcctgcagtcagtccgcaccacatcaaacacaactgcacagggtcaagttcatattatggacaagaagagtgaggatgagaagcagaagcaacaaaaaaaggaggcatcccctgaagaatgtgatcaggcagtggaaggattaagcactgcaaaagcgaaagcaaaagctaagctggaggaagtgcaaaagactgaccaatcagtggtacagaaattatgggcaaagcttcttggtattggccctgctttacgaattattgcttcaatgagcagagctgattgggctgcaaagttgaagcattggaaggatgaatttatttctacactgcagcattattggttgggcactaagctactctgggcagatgttagaatctcatcaaggctgttagttaaacttgctagtggaaagagcctcacaagacgagagaggcagcagctcacacgcacaacagcagatctattcaggctagtaccttttgcagtttttattatcgttccattcatggagctcttgctgccagtgttcctcaagttgttcccaaacatgttgccatccactttccaggacaaaatgaaagaagaggaggccctaaaaaggaaactgaaagcaaggatggaatatgcaaagtttttacaagacactgctaaagaaatggcgaaggaagttcaaacatcacgcagtggagaaatgaaacagactgctgaagatctggatgagttcttgaataaggttaggaaaggtgggcatgcctccaatgacgaaattttgagctttgcaaagctatttaatgacgagctgactttggataacatgagcagaccactacttgcgattcatgcttcggaagaaactacaagacattaagaatgatgataagatgattcaagctgagggtgtggagtctctttctgaatatgagcttcgacaagcatgtcgtgagcgtgggcaccttggtttgttgtcaacagaggagatgcgtcaacagctcagagactggctggatctatcactcaatcattctgtgccatcgtctcttctaatactctcaagagcttttactgtatctggtaaaatgaaacctgaggaggccgttgtagcaaccttatcttccctgccagatgaagttgtcgatacagttgggactgtactgccttctgaagattctgtttcagagaggaagagaaaattggaatttctggagatgcaggaagagcttatcaaggaagaggagaaaaggcaagagaaagatgacaaggcaaaactggaggagccaaaggctactgaagaagatttggctttgaaggaaatgactgagcctactgttagggagaaagaggaactaaagaaagcaaaaacccacgataagaaagagcagctttgtaatatcagtcaagcattggctgtgcttgcatctgtttcttctgttaccaaggagcgacaagagtttttaagccttgtcaacaaggagatagaactatataataacatgctcgcaaaggagggtacagatggtgaagaagaagccaggagagcgtacaaggctgctagggaggaatcagaccatgctgcagaggcagctgtgggagaaaaggtctcttcagctttgattgatagggttgatgctatgcttcaaaagttagaaaaggagattgatgatgttgatgctcgaattggcaatcgctggcagctgctggatagggactgcgatggcaaggtgactcctgaagaggtagctgcagctgcaaattatctcaaagacaccataggagcagaaggcgtccaggagcttatcagcaatctttctaaagacaacgaagggaatatccttgtggaagacattgtgaagctggcgtcacaaacagaggaaaacaacgaagctgaagaaactgcacgatgatttggaatagcagccacattcttggctcttaaaactcgacggtccattccttttttaaaaggaaccgcacataataaagctagttcctggcagtctcatgcaaaaatcaccaagcaggatggtcattctttttgttctgactggcggctgcagagaaaattgtatcctgctgttgaaagatattcatttatacagttaagtcccagcacaaccgatcgttaggttaggaattctgtccgaaatggcaacttgcatttcaaacgtctgccatgaaaatgagaataaattcggcgggctctacagatttttcatctattgtctgaacaaaagtataggcatcaaataagtatctgggtaagtttatactatttgaataagaatcagctggatttgtttaaattcttaacaagaccgttttagcagtttgactatatggtcaatcaaaacactattttgtattgtatattgtactatgtgcacttttgcagtgagatttaaatatgggtatagagatagat

SEQ ID NO: 20087 - DNA, 3221 bp, Zea Mays
cgcaggcagtcactttgcggcgagacgcttgtgtcgctcctttccaccctcagtctcagtcctctcatgatctcattccccaatcggcgacatttccagcaatttggtagtttcccacgcaggctgcgcgcaagcaaccatcccacccctcttccgcggcagtccactgcctcccggaaaatcccacctcgctccgatccaacccgtccccgcaaccagcgcagccgccgcgacggggtccgactcccggccgatctcccgcctccaccagcgccacggattgccagcatttccccttgctacctgacacccgcagagagctaaaatagctctcctggctaagcaagcttcccggggcatgtgccgataagtgttctacctggaagggcatgattctggagtttccttgagaaagggagtaagtgctcaaggatggcctcaagggctatcatcaggaggaggaatgacattctacggcacactcatgtgcctattttgtccccttcattcactagcacaattgggcaaggacaatttgattgtgaggttgatcatcaaagatctgtatgttacttttcaaaggaaagtttagcagattctaatcatgctatggcacattgtactttaaataagcgaaagctttgtcatctcagtagcggtttcgcatggcatccagcttgtgaggtttctcttcctacttatggttctagagcacagaactttgtattcccattgggagtcaggtgtttcctgcagtcagtccgcaccacatcaaacacaactgcacagggtcaagttcatattatggacaagaagagtgaggatgagaagcagaagcaacaaaaaaaggaggcatcccctgaagaatgtgatcaggcagtggaaggattaagcactgcaaaagcgaaagcaaaagctaagctggaggaagtgcaaaagactgaccaatcagtggtacagaaattatgggcaaagcttcttggtattggccctgctttacgaattattgcttcaatgagcagagctgattgggctgcaaagttgaagcattggaaggatgaatttatttctacactgcagcattattggttgggcactaagctactctgggcagatgttagaatctcatcaaggctgttagttaaacttgctagtggaaagagcctcacaagacgagagaggcagcagctcacacgcacaacagcagatctattcaggctagtaccttttgcagtttttattatcgttccattcatggagctcttgctgccagtgttcctcaagttgttcccaaacatgttgccatccactttccaggacaaaatgaaagaagaggaggccctaaaaaggaaactgaaagcaaggatggaatatgcaaagtttttacaagacactgctaaagaaatggcgaaggaagttcaaacatcacgcagtggagaaatgaaacagactgctgaagatctggatgagttcttgaataaggttaggaaaggtgggcatgcctccaatgacgaaattttgagctttgcaaagctatttaatgacgagctgactttggataacatgagcagaccacggcttgttaatatgtgtaaatacatggggatccaaccttttggcacagaccactacttgcgattcatgcttcggaagaaactacaagacattaagaatgatgataagatgattcaagctgagggtgtggagtctctttctgaatatgagcttcgacaagcatgtcgtgagcgtgggcaccttggtttgttgtcaacagaggagatgcgtcaacagctcagagactggctggatctatcactcaatcattctgtgccatcgtctcttctaatactctcaagagcttttactgtatctggtaaaatgaaacctgaggaggccgttgtagcaaccttatcttccctgccagatgaagttgtcgatacagttgggactgtactgccttctgaagattctgtttcagagaggaagagaaaattggaatttctggagatgcaggaagagcttatcaaggaagaggagaaaaggcaagagaaagatgacaaggcaaaactggaggagccaaaggctactgaagaagatttggctttgaaggaaatgactgagcctactgttagggagaaagaggaactaaagaaagcaaaaacccacgataagaaagagcagctttgtaatatcagtcaagcattggctgtgcttgcatctgtttcttctgttaccaaggagcgacaagagtttttaagccttgtcaacaaggagatagaactatataataacatgctcgcaaaggagggtacagatggtgaagaagaagccaggagagcgtacaaggctgctagggaggaatcagaccatgctgcagaggcagctgtgggagaaaaggtctcttcagctttgattgatagggttgatgctatgcttcaaaagttagaaaaggagattgatgatgttgatgctcgaattggcaatcgctggcagctgctggatagggactgcgatggcaaggtgactcctgaagaggtagctgcagctgcaaattatctcaaagacaccataggagcagaaggcgtccaggagcttatcagcaatctttctaaagacaacgaagggaatatccttgtggaagacattgtgaagctggcgtcacaaacagaggaaaacaacgaagctgaagaaactgcacgatgatttggaatagcagccacattcttggctcttaaaactcgacggtccattccttttttaaaaggaaccgcacataataaagctagttcctggcagtctcatgcaaaaatcaccaagcaggatggtcattctttttgttctgactggcggctgcagagaaaattgtatcctgctgttgaaagatattcatttatacagttaagtcccagcacaaccgatcgttaggttaggaattctgtccgaaatggcaacttgcatttcaaacgtctgccatgaaaatgagaataaattcggcgggctctacagatttttcatctattgtctgaacaaaagtataggcatcaaataagtatctgggtaagtttatactatttgaataagaatcagctggatttgtttaaattcttaacaagaccgttttagcagtttgactatatggtcaatcaaaacactattttgtattgtatattgtactatgtgcacttttgcagtgagatttaaatatgggtatagagatagat

SEQ ID NO: 20088 - DNA, 2848 bp, Zea Mays
cagcatttccccttgctacctgacacccgcagagagctaaaatagctctcctggctaagcaagcttcccggggcatgtgccgataagtgttctacctggaagggcatgattctggagtttccttgagaaagggagtaagtgctcaaggatggcctcaagggctatcatcaggaggaggaatgacattctacggcacactcatgtgcctattttgtccccttcattcactagcacaattgggcaaggacaatttgattgtgaggttgatcatcaaagatctgtatgttacttttcaaaggaaagtttagcagattctaatcatgctatggcacattgtactttaaataagcgaaagctttgtcatctcagtagcggtttcgcatggcatccagcttgtgaggtttctcttcctacttatggttctagagcacagaactttgtattcccattgggagtcaggtgtttcctgcagtcagtccgcaccacatcaaacacaactgcacagggtcaagttcatattatggacaagaagagtgaggatgagaagcagaagcaacaaaaaaaggaggcatcccctgaagaatgtgatcaggcagtggaaggattaagcactgcaaaagcgaaagcaaaagctaagctggaggaagtgcaaaagactgaccaatcagtggtacagaaattatgggcaaagcttcttggtattggccctgctttacgaattattgcttcaatgagcagagctgattgggctgcaaagttgaagcattggaaggatgaatttatttctacactgcagcattattggttgggcactaagctactctgggcagatgttagaatctcatcaaggctgttagttaaacttgctagtggaaagagcctcacaagacgagagaggcagcagctcacacgcacaacagcagatctattcaggctagtaccttttgcagtttttattatcgttccattcatggagctcttgctgccagtgttcctcaagttgttcccaaacatgttgccatccactttccaggacaaaatgaaagaagaggaggccctaaaaaggaaactgaaagcaaggatggaatatgcaaagtttttacaagacactgctaaagaaatggcgaaggaagttcaaacatcacgcagtggagaaatgaaacagactgctgaagatctggatgagttcttgaataagaccacggcttgttaatatgtgtaaatacatggggatccaaccttttggcacagaccactacttgcgattcatgcttcggaagaaactacaagacattaagaatgatgataagatgattcaagctgagggtgtggagtctctttctgaatatgagcttcgacaagcatgtcgtgagcgtgggcaccttggtttgttgtcaacagaggagatgcgtcaacagctcagagactggctggatctatcactcaatcattctgtgccatcgtctcttctaatactctcaagagcttttactgtatctggtaaaatgaaacctgaggaggccgttgtagcaaccttatcttccctgccagatgaagttgtcgatacagttgggactgtactgccttctgaagattctgtttcagagaggaagagaaaattggaatttctggagatgcaggaagagcttatcaaggaagaggagaaaaggcaagagaaagatgacaaggcaaaactggaggagccaaaggctactgaagaagatttggctttgaaggaaatgactgagcctactgttagggagaaagaggaactaaagaaagcaaaaacccacgataagaaagagcagctttgtaatatcagtcaagcattggctgtgcttgcatctgtttcttctgttaccaaggagcgacaagagtttttaagccttgtcaacaaggagatagaactatataataacatgctcgcaaaggagggtacagatggtgaagaagaagccaggagagcgtacaaggctgctagggaggaatcagaccatgctgcagaggcagctgtgggagaaaaggtctcttcagctttgattgatagggttgatgctatgcttcaaaagttagaaaaggagattgatgatgttgatgctcgaattggcaatcgctggcagctgctggatagggactgcgatggcaaggtgactcctgaagaggtagctgcagctgcaaattatctcaaagacaccataggagcagaaggcgtccaggagcttatcagcaatctttctaaagacaacgaagggaatatccttgtggaagacattgtgaagctggcgtcacaaacagaggaaaacaacgaagctgaagaaactgcacgatgatttggaatagcagccacattcttggctcttaaaactcgacggtccattccttttttaaaaggaaccgcacataataaagctagttcctggcagtctcatgcaaaaatcaccaagcaggatggtcattctttttgttctgactggcggctgcagagaaaattgtatcctgctgttgaaagatattcatttatacagttaagtcccagcacaaccgatcgttaggttaggaattctgtccgaaatggcaacttgcatttcaaacgtctgccatgaaaatgagaataaattcggcgggctctacagatttttcatctattgtctgaacaaaagtataggcatcaaataagtatctgggtaagtttatactatttgaataagaatcagctggatttgtttaaattcttaacaagaccgttttagcagtttgactatatggtcaatcaaaacactattttgtattgtatattgtactatgtgcacttttgcagtgagatttaaatatgggtatagagatagat

SEQ ID NO: 20089 - DNA, 2593 bp, Zea Mays
agtaagtgctcaaggatggcctcaagggctatcatcaggaggaggaatgacattctacggcacactcatgtgcctattttgtccccttcattcactagcacaattgggcaaggacaatttgattgtgaggttgatcatcaaagatctgtatgttacttttcaaaggaaagtttagcagattctaatcatgctatggcacattgtactttaaataagcgaaagctttgtcatctcagtagcggtttcgcatggcatccagcttgtgaggtttctcttcctacttatggttctagagcacagaactttgtattcccattgggagtcaggtgtttcctgcagtcagtccgcaccacatcaaacacaactgcacagggtcaagttcatattatggacaagaagagtgaggatgagaagcagaagcaacaaaaaaaggaggcatcccctgaagaatgtgatcaggcagtggaaggattaagcactgcaaaagcgaaagcaaaagctaagctggaggaagtgcaaaagactgaccaatcagtggtacagaaattatgggcaaagcttcttggtattggccctgctttacgaattattgcttcaatgagcagagctgattgggctgcaaagttgaagcattggaaggatgaatttatttctacactgcagcattattggttgggcactaagctactctgggcagatgttagaatctcatcaaggctgttagttaaacttgctagtggaaagagcctcacaagacgagagaggcagcagctcacacgcacaacagcagatctattcaggaggccctaaaaaggaaactgaaagcaaggatggaatatgcaaagtttttacaagacactgctaaagaaatggcgaaggaagttcaaacatcacgcagtggagaaatgaaacagactgctgaagatctggatgagttcttgaataaggttaggaaaggtgggcatgcctccaatgacgaaattttgagctttgcaaagctatttaatgacgagctgactttggataacatgagcagcattaagaatgatgataagatgattcaagctgagggtgtggagtctctttctgaatatgagcttcgacaagcatgtcgtgagcgtgggcaccttggtttgttgtcaacagaggagatgcgtcaacagctcagagactggctggatctatcactcaatcattctgtgccatcgtctcttctaatactctcaagagcttttactgtatctggtaaaatgaaacctgaggaggccgttgtagcaaccttatcttccctgccagatgaagttgtcgatacagttgggactgtactgccttctgaagattctgtttcagagaggaagagaaaattggaatttctggagatgcaggaagagcttatcaaggaagaggagaaaaggcaagagaaagatgacaaggcaaaactggaggagccaaaggctactgaagaagatttggctttgaaggaaatgactgagcctactgttagggagaaagaggaactaaagaaagcaaaaacccacgataagaaagagcagctttgtaatatcagtcaagcattggctgtgcttgcatctgtttcttctgttaccaaggagcgacaagagtttttaagccttgtcaacaaggagatagaactatataataacatgctcgcaaaggagggtacagatggtgaagaagaagccaggagagcgtacaaggctgctagggaggaatcagaccatgctgcagaggcagctgtgggagaaaaggtctcttcagctttgattgatagggttgatgctatgcttcaaaagttagaaaaggagattgatgatgttgatgctcgaattggcaatcgctggcagctgctggatagggactgcgatggcaaggtgactcctgaagaggtagctgcagctgcaaattatctcaaagacaccataggagcagaaggcgtccaggagcttatcagcaatctttctaaagacaacgaagggaatatccttgtggaagacattgtgaagctggcgtcacaaacagaggaaaacaacgaagctgaagaaactgcacgatgatttggaatagcagccacattcttggctcttaaaactcgacggtccattccttttttaaaaggaaccgcacataataaagctagttcctggcagtctcatgcaaaaatcaccaagcaggatggtcattctttttgttctgactggcggctgcagagaaaattgtatcctgctgttgaaagatattcatttatacagttaagtcccagcacaaccgatcgttaggttaggaattctgtccgaaatggcaacttgcatttcaaacgtctgccatgaaaatgagaataaattcggcgggctctacagatttttcatctattgtctgaacaaaagtataggcatcaaataagtatctgggtaagtttatactatttgaataagaatcagctggatttgtttaaattcttaacaagaccgttttagcagtttgactatatggtcaatcaaaacactattttgtattgtatattgtactatgtgcacttttgcagtgagatttaaatatgggtatagagatagat

SEQ ID NO: 20090 - DNA, 2702 bp, Zea Mays
atggcctcaagggctatcatcaggaggaggaatgacattctacggcacactcatgtgcctattttgtccccttcattcactagcacaattgggcaaggacaatttgattgtgaggttgatcatcaaagatctgtatgttacttttcaaaggaaagtttagcagattctaatcatgctatggcacattgtactttaaataagcgaaagctttgtcatctcagtagcggtttcgcatggcatccagcttgtgaggtttctcttcctacttatggttctagagcacagaactttgtattcccattgggagtcaggtgtttcctgcagtcagtccgcaccacatcaaacacaactgcacagggtcaagttcatattatggacaagaagagtgaggatgagaagcagaagcaacaaaaaaaggaggcatcccctgaagaatgtgatcaggcagtggaaggattaagcactgcaaaagcgaaagcaaaagctaagctggaggaagtgcaaaagactgaccaatcagtggtacagaaattatgggcaaagcttcttggtattggccctgctttacgaattattgcttcaatgagcagagctgattgggctgcaaagttgaagcattggaaggatgaatttatttctacactgcagcattattggttgggcactaagctactctgggcagatgttagaatctcatcaaggctgttagttaaacttgctagtggaaagagcctcacaagacgagagaggcagcagctcacacgcacaacagcagatctattcaggctagtaccttttgcagtttttattatcgttccattcatggagctcttgctgccagtgttcctcaagttgttcccaaacatgttgccatccactttccaggacaaaatgaaagaagaggaggccctaaaaaggaaactgaaagcaaggatggaatatgcaaagtttttacaagacactgctaaagaaatggcgaaggaagttcaaacatcacgcagtggagaaatgaaacagactgctgaagatctggatgagttcttgaataaggttaggaaaggtgggcatgcctccaatgacgaaattttgagctttgcaaagctatttaatgacgagctgactttggataacatgagcagcattaagaatgatgataagatgattcaagctgagggtgtggagtctctttctgaatatgagcttcgacaagcatgtcgtgagcgtgggcaccttggtttgttgtcaacagaggagatgcgtcaacagctcagagactggctggatctatcactcaatcattctgtgccatcgtctcttctaatactctcaagagcttttactgtatctggtaaaatgaaacctgaggaggccgttgtagcaaccttatcttccctgccagatgaagttgtcgatacagttgggactgtactgccttctgaagattctgtttcagagaggaagagaaaattggaatttctggagatgcaggaagagcttatcaaggtaatagaagaggagaaaaggcaagagaaagatgacaaggcaaaactggaggagccaaaggctactgaagaagatttggctttgaaggaaatgactgagcctactgttagggagaaagaggaactaaagaaagcaaaaacccacgataagaaagagcagctttgtaatatcagtcaagcattggctgtgcttgcatctgtttcttctgttaccaaggagcgacaagagtttttaagccttgtcaacaaggagatagaactatataataacatgctcgcaaaggagggtacagatggtgaagaagaagccaggagagcgtacaaggctgctagggaggaatcagaccatgctgcagaggcagctgtgggagaaaaggtctcttcagctttgattgatagggttgatgctatgcttcaaaagttagaaaaggagattgatgatgttgatgctcgaattggcaatcgctggcagctgctggatagggactgcgatggcaaggtgactcctgaagaggtagctgcagctgcaaattatctcaaagacaccataggagcagaaggcgtccaggagcttatcagcaatctttctaaagacaacgaagggaatatccttgtggaagacattgtgaagctggcgtcacaaacagaggaaaacaacgaagctgaagaaactgcacgatgatttggaatagcagccacattcttggctcttaaaactcgacggtccattccttttttaaaaggaaccgcacataataaagctagttcctggcagtctcatgcaaaaatcaccaagcaggatggtcattctttttgttctgactggcggctgcagagaaaattgtatcctgctgttgaaagatattcatttatacagttaagtcccagcacaaccgatcgttaggttaggaattctgtccgaaatggcaacttgcatttcaaacgtctgccatgaaaatgagaataaattcggcgggctctacagatttttcatctattgtctgaacaaaagtataggcatcaaataagtatctgggtaagtttatactatttgaataagaatcagctggatttgtttaaattcttaacaagaccgttttagcagtttgactatatggtcaatcaaaacactattttgtattgtatattgtactatgtgcacttttgcagtgagatttaaatatgggtatagagatagat

SEQ ID NO: 20091 - DNA, 1749 bp, Zea Mays
cttcttgcatgcttagttaggaaaggtgggcatgcctccaatgacgaaattttgagctttgcaaagctatttaatgacgagctgactttggataacatgagcagaccacggcttgttaatatgtgtaaatacatggggatccaaccttttggcacagaccactacttgcgattcatgcttcggaagaaactacaagacattaagaatgatgataagatgattcaagctgagggtgtggagtctctttctgaatatgagcttcgacaagcatgtcgtgagcgtgggcaccttggtttgttgtcaacagaggagatgcgtcaacagagactggctggatctatcactcaatcattctgtgccatcgtctcttctaatactctcaagagcttttactgtatctggtaaaatgaaacctgaggaggccgttgtagcaaccttatcttccctgccagatgaagttgtcgatacagttgggactgtactgccttctgaagattctgtttcagagaggaagagaaaattggaatttctggagatgcaggaagagcttatcaaggaagaggagaaaaggcaagagaaagatgacaaggcaaaactggaggagccaaaggctactgaagaagatttggctttgaaggaaatgactgagcctactgttagggagaaagaggaactaaagaaagcaaaaacccacgataagaaagagcagctttgtaatatcagtcaagcattggctgtgcttgcatctgtttcttctgttaccaaggagcgacaagagtttttaagccttgtcaacaaggagatagaactatataataacatgctcgcaaaggagggtacagatggtgaagaagaagccaggagagcgtacaaggctgctagggaggaatcagaccatgctgcagaggcagctgtgggagaaaaggtctcttcagctttgattgatagggttgatgctatgcttcaaaagttagaaaaggagattgatgatgttgatgctcgaattggcaatcgctggcagctgctggatagggactgcgatggcaaggtgactcctgaagaggtagctgcagctgcaaattatctcaaagacaccataggagcagaaggcgtccaggagcttatcagcaatctttctaaagacaacgaagggaatatccttgtggaagacattgtgaagctggcgtcacaaacagaggaaaacaacgaagctgaagaaactgcacgatgatttggaatagcagccacattcttggctcttaaaactcgacggtccattccttttttaaaaggaaccgcacataataaagctagttcctggcagtctcatgcaaaaatcaccaagcaggatggtcattctttttgttctgactggcggctgcagagaaaattgtatcctgctgttgaaagatattcatttatacagttaagtcccagcacaaccgatcgttaggttaggaattctgtccgaaatggcaacttgcatttcaaacgtctgccatgaaaatgagaataaattcggcgggctctacagatttttcatctattgtctgaacaaaagtataggcatcaaataagtatctgggtaagtttatactatttgaataagaatcagctggatttgtttaaattcttaacaagaccgttttagcagtttgactatatggtcaatcaaaacactattttgtattgtatattgtactatgtgcacttttgcagtgagatttaaatatgggtatagagatagat

SEQ ID NO: 20092 - DNA, 1173 bp, Zea Mays
gtctgaagcccgctgaagagagtgccacccttgcaaaattctagaccaggagaaggaaagggatctccggtccccggctcaccacttccgattccaatctggtctcgctgggcctggccgctggcggcaagggagagatggggaagaaccaggcgtataaggcgatgcagcgggcgaggctggggtcctcgtccggcgcacctggcgccgccgacgcccccgaagacggcatgagtggcatgcggcgcgcctggccagccttaacaagacgcacaccgtcacctgggaggagttcaaaaagaagcagaaggaagaggaattgaaaaggggtgagctggaggctgacaaagataaaatgatgagagagtatagagctcaactggatgctgaaagagctcagaagctagcaaatggaagaaatcactggtccaactcaaagtcatcatattccaagaaagagaggaaggataaggatgcaaagaaaagaaataaaaagaggagaaagaagttcatcagagtcaagttccagcttatcgtcagaatcttccagcagcgatgatgaggataggggttcaaggaagtccagatcacgatctagttcgaagagaacaaagcaggaaaagaagcaccgatcaaggtccaagcacagagacagtgaaagtgaggaaggtccagttcgcctctctaaattcttcgggaagtaaggagtagatactgtacccaatacgccttttcattttgaaccgtagattggtgggtttggatgtaatattcaatacagattatttctgaaggttgatggaatcagttaccatgttctcaatagaatgctcaacagttaagagggtctggttaagttgtgtggcttcctaaaactttgtaaggaattggtaagtcattgttagattgctgtaccttagaggatttgatgtctatatttgaaatatttgataaatcgaactgctatatatatcttaaggcttcacatggccagtcacttgtttcggttatgctctcgttgaagcaacgtgatacaccaattcgacttcagatcaaaagactgaatactgcatcttagcaccatcactctagttatcaaccgtatagttggcctcgtctataaggttagttcctgtccgtgaaaaaaaaaacagcaaaataaaaaacacacaa

SEQ ID NO: 20093 - DNA, 1319 bp, Zea Mays
gtctgaagcccgctgaagagagtgccacccttgcaaaattctagaccaggagaaggaaagggatctccggtccccggctcaccacttccgattccaatctggtctcgctgggcctggccgctggcggcaagggagagatggggaagaaccaggcgtataaggcgatgcagcgggcgaggctggggtcctcgtccggcgcacctggcgccgccgacgcccccgaagacggcatggtcggtccccttcctctctcctagcagatctctgattgccatccgcacttccgagttccaggcttgcaatccatcctgatctcattatttccgcggccctattcgtacgctaatatatatgacggacggttcatttcattctccagagtggcatgcggcgcgcctggccagccttaacaagacgcacaccgtcacctgggaggagttcaaaaagaagcagaaggaagaggaattgaaaaggggtgagctggaggctgacaaagataaaatgatgagagagtatagagctcaactggatgctgaaagagctcagaagctagcaaatggaagaaatcactggtccaactcaaagtcatcatattccaagaaagagaggaaggataaggatgcaaagaaaagaaataaaaagaggagaaagaagttcatcagagtcaagttccagcttatcgtcagaatcttccagcagcgatgatgaggataggggttcaaggaagtccagatcacgatctagttcgaagagaacaaagcaggaaaagaagcaccgatcaaggtccaagcacagagacagtgaaagtgaggaaggtccagttcgcctctctaaattcttcgggaagtaaggagtagatactgtacccaatacgccttttcattttgaaccgtagattggtgggtttggatgtaatattcaatacagattatttctgaaggttgatggaatcagttaccatgttctcaatagaatgctcaacagttaagagggtctggttaagttgtgtggcttcctaaaactttgtaaggaattggtaagtcattgttagattgctgtaccttagaggatttgatgtctatatttgaaatatttgataaatcgaactgctatatatatcttaaggcttcacatggccagtcacttgtttcggttatgctctcgttgaagcaacgtgatacaccaattcgacttcagatcaaaagactgaatactgcatcttagcaccatcactctagttatcaaccgtatagttggcctcgtctataaggttagttcctgtccgtgaaaaaaaaaacagcaaaataaaaaacacacaa

SEQ ID NO: 20094 - DNA, 1610 bp, Zea Mays
gtaaatttttgtcacaaacaaagctaaaaaccaaaaaaaatcggtaagcgggtctggtagttcaaaacaaatgatgtcgtgtaactttgttgcacaacatgttacatggaatccctcaactgatcgactgccactatgtgatatcgggaagctaatacctaacgtatttattttaggaaaaaacatttaataaaatagttttgcatagtaagatgtgagacaaaggattaggaccagtattttcagcatcatccgccatctaaatattctaaaacacatgggtttccttgcaaaacagcaaggccacatcaactcagaaatctcgatcgttggatcgtcaaccgataaatcttcatcattggatggaggctcaacaatcatatgacgatactccagagtcttctggtatcggcagcccatggaagagtaaaagccaataaagaactctagaaaagggcgcctcagatccagacctcagatccatatctctaatcctctctgcttcggtgagatccttcgctagataaggaaaaccccagagtaggagctacagatctccaaaatctccattctcagtctgcatcggcgagttccttcgtaacccctctgctcccttgctcccgtcattgttttggaccagcttaaaagtcctcttgtatatatggttttttcagccaaaaaatagtctaaaatacatttcagcccaaaaatatggtccaaaagacctcctgcttgcagcgattgagtctggtgttggcgggctccctcattcgctcgttttaaatggcaatcaagaacaaagaaccagatcaatcgattccatcaatagttatatcaaggtaaatacactctttctatctatcttattttaataatcatgtgcttattttctctattatttcataaattccatatctaatacgatcccacttcaccgaatctcaaaattgggcagaccatccaatagaaaacgtaaaatatcaagtattagtataaataaagaacaagctttagaaaatagatataaaagaagaaacctcaatatctaaaaaaaatgcatatttagcaattccacaaggaatagtttatctatcacctgaatatatacaacacctgaaagaaacatatattgaaagatcatactttggaatggcaaactatacatgtaaatactgtagtgccatattttggtctcaagagagtctcaaacgtgcatcaaattacaaagacaaagaattagtttatacaaattgttgaaaacaaggcaagattgtcattccagcatttaaagcaccacctgaatttttaccaaatcttctaaaatataatggagataatcgttctaagaattttcttaataaaatcagacaatacaatagtcttttttgcatttacttccatgagtgctaacatagacaaatcaataaatcgtggacaaggaccatatatattttgtattaatggtcaagtccatcctcgtattggatgtctactaccaacacacaataatagaccaaaatttgtcgaattatatatatatatatgacaccgagaatgaaatttcaaatagaataggtgccttacaagaggatgaaaatgacatagatgac

SEQ ID NO: 20095 - DNA, 1371 bp, Zea Mays
ggctccccccgctgaaggctcaagtctcagtcccggctcaccgcagagttatctcactcggaggcgccagcgcgcgcgtgtataaataactgcgcctcactgctgcggtgcacggtgtccccctccctacccgctgtctgcggctggccaccctcatagcccccgagctctgtgtgcgacgatggactactcgggcaccaaggagtcgcctcctgccggggcttggtggtcgagggagacggtggccgtggtgaccggcgcgaaccgcggcatcggccacgcgctcgccgcccgcctggccgagcacggcctcaccgtggtgctcaccgcgcgggacggcgagcgcggggaggccgccgcggcgccgctcctcgcgcgcgggctcgccgtcgtcttccgcaggctcgacgtctccgaccccgcctccgtcgccgagttcgccgcgtggatccgcgacgccctcggcggcctcgacatcctggtgaacaacgcagccgtgtcgtttaacgagatcgacaccaactccgtggagcacgccgaggctgtcctcaggaccaacttctacggggccaagatgctcaccgaagcgctcctgccgctgttccggcagtcgtcggcgaccagcaggatcctcaacgtcagctcccagcttggccttctcaacaaggtgagcgacccgtcgctgagggcgctgctgctggacgaggacgggctgacggaggcggggatagaggcgatggtgtcgcggttcctggcgcaggtgaaggacgggacgtggggcgggcagggttggcccaaggtgtggacggactactcggtctccaagctggccctgaacgcctactcgcggctgctggcgcggcggctgcaggcgcgcggcgcgcgcgtgagcgtcaactgcttctgccccgggttcacgcgcacgggcatgaccaagggctgggggaagcgcaccgccgaggaggcggccgacgtcgccgcgcggctcgcgctgctggcgcccgccgagctccccacggggaccttcttcaagtggtgcacgccgcagctctactccaagctgtgactgtgactggatagctacgcctaccgtcgtcggcagtgtgtgcgtgcgctccgtgaacgctggagtatatatatatagttcggttcctttagctactctgctcagaagtcagaaacgggagtgtcgatctgccaaggtgctttcggttgaacacagctcgtttgtgacctctccgcaatgtaccatgtacctagttgtctaagatctaggtcaagaacaggtaccgcatgatgaggcgcatggaggatgctgtggcaagctcgtgagaggtctaggtcgtcgtctcccagtcaactttgggttgc

SEQ ID NO: 20096 - DNA, 1168 bp, Zea Mays
cagagacacggaacaacccctttctttttcttaattcctcatccactcgccgcacgacgaagagagcggctcccattccccaccacctactcggaccggagcagcagattctcgaagcgaccggtgaaacattctcgcgccaattgtgggggccatgggcgccaacggacacccgccggcgagcaccgtcgcgcagaacggatcccactctggcggaggcggaggagggggagggggagtgaaccctagcaacggcggcacgggggcggctcttcggcacgaccctggtctggcgcgggagtggtcgacggaggagcagaccatcctcgacgagctgctggtcaagtatgcatccgatttacccgttgttcgttatgcaaaagttgcaatgaagttgccagagaaaacagttcgggatgtagccttgcgctgcagatggatgaataaaaaggagagcgccaaaagaaagaaagaggatcacaactcgtctaagaaaagcaaggacaaaaaggagaaggtttcagattcttcgtcgaaaccacctgtgcatatggtgggtaggcctaatgttcctccataccctcttccagttcttccaatggacgatgatgaaatctcatccaaagccattggaggtccaacgggtgaaatacttgaaactaatgcccatgttttgggtcaaatttcgtcaaaccttagcaacatgcaggacaatatctctctgctctgccaaactcgcgataatatactcagggtcttgaaagagataaacgatgctccagatatcatgaagcagatgcccccgctacctgtgaagataaacgaggagctcgtcaactcgttgctccctagaccaactgtacctatgcagtagtgatagcaaaatgagcttttaagataggcagctgaaataaaaaaaaaaaggggcagccctggtacttttttgttcgttttgtagctccatcctctcgccttctgtattgtatgtttcgtctggatgcttatgtttgttccaaccttttgcaagtcaggcggttggaacgtgtaccaagttaccaagggctgcttccacataagtatcaggtcctgactctgttttgtaatctatagctgtttggtaatgccatggaatcggagtacactttagggtctgtttggttgggcggtg

SEQ ID NO: 20097 - DNA, 1162 bp, Zea Mays
cggaacaacccctttctttttcttaattcctcatccactcgccgcacgacgaagagagcggctcccattccccaccacctactcggaccggagcagcagattctcgaagcgaccggtgaaacattctcgcgccaattgtgggggccatgggcgccaacggacacccgccggcgagcaccgtcgcgcagaacggatcccactctggcggaggcggaggagggggagggggagtgaaccctagcaacggcggcacgggggcggctcttcggcacgaccctggtctggcgcgggagtggtcgacggaggagcagaccatcctcgacgagctgctggtcaagtatgcatccgatttacccgttgttcgttatgcaaaagttgcaatgaagttgccagagaaaacagttcgggatgtagccttgcgctgcagatggatgaataaaaaggagagcgccaaaagaaagaaagaggatcacaactcgtctaagaaaagcaaggacaaaaaggagaaggtttcagattcttcgtcgaaaccacctgtgcatatggtgggtaggcctaatgttcctccataccctcttccagttcttccaatggacgatgatgaaatctcatccaaagccattggaggtccaacgggtgaaatacttgaaactaatgcccatgttttgggtcaaatttcgtcaaaccttagcaacatatacaggacaatatctctctgctctgccaaactcgcgataatatactcagggtcttgaaagagataaacgatgctccagatatcatgaagcagatgcccccgctacctgtgaagataaacgaggagctcgtcaactcgttgctccctagaccaactgtacctatgcagtagtgatagcaaaatgagcttttaagataggcagctgaaataaaaaaaaaaaggggcagccctggtacttttttgttcgttttgtagctccatcctctcgccttctgtattgtatgtttcgtctggatgcttatgtttgttccaaccttttgcaagtcaggcggttggaacgtgtaccaagttaccaagggctgcttccacataagtatcaggtcctgactctgttttgtaatctatagctgtttggtaatgccatggaatcggagtacactttagggtctgtttggttgggcggtg

SEQ ID NO: 20098 - DNA, 893 bp, Zea Mays
ttggtagttatatagcacaaatcttacccacaagacaccattcaaaatgactgactggcatcaggtatgcatccgatttacccgttgttcgttatgcaaaagttgcaatgaagttgccagagaaaacagttcgggatgtagccttgcgctgcagatggatgaataaaaaggagagcgccaaaagaaagaaagaggatcacaactcgtctaagaaaagcaaggacaaaaaggagaaggtttcagattcttcgtcgaaaccacctgtgcatatggtgggtaggcctaatgttcctccataccctcttccagttcttccaatggacgatgatgaaatctcatccaaagccattggaggtccaacgggtgaaatacttgaaactaatgcccatgttttgggtcaaatttcgtcaaaccttagcaacatgcagatacaggacaatatctctctgctctgccaaactcgcgataatatactcagggtcttgaaagagataaacgatgctccagatatcatgaagcagatgcccccgctacctgtgaagataaacgaggagctcgtcaactcgttgctccctagaccaactgtacctatgcagtagtgatagcaaaatgagcttttaagataggcagctgaaataaaaaaaaaaaggggcagccctggtacttttttgttcgttttgtagctccatcctctcgccttctgtattgtatgtttcgtctggatgcttatgtttgttccaaccttttgcaagtcaggcggttggaacgtgtaccaagttaccaagggctgcttccacataagtatcaggtcctgactctgttttgtaatctatagctgtttggtaatgccatggaatcggagtacactttagggtctgtttggttgggcggtg

SEQ ID NO: 20099 - DNA, 1038 bp, Zea Mays
acacctcaaatcacctcacacaacaagctgcaccgcagcaacgaacacgaaccttggcagaacgaagctgaagtagttcgctgtgaacccagtatggcggcggaggcagtggcggtgcgaacgtggctaatgtggtcaccgacgcgttcttcaacggcatcaagaaccaggccgggagcgggtgcgagggcaagaacttctacacccggagcgcgttcctgagcgccgtcaacgcgtacccgggcttcgcccatggcgggacggaggtggagggcaagcgcgagatcgccgccttcttcgcgcacgtcacgcacgagaccggacatttctgctacatcagcgagatcaacaagagcaacgcctactgcgacgcgagcaacaggcagtggccgtgcgcggcggggcagaagtactacgggcgcggcccgctgcagatctcgtggaactacaactacgggcccgccgggagggacatcggcttcaacgggctcgccgaccccaacagggtggcgcaggacgccgtgatcgcgttcaagacggcgctctggttctggatgaacaacgtgcaccgtgtgatgccgcagggcttcggcgccaccatcagggccatcaacggcgccctcgagtgcaacgggaacaaccccgcccagatgaacgcgcgcgtcggctactacaagcagtactgccagcagctccgcgtcgacccagggcccaacctcacttgctaggcgacggcgtccacgttgtacccatggctcctgctagtgctagctcgtccacaataaatgctcggcgtcgcaccctcgcgaaaagtaaaccaagagtttactgactagtacgagctagctagcatgcagtaataataatcatcgtaataataataataaaacgactgggctgagccactttgttcgacctgaatgaataatgaagcaactgtatgttccctctgtacatagttgtgtatgcttgtgcttttactttccgtttgcagcatgggtctaacatcgaccgaatcaagaaatttcgagaataaca

SEQ ID NO: 20100 - DNA, 2367 bp, Zea Mays
cgccctccttaccctcttaagaaatagtagagatataaacggacggtcagggccggacctcttccctgatcccaccatcgtccatccttaaaaccctgcttgcctaaagcctcgtctcttccttcaattcttccccaacgcaggctcttcccccgcacagcagcatctttcttctcctcttcgcggcgcgtcctccgggttaaggaaaaaaaagcggggaaaagggagaagaatcgcacgtcccgccgccgcccgctctgctagtgctagctgctgctggtttggtcgtttcccggccgccgcgccggtgacgcagatcgacagctcctgcccatctcagagtccatcgccgctgatcctgcctgtgcctgcagcgaaacacgcgcggggcaaggacggagctggtaagccgatcgagccggcgagggtggacaagatgatgatggccgaggtggtggccaaccacagcaaaaggagccacaccgacggctacttcagtgccaaagccgccgtcgccgccgccgccgccgcgagcccgccagaggagttgggaagcatgcccatgtcctcgaagaagccgaggccgaggaatagcaacagcccgagaaccgcgcccgtatcgcccaaggagaagaaggacaggatcggcgagagagtcgcggcgctccagcagctagtgtcgccgttcgggaagacagacacggcttccgttctgcaggaggcctcggggtacatcaggttcctgcaccagcagctccaggtcctcagctccccttacatgcgtgctcctccggctgccggcgccgcgcctgaggatcccgagcactacagcctccggagccgcgggctgtgcctggtgccggtggaccagacactgcagctgacccagagcaacggggccgacctgtgggcgccggcgaacacgaccaggcgcaggtgaggaggagcctgctgccggcctgtgcctggtggtggtctgcccggaggaaaccgcgcaagtactactgctgtgtctgcatggtgcgcgtgtagtacagtttccaagcgcctgacccaattcgatctcctaacaagaagctaagcattaagcaagcgtgtccgtatcagccgccttgtattataccagtgacctgtcggcgccgtatatgtgtgatctgcttgctagctgatccacacagatggaagcggccctgaactgcgtctccatgtggtactagtactatgtaactatgtgtttactgacttgtgaactagcagtctgtggcctgtcagcaagtaaatgggggcagtttaatgcatgttccttgagatgccctctcaccatatccttctctttctctcagctgctgaaactgaaactgcacattcaggcaaggcagagcctaatgactgccgatgcgctcgtctccgaagttgtgaacttatgaccgtgcaaatctttcatgctgccacacgtcttgagtgtaaagctggcctgtggttgagattgtggcaagaaaaaaagaactcctgaacatgtacagaagcaaaattgggcacagaataaatagtgtctccctgtccttcaagttttaactattcgtttctgaattctgataaaaacggggctctgactctgagagcgcagagagtccaaactgaagtcagaatggtcattcatgaatttctttgcgaattcatgaatggccgttgtcactgttcgaggagaattcattcgagagaatgtggtctaagcaccatgattttgtactaataggctatactcattcgagagaacagagaagtaaagaggagaaagttagaggaagttgaatgacagaaattactttgtactgacgggcctcactcgcgcaccgttgagtcgagagccgaagcccaccatggttgggcttgggccttaccatgaccactgcactgcacgtctgcattgtacgaaactcgttcgatttctcgatcagtggagacggtagtacagtacagtgtactaccaagctttccacactggtgtttagatgcgaagtttaaccaaatcaaaacaaaagccgtttaatttctgtacgatgcaactgtgctgcattcatggacgacgaccgagcggacctaaaagtggggtcggacacgttacaaatctattgatggctatagagatctaggtaacacatctcatctctttgtctatttatacagcagtcgtctcttgattattattaatataattcctttttatctttcttataaagttttttatatttttagactatgctagtaataaacttacgttaagaaataaaatagacaccaaaatttacgtggaaaaatctcttccaatatggaggaccaaacaaccacgaggaccaaacaagttac

SEQ ID NO: 20101 - DNA, 880 bp, Zea Mays
caccgaccgatcgttgatcaaggctagggattagggaacacttacgagaagctcgagttgtagtcgatctcagcagtctcaaccatgacaacaacagggacactaaccaccaccgtgctcttctccacgaccggcccttgatgggaacacatctgagaacctgacgggagtagcggcagcctgcattttctgatctaaacttcctgtatgtgatcaagtgttctattgaagtggagcgacagcttggtacagtatgatctaaaagggttatcgatcttgtgtggtgagcttccgttatatactgcagagccagagtggggtcccttgaccattgtttctaaaaataacttcattagtcaatagtggaaatataagtgtaatattctgtaagcatgacattcatgaaatagatgtcctcactagatccttttgctacctaggcatagagacttgaacacaaaggatacaaaagcacttactatgaatttagtaacatcaatggagctagtaatagggccaaagagtccaaccttcgtgtacatcataaggatgaagccacacatgatgtcactgaccatcttgtgcagcacccgagctacactggcactcagcgcaccacaacaagcgcatccattacagatcatgtaatgcttagaatatattggatggacaagaaagggtcgccgttgtccgcgacttgtgacaggttcacggcctctggtcttgagttcttcgagacccacttcaggtaggagctcttttgggtgttaggcttcgccatgatgcttcccgaccctgagctcgctaagaggctggggctcgacattggggtgaagaactcctcaggctcgatgagggggacaaacttggtgaaagtgat

SEQ ID NO: 20102 - DNA, 723 bp, Zea Mays
agcaggcaaaaatcccagagaggccatatccacatccaagctgcatcaataacaacaataacaacaacaacaacaataattaaaccatgaagtgatcatataaaagttaaaaaatacccatagtgaaaatccaaggctaaatattgacaaaatataagaaactattctctccgatcaaaaatacacttgtcccatttgactttgcatggtcttcgatgcatatctttgaccactattttctttagaatatattattaaaagtttttcacattaataagattttgcaagcaattttttcaatacacttatagatatatgtttgcatgttttcagactaaataaattaaaagtatcaatatttgtagtttttaagtttgactaaatcttgtcctaaacgacatgttgttttatgaccagaggggggggggggtatatgactactgtaggttagttcgtcagtgccaatttagaaatgccatttaatagataaatgtcaaacttgaactgtctaacactaggcactatcattatgcatgcatccagattgtcctgctggagcatacattctgctcttatggaaagcaaaaacaggaatagacatcaagcagatcagtagtgagaaccaactaaatgaaataacaagctagatacataagttttctcacgagttacctctagaacccgcttgcccctgaagctcaactgcccatcacggatctcatt

SEQ ID NO: 20103 - DNA, 1320 bp, Zea Mays
ctacactttgcctttacatgagcaacatatatattatcttatcatcagctgctcttaccacagcatgctatccagagttccaaacaacaactccaatagaaatttcaaatccaagaacaacaaccagtaatgagatatctgctcttgtaaaactgacaatataaactattaatgacaaatcttcaaggcctccaactttatttctcaagaaattaatagagaaaatatatattaaatttacaccagaacatccatgaaaatcatgatgaaaacaaacttacaattttgtacagagttgcatgaaatgcgtggctttagcctcgttgaatcggcacataagcatcagatttggttctcaattgttgattaaactgcatcccttttccttccttaactcctgaaacatcatccacctccgcacctcctttgcctcctccaatcttccatgtgacgcatagatattagcaagcaggacatagttcccggtattacctggctcaatcacaaaaagcttcttggctacctccttacccatctcaaggtccctgtagttcatgcaagcccaaaggagttcgttaacatgttcaggtggagctttttcttgaatgaatgttcaagtgtaacttattgtttgatatattattacacatcaaatataccattatgatagttgcttctccagatgaaccacattttcatatttctattctcggggacatatcgtgtgcaatcactcatatctgtgcaatcgtgcaatcatccaatatgagacgttcaatctatatctgacggtagctatttcaggggggtttggcaaatttcaacggtgtgtgaggtgaaagaatataaatataacggcagttaccattggatacatatttaatgtttcagattcgttgattgcacaatgcacatgatattttaccattaaatgtagatagtaaaatgtagatagtaccgttatctagacaggttgagtagtgtctttctacagtcaacaagaaggcagaggaagctacctttagaagttgatgaataaactgggtaacatccttgcctgtaattggaatagatctgatactgctcccaatgacaaccatcagcaaccggagtgcaagttctttaatccaatcgatgagtgcaagatcaccttgcgtgcaaatataatttaggaacaaaatagtcgtgaaatcaaacataaatcacttacaataaaaacaatacaaattgatccatacggtactatggaagttatcatctcaccgttactcgcatttctagcaaaaattttctgcagatagcatctttctaatttccaac

SEQ ID NO: 20104 - DNA, 926 bp, Zea Mays
cgtactgcaggcactgcaccgcgattcgcccgagctgcatgcaggtcgacaaggttaggtacggttctgcagaagaaaagttttcgtgtgtagaaaattgttatgggttaagagagaccttgacagctccagcaggaggatactgatcaccaagttgcggatcgatgcattcctgaaccctgtcttccgtcagcatcggagttgcctgatgcatcaacatgatcaggaaatcgccagacgttttttttttctctcccattttttggtgctcgttggggttggggttattccatccagggtgcatcaacattattggttatagcactcggagggcaagctccatcgatttttaatctggggtctagaactttcttgaagttgaacaaagaaaacacattttgatcagtttgacagaatgccacccaaatcttccacttgtgtctaggaaagtacctctttcgatcgattctcagctgggttaggtaagaatgcggtgattagtagtaggatacactaactggttgcaattattccagtttggtttcgcgtttatttttcactgtttgattgatgcggactatcattttggttgccttcagattacgtaactaataatggaatcagagtcagggggtgggtgacctacaagtattcgataattcttacccagttcaccaggcttcgctggcccggcggcaacgtccggtccaatggcttcctacccgtcaggagctccaggagaacgatgccgaagctgtacacgtcgctcttgtccgtcatctggcccgtcatggcgtacctgaaggaacaaccacgaatccgtcagagacccacccgacccgatcccaaacatgaaacagcagtgctgtgctgctacacgaactgaaggcacgtactcgggcgcctggtagccgaaggaaccgagc

SEQ ID NO: 20105 - DNA, 4049 bp, Zea Mays
tagctgtgcagtccgaccacgcctacggcaaaatggcgtcgcacacccagttcatggctgcagcaattcatttactgaatacggcggtaacgtatgctttagagtcatcactgcggacagcctgagtccaccccccgtccctttccctctcctacctccacctccacgacaacaagcaaatccccatccagttccaaaccctaactcaaatgctcgctttgactgcctcagcctcatccgcttcgtcccatccttatcgccacgcctccgcgcacactcgtcgcccccgcctacgtgcggtcctcgcgatggcgggctccgacgacccccgtgcagcgcccgccagatcggtcgccgtcgtcggcgccggggtcagcgggctcgcggcggcgtacaggctcagacagagcggcgtgaacgtaacggtgttcgaagcggccgacagggcgggaggaaagatacggaccaattccgagggcgggtttgtctgggatgaaggagctaacaccatgacagaaggtgaatgggaggccagtagactgattgatgatcttggtctacaagacaaacagcagtatcctaactcccaacacaagcgttacattgtcaaagatggagcaccagcactgattccttcggatcccatttcgctaatgaaaagcagtgttctttcgacaaaatcaaaggtatgttcagccattgagtacaaactgccgagtgccgactaacaaaatgtcataacattgctagtatcaatgcctaccatcatcaattgaagtagtttgttagttactttaaggtaactacttgataaattcttatattcctccatttatttttccttcaagctatgtgtttatgatctgcggtgattatgtcattttattctaaaaaaaactcgacctgcggagggtaagacaacccctggacattatattaagaagaccttctcaagtgggttgagaaaaccctcaaacccctgctccacccatacacagcggcaccgtagcccatgtgagaatgacagcgattggggccatgcattagacctgtgctttggcgtgggacggacgaggggatttcccccgaacccctgccgtagcccatgtgagaatgaccgcaactagggccggacattagacttgtgctttagcgtggaacagatgaggagatttccccccgaacctctgccacacccatacacaacggcactgtagcccatatgagaatgaccgcgaccagagccggacattagacatgttctttggcgtgggacagacgagtggaatttttaaccttagattgaaattcactctcacagggagttgaactcaggacatgagggtgctactcagaccacgtaaccaactcagttagaggccttcgtatgtcattatgttttaactgaattatgttttatctgtggctctttgaagattgcgttattttttgaaccatttctctacaagaaagctaacacaagaaactctggaaaagtgtctgaggagcacttgagtgagaggtgaaccttcgtattcttcgtgtcttgcattgatatgaaatttaaaattgcaatcatatatcaatatatcatactagtattattttctttaagtaagtcttgagctatgcgttatacctatcgattcctcattattttcaaattctgaaaatcaatattatggtatcccatataatatacaccattgcagtgttctcttttgagtgtagagaactagagataatagaattatcttgtttgaaaacatttgcagtgttgggagcttctgtgaacgccactttggaagagaagttgttgactattttgttgatccatttgtagctggaacaagtgcaggagatccagagtcactatctattcgtcatgcattcccagcattgtggaatttggaaagaaagtatggttcagttattgttggtgccatcttgtctaagctagcagctaaaggtgatccagtaaagacaagacatgattcatcagggaaaagaaggaatagacgagtgtcgttttcatttcatggtggaatgcaggtattctcctccattgtttttttccaattagaatcccttgattgaattccttttgtctgttttattactatcaaatattttaatttggagcccttgaaattttcatcagccctactaattttgttggtgccgtttaaaaatggtgagttcagatttcagactgcaagttatttatttgttaaactcaaggatattacttcacaatgagtatcactttaacacttagaaaagctattagtgtgtggtactgtggttatgctttacattcatatccaactcaaggattctgttacatcctaccataatcattctttgtagacatgatacatgcttattagcttgcgaagatatgtgttttgagcaaataaattgaagtgaaaatatatcttttaaacaaactatatgtttttgacattgcagatagtttgcatggaagcagtgatgagtcctgaatatactcatctatcatgagaaatacaaacaaatctagatttttatacttactttggctccttatcccttacccactctatggaatgcatgttttatagcattcaagtatacatactgtctgacatttcacatttatgttgttaagttatatgttttgttttcctggctgagtaagttcaaaagttctttgttatttcagtcactaataaatgcacttcacaatgaagttggagatgataatgtgaagcttggtacagaagtgttgtcattggcatgtacatttgatggagttcctgcactaggcaggtggtcaatttctgttgattcgaaggatagcggtgacaaggaccttgctagtaaccaaacctttgatgctgttataatgacagctccattgtcaaatgtccggaggatgaagttcacaaaaggtggagctccggttgttcttgactttcttcctaagatggattatctaccactatctctcatggtgactgcttttaagaaggatgatgtcaagaaacctctggaaggatttggggtcttaataccttacaaggaacagcaaaaacatggtctgaaaacccttgggactctcttttcctcaatgatgttcccagatcgagctcctgatgaccaatatttatatacaacatttgttgggggtagccacaatagagatcttgctggagctccaacgtctattctgaaacaacttgtgacctctgaccttaaaaaactcttgggcgtagaggggcaaccaacttttgtcaagcatgtatactggggaaatgcttttcctttgtatggccatgattatagttctgtattggaagctatagaaaagatggagaaaaaccttccagggttcttctacgcaggaaataacaaggatgggcttgctgttggaagtgttatagcttcaggaagcaaggctgctgaccttgcaatctcatatcttgaatctcacaccaagcataataattcacattgaaagcgtctgacctatcctctagcagttgtcgacaaatttgtccagttcatgtacagtagaaaccgatgcgttgcagtctcagaacatcttcacttcagatattaacccttcgttgaacatccaccagaaaggtagtcacatgtgtaagtcggaaaatgaggttaaaaactattatggtggccgaaatgctcttttttgttttcctcacaagtggcctacgacacttgatgttggaaatacatttaaatttgttgaattgtttgagaacacatgcgtgacgtgtaatatttgcctattgtgattttagcagtagattctttgccagattatgctttacgcctttacagtgacctaggagtcaagggccccacatattatatttatttaccactgctttccttgagtaatttgtaccaaaagaagcaacgaccatctcatccgaaacttcagtgattctatcactctacagttatcttcgtgtgccattgtttgttttgtgtagtgaaaacctacacttgcggtcatcaacaaccattgtcacttctatcag

SEQ ID NO: 20106 - DNA, 3306 bp, Zea Mays
gtatgctttagagtcatcactgcggacagcctgagtccaccccccgtccctttccctctcctacctccacctccacgacaacaagcaaatccccatccagttccaaaccctaactcaaatgctcgctttgactgcctcagcctcatccgcttcgtcccatccttatcgccacgcctccgcgcacactcgtcgcccccgcctacgtgcggtcctcgcgatggcgggctccgacgacccccgtgcagcgcccgccagatcggtcgccgtcgtcggcgccggggtcagcgggctcgcggcggcgtacaggctcagacagagcggcgtgaacgtaacggtgttcgaagcggccgacagggcgggaggaaagatacggaccaattccgagggcgggtttgtctgggatgaaggagctaacaccatgacagaaggtgaatgggaggccagtagactgattgatgatcttggtctacaagacaaacagcagtatcctaactcccaacacaagcgttacattgtcaaagatggagcaccagcactgattccttcggatcccatttcgctaatgaaaagcagtgttctttcgacaaaatcaaaggtatgttcagccattgagtacaaactgccgagtgccgactaacaaaatgtcataacattgctagtatcaatgcctaccatcatcaattgaagtagtttgttagttactttaaggtaactacttgataaattcttatattcctccatttatttttccttcaagctatgtgtttatgatctgcggtgattatgtcattttattctaaaaaaaactcgacctgcggagggtaagacaacccctggacattatattaagaagaccttctcaagtgggttgagaaaaccctcaaacccctgctccacccatacacagcggcaccgtagcccatgtgagaatgacagcgattggggccatgcattagacctgtgctttggcgtgggacggacgaggggatttcccccgaacccctgccgtagcccatgtgagaatgaccgcaactagggccggacattagacttgtgctttagcgtggaacagatgaggagatttccccccgaacctctgccacacccatacacaacggcactgtagcccatatgagaatgaccgcgaccagagccggacattagacatgttctttggcgtgggacagacgagtggaatttttaaccttagattgaaattcactctcacagggagttgaactcaggacatgagggtgctactcagaccacgtaaccaactcagttagaggccttcgtatgtcattatgttttaactgaattatgttttatctgtggctctttgaagattgcgttattttttgaaccatttctctacaagaaagctaacacaagaaactctggaaaagtgtctgaggagcacttgagtgagaggtgaaccttcgtattcttcgtgtcttgcattgatatgaaatttaaaattgcaatcatatatcaatatatcatactagtattattttctttaagtaagtcttgagctatgcgttatacctatcgattcctcattattttcaaattctgaaaatcaatattatggtatcccatataatatacaccattgcagtgttctcttttgagtgtagagaactagagataatagaattatcttgtttgaaaacatttgcagtgttgggagcttctgtgaacgccactttggaagagaagttgttgactattttgttgatccatttgtagctggaacaagtgcaggagatccagagtcactatctattcgtcatgcattcccagcattgtggaatttggaaagaaagtatggttcagttattgttggtgccatcttgtctaagctagcagctaaaggtgatccagtaaagacaagacatgattcatcagggaaaagaaggaatagacgagtgtcgttttcatttcatggtggaatgcagtcactaataaatgcacttcacaatgaagttggagatgataatgtgaagcttggtacagaagtgttgtcattggcatgtacatttgatggagttcctgcactaggcaggtggtcaatttctgttgattcgaaggatagcggtgacaaggaccttgctagtaaccaaacctttgatgctgttataatgacagctccattgtcaaatgtccggaggatgaagttcacaaaaggtggagctccggttgttcttgactttcttcctaagatggattatctaccactatctctcatggtgactgcttttaagaaggatgatgtcaagaaacctctggaaggatttggggtcttaataccttacaaggaacagcaaaaacatggtctgaaaacccttgggactctcttttcctcaatgatgttcccagatcgagctcctgatgaccaatatttatatacaacatttgttgggggtagccacaatagagatcttgctggagctccaacgtctattctgaaacaacttgtgacctctgaccttaaaaaactcttgggcgtagaggggcaaccaacttttgtcaagcatgtatactggggaaatgcttttcctttgtatggccatgattatagttctgtattggaagctatagaaaagatggagaaaaaccttccagggttcttctacgcaggaaataacaaggatgggcttgctgttggaagtgttatagcttcaggaagcaaggctgctgaccttgcaatctcatatcttgaatctcacaccaagcataataattcacattgaaagcgtctgacctatcctctagcagttgtcgacaaatttgtccagttcatgtacagtagaaaccgatgcgttgcagtctcagaacatcttcacttcagatattaacccttcgttgaacatccaccagaaaggtagtcacatgtgtaagtcggaaaatgaggttaaaaactattatggtggccgaaatgctcttttttgttttcctcacaagtggcctacgacacttgatgttggaaatacatttaaatttgttgaattgtttgagaacacatgcgtgacgtgtaatatttgcctattgtgattttagcagtagattctttgccagattatgctttacgcctttacagtgacctaggagtcaagggccccacatattatatttatttaccactgctttccttgagtaatttgtaccaaaagaagcaacgaccatctcatccgaaacttcagtgattctatcactctacagttatcttcgtgtgccattgtttgttttgtgtagtgaaaacctacacttgcggtcatcaacaaccattgtcacttctatcag

SEQ ID NO: 20107 - DNA, 2858 bp, Zea Mays
gtatgctttagagtcatcactgcggacagcctgagtccaccccccgtccctttccctctcctacctccacctccacgacaacaagcaaatccccatccagttccaaaccctaactcaaatgctcgctttgactgcctcagcctcatccgcttcgtcccatccttatcgccacgcctccgcgcacactcgtcgcccccgcctacgtgcggtcctcgcgatggcgggctccgacgacccccgtgcagcgcccgccagatcggtcgccgtcgtcggcgccggggtcagcgggctcgcggcggcgtacaggctcagacagagcggcgtgaacgtaacggtgttcgaagcggccgacagggcgggaggaaagatacggaccaattccgagggcgggtttgtctgggatgaaggagctaacaccatgacagaaggtgaatgggaggccagtagactgattgatgatcttggtctacaagacaaacagcacctaactcccaacacaagcgttacattgtcaaagatggagcaccagcactggtaaaagggctttgatgtaatcatgcatgtctctcttttcgtcatgtattctgcctcacttttgaatatcctgccttttggtctcataagattccttcggatcccatttcgctaatgaaaagcagtgttctttcgacaaaatcaaaggtatgttcagccattgagtacaaactgccgagtgccgactaacaaaatgtcataacattgctagtatcaatgcctaccatcatcaattgaagtagtttgttagttactttaaggtaactacttgataaattcttatattcctccatttatttttccttcaagctatgtgtttatgatctgcggtgattatgtcattttattctaaaaaaaactcgacctgcggagggtaagacaacccctggacattatattaagaagaccttctcaagtgggttgagaaaaccctcaaacccctgctccacccatacacagcggcaccgtagcccatgtgagaatgacagcgattggggccatgcattagacctgtgctttggcgtgggacggacgaggggatttcccccgaacccctgccgtagcccatgtgagaatgaccgcaactagggccggacattagacttgtgctttagcgtggaacagatgaggagatttccccccgaacctctgccacacccatacacaacggcactgtagcccatatgagaatgaccgcgaccagagccggacattagacatgttctttggcgtgggacagacgagtggaatttttaaccttagattgaaattcactctcacagggagttgaactcaggacatgagggtgctactcagaccacgtaaccaactcagttagaggccttcgtatgtcattatgttttaactgaattatgttttatctgtggctctttgaagattgcgttattttttgaaccatttctctacaagaaagctaacacaagaaactctggaaaagtgtctgaggagcacttgagtgagagtgttgggagcttctgtgaacgccactttggaagagaagttgttgactattttgttgatccatttgtagctggaacaagtgcaggagatccagagtcactatctattcgtcatgcattcccagcattgtggaatttggaaagaaagtatggttcagttattgttggtgccatcttgtctaagctagcagctaaaggtgatccagtaaagacaagacatgattcatcagggaaaagaaggaatagacgagtgtcgttttcatttcatggtggaatgcagtcactaataaatgcacttcacaatgaagttggagatgataatgtgaagcttggtacagaagtgttgtcattggcatgtacatttgatggagttcctgcactaggcaggtggtcaatttctgttgattcgaaggatagcggtgacaaggaccttgctagtaaccaaacctttgatgctgttataatgacagctccattgtcaaatgtccggaggatgaagttcacaaaaggtggagctccggttgttcttgactttcttcctaagatggattatctaccactatctctcatggtgactgcttttaagaaggatgatgtcaagaaacctctggaaggatttggggtcttaataccttacaaggaacagcaaaaacatggtctgaaaacccttgggactctcttttcctcaatgatgttcccagatcgagctcctgatgaccaatatttatatacaacatttgttgggggtagccacaatagagatcttgctggagctccaacgtctattctgaaacaacttgtgacctctgaccttaaaaaactcttgggcgtagaggggcaaccaacttttgtcaagcatgtatactggggaaatgcttttcctttgtatggccatgattatagttctgtattggaagctatagaaaagatggagaaaaaccttccagggttcttctacgcaggaaataacaaggatgggcttgctgttggaagtgttatagcttcaggaagcaaggctgctgaccttgcaatctcatatcttgaatctcacaccaagcataataattcacattgaaagcgtctgacctatcctctagcagttgtcgacaaatttgtccagttcatgtacagtagaaaccgatgcgttgcagtctcagaacatcttcacttcagatattaacccttcgttgaacatccaccagaaagtgaaaacctacacttgcggtcatcaacaaccattgtcacttctatcagactgtacagtagcaagtggtgtctgttgagtcgacaagtgaagcaggtcgatacctcgatctcgattgatcattcacaggtcagctagcg

SEQ ID NO: 20108 - DNA, 2939 bp, Zea Mays
gtcatcactgcggacagcctgagtccaccccccgtccctttccctctcctacctccacctccacgacaacaagcaaatccccatccagttccaaaccctaactcaaatgctcgctttgactgcctcagcctcatccgcttcgtcccatccttatcgccacgcctccgcgcacactcgtcgcccccgcctacgtgcggtcctcgcgatggcgggctccgacgacccccgtgcagcgcccgccagatcggtcgccgtcgtcggcgccggggtcagcgggctcgcggcggcgtacaggctcagacagagcggcgtgaacgtaacggtgttcgaagcggccgacagggcgggaggaaagatacggaccaattccgagggcgggtttgtctgggatgaaggagctaacaccatgacagaaggtgaatgggaggccagtagactgattgatgatcttggtctacaagacaaacagcagtatcctaactcccaacacaagcgttacattgtcaaagatggagcaccagcactgattccttcggatcccatttcgctaatgaaaagcagtgttctttcgacaaaatcaaaggtatgttcagccattgagtacaaactgccgagtgccgactaacaaaatgtcataacattgctagtatcaatgcctaccatcatcaattgaagtagtttgttagttactttaaggtaactacttgataaattcttatattcctccatttatttttccttcaagctatgtgtttatgatctgcggtgattatgtcattttattctaaaaaaaactcgacctgcggagggtaagacaacccctggacattatattaagaagaccttctcaagtgggttgagaaaaccctcaaacccctgctccacccatacacagcggcaccgtagcccatgtgagaatgacagcgattggggccatgcattagacctgtgctttggcgtgggacggacgaggggatttcccccgaacccctgccgtagcccatgtgagaatgaccgcaactagggccggacattagacttgtgctttagcgtggaacagatgaggagatttccccccgaacctctgccacacccatacacaacggcactgtagcccatatgagaatgaccgcgaccagagccggacattagacatgttctttggcgtgggacagacgagtggaatttttaaccttagattgaaattcactctcacagggagttgaactcaggacatgagggtgctactcagaccacgtaaccaactcagttagaggccttcgtatgtcattatgttttaactgaattatgttttatctgtggctctttgaagattgcgttattttttgaaccatttctctacaagaaagctaacacaagaaactctggaaaagtgtctgaggagcacttgagtgagagtgttgggagcttctgtgaacgccactttggaagagaagttgttgactattttgttgatccatttgtagctggaacaagtgcaggagatccagagtcactatctattcgtcatgcattcccagcattgtggaatttggaaagaaagtatggttcagttattgttggtgccatcttgtctaagctagcagctaaaggtgatccagtaaagacaagacatgattcatcagggaaaagaaggaatagacgagtgtcgttttcatttcatggtggaatgcaggtggtcaatttctgttgattcgaaggatagcggtgacaaggaccttgctagtaaccaaacctttgatgctgttataatgacagctccattgtcaaatgtccggaggatgaagttcacaaaaggtggagctccggttgttcttgactttcttcctaaggtcagatggattatctaccactatctctcatggtgactgcttttaagaaggatgatgtcaagaaacctctggaaggatttggggtcttaataccttacaaggaacagcaaaaacatggtctgaaaacccttgggactctcttttcctcaatgatgttcccagatcgagctcctgatgaccaatatttatatacaacatttgttgggggtagccacaatagagatcttgctggagctccaacgtctattctgaaacaacttgtgacctctgaccttaaaaaactcttgggcgtagaggggcaaccaacttttgtcaagcatgtatactggggaaatgcttttcctttgtatggccatgattatagttctgtattggaagctatagaaaagatggagaaaaaccttccagggttcttctacgcaggaaataacaaggatgggcttgctgttggaagtgttatagcttcaggaagcaaggctgctgaccttgcaatctcatatcttgaatctcacaccaagcataataattcacattgaaagcgtctgacctatcctctagcagttgtcgacaaatttgtccagttcatgtacagtagaaaccgatgcgttgcagtctcagaacatcttcacttcagatattaacccttcgttgaacatccaccagaaaggtagtcacatgtgtaagtcggaaaatgaggttaaaaactattatggtggccgaaatgctcttttttgttttcctcacaagtggcctacgacacttgatgttggaaatacatttaaatttgttgaattgtttgagaacacatgcgtgacgtgtaatatttgcctattgtgattttagcagtagattctttgccagattatgctttacgcctttacagtgacctaggagtcaagggccccacatattatatttatttaccactgctttccttgagtaatttgtaccaaaagaagcaacgaccatctcatccgaaacttcagtgattctatcactctacagttatcttcgtgtgccattgtttgttttgtgtagtgaaaacctacacttgcggtcatcaacaaccattgtcacttctatcag

SEQ ID NO: 20109 - DNA, 3037 bp, Zea Mays
gtcatcactgcggacagcctgagtccaccccccgtccctttccctctcctacctccacctccacgacaacaagcaaatccccatccagttccaaaccctaactcaaatgctcgctttgactgcctcagcctcatccgcttcgtcccatccttatcgccacgcctccgcgcacactcgtcgcccccgcctacgtgcggtcctcgcgatggcgggctccgacgacccccgtgcagcgcccgccagatcggtcgccgtcgtcggcgccggggtcagcgggctcgcggcggcgtacaggctcagacagagcggcgtgaacgtaacggtgttcgaagcggccgacagggcgggaggaaagatacggaccaattccgagggcgggtttgtctgggatgaaggagctaacaccatgacagaaggtgaatgggaggccagtagactgattgatgatcttggtctacaagacaaacagcagtatcctaactcccaacacaagcgttacattgtcaaagatggagcaccagcactgattccttcggatcccatttcgctaatgaaaagcagtgttctttcgacaaaatcaaaggtatgttcagccattgagtacaaactgccgagtgccgactaacaaaatgtcataacattgctagtatcaatgcctaccatcatcaattgaagtagtttgttagttactttaaggtaactacttgataaattcttatattcctccatttatttttccttcaagctatgtgtttatgatctgcggtgattatgtcattttattctaaaaaaaactcgacctgcggagggtaagacaacccctggacattatattaagaagaccttctcaagtgggttgagaaaaccctcaaacccctgctccacccatacacagcggcaccgtagcccatgtgagaatgacagcgattggggccatgcattagacctgtgctttggcgtgggacggacgaggggatttcccccgaacccctgccgtagcccatgtgagaatgaccgcaactagggccggacattagacttgtgctttagcgtggaacagatgaggagatttccccccgaacctctgccacacccatacacaacggcactgtagcccatatgagaatgaccgcgaccagagccggacattagacatgttctttggcgtgggacagacgagtggaatttttaaccttagattgaaattcactctcacagggagttgaactcaggacatgagggtgctactcagaccacgtaaccaactcagttagaggccttcgtatgtcattatgttttaactgaattatgttttatctgtggctctttgaagattgcgttattttttgaaccatttctctacaagaaagctaacacaagaaactctggaaaagtgtctgaggagcacttgagtgagagtgttgggagcttctgtgaacgccactttggaagagaagttgttgactattttgttgatccatttgtagctggaacaagtgcaggagatccagagtcactatctattcgtcatgcattcccagcattgtggaatttggaaagaaagtatggttcagttattgttggtgccatcttgtctaagctagcagctaaaggtgatccagtaaagacaagacatgattcatcagggaaaagaaggaatagacgagtgtcgttttcatttcatggtggaattcactaataaatgcacttcacaatgaagttggagatgataatgtgaagcttggtacagaagtgttgtcattggcatgtacatttgatggagttcctgcactaggcaggtggtcaatttctgttgattcgaaggatagcggtgacaaggaccttgctagtaaccaaacctttgatgctgttataatgacagctccattgtcaaatgtccggaggatgaagttcacaaaaggtggagctccggttgttcttgactttcttcctaagatggattatctaccactatctctcatggtgactgcttttaagaaggatgatgtcaagaaacctctggaaggatttggggtcttaataccttacaaggaacagcaaaaacatggtctgaaaacccttgggactctcttttcctcaatgatgttcccagatcgagctcctgatgaccaatatttatatacaacatttgttgggggtagccacaatagagatcttgctggagctccaacgtctattctgaaacaacttgtgacctctgaccttaaaaaactcttgggcgtagaggggcaaccaacttttgtcaagcatgtatactggggaaatgcttttcctttgtatggccatgattatagttctgtattggaagctatagaaaagatggagaaaaaccttccagggttcttctacgcaggaaataacaaggatgggcttgctgttggaagtgttatagcttcaggaagcaaggctgctgaccttgcaatctcatatcttgaatctcacaccaagcataataattcacattgaaagcgtctgacctatcctctagcagttgtcgacaaatttgtccagttcatgtacagtagaaaccgatgcgttgcagtctcagaacatcttcacttcagatattaacccttcgttgaacatccaccagaaaggtagtcacatgtgtaagtcggaaaatgaggttaaaaactattatggtggccgaaatgctcttttttgttttcctcacaagtggcctacgacacttgatgttggaaatacatttaaatttgttgaattgtttgagaacacatgcgtgacgtgtaatatttgcctattgtgattttagcagtagattctttgccagattatgctttacgcctttacagtgacctaggagtcaagggccccacatattatatttatttaccactgctttccttgagtaatttgtaccaaaagaagcaacgaccatctcatccgaaacttcagtgattctatcactctacagttatcttcgtgtgccattgtttgttttgtgtagtgaaaacctacacttgcggtcatcaacaaccattgtcacttctatcag

SEQ ID NO: 20110 - DNA, 3013 bp, Zea Mays
gtcatcactgcggacagcctgagtccaccccccgtccctttccctctcctacctccacctccacgacaacaagcaaatccccatccagttccaaaccctaactcaaatgctcgctttgactgcctcagcctcatccgcttcgtcccatccttatcgccacgcctccgcgcacactcgtcgcccccgcctacgtgcggtcctcgcgatggcgggctccgacgacccccgtgcagcgcccgccagatcggtcgccgtcgtcggcgccggggtcagcgggctcgcggcggcgtacaggctcagacagagcggcgtgaacgtaacggtgttcgaagcggccgacagggcgggaggaaagatacggaccaattccgagggcgggtttgtctgggatgaaggagctaacaccatgacagaaggtgaatgggaggccagtagactgattgatgatcttggtctacaagacaaacagcagtatcctaactcccaacacaagcgttacattgtcaaagatggagcaccagcactgattccttcggatcccatttcgctaatgaaaagcagtgttctttcgacaaaatcaaaggtatgttcagccattgagtacaaactgccgagtgccgactaacaaaatgtcataacattgctagtatcaatgcctaccatcatcaattgaagtagtttgttagttactttaaggtaactacttgataaattcttatattcctccatttatttttccttcaagctatgtgtttatgatctgcggtgattatgtcattttattctaaaaaaaactcgacctgcggagggtaagacaacccctggacattatattaagaagaccttctcaagtgggttgagaaaaccctcaaacccctgctccacccatacacagcggcaccgtagcccatgtgagaatgacagcgattggggccatgcattagacctgtgctttggcgtgggacggacgaggggatttcccccgaacccctgccgtagcccatgtgagaatgaccgcaactagggccggacattagacttgtgctttagcgtggaacagatgaggagatttccccccgaacctctgccacacccatacacaacggcactgtagcccatatgagaatgaccgcgaccagagccggacattagacatgttctttggcgtgggacagacgagtggaatttttaaccttagattgaaattcactctcacagggagttgaactcaggacatgagggtgctactcagaccacgtaaccaactcagttagaggccttcgtatgtcattatgttttaactgaattatgttttatctgtggctctttgaagattgcgttattttttgaaccatttctctacaagaaagctaacacaagaaactctggaaaagtgtctgaggagcacttgagtgagagtgttgggagcttctgtgaacgccactttggaagagaagttgttgactattttgttgatccatttgtagctggaacaagtgcaggagatccagagtcactatctattcgtcatgcattcccagcattgtggaatttggaaagaaagtatggttcagttattgttggtgccatcttgtctaagctagcagctaaaggtgatccagtaaagacaagacatgattcatcagggaaaagaaggaatagacgagtgtcgttttcatttcatggtggaatgcagttggagatgataatgtgaagcttggtacagaagtgttgtcattggcatgtacatttgatggagttcctgcactaggcaggtggtcaatttctgttgattcgaaggatagcggtgacaaggaccttgctagtaaccaaacctttgatgctgttataatgacagctccattgtcaaatgtccggaggatgaagttcacaaaaggtggagctccggttgttcttgactttcttcctaagatggattatctaccactatctctcatggtgactgcttttaagaaggatgatgtcaagaaacctctggaaggatttggggtcttaataccttacaaggaacagcaaaaacatggtctgaaaacccttgggactctcttttcctcaatgatgttcccagatcgagctcctgatgaccaatatttatatacaacatttgttgggggtagccacaatagagatcttgctggagctccaacgtctattctgaaacaacttgtgacctctgaccttaaaaaactcttgggcgtagaggggcaaccaacttttgtcaagcatgtatactggggaaatgcttttcctttgtatggccatgattatagttctgtattggaagctatagaaaagatggagaaaaaccttccagggttcttctacgcaggaaataacaaggatgggcttgctgttggaagtgttatagcttcaggaagcaaggctgctgaccttgcaatctcatatcttgaatctcacaccaagcataataattcacattgaaagcgtctgacctatcctctagcagttgtcgacaaatttgtccagttcatgtacagtagaaaccgatgcgttgcagtctcagaacatcttcacttcagatattaacccttcgttgaacatccaccagaaaggtagtcacatgtgtaagtcggaaaatgaggttaaaaactattatggtggccgaaatgctcttttttgttttcctcacaagtggcctacgacacttgatgttggaaatacatttaaatttgttgaattgtttgagaacacatgcgtgacgtgtaatatttgcctattgtgattttagcagtagattctttgccagattatgctttacgcctttacagtgacctaggagtcaagggccccacatattatatttatttaccactgctttccttgagtaatttgtaccaaaagaagcaacgaccatctcatccgaaacttcagtgattctatcactctacagttatcttcgtgtgccattgtttgttttgtgtagtgaaaacctacacttgcggtcatcaacaaccattgtcacttctatcag

SEQ ID NO: 20111 - DNA, 3693 bp, Zea Mays
gtcatcactgcggacagcctgagtccaccccccgtccctttccctctcctacctccacctccacgacaacaagcaaatccccatccagttccaaaccctaactcaaatgctcgctttgactgcctcagcctcatccgcttcgtcccatccttatcgccacgcctccgcgcacactcgtcgcccccgcctacgtgcggtcctcgcgatggcgggctccgacgacccccgtgcagcgcccgccagatcggtcgccgtcgtcggcgccggggtcagcgggctcgcggcggcgtacaggctcagacagagcggcgtgaacgtaacggtgttcgaagcggccgacagggcgggaggaaagatacggaccaattccgagggcgggtttgtctgggatgaaggagctaacaccatgacagaaggtgaatgggaggccagtagactgattgatgatcttggtctacaagacaaacagcagtatcctaactcccaacacaagcgttacattgtcaaagatggagcaccagcactgattccttcggatcccatttcgctaatgaaaagcagtgttctttcgacaaaatcaaaggtatgttcagccattgagtacaaactgccgagtgccgactaacaaaatgtcataacattgctagtatcaatgcctaccatcatcaattgaagtagtttgttagttactttaaggtaactacttgataaattcttatattcctccatttatttttccttcaagctatgtgtttatgatctgcggtgattatgtcattttattctaaaaaaaactcgacctgcggagggtaagacaacccctggacattatattaagaagaccttctcaagtgggttgagaaaaccctcaaacccctgctccacccatacacagcggcaccgtagcccatgtgagaatgacagcgattggggccatgcattagacctgtgctttggcgtgggacggacgaggggatttcccccgaacccctgccgtagcccatgtgagaatgaccgcaactagggccggacattagacttgtgctttagcgtggaacagatgaggagatttccccccgaacctctgccacacccatacacaacggcactgtagcccatatgagaatgaccgcgaccagagccggacattagacatgttctttggcgtgggacagacgagtggaatttttaaccttagattgaaattcactctcacagggagttgaactcaggacatgagggtgctactcagaccacgtaaccaactcagttagaggccttcgtatgtcattatgttttaactgaattatgttttatctgtggctctttgaagattgcgttattttttgaaccatttctctacaagaaagctaacacaagaaactctggaaaagtgtctgaggagcacttgagtgagagtgttgggagcttctgtgaacgccactttggaagagaagttgttgactattttgttgatccatttgtagctggaacaagtgcaggagatccagagtcactatctattcgtcatgcattcccagcattgtggaatttggaaagaaagtatggttcagttattgttggtgccatcttgtctaagctagcagctaaaggtgatccagtaaagacaagacatgattcatcagggaaaagaaggaatagacgagtgtcgttttcatttcatggtggaatgcaggtattctcctccattgtttttttccaattagaatcccttgattgaattccttttgtctgttttattactatcaaatattttaatttggagcccttgaaattttcatcagccctactaattttgttggtgccgtttaaaaatggtgagttcagatttcagactgcaagttatttatttgttaaactcaaggatattacttcacaatgagtatcactttaacacttagaaaagctattagtgtgtggtactgtggttatgctttacattcatatccaactcaaggattctgttacatcctaccataatcattctttgtagacatgatacatgcttattagcttgcgaagatatgtgttttgagcaaataaattgaagtgaaaatatatcttttaaacaaactatatgtttttgacattgcagatagtttgcatggaagcagtgatgagtcctgaatatactcatctatcatgagaaatacaaacaaatctagatttttatacttactttggctccttatcccttacccactctatggaatgcatgttttatagcattcaagtatacatactgtctgacatttcacatttatgttgttaagttatatgttttgttttcctggctgagtaagttcaaaagttctttgttatttcagtcactaataaatgcacttcacaatgaagttggagatgataatgtgaagcttggtacagaagtgttgtcattggcatgtacatttgatggagttcctgcactaggcaggtggtcaatttctgttgattcgaaggatagcggtgacaaggaccttgctagtaaccaaacctttgatgctgttataatgacagctccattgtcaaatgtccggaggatgaagttcacaaaaggtggagctccggttgttcttgactttcttcctaagatggattatctaccactatctctcatggtgactgcttttaagaaggatgatgtcaagaaacctctggaaggatttggggtcttaataccttacaaggaacagcaaaaacatggtctgaaaacccttgggactctcttttcctcaatgatgttcccagatcgagctcctgatgaccaatatttatatacaacatttgttgggggtagccacaatagagatcttgctggagctccaacgtctattctgaaacaacttgtgacctctgaccttaaaaaactcttgggcgtagaggggcaaccaacttttgtcaagcatgtatactggggaaatgcttttcctttgtatggccatgattatagttctgtattggaagctatagaaaagatggagaaaaaccttccagggttcttctacgcaggaaataacaaggatgggcttgctgttggaagtgttatagcttcaggaagcaaggctgctgaccttgcaatctcatatcttgaatctcacaccaagcataataattcacattgaaagcgtctgacctatcctctagcagttgtcgacaaatttgtccagttcatgtacagtagaaaccgatgcgttgcagtctcagaacatcttcacttcagatattaacccttcgttgaacatccaccagaaaggtagtcacatgtgtaagtcggaaaatgaggttaaaaactattatggtggccgaaatgctcttttttgttttcctcacaagtggcctacgacacttgatgttggaaatacatttaaatttgttgaattgtttgagaacacatgcgtgacgtgtaatatttgcctattgtgattttagcagtagattctttgccagattatgctttacgcctttacagtgacctaggagtcaagggccccacatattatatttatttaccactgctttccttgagtaatttgtaccaaaagaagcaacgaccatctcatccgaaacttcagtgattctatcactctacagttatcttcgtgtgccattgtttgttttgtgtagtgaaaacctacacttgcggtcatcaacaaccattgtcacttctatcag

SEQ ID NO: 20112 - DNA, 1025 bp, Zea Mays
gcctgagtccaccccccgtccctttccctctcctacctccacctccacgacaacaagcaaatccccatccagttccaaaccctaactcaaatgctcgctttgactgcctcagcctcatccgcttcgtcccatccttatcgccacgcctccgcgcacactcgtcgcccccgcctacgtgcggtcctcgcgatggcgggctccgacgacccccgtgcagcgcccgccagatcggtcgccgtcgtcggcgccggggtcagcgggctcgcggcggcgtacaggctcagacagagcggcgtgaacgtaacggtgttcgaagcggccgacagggcgggaggaaagatacggaccaattccgagggcgggtttgtctgggatgaaggagctaacaccatgacagaaggtgaatgggaggccagtagactgattgatgatcttggtctacaagacaaacagcacctaactcccaacacaagcgttacattgtcaaagatggagcaccagcactgattccttcggatcccatttcgctaatgaaaagcagtgttctttcgacaaaatcaaagattgcgttattttttgaaccatttctctacaagaaagctaacacaagaaactctggaaaagtgtctgaggagcacttgagtgagagtgttgggagcttctgtgaacgccactttggaagagaagttgttgactattttgttgatccatttgtagctggaacaagtgcaggagatccagagtcactatctattcgtcatgcattcccagcattgtggaatttggaaagaaagtatggttcagttattgttggtgccatcttgtctaagctagcagctaaaggtgatccagtaaagacaagacatgattcatcagggaaaagaaggaatagacgagtgtcgttttcatttcatggtggaatgcagccctactaattttgttggtgccgtttaaaaatggtgagttcagatttcagactgcaagttatttatttgttaaactcaaggatattacttcacaatgag

SEQ ID NO: 20113 - DNA, 2279 bp, Zea Mays
gcctgagtccaccccccgtccctttccctctcctacctccacctccacgacaacaagcaaatccccatccagttccaaaccctaactcaaatgctcgctttgactgcctcagcctcatccgcttcgtcccatccttatcgccacgcctccgcgcacactcgtcgcccccgcctacgtgcggtcctcgcgatggcgggctccgacgacccccgtgcagcgcccgccagatcggtcgccgtcgtcggcgccggggtcagcgggctcgcggcggcgtacaggctcagacagagcggcgtgaacgtaacggtgttcgaagcggccgacagggcgggaggaaagatacggaccaattccgagggcgggtttgtctgggatgaaggagctaacaccatgacagaaggtgaatgggaggccagtagactgattgatgatcttggtctacaagacaaacagcagtatcctaactcccaacacaagcgttacattgtcaaagatggagcaccagcactggtaaaagggctttgatgtaatcatgcatgtctctcttttcgtcatgtattctgcctcacttttgaatatcctgccttttggtctcataagattccttcggatcccatttcgctaatgaaaagcagtgttctttcgacaaaatcaaagtgttgggagcttctgtgaacgccactttggaagagaagttgttgactattttgttgatccatttgtagctggaacaagtgcaggagatccagagtcactatctattcgtcatgcattcccagcattgtggaatttggaaagaaagtatggttcagttattgttggtgccatcttgtctaagctagcagctaaaggtgatccagtaaagacaagacatgattcatcagggaaaagaaggaatagacgagtgtcgttttcatttcatggtggaatgcagtcactaataaatgcacttcacaatgaagttggagatgataatgtgaagcttggtacagaagtgttgtcattggcatgtacatttgatggagttcctgcactaggcaggtggtcaatttctgttgattcgaaggatagcggtgacaaggaccttgctagtaaccaaacctttgatgctgttataatgacagctccattgtcaaatgtccggaggatgaagttcacaaaaggtggagctccggttgttcttgactttcttcctaagatggattatctaccactatctctcatggtgactgcttttaagaaggatgatgtcaagaaacctctggaaggatttggggtcttaataccttacaaggaacagcaaaaacatggtctgaaaacccttgggactctcttttcctcaatgatgttcccagatcgagctcctgatgaccaatatttatatacaacatttgttgggggtagccacaatagagatcttgctggagctccaacgtctattctgaaacaacttgtgacctctgaccttaaaaaactcttgggcgtagaggggcaaccaacttttgtcaagcatgtatactggggaaatgcttttcctttgtatggccatgattatagttctgtattggaagctatagaaaagatggagaaaaaccttccagggttcttctacgcaggaaataacaaggatgggcttgctgttggaagtgttatagcttcaggaagcaaggctgctgaccttgcaatctcatatcttgaatctcacaccaagcataataattcacattgaaagcgtctgacctatcctctagcagttgtcgacaaatttgtccagttcatgtacagtagaaaccgatgcgttgcagtctcagaacatcttcacttcagatattaacccttcgttgaacatccaccagaaaggtagtcacatgtgtaagtcggaaaatgaggttaaaaactattatggtggccgaaatgctcttttttgttttcctcacaagtggcctacgacacttgatgttggaaatacatttaaatttgttgaattgtttgagaacacatgcgtgacgtgtaatatttgcctattgtgattttagcagtagattctttgccagattatgctttacgcctttacagtgacctaggagtcaagggccccacatattatatttatttaccactgctttccttgagtaatttgtaccaaaagaagcaacgaccatctcatccgaaacttcagtgattctatcactctacagttatcttcgtgtgccattgtttgttttgtgtagtgaaaacctacacttgcggtcatcaacaaccattgtcacttctatcag

SEQ ID NO: 20114 - DNA, 3020 bp, Zea Mays
cctgagtccaccccccgtccctttccctctcctacctccacctccacgacaacaagcaaatccccatccagttccaaaccctaactcaaatgctcgctttgactgcctcagcctcatccgcttcgtcccatccttatcgccacgcctccgcgcacactcgtcgcccccgcctacgtgcggtcctcgcgatggcgggctccgacgacccccgtgcagcgcccgccagatcggtcgccgtcgtcggcgccggggtcagcgggctcgcggcggcgtacaggctcagacagagcggcgtgaacgtaacggtgttcgaagcggccgacagggcgggaggaaagatacggaccaattccgagggcgggtttgtctgggatgaaggagctaacaccatgaaggtgaatgggaggccagtagactgattgatgatcttggtctacaagacaaacagcagtatcctaactcccaacacaagcgttacattgtcaaagatggagcaccagcactgattccttcggatcccatttcgctaatgaaaagcagtgttctttcgacaaaatcaaaggtatgttcagccattgagtacaaactgccgagtgccgactaacaaaatgtcataacattgctagtatcaatgcctaccatcatcaattgaagtagtttgttagttactttaaggtaactacttgataaattcttatattcctccatttatttttccttcaagctatgtgtttatgatctgcggtgattatgtcattttattctaaaaaaaactcgacctgcggagggtaagacaacccctggacattatattaagaagaccttctcaagtgggttgagaaaaccctcaaacccctgctccacccatacacagcggcaccgtagcccatgtgagaatgacagcgattggggccatgcattagacctgtgctttggcgtgggacggacgaggggatttcccccgaacccctgccgtagcccatgtgagaatgaccgcaactagggccggacattagacttgtgctttagcgtggaacagatgaggagatttccccccgaacctctgccacacccatacacaacggcactgtagcccatatgagaatgaccgcgaccagagccggacattagacatgttctttggcgtgggacagacgagtggaatttttaaccttagattgaaattcactctcacagggagttgaactcaggacatgagggtgctactcagaccacgtaaccaactcagttagaggccttcgtatgtcattatgttttaactgaattatgttttatctgtggctctttgaagattgcgttattttttgaaccatttctctacaagaaagctaacacaagaaactctggaaaagtgtctgaggagcacttgagtgagagtgttgggagcttctgtgaacgccactttggaagagaagttgttgactattttgttgatccatttgtagctggaacaagtgcaggagatccagagtcactatctattcgtcatgcattcccagcattgtggaatttggaaagaaagtatggttcagttattgttggtgccatcttgtctaagctagcagctaaaggtgatccagtaaagacaagacatgattcatcagggaaaagaaggaatagacgagtgtcgttttcatttcatggtggaatgcagtcactaataaatgcacttcacaatgaagttggagatgataatgtgaagcttggtacagaagtgttgtcattggcatgtacatttgatggagttcctgcactaggcaggtggtcaatttctgttgattcgaaggatagcggtgacaaggaccttgctagtaaccaaacctttgatgctgttataatgacagctccattgtcaaatgtccggaggatgaagttcacaaaaggtggagctccggttgttcttgactttcttcctaagatggattatctaccactatctctcatggtgactgcttttaagaaggatgatgtcaagaaacctctggaaggatttggggtcttaataccttacaaggaacagcaaaaacatggtctgaaaacccttgggactctcttttcctcaatgatgttcccagatcgagctcctgatgaccaatatttatatacaacatttgttgggggtagccacaatagagatcttgctggagctccaacgtctattctgaaacaacttgtgacctctgaccttaaaaaactcttgggcgtagaggggcaaccaacttttgtcaagcatgtatactggggaaatgcttttcctttgtatggccatgattatagttctgtattggaagctatagaaaagatggagaaaaaccttccagggttcttctacgcaggaaataacaaggatgggcttgctgttggaagtgttatagcttcaggaagcaaggctgctgaccttgcaatctcatatcttgaatctcacaccaagcataataattcacattgaaagcgtctgacctatcctctagcagttgtcgacaaatttgtccagttcatgtacagtagaaaccgatgcgttgcagtctcagaacatcttcacttcagatattaacccttcgttgaacatccaccagaaaggtagtcacatgtgtaagtcggaaaatgaggttaaaaactattatggtggccgaaatgctcttttttgttttcctcacaagtggcctacgacacttgatgttggaaatacatttaaatttgttgaattgtttgagaacacatgcgtgacgtgtaatatttgcctattgtgattttagcagtagattctttgccagattatgctttacgcctttacagtgacctaggagtcaagggccccacatattatatttatttaccactgctttccttgagtaatttgtaccaaaagaagcaacgaccatctcatccgaaacttcagtgattctatcactctacagttatcttcgtgtgccattgtttgttttgtgtagtgaaaacctacacttgcggtcatcaacaaccattgtcacttctatcag

SEQ ID NO: 20115 - DNA, 3020 bp, Zea Mays
cctgagtccaccccccgtccctttccctctcctacctccacctccacgacaacaagcaaatccccatccagttccaaaccctaactcaaatgctcgctttgactgcctcagcctcatccgcttcgtcccatccttatcgccacgcctccgcgcacactcgtcgcccccgcctacgtgcggtcctcgcgatggcgggctccgacgacccccgtgcagcgcccgccagatcggtcgccgtcgtcggcgccggggtcagcgggctcgcggcggcgtacaggctcagacagagcggcgtgaacgtaacggtgttcgaagcggccgacagggcgggaggaaagatacggaccaattccgagggcgggtttgtctgggatgaaggagctaacaccatgacagaaggtgaatgggaggccagtagactgattgatgatcttggtctacaagacaaacagcacctaactcccaacacaagcgttacattgtcaaagatggagcaccagcactgattccttcggatcccatttcgctaatgaaaagcagtgttctttcgacaaaatcaaaggtatgttcagccattgagtacaaactgccgagtgccgactaacaaaatgtcataacattgctagtatcaatgcctaccatcatcaattgaagtagtttgttagttactttaaggtaactacttgataaattcttatattcctccatttatttttccttcaagctatgtgtttatgatctgcggtgattatgtcattttattctaaaaaaaactcgacctgcggagggtaagacaacccctggacattatattaagaagaccttctcaagtgggttgagaaaaccctcaaacccctgctccacccatacacagcggcaccgtagcccatgtgagaatgacagcgattggggccatgcattagacctgtgctttggcgtgggacggacgaggggatttcccccgaacccctgccgtagcccatgtgagaatgaccgcaactagggccggacattagacttgtgctttagcgtggaacagatgaggagatttccccccgaacctctgccacacccatacacaacggcactgtagcccatatgagaatgaccgcgaccagagccggacattagacatgttctttggcgtgggacagacgagtggaatttttaaccttagattgaaattcactctcacagggagttgaactcaggacatgagggtgctactcagaccacgtaaccaactcagttagaggccttcgtatgtcattatgttttaactgaattatgttttatctgtggctctttgaagattgcgttattttttgaaccatttctctacaagaaagctaacacaagaaactctggaaaagtgtctgaggagcacttgagtgagagtgttgggagcttctgtgaacgccactttggaagagaagttgttgactattttgttgatccatttgtagctggaacaagtgcaggagatccagagtcactatctattcgtcatgcattcccagcattgtggaatttggaaagaaagtatggttcagttattgttggtgccatcttgtctaagctagcagctaaaggtgatccagtaaagacaagacatgattcatcagggaaaagaaggaatagacgagtgtcgttttcatttcatggtggaatgcagtcactaataaatgcacttcacaatgaagttggagatgataatgtgaagcttggtacagaagtgttgtcattggcatgtacatttgatggagttcctgcactaggcaggtggtcaatttctgttgattcgaaggatagcggtgacaaggaccttgctagtaaccaaacctttgatgctgttataatgacagctccattgtcaaatgtccggaggatgaagttcacaaaaggtggagctccggttgttcttgactttcttcctaagatggattatctaccactatctctcatggtgactgcttttaagaaggatgatgtcaagaaacctctggaaggatttggggtcttaataccttacaaggaacagcaaaaacatggtctgaaaacccttgggactctcttttcctcaatgatgttcccagatcgagctcctgatgaccaatatttatatacaacatttgttgggggtagccacaatagagatcttgctggagctccaacgtctattctgaaacaacttgtgacctctgaccttaaaaaactcttgggcgtagaggggcaaccaacttttgtcaagcatgtatactggggaaatgcttttcctttgtatggccatgattatagttctgtattggaagctatagaaaagatggagaaaaaccttccagggttcttctacgcaggaaataacaaggatgggcttgctgttggaagtgttatagcttcaggaagcaaggctgctgaccttgcaatctcatatcttgaatctcacaccaagcataataattcacattgaaagcgtctgacctatcctctagcagttgtcgacaaatttgtccagttcatgtacagtagaaaccgatgcgttgcagtctcagaacatcttcacttcagatattaacccttcgttgaacatccaccagaaaggtagtcacatgtgtaagtcggaaaatgaggttaaaaactattatggtggccgaaatgctcttttttgttttcctcacaagtggcctacgacacttgatgttggaaatacatttaaatttgttgaattgtttgagaacacatgcgtgacgtgtaatatttgcctattgtgattttagcagtagattctttgccagattatgctttacgcctttacagtgacctaggagtcaagggccccacatattatatttatttaccactgctttccttgagtaatttgtaccaaaagaagcaacgaccatctcatccgaaacttcagtgattctatcactctacagttatcttcgtgtgccattgtttgttttgtgtagtgaaaacctacacttgcggtcatcaacaaccattgtcacttctatcag

SEQ ID NO: 20116 - DNA, 2081 bp, Zea Mays
cctgagtccaccccccgtccctttccctctcctacctccacctccacgacaacaagcaaatccccatccagttccaaaccctaactcaaatgctcgctttgactgcctcagcctcatccgcttcgtcccatccttatcgccacgcctccgcgcacactcgtcgcccccgcctacgtgcggtcctcgcgatggcgggctccgacgacccccgtgcagcgcccgccagatcggtcgccgtcgtcggcgccggggtcagcgggctcgcggcggcgtacaggctcagacagagcggcgtgaacgtaacggtgttcgaagcggccgacagggcgggaggaaagatacggaccaattccgagggcgggtttgtctgggatgaaggagctaacaccatgacagaaggtgaatgggaggccagtagactgattgatgatcttggtctacaagacaaacagcagtatcctaactcccaacacaagcgttacattgtcaaagatggagcaccagcactgattccttcggatcccatttcgctaatgaaaagcagtgttctttcgacaaaatcaaagtgttgggagcttctgtgaacgccactttggaagagaagttgttgactattttgttgatccatttgtagctggaacaagtgcaggagatccagagtcactatctattcgtcatgcattcccagcattgtggaatttggaaagaaagtatggttcagttattgttggtgccatcttgtctaagctagcagctaaaggtgatccagtaaagacaagacatgattcatcagggaaaagaaggaatagacgagtgtcgttttcatttcatggtggaatgcaggtggtcaatttctgttgattcgaaggatagcggtgacaaggaccttgctagtaaccaaacctttgatgctgttataatgacagctccattgtcaaatgtccggaggatgaagttcacaaaaggtggagctccggttgttcttgactttcttcctaagatggattatctaccactatctctcatggtgactgcttttaagaaggatgatgtcaagaaacctctggaaggatttggggtcttaataccttacaaggaacagcaaaaacatggtctgaaaacccttgggactctcttttcctcaatgatgttcccagatcgagctcctgatgaccaatatttatatacaacatttgttgggggtagccacaatagagatcttgctggagctccaacgtctattctgaaacaacttgtgacctctgaccttaaaaaactcttgggcgtagaggggcaaccaacttttgtcaagcatgtatactggggaaatgcttttcctttgtatggccatgattatagttctgtattggaagctatagaaaagatggagaaaaaccttccagggttcttctacgcaggaaataacaaggatgggcttgctgttggaagtgttatagcttcaggaagcaaggctgctgaccttgcaatctcatatcttgaatctcacaccaagcataataattcacattgaaagcgtctgacctatcctctagcagttgtcgacaaatttgtccagttcatgtacagtagaaaccgatgcgttgcagtctcagaacatcttcacttcagatattaacccttcgttgaacatccaccagaaaggtagtcacatgtgtaagtcggaaaatgaggttaaaaactattatggtggccgaaatgctcttttttgttttcctcacaagtggcctacgacacttgatgttggaaatacatttaaatttgttgaattgtttgagaacacatgcgtgacgtgtaatatttgcctattgtgattttagcagtagattctttgccagattatgctttacgcctttacagtgacctaggagtcaagggccccacatattatatttatttaccactgctttccttgagtaatttgtaccaaaagaagcaacgaccatctcatccgaaacttcagtgattctatcactctacagttatcttcgtgtgccattgtttgttttgtgtagtgaaaacctacacttgcggtcatcaacaaccattgtcacttctatcag

SEQ ID NO: 20117 - DNA, 2290 bp, Zea Mays
cctgagtccaccccccgtccctttccctctcctacctccacctccacgacaacaagcaaatccccatccagttccaaaccctaactcaaatgctcgctttgactgcctcagcctcatccgcttcgtcccatccttatcgccacgcctccgcgcacactcgtcgcccccgcctacgtgcggtcctcgcgatggcgggctccgacgacccccgtgcagcgcccgccagatcggtcgccgtcgtcggcgccggggtcagcgggctcgcggcggcgtacaggctcagacagagcggcgtgaacgtaacggtgttcgaagcggccgacagggcgggaggaaagatacggaccaattccgagggcgggtttgtctgggatgaaggagctaacaccatgacagaaggtgaatgggaggccagtagactgattgatgatcttggtctacaagacaaacagcagtatcctaactcccaacacaagcgttacattgtcaaagatggagcaccagcactgattccttcggatcccatttcgctaatgaaaagcagtgttctttcgacaaaatcaaagattgcgttattttttgaaccatttctctacaagaaagctaacacaagaaactctggaaaagtgtctgaggagcacttgagtgagagtgttgggagcttctgtgaacgccactttggaagagaagttgttgactattttgttgatccatttgtagctggaacaagtgcaggagatccagagtcactatctattcgtcatgcattcccagcattgtggaatttggaaagaaagtatggttcagttattgttggtgccatcttgtctaagctagcagctaaaggtgatccagtaaagacaagacatgattcatcagggaaaagaaggaatagacgagtgtcgttttcatttcatggtggaatgcagttctttgttatttcagtcactaataaatgcacttcacaatgaagttggagatgataatgtgaagcttggtacagaagtgttgtcattggcatgtacatttgatggagttcctgcactaggcaggtggtcaatttctgttgattcgaaggatagcggtgacaaggaccttgctagtaaccaaacctttgatgctgttataatgacagctccattgtcaaatgtccggaggatgaagttcacaaaaggtggagctccggttgttcttgactttcttcctaagatggattatctaccactatctctcatggtgactgcttttaagaaggatgatgtcaagaaacctctggaaggatttggggtcttaataccttacaaggaacagcaaaaacatggtctgaaaacccttgggactctcttttcctcaatgatgttcccagatcgagctcctgatgaccaatatttatatacaacatttgttgggggtagccacaatagagatcttgctggagctccaacgtctattctgaaacaacttgtgacctctgaccttaaaaaactcttgggcgtagaggggcaaccaacttttgtcaagcatgtatactggggaaatgcttttcctttgtatggccatgattatagttctgtattggaagctatagaaaagatggagaaaaaccttccagggttcttctacgcaggaaataacaaggatgggcttgctgttggaagtgttatagcttcaggaagcaaggctgctgaccttgcaatctcatatcttgaatctcacaccaagcataataattcacattgaaagcgtctgacctatcctctagcagttgtcgacaaatttgtccagttcatgtacagtagaaaccgatgcgttgcagtctcagaacatcttcacttcagatattaacccttcgttgaacatccaccagaaaggtagtcacatgtgtaagtcggaaaatgaggttaaaaactattatggtggccgaaatgctcttttttgttttcctcacaagtggcctacgacacttgatgttggaaatacatttaaatttgttgaattgtttgagaacacatgcgtgacgtgtaatatttgcctattgtgattttagcagtagattctttgccagattatgctttacgcctttacagtgacctaggagtcaagggccccacatattatatttatttaccactgctttccttgagtaatttgtaccaaaagaagcaacgaccatctcatccgaaacttcagtgattctatcactctacagttatcttcgtgtgccattgtttgttttgtgtagtgaaaacctacacttgcggtcatcaacaaccattgtcacttctatcag

SEQ ID NO: 20118 - DNA, 2246 bp, Zea Mays
cctgagtccaccccccgtccctttccctctcctacctccacctccacgacaacaagcaaatccccatccagttccaaaccctaactcaaatgctcgctttgactgcctcagcctcatccgcttcgtcccatccttatcgccacgcctccgcgcacactcgtcgcccccgcctacgtgcggtcctcgcgatggcgggctccgacgacccccgtgcagcgcccgccagatcggtcgccgtcgtcggcgccggggtcagcgggctcgcggcggcgtacaggctcagacagagcggcgtgaacgtaacggtgttcgaagcggccgacagggcgggaggaaagatacggaccaattccgagggcgggtttgtctgggatgaaggagctaacaccatgacagaaggtgaatgggaggccagtagactgattgatgatcttggtctacaagacaaacagcagtatcctaactcccaacacaagcgttacattgtcaaagatggagcaccagcactgattccttcggatcccatttcgctaatgaaaagcagtgttctttcgacaaaatcaaagattgcgttattttttgaaccatttctctacaagaaagctaacacaagaaactctggaaaagtgtctgaggagcacttgagtgagagtgttgggagcttctgtgaacgccactttggaagagaagttgttgactattttgttgatccatttgtagctggaacaagtgcaggagatccagagtcactatctattcgtcatgcattcccagcattgtggaatttggaaagaaagtatggttcagttattgttggtgccatcttgtctaagctagcagctaaaggtgatccagtaaagacaagacatgattcatcagggaaaagaaggaatagacgagtgtcgttttcatttcatggtggaatgcagttggagatgataatgtgaagcttggtacagaagtgttgtcattggcatgtacatttgatggagttcctgcactaggcaggtggtcaatttctgttgattcgaaggatagcggtgacaaggaccttgctagtaaccaaacctttgatgctgttataatgacagctccattgtcaaatgtccggaggatgaagttcacaaaaggtggagctccggttgttcttgactttcttcctaagatggattatctaccactatctctcatggtgactgcttttaagaaggatgatgtcaagaaacctctggaaggatttggggtcttaataccttacaaggaacagcaaaaacatggtctgaaaacccttgggactctcttttcctcaatgatgttcccagatcgagctcctgatgaccaatatttatatacaacatttgttgggggtagccacaatagagatcttgctggagctccaacgtctattctgaaacaacttgtgacctctgaccttaaaaaactcttgggcgtagaggggcaaccaacttttgtcaagcatgtatactggggaaatgcttttcctttgtatggccatgattatagttctgtattggaagctatagaaaagatggagaaaaaccttccagggttcttctacgcaggaaataacaaggatgggcttgctgttggaagtgttatagcttcaggaagcaaggctgctgaccttgcaatctcatatcttgaatctcacaccaagcataataattcacattgaaagcgtctgacctatcctctagcagttgtcgacaaatttgtccagttcatgtacagtagaaaccgatgcgttgcagtctcagaacatcttcacttcagatattaacccttcgttgaacatccaccagaaaggtagtcacatgtgtaagtcggaaaatgaggttaaaaactattatggtggccgaaatgctcttttttgttttcctcacaagtggcctacgacacttgatgttggaaatacatttaaatttgttgaattgtttgagaacacatgcgtgacgtgtaatatttgcctattgtgattttagcagtagattctttgccagattatgctttacgcctttacagtgacctaggagtcaagggccccacatattatatttatttaccactgctttccttgagtaatttgtaccaaaagaagcaacgaccatctcatccgaaacttcagtgattctatcactctacagttatcttcgtgtgccattgtttgttttgtgtagtgaaaacctacacttgcggtcatcaacaaccattgtcacttctatcag

SEQ ID NO: 20119 - DNA, 1645 bp, Zea Mays
agcactggtaaaagggctttgattgttgggagcttctgtgaacgccactttggaagagaagttgttgactattttgttgatccatttgtagctggaacaagtgcaggagatccagagtcactatctattcgtcatgcattcccagcattgtggaatttggaaagaaagtatggttcagttattgttggtgccatcttgtctaagctagcagctaaaggtgatccagtaaagacaagacatgattcatcagggaaaagaaggaatagacgagtgtcgttttcatttcatggtggaatgcagtcactaataaatgcacttcacaatgaagttggagatgataatgtgaagcttggtacagaagtgttgtcattggcatgtacatttgatggagttcctgcactaggcaggtggtcaatttctgttgattcgaaggatagcggtgacaaggaccttgctagtaaccaaacctttgatgctgttataatgacagctccattgtcaaatgtccggaggatgaagttcacaaaaggtggagctccggttgttcttgactttcttcctaagatggattatctaccactatctctcatggtgactgcttttaagaaggatgatgtcaagaaacctctggaaggatttggggtcttaataccttacaaggaacagcaaaaacatggtctgaaaacccttgggactctcttttcctcaatgatgttcccagatcgagctcctgatgaccaatatttatatacaacatttgttgggggtagccacaatagagatcttgctggagctccaacgtctattctgaaacaacttgtgacctctgaccttaaaaaactcttgggcgtagaggggcaaccaacttttgtcaagcatgtatactggggaaatgcttttcctttgtatggccatgattatagttctgtattggaagctatagaaaagatggagaaaaaccttccagggttcttctacgcaggaaataacaaggatgggcttgctgttggaagtgttatagcttcaggaagcaaggctgctgaccttgcaatctcatatcttgaatctcacaccaagcataataattcacattgaaagcgtctgacctatcctctagcagttgtcgacaaatttgtccagttcatgtacagtagaaaccgatgcgttgcagtctcagaacatcttcacttcagatattaacccttcgttgaacatccaccagaaaggtagtcacatgtgtaagtcggaaaatgaggttaaaaactattatggtggccgaaatgctcttttttgttttcctcacaagtggcctacgacacttgatgttggaaatacatttaaatttgttgaattgtttgagaacacatgcgtgacgtgtaatatttgcctattgtgattttagcagtagattctttgccagattatgctttacgcctttacagtgacctaggagtcaagggccccacatattatatttatttaccactgctttccttgagtaatttgtaccaaaagaagcaacgaccatctcatccgaaacttcagtgattctatcactctacagttatcttcgtgtgccattgtttgttttgtgtagtgaaaacctacacttgcggtcatcaacaaccattgtcacttctatcag

SEQ ID NO: 20120 - DNA, 2040 bp, Zea Mays
atagccttagcccggcgcgagaagaaatcgtatcctcgccagctcttcaccaacagattcgtctcctcgcctccgccgggtttcgaccagaacgccgccgccagcccaccagtaattcctccgggcactggtctccgcctaggtcccaggaggccaggaccgcctccggccctccgcgactccgtcggtccaccgggactggcttgccgctgccaggggctccatcgcccagtaccggctccggtacacaagcggaaggcggccgagtaccaagacgcagcagcagcgcgaggcgcctggtctccacctcctctgggatcaccacccaagaaaagggtgcgcggcgcataggcgaccactgaggtaaccagcggcttattttattctctatataacatttggctgtaagtggattataatctctataactcttaaataagcaacagtgcaacaccttgattttgttgggtcctccgccagtcccatgcaacgcgagattttgggagccgtggccgcacgcccgcacagacgccattgttcagccctagacatgcgccaccgagccctgtcgagccaacatagcagagaaagaagttgcaaatatctcaatgtcaagtgtttcaaattctattgctgtgggtcttccaagctatgggctatatctagagacaaggtttctcacgcagacctataggaacttcgcacagaaatcctcttacaagtattccagaatccgtgcagtgcagggaaatggtgggcgtcgaaggctggttgacataatccgaatcattccagaactctcaagggactattttaaaagtcgatcgaggcgagctctttttggtggcatctcgttgcttggcggcttttacgttgcacagacaatctcgctctctttcggtaccttgggtgtgaatgatgttatagcagcggttgtttgtgtcctgctgacagagtatgtgacaaagttctattacagtcggcctaaggttaccttccccattgctctcctcaacaatttcaagatgggtttcacatatggcctgtttattgatgccttcaagcttgctagctgagctgcactatgtcctgcttggctacttctttgcacgctcttgatcaccacaaacatgactatatatgacatacatcatttttgtattgttgtatgtgaagattgaatccagtttacatagccttttagtttacatggaattcatctctgctgtgcaattttgcaaacttgaggttaatccaagctaattctgaactgagcggcagtaaagttcctattgggttactgtctgttactgttgcctgccaaatttataaagtccttcagtaatatcagtgtgtcttgattgctagcagcaatgcgacaaacatggcagattccagtgatgctgtatcaaaatgtgtttgcctgtttggtctgtgcacagctttaggtggtttcttggcaccatgctgtattctgattattttgggtatttctcagaatctctaatagttggctgtgcgttgagaagaggcgacgatattattgtagcattattggaaatggatgtacactgaggcattgggaatggatgccattttatgtttgaaaattacacttcgtgaataatgatctgctttgggacgcgatatcaatagtcatgttctttgtgtgctgattttccccctcaaattctgcatccggtactatccattcataatttgtgatactttttttttgtacacgtttaaaggtgcacccatgtgttggtgattcagtgacgccatttcgggcgtcagctagaatcgtctgtgcatatgtgaacgggtatgccattttctattgttgagaagtttttcttatatggagtacatgtgactatgtaagctctttcctctgtatttttttctatgatgagaaagtgcatataaaacacccggcgagtgtcagccaatggttatgcagttacattaaaacaaaagcatgatttattttgtcgctactacaatgtagttaacttattagtttgatgaagggggtat

SEQ ID NO: 20121 - DNA, 1857 bp, Zea Mays
atagccttagcccggcgcgagaagaaatcgtatcctcgccagctcttcaccaacagattcgtctcctcgcctccgccgggtttcgaccagaacgccgccgccagcccaccagtaattcctccgggcactggtctccacctcctctgggatcaccacccaagaaaagggtgcgcggcgcataggcgaccactgagattttattctctatataacatttggctgtaagtggattataatctctataactcttaaataagcaacagtgcaacaccttgattttgttgggtcctccgccagtcccatgcaacgcgagattttgggagccgtggccgcacgcccgcacagacgccattgttcagccctagacatgcgccaccgagccctgtcgagccaacatagcagagaaagaagttgcaaatatctcaatgtcaagtgtttcaaattctattgctgtgggtcttccaagctatgggctatatctagagacaaggtttctcacgcagacctataggaacttcgcacagaaatcctcttacaagtattccagaatccgtgcagtgcagggaaatggtgggcgtcgaaggctggttgacataatccgaatcattccagaactctcaagggactattttaaaagtcgatcgaggcgagctctttttggtggcatctcgttgcttggcggcttttacgttgcacagacaatctcgctctctttcggtaccttgggtgtgaatgatgttatagcagcggttgtttgtgtcctgctgacagagtatgtgacaaagttctattacagtcggcctaaggttaccttccccattgctctcctcaacaatttcaagatgggtttcacatatggcctgtttattgatgccttcaagcttgctagctgagctgcactatgtcctgcttggctacttctttgcacgctcttgatcaccacaaacatgactatatatgacatacatcatttttgtattgttgtatgtgaagattgaatccagtttacatagccttttagtttacatggaattcatctctgctgtgcaattttgcaaacttgaggttaatccaagctaattctgaactgagcggcagtaaagttcctattgggttactgtctgttactgttgcctgccaaatttataaagtccttcagtaatatcagtgtgtcttgattgctagcagcaatgcgacaaacatggcagattccagtgatgctgtatcaaaatgtgtttgcctgtttggtctgtgcacagctttaggtggtttcttggcaccatgctgtattctgattattttgggtatttctcagaatctctaatagttggctgtgcgttgagaagaggcgacgatattattgtagcattattggaaatggatgtacactgaggcattgggaatggatgccattttatgtttgaaaattacacttcgtgaataatgatctgctttgggacgcgatatcaatagtcatgttctttgtgtgctgattttccccctcaaattctgcatccggtactatccattcataatttgtgatactttttttttgtacacgtttaaaggtgcacccatgtgttggtgattcagtgacgccatttcgggcgtcagctagaatcgtctgtgcatatgtgaacgggtatgccattttctattgttgagaagtttttcttatatggagtacatgtgactatgtaagctctttcctctgtatttttttctatgatgagaaagtgcatataaaacacccggcgagtgtcagccaatggttatgcagttacattaaaacaaaagcatgatttattttgtcgctactacaatgtagttaacttattagtttgatgaagggggtat

SEQ ID NO: 20122 - DNA, 1849 bp, Zea Mays
atagccttagcccggcgcgagaagaaatcgtatcctcgccagctcttcaccaacagattcgtctcctcgcctccgccgggtttcgaccagaacgccgccgccagcccaccagtaattcctccgggcactggtctccgcctaggtcccaggaggccaggaccgcctccggccctccgcgactccgtcggtccaccgggactggcttgccgctgccaggggctccatcgcccagtaccggctccggtacacaagcggaaggcggccgagtaccaagacgcagcagcagcgcgaggcgcctggtctccacctcctctgggatcaccacccaagaaaagggtgcgcggcgcataggcgaccactgaggtaaccagcggcttattttattctctatataacatttggcttgcaaatatctcaatgtcaagtgtttcaaattctattgctgtgggtcttccaagctatgggctatatctagagacaaggtttctcacgcagacctataggaacttcgcacagaaatcctcttacaagtattccagaatccgtgcagtgcagggaaatggtgggcgtcgaaggctggttgacataatccgaatcattccagaactctcaagggactattttaaaagtcgatcgaggcgagctctttttggtggcatctcgttgcttggcggcttttacgttgcacagacaatctcgctctctttcggtaccttgggtgtgaatgatgttatagcagcggttgtttgtgtcctgctgacagagtatgtgacaaagttctattacagtcggcctaaggttaccttccccattgctctcctcaacaatttcaagatgggtttcacatatggcctgtttattgatgccttcaagcttgctagctgagctgcactatgtcctgcttggctacttctttgcacgctcttgatcaccacaaacatgactatatatgacatacatcatttttgtattgttgtatgtgaagattgaatccagtttacatagccttttagtttacatggaattcatctctgctgtgcaattttgcaaacttgaggttaatccaagctaattctgaactgagcggcagtaaagttcctattgggttactgtctgttactgttgcctgccaaatttataaagtccttcagtaatatcagtgtgtcttgattgctagcagcaatgcgacaaacatggcagattccagtgatgctgtatcaaaatgtgtttgcctgtttggtctgtgcacagctttaggtggtttcttggcaccatgctgtattctgattattttgggtatttctcagaatctctaatagttggctgtgcgttgagaagaggcgacgatattattgtagcattattggaaatggatgtacactgaggcattgggaatggatgccattttatgtttgaaaattacacttcgtgaataatgatctgctttgggacgcgatatcaatagtcatgttctttgtgtgctgattttccccctcaaattctgcatccggtactatccattcataatttgtgatactttttttttgtacacgtttaaaggtgcacccatgtgttggtgattcagtgacgccatttcgggcgtcagctagaatcgtctgtgcatatgtgaacgggtatgccattttctattgttgagaagtttttcttatatggagtacatgtgactatgtaagctctttcctctgtatttttttctatgatgagaaagtgcatataaaacacccggcgagtgtcagccaatggttatgcagttacattaaaacaaaagcatgatttattttgtcgctactacaatgtagttaacttattagtttgatgaagggggtat

SEQ ID NO: 20123 - DNA, 904 bp, Zea Mays
atagccttagcccggcgcgagaagaaatcgtatcctcgccagctcttcaccaacagattcgtctcctcgcctccgccgggtttcgaccagaacgccgccgccagcccaccagtaattcctccgggcactggtctccacctcctctgggatcaccacccaagaaaagggtgcgcggcgcataggcgaccactgagattttattctctatataacatttggcttgcaaatatctcaatgtcaagtgtttcaaattctattgctgtgggtcttccaagctatgggctatatctagagacaaggtttctcacgcagacctataggaacttcgcacagaaatcctcttacaagtattccagaatccgtgcagtgcagggaaatggtgggcgtcgaaggctggttgacataatccgaatcattccagaactctcaagggactattttaaaagtcgatcgaggcgagctctttttggtggcatctcgttgcttggcggcttttacgttgcacagacaatctcgctctctttcggtaccttgggtgtgaatgatgttatagcagcggttgtttgtgtcctgctgacagagtatgtgacaaagttctattacagtcggcctaaggtgcacccatgtgttggtgattcagtgacgccatttcgggcgtcagctagaatcgtctgtgcatatgtgaacgggtatgccattttctattgttgagaagtttttcttatatggagtacatgtgactatgtaagctctttcctctgtatttttttctatgatgagaaagtgcatataaaacacccggcgagtgtcagccaatggttatgcagttacattaaaacaaaagcatgatttattttgtcgctactacaatgtagttaacttattagtttgatgaagggggtat

SEQ ID NO: 20124 - DNA, 1531 bp, Zea Mays
atagccttagcccggcgcgagaagaaatcgtatcctcgccagctcttcaccaacagattcgtctcctcgcctccgccgggtttcgaccagaacgccgccgccagcccaccagtaattcctccgggcactggtctccacctcctctgggatcaccacccaagaaaagggtgcgcggcgcataggcgaccactgagattttattctctatataacatttggctaatccgtgcagtgcagggaaatggtgggcgtcgaaggctggttgacataatccgaatcattccagaactctcaagggactattttaaaagtcgatcgaggcgagctctttttggtggcatctcgttgcttggcggcttttacgttgcacagacaatctcgctctctttcggtaccttgggtgtgaatgatgttatagcagcggttgtttgtgtcctgctgacagagtatgtgacaaagttctattacagtcggcctaaggttaccttccccattgctctcctcaacaatttcaagatgggtttcacatatggcctgtttattgatgccttcaagcttgctagctgagctgcactatgtcctgcttggctacttctttgcacgctcttgatcaccacaaacatgactatatatgacatacatcatttttgtattgttgtatgtgaagattgaatccagtttacatagccttttagtttacatggaattcatctctgctgtgcaattttgcaaacttgaggttaatccaagctaattctgaactgagcggcagtaaagttcctattgggttactgtctgttactgttgcctgccaaatttataaagtccttcagtaatatcagtgtgtcttgattgctagcagcaatgcgacaaacatggcagattccagtgatgctgtatcaaaatgtgtttgcctgtttggtctgtgcacagctttaggtggtttcttggcaccatgctgtattctgattattttgggtatttctcagaatctctaatagttggctgtgcgttgagaagaggcgacgatattattgtagcattattggaaatggatgtacactgaggcattgggaatggatgccattttatgtttgaaaattacacttcgtgaataatgatctgctttgggacgcgatatcaatagtcatgttctttgtgtgctgattttccccctcaaattctgcatccggtactatccattcataatttgtgatactttttttttgtacacgtttaaaggtgcacccatgtgttggtgattcagtgacgccatttcgggcgtcagctagaatcgtctgtgcatatgtgaacgggtatgccattttctattgttgagaagtttttcttatatggagtacatgtgactatgtaagctctttcctctgtatttttttctatgatgagaaagtgcatataaaacacccggcgagtgtcagccaatggttatgcagttacattaaaacaaaagcatgatttattttgtcgctactacaatgtagttaacttattagtttgatgaagggggtat

SEQ ID NO: 20125 - DNA, 1666 bp, Zea Mays
atagccttagcccggcgcgagaagaaatcgtatcctcgccagctcttcaccaacagattcgtctcctcgcctccgccgggtttcgaccagaacgccgccgccagcccaccagtaattcctccgggcactggtctccacctcctctgggatcaccacccaagaaaagggtgcgcggcgcataggcgaccactgagattttattctctatataacatttggcttgcaaatatctcaatgtcaagtgtttcaaattctattgctgtgggtcttccaagctatgggctatatctagagacaaggtttctcacgcagacctataggaacttcgcacagaaatcctcttacaagtattccagaatccgtgcagtgcagggaaatggtgggcgtcgaaggctggttgacataatccgaatcattccagaactctcaagggactattttaaaagtcgatcgaggcgagctctttttggtggcatctcgttgcttggcggcttttacgttgcacagacaatctcgctctctttcggtaccttgggtgtgaatgatgttatagcagcggttgtttgtgtcctgctgacagagtatgtgacaaagttctattacagtcggcctaaggttaccttccccattgctctcctcaacaatttcaagatgggtttcacatatggcctgtttattgatgccttcaagcttgctagctgagctgcactatgtcctgcttggctacttctttgcacgctcttgatcaccacaaacatgactatatatgacatacatcatttttgtattgttgtatgtgaagattgaatccagtttacatagccttttagtttacatggaattcatctctgctgtgcaattttgcaaacttgaggttaatccaagctaattctgaactgagcggcagtaaagttcctattgggttactgtctgttactgttgcctgccaaatttataaagtccttcagtaatatcagtgtgtcttgattgctagcagcaatgcgacaaacatggcagattccagtgatgctgtatcaaaatgtgtttgcctgtttggtctgtgcacagctttaggtggtttcttggcaccatgctgtattctgattattttgggtatttctcagaatctctaatagttggctgtgcgttgagaagaggcgacgatattattgtagcattattggaaatggatgtacactgaggcattgggaatggatgccattttatgtttgaaaattacacttcgtgaataatgatctgctttgggacgcgatatcaatagtcatgttctttgtgtgctgattttccccctcaaattctgcatccggtactatccattcataatttgtgatactttttttttgtacacgtttaaaggtgcacccatgtgttggtgattcagtgacgccatttcgggcgtcagctagaatcgtctgtgcatatgtgaacgggtatgccattttctattgttgagaagtttttcttatatggagtacatgtgactatgtaagctctttcctctgtatttttttctatgatgagaaagtgcatataaaacacccggcgagtgtcagccaatggttatgcagttacattaaaacaaaagcatgatttattttgtcgctactacaatgtagttaacttattagtttgatgaagggggtat

SEQ ID NO: 20126 - DNA, 1716 bp, Zea Mays
atagccttagcccggcgcgagaagaaatcgtatcctcgccagctcttcaccaacagattcgtctcctcgcctccgccgggtttcgaccagaacgccgccgccagcccaccagtaattcctccgggcactggtctccacctcctctgggatcaccacccaagaaaagggtgcgcggcgcataggcgaccactgaggtaaccagcggcttattttattctctatataacatttggctgtaagtggattataatctctataactcttaaataagtgcaaatatctcaatgtcaagtgtttcaaattctattgctgtgggtcttccaagctatgggctatatctagagacaaggtttctcacgcagacctataggaacttcgcacagaaatcctcttacaagtattccagaatccgtgcagtgcagggaaatggtgggcgtcgaaggctggttgacataatccgaatcattccagaactctcaagggactattttaaaagtcgatcgaggcgagctctttttggtggcatctcgttgcttggcggcttttacgttgcacagacaatctcgctctctttcggtaccttgggtgtgaatgatgttatagcagcggttgtttgtgtcctgctgacagagtatgtgacaaagttctattacagtcggcctaaggttaccttccccattgctctcctcaacaatttcaagatgggtttcacatatggcctgtttattgatgccttcaagcttgctagctgagctgcactatgtcctgcttggctacttctttgcacgctcttgatcaccacaaacatgactatatatgacatacatcatttttgtattgttgtatgtgaagattgaatccagtttacatagccttttagtttacatggaattcatctctgctgtgcaattttgcaaacttgaggttaatccaagctaattctgaactgagcggcagtaaagttcctattgggttactgtctgttactgttgcctgccaaatttataaagtccttcagtaatatcagtgtgtcttgattgctagcagcaatgcgacaaacatggcagattccagtgatgctgtatcaaaatgtgtttgcctgtttggtctgtgcacagctttaggtggtttcttggcaccatgctgtattctgattattttgggtatttctcagaatctctaatagttggctgtgcgttgagaagaggcgacgatattattgtagcattattggaaatggatgtacactgaggcattgggaatggatgccattttatgtttgaaaattacacttcgtgaataatgatctgctttgggacgcgatatcaatagtcatgttctttgtgtgctgattttccccctcaaattctgcatccggtactatccattcataatttgtgatactttttttttgtacacgtttaaaggtgcacccatgtgttggtgattcagtgacgccatttcgggcgtcagctagaatcgtctgtgcatatgtgaacgggtatgccattttctattgttgagaagtttttcttatatggagtacatgtgactatgtaagctctttcctctgtatttttttctatgatgagaaagtgcatataaaacacccggcgagtgtcagccaatggttatgcagttacattaaaacaaaagcatgatttattttgtcgctactacaatgtagttaacttattagtttgatgaagggggtat

SEQ ID NO: 20127 - DNA, 1873 bp, Zea Mays
atagccttagcccggcgcgagaagaaatcgtatcctcgccagctcttcaccaacagattcgtctcctcgcctccgccgggtttcgaccagaacgccgccgccagcccaccagtaattcctccgggcactggtctccacctcctctgggatcaccacccaagaaaagggtgcgcggcgcataggcgaccactgagattttattctctatataacatttggctgtaagtggattataatctctataactcttaaataagtgcaaatatctcaatgtcaagtgtttcaaattctattgctgtgggtcttccaagctatgggctatatctagagacaaggtttctcacgcagacctataggaacttcgcacagaaatcctcttacaagtattccagaatccgtgcagtgcagggaaatggtgggcgtcgaaggctggttgacataatccgaatcattccagaactctcaagggactattttaaaagtcgatcgaggcgagctctttttggtggcatctcgttgcttggcggcttttacgttgcacagacaatctcgctctctttcggtaccttgggtgtgaatgatgttatagcagcggttgtttgtgtcctgctgacagagtatgtgacaaagttctattacagtcggcctaaggttaccttccccattgctctcctcaacaatttcaagatgggtttcacatatggcctgtttattgatgccttcaagcttgctagctgagctgcactatgtcctgcttggctacttctttgcacgctcttgatcaccacaaacatgactatatatgacatacatcatttttgtattgttgtatgtgaagattgaatccagtttacatagccttttagtttacatggaattcatctctgctgtgcaattttgcaaacttgaggttaatccaagctaattctgaactgagcggcagtaaagttcctattgggttactgtctgttactgttgcctgccaaatttataaagtccttcagtaatatcagtgtgtcttgattgctagcagcaatgcgacaaacatggcagattccagtgatgctgtatcaaaatgtgtttgcctgtttggtctgtgcacagctttaggtggtttcttggcaccatgctgtattctgattattttgggtatttctcagaatctctaatagttggctgtgcgttgagaagaggcgacgatattattgtagcattattggaaatggatgtacactgaggcattgggaatggatgccattttatgtttgaaaattacacttcgtgaataatgatctgctttgggacgcgatatcaatagtcatgttctttgtgtgctgattttccccctcaaattctgcatccggtactatccattcataatttgtgatactttttttttgtacacgtttaaaggtgcacccatgtgttggtgattcagtgacgccatttcgggcgtcagctagaatcgtctgtgcatatgtgaacgggtatgccattttctattgttgagaagtttttcttatatggagtacatgtgactatgtaagctctttcctctgtatttttttctatgatgagaaagtgcatataaaacacccggcgagtgtcagccaatggttatgcagttacattaaaacaaaagcatgatttattttgtcgctactacaatgtagttaacttattagtttgatgaagggggtatatgcttttgaacacgaccagaacaataattttaatatgcaggtttgcctcacttgggacagaccattgttcaagatggtgaaactgtaagctaaattcattgcacttgcagatgtggcgaatgcacagtcagtgagatggtatttatctaatatatcgtcttcctccacac

SEQ ID NO: 20128 - DNA, 1837 bp, Zea Mays
atagccttagcccggcgcgagaagaaatcgtatcctcgccagctcttcaccaacagattcgtctcctcgcctccgccgggtttcgaccagaacgccgccgccagcccaccagtaattcctccgggcactggtctccacctcctctgggatcaccacccaagaaaagggtgcgcggcgcataggcgaccactgagattttattctctatataacatttggctgtaagtggattataatctctataactcttaaataagtgcaaatatctcaatgtcaagtgtttcaaattctattgctgtgggtcttccaagctatgggctatatctagagacaaggtttctcacgcagacctataggaacttcgcacagaaatcctcttacaagtattccagaatccgtgcagtgcagggaaatggtgggcgtcgaaggctggttgacataatccgaatcattccagaactctcaagggactattttaaaagtcgatcgaggcgagctctttttggtggcatctcgttgcttggcggcttttacgttgcacagacaatctcgctctctttcggtaccttgggtgtgaatgatgttatagcagcggttgtttgtgtcctgctgacagagtatgtgacaaagttctattacagtcggcctaaggttaccttccccattgctctcctcaacaatttcaagatgggtttcacatatggcctgtttattgatgccttcaagcttgctagctgagctgcactatgtcctgcttggctacttctttgcacgctcttgatcaccacaaacatgactatatatgacatacatcatttttgtattgttgtatgtgaagattgaatccagtttacatagccttttagtttacatggaattcatctctgctgtgcaattttgcaaacttgaggttaatccaagctaattctgaactgagcggcagtaaagttcctattgggttactgtctgttactgttgcctgccaaatttataaagtccttcagtaatatcagtgtgtcttgattgctagcagcaatgcgacaaacatggcagattccagtgatgctgtatcaaaatgtgtttgcctgtttggtctgtgcacagctttaggtggtttcttggcaccatgctgtattctgattattttgggtatttctcagaatctctaatagttggctgtgcgttgagaagaggcgacgatattattgtagcattattggaaatggatgtacactgaggcattgggaatggatgccattttatgtttgaaaattacacttcgtgaataatgatctgctttgggacgcgatatcaatagtcatgttctttgtgtgctgattttccccctcaaattctgcatccggtactatccattcataatttgtgatactttttttttgtacacgtttaaaggtgcacccatgtgttggtgattcagtgacgccatttcgggcgtcagctagaatcgtctgtgcatatgtgaacgggtatgccattttctattgttgagaagtttttcttatatggagtacatgtgactatgtaagctctttcctctgtatttttttctatgatgagaaagtgcatataaaacacccggcgagtgtcagccaatggttatgcagttacattaaaacaaaagcatgatttattttgtcgctactacaatgtagttaacttattagtttgatgaagggggtatatgcttttgaacacgaccagaacaataattttaatatgcaggtttgcctcacttgggacagaccattgttcaagatggtgaaacttgcacagtcagtgagatggtatttatctaatatatcgtcttcctccacac

SEQ ID NO: 20129 - DNA, 1844 bp, Zea Mays
gtttcatcaaggacactgtatatctaaatcattggagcaatagacagcctaaaacagcacttgggtccaactccctgtggcagtgaatttagtctggttaaaacaatcctctcattggcaaacatggggttcagggattttgtcaacgagcaaggttgagttaaaaacattgcctagggagaggtcatgccccctgctggttgagttttttctctgaatatgctgcagtgcaaatatctcaatgtcaagtgtttcaaattctattgctgtgggtcttccaagctatgggctatatctagagacaaggtttctcacgcagacctataggaacttcgcacagaaatcctcttacaagtattccagaatccgtgcagtgcagggaaatggtgggcgtcgaaggctggttgacataatccgaatcattccagaactctcaagggactattttaaaagtcgatcgaggcgagctctttttggtggcatctcgttgcttggcggcttttacgttgcacagacaatctcgctctctttcggtaccttgggtgtgaatgatgttatagcagcggttgtttgtgtcctgctgacagagtatgtgacaaagttctattacagtcggcctaaggttaccttccccattgctctcctcaacaatttcaagatgggtttcacatatggcctgtttattgatgccttcaagcttgctagctgagctgcactatgtcctgcttggctacttctttgcacgctcttgatcaccacaaacatgactatatatgacatacatcatttttgtattgttgtatgtgaagattgaatccagtttacatagccttttagtttacatggaattcatctctgctgtgcaattttgcaaacttgaggttaatccaagctaattctgaactgagcggcagtaaagttcctattgggttactgtctgttactgttgcctgccaaatttataaagtccttcagtaatatcagtgtgtcttgattgctagcagcaatgcgacaaacatggcagattccagtgatgctgtatcaaaatgtgtttgcctgtttggtctgtgcacagctttaggtggtttcttggcaccatgctgtattctgattattttgggtatttctcagaatctctaatagttggctgtgcgttgagaagaggcgacgatattattgtagcattattggaaatggatgtacactgaggcattgggaatggatgccattttatgtttgaaaattacacttcgtgaataatgatctgctttgggacgcgatatcaatagtcatgttctttgtgtgctgattttccccctcaaattctgcatccggtactatccattcataatttgtgatactttttttttgtacacgtttaaaggtgcacccatgtgttggtgattcagtgacgccatttcgggcgtcagctagaatcgtctgtgcatatgtgaacgggtatgccattttctattgttgagaagtttttcttatatggagtacatgtgactatgtaagctctttcctctgtatttttttctatgatgagaaagtgcatataaaacacccggcgagtgtcagccaatggttatgcagttacattaaaacaaaagcatgatttattttgtcgctactacaatgtagttaacttattagtttgatgaagggggtatatgcttttgaacacgaccagaacaataattttaatatgcaggtttgcctcacttgggacagaccattgttcaagatggtgaaactgtaagctaaattcattgcacttgcagatgtggcgaatgcacagtcagtgagatggtatttatctaatatatcgtcttcctccacac

SEQ ID NO: 20130 - DNA, 2749 bp, Zea Mays
gttcaaccatgtcacagtgagttagtatgaacattgttctcatctgtgtaaataccgtgagatgaacagtcattgtggcaaattttaggttttaaaatacggaaactacagtgatgctcatattgagctaaaaatagaagttgagatgaactaattaaatccacttttggtaccattgatttgcacaacttttagcaatataattcaaataattttctgacactgataggtgctgtagacatgacaggcagctgcttaccgtccaggctgcataatctgtggtaacctttatattatcattttttcaagaaaatggagatgatatacttgccaattttttgttgtgtagcaatgaggtatatgtacatgtcatcttgaggaacaccatatgcatttactttagaatctaatataagtattgaagtaatgaactactccctccattccaaaatagtagtcgttttagctcttgatttttatgtttatattcaaatagatgaagatacatctagacacatatataaaatacatacatcaagtattgtgtgaatccaataaatacctaaaacgaattttattttgggacatagggagtacttaaattgagaagtacagaatggaagaacccactatagctagcatttgctgattccgggatgtctgtcaccaacctgtgacatgtatttattttagatttgtcacatcaaagtagtagaattagtattttccaataattgtgaaaagttccaggacttaccaatgaagatattctctatttgttgggttacttggacttggggagtctggatccaccatcacctagtagcaagggttagcttgttatcttgaggaaatatctcagaactaaacataatagttcccttattcagtagcaggtgcttagcatttgttctctgaaattgttaccacacttccttatcttttattcagagaattacaaagatactatttgattaaccagcgcaatctaggcattcttttttaaggtacctgttaaccctgatgaatgaaataaagccttttttctcaaacacaaaaagaaagtctctaatgcagacttattttaatgttactactacaataacctcgtcatataacaataaagtcttttagtcccaagtaaattggagtaggctagagttgaaagtcaaaagaagccataaatcaaggttcagtcacatagatagctgtttttcattcgctcctatttaagactaaatctttggtatattttatcctttcaagtctcattttattgtcttttttcatgtcaattttgacctttctttgtctctttttttattattatcgctctttagaatccaactacacactggtgtctctaaaggtcttcgtcaatcgtcataacactactaaaatgcgaaaactcatatcatatgacatgtatttatgcatcttactatagtaattcaaacttcctgtagttgttgatgacataactttttattctagtcagcaccatgtacaagatgcaggtacatgtgccgatgctgtcgaacatacggatggtgcatgaaattaaatgcaagtgcagaggtccttttcaatccataaaaaaaattgtacaacttatggaaagttgagattctttgttttcattgctatgtgggcactgaaaacaattaaaggtgatgaactccaaaagcagatgttacaacatgaacattccctcaccctttcaataaactaggtgaatgaggaaagcgagccggaattccctagtacttggaactcctggagatcgtttttactagagcgtgctcattaaagcttccactctaatgttgctgtgatgaagattgccttctcattacaaatggtggagggcctcaagcgaaacattatttgatgggaatattagacttcaacgataaaaagtggatacaggaaggagtggctctctttcggagtgtggcctctcatctgatcaaatgaaggctgatgctgtacttataaacacgggggcctttcggagaaacagatccagggcaggaaaggcacggagcccggctacgtggaggaagtgaatcgtcagattggaggaatcgaaccgtcgctggcatgataatcttgaccagagagcaagtgaggcaaagcgccatgctcgttcacgtgggagcatcccattcgtcgcgtgacggatgggactcgtacccccaaggaccaaccccaaatccaaatcccagaagaagacggcgcgggcgcgtgccatggaatggaaaggttccccgcagcggaggaatcgtccacccgcccagctactcaaggttggctacgggggtttctttcgaaaatggaatggcccggactgaattattggcacagtagtggccaacaggattggctgggccggcaaagcgaaaatattggatgtacccacctgatcggcggtggatcgtatatggcaccatctctcatcaaatcgacaacgctccagcatttgcaatgaacaaaacagcttaccggagtgcagccctgctggcatgggttacaattttcccgctcgaaccgggtctgtttttctttctcctctccatggaagaaccgttcagtgccatgacatcagcaaaaacttgtgtaatttctttaaagatatgatgctcgttggaaatctcaagacttaaaaaaaacacacacaggcatcagaagaccggatttaatcggatatggaggctcctcctgaccaactaaacaaggaatgcaaaag

SEQ ID NO: 20131 - DNA, 2715 bp, Zea Mays
ctcatctgtgtaaataccgtgagatgaacagtcattgtggcaaattttaggttttaaaatacggaaactacagtgatgctcatattgagctaaaaatagaagttgagatgaactaattaaatccacttttggtaccattgatttgcacaacttttagcaatataattcaaataattttctgacactgataggtgctgtagacatgacaggcagctgcttaccgtccaggctgcataatctgtggtaacctttatattatcattttttcaagaaaatggagatgatatacttgccaattttttgttgtgtagcaatgaggtatatgtacatgtcatcttgaggaacaccatatgcatttactttagaatctaatataagtattgaagtaatgaactactccctccattccaaaatagtagtcgttttagctcttgatttttatgtttatattcaaatagatgaagatacatctagacacatatataaaatacatacatcaagtattgtgtgaatccaataaatacctaaaacgaattttattttgggacatagggagtacttaaattgagaagtacagaatggaagaacccactatagctagcatttgctgattccgggatgtctgtcaccaacctgtgacatgtatttattttagatttgtcacatcaaagtagtagaattagtattttccaataattgtgaaaagttccaggacttaccaatgaagatattctctatttgttgggttacttggacttggggagtctggatccaccatcacctagtagcaagggttagcttgttatcttgaggaaatatctcagaactaaacataatagttcccttattcagtagcaggtgcttagcatttgttctctgaaattgttaccacacttccttatcttttattcagagaattacaaagatactatttgattaaccagcgcaatctaggcattcttttttaaggtacctgttaaccctgatgaatgaaataaagccttttttctcaaacacaaaaagaaagtctctaatgcagacttattttaatgttactactacaataacctcgtcatataacaataaagtcttttagtcccaagtaaattggagtaggctagagttgaaagtcaaaagaagccataaatcaaggttcagtcacatagatagctgtttttcattcgctcctatttaagactaaatctttggtatattttatcctttcaagtctcattttattgtcttttttcatgtcaattttgacctttctttgtctctttttttattattatcgctctttagaatccaactacacactggtgtctctaaaggtcttcgtcaatcgtcataacactactaaaatgcgaaaactcatatcatatgacatgtatttatgcatcttactatagtaattcaaacttcctgtagttgttgatgacataactttttattctagtcagcaccatgtacaagatgcaggtacatgtgccgatgctgtcgaacatacggatggtgcatgaaattaaatgcaagtgcagaggtccttttcaatccataaaaaaaattgtacaacttatggaaagttgagattctttgttttcattgctatgtgggcactgaaaacaattaaaggtgatgaactccaaaagcagatgttacaacatgaacattccctcaccctttcaataaactaggtgaatgaggaaagcgagccggaattccctagtacttggttggaactcctggagatcgtttttactagagcgtgctcattaaagcttccactctaatgttgctgtgatgaagattgccttctcattacaaatggtggagggcctcaagcgaaacattatttgatgggaatattagacttcaacgataaaaagtggatacaggaaggagtggctctctttcggagtgtggcctctcatctgatcaaatgaaggctgatgctgtacttataaacacgggggcctttcggagaaacagatccagggcaggaaaggcacggagcccggctacgtggaggaagtgaatcgtcagattggaggaatcgaaccgtcgctggcatgataatcttgaccagagagcaagtgaggcaaagcgccatgctcgttcacgtgggagcatcccattcgtcgcgtgacggatgggactcgtacccccaaggaccaaccccaaatccaaatcccagaagaagacggcgcgggcgcgtgccatggaatggaaaggttccccgcagcggaggaatcgtccacccgcccagctactcaaggttggctacgggggtttctttcgaaaatggaatggcccggactgaattattggcacagtagtggccaacaggattggctgggccggcaaagcgaaaatattggatgtacccacctgatcggcggtggatcgtatatggcaccatctctcatcaaatcgacaacgctccagcatttgcaatgaacaaaacagcttaccggagtgcagccctgctggcatgggttacaattttcccgctcgaaccgggtctgtttttctttctcctctccatggaagaaccgttcagtgccatgacatcagcaaaaacttgtgtaatttctttaaagatatgatgctcgttggaaatctcaagacttaaaaaaaacacacacaggcatcagaagaccggatttaatcggatatggaggctcctcctgaccaactaaacaaggaatgcaaaag

SEQ ID NO: 20132 - DNA, 1130 bp, Zea Mays
ctattttgaggcccgctctctagagaacaaagaagctgatttggcctcaaatgtgaagttgggtgcactgatgggtgcagcatgaacattccctcaccctttcaataaactaggtgaatgaggaaagcgagccggaattccctagtacttggaactcctggagatcgtttttactagagcgtgctcattaaagcttccactctaatgttgctgtgatgaagattgccttctcattacaaatggtggagggcctcaagcgaaacattatttgatgggaatattagacttcaacgataaaaagtggatacaggaaggagtggctctctttcggagtgtggcctctcatctgatcaaatgaaggctgatgctgtacttataaacacgggggcctttcggagaaacagatccagggcaggaaaggcacggagcccggctacgtggaggaagtgaatcgtcagattggaggaatcgaaccgtcgctggcatgataatcttgaccagagagcaagtgaggcaaagcgccatgctcgttcacgtgggagcatcccattcgtcgcgtgacggatgggactcgtacccccaaggaccaaccccaaatccaaatcccagaagaagacggcgcgggcgcgtgccatggaatggaaaggttccccgcagcggaggaatcgtccacccgcccagctactcaaggttggctacgggggtttctttcgaaaatggaatggcccggactgaattattggcacagtagtggccaacaggattggctgggccggcaaagcgaaaatattggatgtacccacctgatcggcggtggatcgtatatggcaccatctctcatcaaatcgacaacgctccagcatttgcaatgaacaaaacagcttaccggagtgcagccctgctggcatgggttacaattttcccgctcgaaccgggtctgtttttctttctcctctccatggaagaaccgttcagtgccatgacatcagcaaaaacttgtgtaatttctttaaagatatgatgctcgttggaaatctcaagacttaaaaaaaacacacacaggcatcagaagaccggatttaatcggatatggaggctcctcctgaccaactaaacaaggaatgcaaaag

SEQ ID NO: 20133 - DNA, 859 bp, Zea Mays
gtgctcctacctacgccgcattccatcaagaggatacaggaaggagtggctctctttcggagtgtggcctctcatctgatcaaatgaaggctgatgctgtacttataaacacgggggcctttcggagaaacagatccagggcaggaaaggcacggagcccggctacgtggaggaagtgaatcgtcagattggaggaatcgaaccgtcgctggcatgataatcttgaccagagagcaagtgaggcaaagcgccatgctcgttcacgtgggagcatcccattcgtcgcgtgacggatgggactcgtacccccaaggaccaaccccaaatccaaatcccagaagaagacggcgcgggcgcgtgccatggaatggaaaggttccccgcagcggaggaatcgtccacccgcccagctactcaaggttggctacgggggtttctttcgaaaatggaatggcccggactgaattattggcacagtagtggccaacaggattggctgggccggcaaagcgaaaatattggatgtacccacctgatcggcggtggatcgtatatggcaccatctctcatcaaatcgacaacgctccagcatttgcaatgaacaaaacagcttaccggagtgcagccctgctggcatgggttacaattttcccgctcgaaccgggtctgtttttctttctcctctccatggaagaaccgttcagtgccatgacatcagcaaaaacttgtgtaatttctttaaagatatgatgctcgttggaaatctcaagacttaaaaaaaacacacacaggcatcagaagaccggatttaatcggatatggaggctcctcctgaccaactaaacaaggaatgcaaaag

SEQ ID NO: 20134 - DNA, 3204 bp, Zea Mays
cgtggctcaacgcggttttgtgtctctcaaacaacatggctagggtaggcgaagggcagggccaaggaagccgccgtagtcatggacaaattctttgcctcggatgaaatttgacaaataagagaccatggagagacttgaggtggacggggatttcattgccgctggcaattggaagctacatggggcactatgcaatgaactttacacagtagtccgtgaagttttggatgccattcctccttttgagactacacggtcaggatgcagtcctgggctcctggcattgagttccttgaggatatctgttgagaaagccaagaatttactccagtattgctcagagagtagcaagctttacttggctgttacagcagaaagcgttctaacaaaatttgagaattcaagacaaggacttctggaaagccttcaccaagtagaagaaacaattccggaagcagtcggttctaaggtagttgtccataatctttcagaaacttagctttgccagctagtatttttgttggaccatacatactgaacttctgcaattaaccctacagtctttcagaaacttagctttgccagctatttttgtcgaaccacatatactgaacttccgcaacaaatcctaatgtctccctttatcttgaggggattgcagctttacaatattgcttgattgtagggatccaaaacgtacactagtttcgccagattttcagttagttttttttttggccggaagcttttgatgaggaattaaatctttcatgctaatctgacttggatcttgttttcttgtggaattaattggattcctggtcccctgatgactactttcctttctaaatttcagatcactatgattgcacaagagctggaaaaggctggttttgtcttggaccagtccgaaaagcaagttggtgatgaagtgagtgaactaatccagaacgagccaaaatccaatggattccttgatgagaatgagcttgaatttctccaccaaattgctttccgggttggtattacatcatccgtggcagctctcactgaaagaagagcacttaggaggcttcttgagagagcccatgcagaggaggacttgaaaaaggaatcaattgcagcctatctactgcaccttattaggaaatactcgaatatatttaagagtgaaacaaacgatagtaccaactccctgtgctcaagcccttcctgctcctccagtaaactgtccagctcaactgatctccatggaaactgtcagatcctcgagaagcggctcccaagtgttggctccttaagtccgaagcagattggagggttatcagggacagggagtatgcccttgccacctgaggagctgaggtgtccaatctccctgcagctcatgtatgaccctgttgtcattgcatccggtcagacatatgaacgagcttgcatcgagaagtggttccacagtggcaacacaacctgcccgaaaactcgcaagcagctgtcccagctcttgagaacacctaattactgcattaagggtctgatagcatcttggtgcgaacagaacggggttccagttccagctgggccgccagaatctcccaagctagaacatctgagcatctcatcgctggaaagcaccacatgtgcggcgactgatggcgctaacactaacactgtcttgtttgaagacacaacagccaaggatgacgccaagtcggagagtgaagtttccaaggagatgttctctcgtcaaaactccggagaggccacgtccaaactacgtatacacgaagaagtctcaccggagaactgctctgctcttcagagctccaaggaggctgcacctgacgcatgtggggttgaagactccgtggacgtggagaagggcaagggctctcaccaagactccaaagacgatgtacctgtcagtgagagatgtgaacagtggctccatgtgctgaacaagaacgatgctgagagcatgagtgagaaacataagttggttgagcagatcaggatcctgttgaagaacgacgacgaacttcggaactatgcaggtgctaatggtattactgagccactaatccattttctgaagatggctatccacagaggaggtgtgcaatctcaggaggttgctacaatggctctgttcaatcttgctgtcaacaatgacgggaacaagagactgctcctgtcagctggagtcatcccgctgatggaacagatgatacagaaacatgaaacctgcgaggctgccatcgcaatgtacctgaacctctcctgcatccccgaggcacaggcgatcatcggctcgagcgtcgccatccatttcctcgtcaacagcctaggggaaggtggcccccggagcgacacctgccgcatggacgcgctgctcaccctgtacaacctgtccctgcacgcgcccaacatcccacccctcatggcgtccggcatcatcgagaacctccgccgcgtgctggtgccgtcctccccgtggacggacaaggccctagcggtcctgctgaacctggcgctgacccggagaggcaaggaggagatcgcggccagcgcggccatggtgggcgccatcgtgctcatcgtggacaacggcgagccgggggagaaggagaaggccgtgtcgtgcctgtatgtgatctgcagtggcgacgagggcagcagccagacagtgctccaggagggcgtgatcccggcgctggtgtccgtgacggccaacggcacggccagggcccgggacaaggcgcagcggctgctgaggctgttccgggagcagcggcagcgggagctggagctggaggagatgcagccgcgggtggagctgcacgaggtggcgagccgggcggccgtgcagcagcagcgggaggaggaagaggaagagatggcgctggccgtgttgccggccgccgcgcccagtaagccgagcggcggcggcaaaaagccacgactgtgcaggtcagggtccaggaggttcaccaaggtcttcacgtgcctgctcaagaagtggagtctgcgttgaaccgagaaggatcgggcagtcgaccggtgcaactgagctgtgctcaaactgtagagctgtaattatccgtctttgacaagcgcgttgcgttcgcagtgattaatgatggtttcttgaaatgagcatgagcaaacgaaagcaaaacgaccaatttccttcgaattagg

SEQ ID NO: 20135 - DNA, 502 bp, Zea Mays
ctccctcgttcagccaccttagggtttggttttgtgaagtttttcccctactcttgagctccaaatttgtggtcatcgtgtgagtgatgtggcagtgttcaggcctgggtaacctccctttcaaacccccaaatctgatttgctcttgtgctatgtgccagctccctagttggtgaccacgcccactaaattccccacctcgccgtggccaggctttcttgtgaagtttttcacccatgtggtgaatgttccgtgctctgcaaaggaaagatttttgatgccttggctttattagttgctccttatggaggtcttgaagcttagattacttatgtgaatcttttatggaaaggcttcacctttccaagtattgtagttaagttatgcactctaaagactatcaggacttgtaataatttcattcccttttatgttgtaagacttgagttctagaatgcaaagtgtattttgtaaaagtattccgctctatctccaatgtgtg

SEQ ID NO: 20136 - DNA, 3935 bp, Zea Mays
gcctgcaaaattgtgtggattgtcatagtgtcttaacgccagtagtattgtactaataacttataatgcaatcacaaaaggctgcatacatgccactgcgagggcgccaaaagcactcgaggcctaatggatcgtacatgatccaaagctgcttcaggggtcatgttcctgtatttaatctgcaacacaaggattatcaggaaattgaacaggagcatgcgtactgagttgcaacaacaaatgcagttcatcctaccaagtagcacaatacaatagtggtgcttcgtcctcttccagctttacaatgaacatatgtagtaccgccttgtatcaagtcaaatgagaagaaacagaatatgaaacactgaaacagcatgcgtactgctggtgtttgggctgggcgcggagtccccgctgtggctggcgctgaaccacggcgggcggaccgtattcctggaggagaacgagttctacgtcaagtacctggagccgcggcaccccgggatggaggcgtacgacgtgtcctacaccacgaaggtgcgcgacttccgggacctgctggaggcggcgggagcagcgagggccaaggagtgtcggcccgtgcagaacctgctcttctccgagtgccgcctcgccatcaatgacctgcccaacgacctctacgacgtggcctgggacgtggtcctcatcgacgggccgtccggctggaaccccaactcacccggccggatgccgtccatctttaccaccgccgtgctggcgcgctccggcgccaccgcggccaagggccccaccgacgtgctcgtgcacgacttccagttcgaggtggagcaggtgctgagcagggagttcctgtgcgacgagaaccgggtcaccggcagcggcaccccgtcgctcggccacttcgtcatccgcgggggcagggccggggccggcgatgccttctgctctgcccaggaggacggctcgtcgggggagaagacgtgccgccgccgcagccacaagtaaattttacttgtccgctgtccgtctatcttgccacggagacgggcagacggcattagccgccagcgacctctcccttcttcgtggcgaatggcccagtctccgatgggtacatggatgctcgctgctccattccgggcgttcgcgctttggatgcgccatgccggagcgcacgtgtgccatgctggatccggtggccacggtggggaaggggggaagggcgtggtctccggtgtgcgccaagccggatccggtggggaagggcgcaatctcagtgttccacctccgcaagggtgccaagtgcaggagcaacatcgacgactggctccgcgagaaccgcatgcgctgccccgcctgctacaagcctgtccactctgtgctgccgtgcaaagcgctgacgacatcggcgccactgcccgcgccagtgccactgccaacgcactcgcagttgtcgacgtcttttttgattccaggacgcgctacagtttgggtctccgtcgtaactaataaagacgcatgatcgagcttggatgggatgggacagtgttggagcgtcttttgggcccgtatggatcagttcttcgaaagattctttaaggatccattagtcgtttctttctatgtcttcttggaactgatcgaaggagtccttcgttacttctgttttttgttttctcggaactgatcaaacttatagcccctatggcgttgtctactaggttgtgcgtcgcagtatccctggtatgacgtcgcgtcttgtccgttcgtcaatgggtttttgtagctattctgatatagacgtagtggtgcttagtaggtctggtcgagtcagctcgaggtgaggtttagggatgtcttcagtacaacttcatcttccgtcatccccttagcgtcacctttaataatgcgtaggcgtatgcttggtacagcgtattgccctgtccctttcggcgtatgggttattgtagagactccggtgctgaggtccctgtgggtggggttgtccggtcccactagtcatggtgatacatatctggcgtcgtgcctgatagagacccttcgataccgcttccatggtctaggcatggctcgatgatggtttgccccatcgtgccgacatggcttgatactgatagtactaggtcggctctgcccttcagtagaggagttcgcttgagagccgactctcgtcttgctgggttgttcagcgcgcaagttggtcggcagccccgcttcaccatgttgctcggcaagtaggctggttggcagccccgcctcaccgggttgctcggcaggcaggctggtcggtagcctcgcctcgctgggttgttcggcaggcacactggtcaacaaccctgcctcactgggttgctcggcaggcaggctagtcggcagcccggtcggtcagttagtgggccgttattgggaggcatttgggccttctttgggtacccggttctaagatatccaacatatatacttcttaggcctcgtttggtttgagggactaaagattagtttctctattttagcttaatttagtcactaaattgacaaacggtatcacaaaatagagactaaattattttggtctctagtccctcaagggatgactaaaaagggaataaaccatattaatttcaccttttgtccctccattattttagttacataaatagcgggaggatactaaggagtattttggtcttcttacgagtcatttaatacgttctgaatattattagtcactaaaaccaaatagggtaaggactaaactttatcccttgtactaaatgaactaaacagacccttcatttatactaatctattaataatctaatgtggacacctgatgttaccgcaacttcaccttctgcccgcatagctattcacaccgcacaaaaaatagtgtagagcgtcgaacccacaccacgtgtttcagaaatttggtactaaccatcaaaccacatgtatcttaatgtttagatatatatatatatatatatatatatatatatatatatatatatatatatatatatatatatatatacttaaagcatcagttttaacggtcatcctgcgtcatatttttacaaaacataactacatttcttctaaattaactcagcgtacagtattaaaaacgatgcagtagttgatgtttccacctccgcaagggtgccaagtgcaggagcaacatggacgactggctccgcgagaaccgcatgcgctgccccgtttgctgcaagcccgtccacttcgtgctgccgtggaaagcgctgacgacatcggcgccactgcccgcgcccgtgccactgccaagtgccaacgcactcgcagtcgtcgacgtcttttttgattccaggatgcgcggtagcggtatccgtcgtcgatatgattccaggacgcgctacagtttgggtctccgtcgtaagtcgtaactaattgtgatggcccgtagcctccggtgagccaccaccgagacatgagcgcaccgcacggccgccgtcgagcgttggcgagctgaatcgcgcctccgtacggaagacagcgacagaagggaataagattcgattcttttcttctctgcttcctcatttctctgatgctgctcttgtacccatcttccgagttgggccatgggttgggccatgtgacactaggccagaaacaagccatgtgttacactaccgccctgccaaaatgttgcttgtccccaagcaacatcatgccatgtatatttgctcattatgaatttgctttgtcttatgaagatgtgcaagtagtcatgagaagcttctttgaattgagaatgctgaatatctgggtcctaagtcttcagagagaatggtgccttgttgtacctctccagcagctcaatatattctctgaaattgaaaccaacacgctgcgctctagaaacaagc

SEQ ID NO: 20137 - DNA, 1842 bp, Zea Mays
cagcttggtcccacactcccaccgtactcccaaacaaaacattctctcatagtctcatctcatgtgcacggaaaggcatctattgcctttctcccaacccgccaaaccctacttgccaccgccaaacttccgccttcgtccgcgccggcgccgctctatcgctctaaaataacctttccagttccaccgggactagctgaaaggagagggaacggagggggatggcgtcgccggacgacgagataagccggctcttccgcatccgccgcacggtgtatgagatgctgcgcgaccgcggatacggtgtccgcgacgaacaaatcaagctcgaaaggcacaagttcatcgaacgctacggcaaccccgtccgccgtgacgagctcaccttcaacgccacaaagttgaacggcccatcggaccagatctacgtgttctttcctaatgaggcaaagcccggggtgaagacaatcaggaactacgtcgagaagatgaagaacgagaacgtcttcgccggcatactcgtcgtgcagcaggcgctcagcgccttcgcacgcagcgccgttcaggaggtctcccagaagtaccacctcgaggtcttccaggaagctgagcttcttgtcaacattaaggaccatgtcctagtgccagagcatgtgctcctgacaccggaagacaagaagactcttctagagcggtacaccgtgaaggaaacccagctgccccggattcagattacagacccgatagcaagatactatgggatgaagcgtgggcaggtcgtgaagatcacaagagccagtgagactgctggaagatacatcacctaccgctacgttgtctgagttttgctacattctcatggcttaagcttccgcaccaagcgaaaatgacctctacttgctaatcctgctgtgtactcggaatatctgttgccctggtgcccttccttgagaactgatctcgggctgttctggcgatagtaataggccgctgttccttaagctgtgttccatctcattttaggccctgttcggttgcagataggtgtgatattggggggtgatattggatcgtgatccaaatgtttcttcacaaattattagggtcataaattatttttagttaaaaaatgaataggaatagggtctgatcctaatccgatctttatgttttatagtttaaaatttagagtctattattacctattattacctctagttgtacagttatagaatattggaggggttaggtggggattaaatccctttctgtttaaaattgaatatggagatactcctctaaccgaataagctctagtgaatgattgtgctgttttttaaagacatgccctacatgtactaggagtgtgcataccactctagtcataccattccaatccttctcaatgtgaaccccatggacttttatttggttgtccattttaaaacccattaattcagcacaaaccaaaatttcatcaaccttaacattttcactgctccaacgagggcacacaaccaaagccatttctagggctaaaataggatggatattagttgatcctatgtcttactctaatgtattttagttggatatatgatctaatatgaatagtttgaaataggacggatacagatacagtggcatgatatttattcgggcggataagtgacatacggatgttatttggtcggatatcagatagttgttggatatttgttcgggcagataagtgacatatacagatgttatttggtcggatatcagatagttgttggatatttgttcgggcagataagtgacatatacagatgttatttggtcggatatcgaatagttgtt

SEQ ID NO: 20138 - DNA, 1749 bp, Zea Mays
caaaacattctctcatagtctcatctcatgtgcacggaaaggcatctattgcctttctcccaacccgccaaaccctacttgccaccgccaaacttccgccttcgtccgcgccggcgccgctctatcgctctaaaataacctttccagttccaccgggactagctgaaaggagagggaacggagggggatggcgtcgccggacgacgagataagccggctcttccgcatccgccgcacggtgtatgagatgctgcgcgaccgcggatacggtgtccgcgacgaacaaatcaagctcgaaaggcacaagttcatcgaacgctacggcaaccccgtccgccgtgacgagctcaccttcaacgccacaaagttgaacggcccatcggaccaggaactacgtcgagaagatgaagaacgagaacgtcttcgccggcatactcgtcgtgcagcaggcgctcagcgccttcgcacgcagcgccgttcaggaggtctcccagaagtaccacctcgaggaagctgagcttcttgtcaacattaaggaccatgtcctagtgccagagcatgtgctcctgacaccggaagacaagaagactcttctagagcggtacaccgtgaaggaaacccagctgccccggattcagattacagacccgatagcaagatactatgggatgaagcgtgggcaggtcgtgaagatcacaagagccagtgagactgctggaagatacatcacctaccgctacgttgtctgagttttgctacattctcatggcttaagcttccgcaccaagcgaaaatgacctctacttgctaatcctgctgtgtactcggaatatctgttgccctggtgcccttccttgagaactgatctcgggctgttctggcgatagtaataggccgctgttccttaagctgtgttccatctcattttaggccctgttcggttgcagataggtgtgatattggggggtgatattggatcgtgatccaaatgtttcttcacaaattattagggtcataaattatttttagttaaaaaatgaataggaatagggtctgatcctaatccgatctttatgttttatagtttaaaatttagagtctattattacctattattacctctagttgtacagttatagaatattggaggggttaggtggggattaaatccctttctgtttaaaattgaatatggagatactcctctaaccgaataagctctagtgaatgattgtgctgttttttaaagacatgccctacatgtactaggagtgtgcataccactctagtcataccattccaatccttctcaatgtgaaccccatggacttttatttggttgtccattttaaaacccattaattcagcacaaaccaaaatttcatcaaccttaacattttcactgctccaacgagggcacacaaccaaagccatttctagggctaaaataggatggatattagttgatcctatgtcttactctaatgtattttagttggatatatgatctaatatgaatagtttgaaataggacggatacagatacagtggcatgatatttattcgggcggataagtgacatacggatgttatttggtcggatatcagatagttgttggatatttgttcgggcagataagtgacatatacagatgttatttggtcggatatcagatagttgttggatatttgttcgggcagataagtgacatatacagatgttatttggtcggatatcgaatagttgtt

SEQ ID NO: 20139 - DNA, 1924 bp, Zea Mays
gccaactatacctctcaccatatatatcggctccatggagaccgacgaaaaacacgcgcacttcgagttgtacaggagctgcactgcacgctcctcaaattcccacgccgcatcgccacccagtgccctgctcaccgccgaacggtttcaatggccgcaagcacagcggcgccatgctacgacgcgcccgagggcgtggacgtccgcgggcggtacgaccgggagttcgcgggcatcctcacccgcgacgcgctggacttcgtggccggcctgcagcgcgagttccgcgccgccgtccgctacgccatggagcagcggcgggaggcccagcgccggtacgacgccggcgagctgccgcggttcgacccggccacgacgctcgtgcgcgagggggactggacgtgcgcgcccgtgccgccggccgtcgcggaccgcaccgtggagatcacgggccccgccgagccgcggaagatggtcatcaacgcgctcaactccggcgccaaggtcttcatggctgacttcgaggacgcgctgtcgccgacgcgcacatcctcatcgacggcgagccggccattggctgcctcgtcgacttcggcctctacttcttccacaaccacgctgccttccgcgcaggccagggcgccggcttcgggccgttcttttacctgcccaagatggagcactccagggaagcgaggatatggaacggggtgttccagagagcggagaaagctgctgggatcgagctcgggagcatccgggcaacggtgctggtggagacgttgccagcggtgttccaaatgaacgagatcctgcacgagctgcgcgagcactcggcggggctcaactgcggccgctgggactacatcttcagctacgtcaagacgttccgcgcccacccggaccgcctcctccccgaccgcgccctcgtcggcatggcccagcacttcatgcgctcctactcccacctcctcatccacacctgccaccgtcgcggagtccacgccatgggcggcatggcggctcagatcccgatcaaggacgatgcggcggcgaacgaggcggcactggagctggtgcgcaaggacaagctgagggaggtgcgcgcgggccacgacggcacgtgggcggcgcacccggggctcatcccggcgatacgggaggtcttcgagggccacctcggcgggaggccgaaccagatcggcgacgccgcagggcacgagggtgccagcgtcaacgaggaggacctcatccagccgccgcggggcgcgcgcactgtggacggtctgcggctcaacgtccgcgtgggcgtgcagtacctcgcggcgtggctggccggctccggctccgtcccgctgtacaacctgatggaggacgcggctacggcggagatcagccgcgtccagaactggcagtggctgcgccacggagcggcgctggacgccggcggtgtggaggtgcgcgcgacgccagagctactcgcacgcgtcgtcgaggaggagatggcgagggtcgaggcagaggtcggccccgacaggttccgaaaggggcggtacgcggaggcgggcaggatcttcagccggcagtgcaccgcgccggagctggacgacttcctcacgctggacgcgtacaacctcatcgtggcgcaccatccagccatcgaaataaggacggatgaccaacaaacatgatagacatgaacagccttgtaaagcgcactgcatattctctgctctgggacttttagtcgtgcttatgatagtacagggtggtctatgtaataaactgagcttctgttgaactctcgggaaggacaactgcacaaccctgtatgagtgtaccgagactatcttttcaccctcagaactaccgctctacaacgtgtatctttctaattttataaatcaaacttatttaactttaa

SEQ ID NO: 20140 - DNA, 2139 bp, Zea Mays
cgacgaaaaacacgcgcacttcgagttgtacaggagctgcactgcacgctcctcaaattcccacgccgcatcgccacccagtgccctgctcaccgccgaacggtttcaatggccgcaagcacagcggcgccatgctacgacgcgcccgagggcgtggacgtccgcgggcggtacgaccgggagttcgcgggcatcctcacccgcgacgcgctggacttcgtggccggcctgcagcgcgagttccgcgccgccgtccgctacgccatggagcagcggcgggaggcccagcgccggtacgacgccggcgagctgccgcggttcgacccggccacgacgctcgtgcgcgagggggactggacgtgcgcgcccgtgccgccggccgtcgcggaccgcaccgtggagatcacgggccccgccgagccgcggaagatggtcatcaacgcgctcaactccggcgccaaggtcttcatgagagaaaaacgtggcaggctgacttcgaggacgcgctgtcgccgacgtgggagaacctgatgcacgggcaggtgaacctgcgggacgccgtggctggcaccatcagcttccgcgacgcggcgcgcgggcggacgtacgagctcaacgaccgaaccgccaagctcttcgtccggccccgcggctggcacctccccgaggcgcacatcctcatcgacggcgagccggccattggctgcctcgtcgacttcggcctctacttcttccacaaccacgctgccttccgcgcaggccagggcgccggcttcgggccgttcttttacctgcccaagatggagcactccagggaagcgaggatatggaacggggtgttccagagagcggagaaagctgctgggatcgagctcgggagcatccgggcaacggtgctggtggagacgttgccagcggtgttccaaatgaacgagatcctgcacgagctgcgcgagcactcggcggggctcaactgcggccgctgggactacatcttcagctacgtcaagacgttccgcgcccacccggaccgcctcctccccgaccgcgccctcgtcggcatggcccagcacttcatgcgctcctactcccacctcctcatccacacctgccaccgtcgcggagtccacgccatgggcggcatggcggctcagatcccgatcaaggacgatgcggcggcgaacgaggcggcactggagctggtgcgcaaggacaagctgagggaggtgcgcgcgggccacgacggcacgtgggcggcgcacccggggctcatcccggcgatacgggaggtcttcgagggccacctcggcgggaggccgaaccagatcggcgacgccgcagggcacgagggtgccagcgtcaacgaggaggacctcatccagccgccgcggggcgcgcgcactgtggacggtctgcggctcaacgtccgcgtgggcgtgcagtacctcgcggcgtggctggccggctccggctccgtcccgctgtacaacctgatggaggacgcggctacggcggagatcagccgcgtccagaactggcagtggctgcgccacggagcggcgctggacgccggcggtgtggaggtgcgcgcgacgccagagctactcgcacgcgtcgtcgaggaggagatggcgagggtcgaggcagaggtcggccccgacaggttccgaaaggggcggtacgcggaggcgggcaggatcttcagccggcagtgcaccgcgccggagctggacgacttcctcacgctggacgcgtacaacctcatcgtggcgcaccatccaggtgcgtcaccgtgcaagctctgaatacatgcatgccttttgtggcagtggagtcagctttcaaaaataacacatcgctgtccaatgcagccatcgaaataaggacggatgaccaacaaacatgatagacatgaacagccttgtaaagcgcactgcatattctctgctctgggacttttagtcgtgcttatgatagtacagggtggtctatgtaataaactgagcttctgttgaactctcgggaaggacaactgcacaaccctgtatgagtgtaccgagactatcttttcaccctcagaactaccgctctacaacgtgtatctttctaattttataaatcaaacttatttaactttaa

SEQ ID NO: 20141 - DNA, 1814 bp, Zea Mays
cgcagacgaacgcagactaaaactggccatcctctacaaccgcgccgtgtacccgggggagagcttcgccaaggtgaagaagtacgggctcaccatgccgctcacgcaggacgagtgggttaacttcatcactagcgccacctccaagaactcagagtggctgggggcaggaaagctgcaggggatcgtgatggtcataatgagcaaggccaccagcgaggtgatcgagcgctggaacttcaacatcgacacctaccccgaggtcgtcgagaaggggtgcgccaccctaaccaatccatggtagccggtgctcattgtgtcagtcagtaatggcttgattgcgtcttcgtctgatgttcgtcaggtctatcaaggagaagagcgacaaaaagatcatgagggagattcgggccatcaagcgccagatcgactcttgcatcaccgacctcccctgcctcgacgagccatgcgtgtttgatatgctggcctacacggacacggacgttgacgctccggacacctggatcgaaagcgacaccaagctcatccacaacacgcagatggttaagctgcactcgttcgacacgaagttcctgtgctggagtggcaggtccacaaggtcgacacggtggtgtcgtacaagaagaatgaggacgacacctcttcgtcgtcaagctcagtaataagagaagcaagaatagagcttcttgaagctgaacttggaagatttgtgatgcttgctaatgagtcagctgaagagatgtatacaagattgaaaaaaatcatcaagaaaattagaagctatggaagtaagaaatggacagatcatgaagtggtgaaaataatgctaagggcttattttctaagaaactcggtattatgttttatgataagagatagtcctaattatgagaagatgacgccagaagtagtacttggtagatttatccgtcatgaaatgatggaaaatgaagggcttcttgaagctgaacttggaagatttgtgatgcttgctgatgagtcagctgaagagatgtacacaagattgaaaaaaatcatcaacaaacttagaagctatggaagtaagagatggacagatcatgaagtggtgaaaataatgctaagggcttattttctaagaaactcggtattatgttttttgataagacaaagtcctaactatgagaagatgacgccggaagtagtacttagcaaatttatcgatcatgaaacgttgttagaagaagccaaatatgttgatatcatgtccaaaagtgtcactgcatcaaagaatcaagacattgcactcaaggcaaacaagaagcaaaaggggaaatgtgtttttgaagaatcaacaagtgaagataatgaagatagttcaagtcttgatgaagaaaaaatagcactcatcaaaagcttcaaaaagataatgaagagccgcaactacaagagcaacaaaaagaatgacaaagaataaaagaaggaagaaaaaagagctatgtcaagaatagacatagtggtggagctcacattagaaagtaatgacacttgaatggtgagagtttcgactcctccaaaattgaagaacattggccttgtggcaaaatttggtacaaagaaagtaaaatttggtaggacatatcaagttcctctcataaatatacatctagtactgattatgatgcctctagtagtagtagttctagtgatgatgatcagttaacatgtgtcttaccttaataaaaaatactatttctaaatttgaaaagatatgatggaattaaataatatatatgagcttgtggagacgcaag

SEQ ID NO: 20142 - DNA, 2027 bp, Zea Mays
atgcgtggccccacacggccacacaaccgttgggcgcgccggtccttaaaatgcccccgcacctgtccaccgccgtgagcacacatccgtccagccgtccacccactcaccaggaccggtcaacgctacgatacctgtgcactgcgcagcccccgccgctgcactagccgttgcttctcccttccgttcgcgttcccattcccaaggagttgtcctcgccggcggatccggggcgccgtcgcaagacgaggaaggcggaggagaggataccagaatggcgtcgcgaacggcgtccaaggatatcatcgctctgcgaggctccgccgccatcgtcagcgagttcttcggctacgcggcgaacagcatcctctacaaccgcgccgtgtacccgggggagagcttcgccaaggtgaagaagtacgggctcaccatgccgctcacgcaggacgagtgggttaacttcatcactagcgccacctccaagaactcaggaaagctgcaggggatcgtgatggtcataatgagcaaggccaccagcgaggtgatcgagcgctggaacttcaacatcgacacctaccccgaggtcgtcgagaaggggtctatcaaggagaagagcgacaaaaagatcatgagggagattcgggccatcaagcgccagatcgactcttgcatcaccgacctcccctgcctcgacgagccatgcgtgtttgatatgctggcctacacggacacggacgttgacgctccggacacctggatcgaaagcgacaccaagctcatccacaacacgcagatggttaagctgcactcgttcgacacgaaggtccacaaggtcgacacggtggtgtcgtacaagaagaatgaggacgacacctcttcgtcgtcaagctcagtaataagagaagcaagaatagagcttcttgaagctgaacttggaagatttgtgatgcttgctaatgagtcagctgaagagatgtatacaagattgaaaaaaatcatcaagaaaattagaagctatggaagtaagaaatggacagatcatgaagtggtgaaaataatgctaagggcttattttctaagaaactcggtattatgttttatgataagagatagtcctaattatgagaagatgacgccagaagtagtacttggtagatttatccgtcatgaaatgatggaaaatgaagggcttcttgaagctgaacttggaagatttgtgatgcttgctgatgagtcagctgaagagatgtacacaagattgaaaaaaatcatcaacaaacttagaagctatggaagtaagagatggacagatcatgaagtggtgaaaataatgctaagggcttattttctaagaaactcggtattatgttttttgataagacaaagtcctaactatgagaagatgacgccggaagtagtacttagcaaatttatcgatcatgaaacgttgttagaagaagccaaatatgttgatatcatgtccaaaagtgtcactgcatcaaagaatcaagacattgcactcaaggcaaacaagaagcaaaaggggaaatgtgtttttgaagaatcaacaagtgaagataatgaagatagttcaagtcttgatgaagaaaaaatagcactcatcaaaagcttcaaaaagataatgaagagccgcaactacaagagcaacaaaaagaatgacaaagaataaaagaaggaagaaaaaagagctatgtcaagaatagacatagtggtggagctcacattagaaagtaatgacacttgaatggtgagagtttcgactcctccaaaattgaagaacattggccttgtggcaaaatttggtacaaagaaagtaaaatttggtaggacatatcaagttcctctcataaatatacatctagtactgattatgatgcctctagtagtagtagttctagtgatgatgatcagttaacatgtgtcttaccttaataaaaaatactatttctaaatttgaaaagatatgatggaattaaataatatatatgagcttgtggagacgcaag

SEQ ID NO: 20143 - DNA, 1963 bp, Zea Mays
atgcgtggccccacacggccacacaaccgttgggcgcgccggtccttaaaatgcccccgcacctgtccaccgccgtgagcacacatccgtccagccgtccacccactcaccaggaccggtcaacgctacgatacctgtgcactgcgcagcccccgccgctgcactagccgttgcttctcccttccgttcgcgttcccattcccaaggagttgtcctcgccggcggatccggggcgccgtcgcaagacgaggaaggcggaggagaggataccagaatggcgtcgcgaacggcgtccaaggatatcatcgctctgcgaggctccgccgccatcgtcagcgagttcttcggctacgcggcgaacagcatcctctacaaccgcgccgtgtacccgggggagagcttcgccaaggtgaagaagtacgggctcaccatgccgctcacgcaggacgagtgggttaacttcatcactagcgccacctccaagaactcaggaaagctgcaggggatcgtgatggtcataatgagcaaggccaccagcgaggtgatcgagcgctggaacttcaacatcgacacctaccccgaggtcgtcgagaaggggtctatcaaggagaagagcgacaaaaagatcatgagggagattcgggccatcaagcgccagatcgactcttgcatcaccgacctcccctgcctcgacgagccatcgacaccaagctcatccacaacacgcagatggttaagctgcactcgttcgacacgaaggtccacaaggtcgacacggtggtgtcgtacaagaagaatgaggacgacacctcttcgtcgtcaagctcagtaataagagaagcaagaatagagcttcttgaagctgaacttggaagatttgtgatgcttgctaatgagtcagctgaagagatgtatacaagattgaaaaaaatcatcaagaaaattagaagctatggaagtaagaaatggacagatcatgaagtggtgaaaataatgctaagggcttattttctaagaaactcggtattatgttttatgataagagatagtcctaattatgagaagatgacgccagaagtagtacttggtagatttatccgtcatgaaatgatggaaaatgaagggcttcttgaagctgaacttggaagatttgtgatgcttgctgatgagtcagctgaagagatgtacacaagattgaaaaaaatcatcaacaaacttagaagctatggaagtaagagatggacagatcatgaagtggtgaaaataatgctaagggcttattttctaagaaactcggtattatgttttttgataagacaaagtcctaactatgagaagatgacgccggaagtagtacttagcaaatttatcgatcatgaaacgttgttagaagaagccaaatatgttgatatcatgtccaaaagtgtcactgcatcaaagaatcaagacattgcactcaaggcaaacaagaagcaaaaggggaaatgtgtttttgaagaatcaacaagtgaagataatgaagatagttcaagtcttgatgaagaaaaaatagcactcatcaaaagcttcaaaaagataatgaagagccgcaactacaagagcaacaaaaagaatgacaaagaataaaagaaggaagaaaaaagagctatgtcaagaatagacatagtggtggagctcacattagaaagtaatgacacttgaatggtgagagtttcgactcctccaaaattgaagaacattggccttgtggcaaaatttggtacaaagaaagtaaaatttggtaggacatatcaagttcctctcataaatatacatctagtactgattatgatgcctctagtagtagtagttctagtgatgatgatcagttaacatgtgtcttaccttaataaaaaatactatttctaaatttgaaaagatatgatggaattaaataatatatatgagcttgtggagacgcaag

SEQ ID NO: 20144 - DNA, 2167 bp, Zea Mays
agcttttactcctcagtcctgctccatctgcctttgctacttttgggggacctccacgcccctcaaatccagagaacaaaaaggagagagagagagaaagagagagagagagagagagagagggaggcagagagcttgccatcccaagcaaaggttccctccttccccacctcgcgctcaacccccctcatcctcgcacatccgattgtgccctgtgctctgccgttctcttatccaagatttcgctggcggcggctcagggagcgaacaaagattgttttttttttcgggctatggagacgaggcctgattcattcaggcccgggcggtggagtggcttcctgaccgggtctgattcgtattggttcaaatgatctgggcggcttaattggttgcatccgcttccgccggggaatcggagctagggctgtggtttgttggccggctggtggatttgtcggcttgggtctggtgagatctggagggtttctggttcagcgcacgggccgcaggtctgcgtagatcccctcttcgattccgtggcggatttgtttagggttttggtttgagtctggtggaacaagagggctggaaatggagactatccagttccatctggtctaacttctaacccagtgatgaatggggctgtggtgtatcactccagtgagccgttaccggcattcaaggatgtgccggcatcagagaagcagaatttgtttgtcaagaaggtgaacctatgctgtgctgtgtatgacttcgcggatccaactaagaacctcaaggagaaggaggtgaagcgtcagacacttatggagcttgttgattacatcacttctgcgaatggcaagttctcagaggttgtcatgctggagatcacaaagatggtgtcgattaatttgttccggagctccagccccacccctcgtgagaacaaggccattgaaggggttgatctggaggaggacgagcctctcatggatcctgcatggtcgcacctgcagatcgtgtatgaggttttcttgagatttgtagcatcacaggagacagatgcaaagctggccaagaggtttatattcgaaacagagaaacataatggtgttgcagagttgttggagatcctgggcagtattatcaatgggtttgcccttccgcttaaggaagagcacaaattattccttgttcgtgcattgatccctcttcacaagccaaaatgtgtatctatgtaccatcagcagctatcatattgcatcacacagtttgttgagaaggattgcaaacttgctgacacagttattagaggcttacttaaatattggcctgtgacaaacagctcaaaggaggtgatgttcttgggtgagttagaagaggttttagaggcaacacagcttgcagagttccaaagatgcatggttccactcttccgtcagattgcccgtagcatgaacagctctcatttccaggtggcagagcgggccttgtttctctggaacaatgaccatatcgaaaacctaatcaagcaaaactacaaggtgctattacctatcatctatccagcactcgagagaaactccagagatcactggaaccaagctgtccgtagcctgacgctgaatgtccgcaagatcttctctgatcacgattctgcattttttggggagtgcgatcagaggttcagtgacgaggagctcaagcaggaggaatctgattcgaagcgagaagccctatggatgcgcttggaggaaatggccgcctcaaaacctcgcgaaaacagtcccttaggcgcaccgaatggcaaacccagccaagctgctggctagaatagcccaccatatcagccgcagccgtgtaactctgactctgggttgtgattttagctttgggacttttttttgtcgttggtttgcctctggccctgttgtaggtgggtaggatgtgtttggttttgtcaggactgtatgttcaaagtgtacacatacagaggaatttgagagatttggcatgtgtagtaacattactcaggattaccatatagcccaataaacaacgtcgattttgattgcaaatacctagtttgggtggtttatataccgaaatgacaatgagcgatgtgttcttgtttctgctgttatattatgtactcctatatgtaatggcgctggaaact

SEQ ID NO: 20145 - DNA, 780 bp, Zea Mays
cctcccaggctgccaggcatggaggtcttgaacgcgagggagaacatgatgttcatccaatcgggcattgacacgtgtggcagagcgggccttgtttctctggaacaatgaccatatcgaaaacctaatcaagcaaaactacaaggtgctattacctatcatctatccagcactcgagagaaactccagagatcactggaaccaagctgtccgtagcctgacgctgaatgtccgcaagatcttctctgatcacgattctgcattttttggggagtgcgatcagaggttcagtgacgaggagctcaagcaggaggaatctgattcgaagcgagaagccctatggatgcgcttggaggaaatggccgcctcaaaacctcgcgaaaacagtcccttaggcgcaccgaatggcaaacccagccaagctgctggctagaatagcccaccatatcagccgcagccgtgtaactctgactctgggttgtgattttagctttgggacttttttttgtcgttggtttgcctctggccctgttgtaggtgggtaggatgtgtttggttttgtcaggactgtatgttcaaagtgtacacatacagaggaatttgagagatttggcatgtgtagtaacattactcaggattaccatatagcccaataaacaacgtcgattttgattgcaaatacctagtttgggtggtttatataccgaaatgacaatgagcgatgtgttcttgtttctgctgttatattatgtactcctatatgtaatggcgctggaaact

SEQ ID NO: 20146 - DNA, 1967 bp, Zea Mays
cgaccggccgagagaaacaccgacccgaccgaactcaactcgttctcgacccgaagccccaaatccctctcagaaaacccttccctcccgatggcaaccgccgccaccgccatggtggtacccgagcagccgcgccgccggaagccggccccggggcgcgggggagtggccctccctgcgggtctctcggaggaggaggccagggtgcgggccatcgccgagattgtctcggcgatgggggagctctcgcggcgcggggaggacgtggacctcaacgcgctcaagtccgccgcgtgccggagatacggtctggcgcgagcgcccaagctggtggagatgatcgctgccgtgcccgaggccgaccgcgccgcgctgctgccgcggttgcgcgctaagcccgtgcgcacggcgtcgggtatcgccgtcgtcgccgtcatgtcgaagccgcaccgttgcccccacatcgctaccaccggtaacatctgtgtctactgcccgggcggtcccgactccgacttcgagtacagcacgcaatcctacactggatacgaacccaccagcatgcgtgccattcgggcaaggtataatccatatgtgcaagccaggagcaggatagatcagctcaagaggttagggcatagtgtggataaggtcgagttcatcttgatgggtgggactttcatgtccttaccagctgattatcgcgattattttatcagaaatcttcatgatgctttgtcggggcacacttcagcaaatgttgaggaggctatttgttattccgaacatagtgctgtcaaatgtattggtatgacgattgaaacgagacctgattattgcttggggcctcatctgcgccagatgctatcttatggttgtactcgcctggaaattggtgtccagagtacatatgaagatgttgcccgtgacacaaacagaggacacacggtggctgctgttgctgattgcttctgtttggcaaaagatgctgggtttaagatttacctaatgttggagttgaaagagacttagaaagtttcagagagttttttgaaagtccagcattccgggctgatggtctgaagatttatccaacacttgttattcgtggaactggtctttatgagctctggaaaactggcagatatagaaattatccacctgagctcttggtggatatcgtggcaagaattctgtctatggttccaccatggacacgagtgtatcgggtccagagagatattcctatgcctcttgtcacttctggtgttgagaaaggtaaccttcgtgagctagctttggctcgaatggatgatctgggcctaaaatgccgagatgtcagaacccgtgaagcagggattcaggatatccatcacaagatcaggcctgatgaagtagagcttgttagacgtgactatgctgcaaatgagggctgggagacgttcctctcttatgaggatacacgacaggatatcctgatcggcctgttgcgcttgcgtaaatgtggccgtaatgttacatgccctgaacttgtagggaggtgttcaattgttcgtgagcttcatgtctatggaactgcagtccctgtgcatggccgtgatgtagacaagctacagcaccaggggtatggaactctgttaatggaagaagcagaaaggattgctcaaaaggagcaccgttcagagaaattggctgtcatttcgggggttggtactcgccactactaccgcaaactgggttatgagctagaaggaccttatatggtcaaatgtttggcataataccgtttcattttttttcgtgctcatgtagaacagactagtgtttataatgtaacttgtgtagttttttcaaaaaaaaaaaatttgttatacccttcttttaatattgagtcgtccaaatgaaaatggagacagctcagcgtgtaatattaaatgatagcaaaattccaccctagccccaaaaaa

SEQ ID NO: 20147 - DNA, 1952 bp, Zea Mays
cgaccggccgagagaaacaccgacccgaccgaactcaactcgttctcgacccgaagccccaaatccctctcagaaaacccttccctcccgatggcaaccgccgccaccgccatggtggtacccgagcagccgcgccgccggaagccggccccggggcgcgggggagtggccctccctgcgggtctctcggaggaggaggccagggtgcgggccatcgccgagattgtctcggcgatgggggagctctcgcggcgcggggaggacgtggacctcaacgcgctcaagtccgccgcgtgccggagatacggtctggcgcgagcgcccaagctggtggagatgatcgctgccgtgcccgaggccgaccgcgccgcgctgctgccgcggttgcgcgctaagcccgtgcgcacggcgtcgggtatcgccgtcgtcgccgtcatgtcgaagccgcaccgttgcccccacatcgctaccaccggtaacatctgtgtctactgcccgggcggtcccgactccgacttcgagtacagcacgcaatcctacactggatacgaacccaccagcatgcgtgccattcgggcaaggtataatccatatgtgcaagccaggagcaggatagatcagctcaagaggttagggcatagtgtggataaggtcgagttcatcttgatgggtgggactttcatgtccttaccagctgattatcgcgattattttatcagaaatcttcatgatgctttgtcggggcacacttcagcaaatgttgaggaggctatttgttattccgaacatagtgctgtcaaatgtattggtatgacgattgaaacatgctatcttatggttgtactcgcctggaaattggtgtccagagtacatatgaagatgttgcccgtgacacaaacagaggacacacggtggctgctgttgctgattgcttctgtttggcaaaagatgctgggtttaaggtggttgcccacatgatgccagatttacctaatgttggagttgaaagagacttagaaagtttcagagagttttttgaaagtccagcattccgggctgatggtctgaagatttatccaacacttgttattcgtggaactggtctttatgagctctggaaaactggcagatatagaaattatccacctgagctcttggtggatatcgtggcaagaattctgtctatggttccaccatggacacgagtgtatcgggtccagagagatattcctatgcctcttgtcacttctggtgttgagaaaggtaaccttcgtgagctagctttggctcgaatggatgatctgggcctaaaatgccgagatgtcagaacccgtgaagcagggattcaggatatccatcacaagatcaggcctgatgaagtagagcttgttagacgtgactatgctgcaaatgagggctgggagacgttcctctcttatgaggatacacgacaggatatcctgatcggcctgttgcgcttgcgtaaatgtggccgtaatgttacatgccctgaacttgtagggaggtgttcaattgttcgtgagcttcatgtctatggaactgcagtccctgtgcatggccgtgatgtagacaagctacagcaccaggggtatggaactctgttaatggaagaagcagaaaggattgctcaaaaggagcaccgttcagagaaattggctgtcatttcgggggttggtactcgccactactaccgcaaactgggttatgagctagaaggaccttatatggtcaaatgtttggcataataccgtttcattttttttcgtgctcatgtagaacagactagtgtttataatgtaacttgtgtagttttttcaaaaaaaaaaaatttgttatacccttcttttaatattgagtcgtccaaatgaaaatggagacagctcagcgtgtaatattaaatgatagcaaaattccaccctagccccaaaaaa

SEQ ID NO: 20148 - DNA, 1752 bp, Zea Mays
cgaccggccgagagaaacaccgacccgaccgaactcaactcgttctcgacccgaagccccaaatccctctcagaaaacccttccctcccgatggcaaccgccgccaccgccatggtggtacccgagcagccgcgccgccggaagccggccccggggcgcgggggagtggccctccctgcgggtctctcggaggaggaggccagggtgcgggccatcgccgagattgtctcggcgatgggggagctctcgcggcgcggggaggacgtggacctcaacgcgctcaagtccgccgcgtgccggagatacggtctggcgcgagcgcccaagctggtggagatgatcgctgccgtgcccgaggccgaccgcgccgcgctgctgccgcggttgcgcgctaagcccgtgcgcacggcgtcgggtatcgccgtcgtcgccgtcatgtcgaagccgcaccgttgcccccacatcgctaccaccggtaacatctgtgtctactgcccgggcggtcccgactccgacttcgagtacagcacgcaatcctacactggatacgaacccaccagcatgcgtgccattcgggcaaggtataatccatatgtgcaagccaggagcaggatagatcagctcaagaggttagggcatagtgtggataaggtcgagttcatcttgatgggtgggactttcatgtccttaccagctgattatcgcgattattttatcagaaatcttcatgatgctttgtcggggcacacttcagcaaatgttgaggaggctatttgttattccgaacatagtgctgtcaaatgtattggtatgacgattgaaacgagacctgattattgcttggggcctcatctgcgccagatgctatcttatggttgtactcgcctggaaattggtgtccagagtacatatgaagatgttgcccgtgacacaaacagaggacacacggtggctgctgttgctgattgcttctgtttggcaaaagatgctgggtttaaggtggttgcccacatgatgccagatttacctaatgttggagttgaaagagacttagaaagtttcagagagttttttgaaagtccagcattccgggctgatggtctgaagatttatccaacacttgttattcgtggaactggtctttatgagctctggaaaactggcagatatagaaattatccacctgagctcttggtggatatcgtggcaagaattctgtctatggttccaccatggacacgagtgtatcgggtccagagagatattcctatgcctcttgtcacttctggtgttgagaaaggtaaccttcgtgagctagctttggctcgaatggatgatctgggcctaaaatgccgagatgtcagaacccgtgaagcagggattcaggatatccatcacaagatcaggcctgatgaagtagagcttgttagacgtgactatgctgcaaatgagggctgggagacgttcctctcttatgaggatacacgacaggatatcctgatcggcctgttgcgcttgcgtaaatgtggccgtaatgttacatgccctgaacttgtagggaggtgttcaattgttcgtgagcttcatgtctatggaactgcagtccctgtgcatggccgtgatgtagacaagctacagcaccaggggtatggaactctgttaatggaagaagcagaaaggattgctcaaaaggagcaccgttcagagaaattggctgtcatttcggggaaagatggtctacccaacaattat

SEQ ID NO: 20149 - DNA, 169 bp, Zea Mays
atggaaagaggcttcttctgcttcttccccatcccctccctcgcgcgaatgctcttcgccggaaagcggccgacgaagacctgtgcaactggcgtaggtcggcggcggcgcgaggtgaacgggagaaggaaaacggcaaagaggtgcgagtgcaggactaggagagcaa

SEQ ID NO: 20150 - DNA, 2855 bp, Zea Mays
cctactcacacatttcccagccgttggtttagaaagcgtctgccagcgccgccgtgccgtggctactctgtactccggcccccatccgcagcaacagcccgcgcagacgcaaagcgtcaagtcaaagaccctgacgataaacatacaaaagcagaagccaggcttacctgcccagcgcgctgcgcaatcgccgccctcctcccctcgcccaacggcaacgaatctgcctgccttcctgcagcctcaccggctcatcacttcgtcagccatcttcacagcccgcctggcgccccccagcatcagattcccctgctaaaccctcctgttgcggtttctatctggtccagataatcactcccttccctccaattatttttccactgctcgaaggcccggggcgcccaccggagccaatcagttccgttcacctttccaccggaatccaccccaccgccaccggtggatgatttgatggagttgccgttttgcggaccgtggaccggcgtggaggaagggttgatagggaggattttttggattgatctataagccttttggtggctaacggttgggagctttggaggagaactcgagtccttgggctctaggttggtctggacgaggccggaggaagttgccaatggagccgccgactgggttctgggcctcgcttctgagcttcctcaagttcctcccctacttctgcggcctcctcgtccttggactcatcaaaggtgttttgttgtgcccttgggcatgtctgattatggcgattggaatatctgccctggtcctgggcttatggcctatgcatctgatttggacatactactgcattgtcagaaccaagctggttggacctgtggtaaagcttctgcttcttattgctgcgactgcagtcttgatcatatggttgataattggcatcccgggaagcatatttgctggattggtatatggttttctagcacccataatggctacatttgatgctgtaggagaaggcaaagaaaagccatttgttcattgctttgtggatggaacatggagtactatcactggaagctgtacagtagtcagggacgtgaaagatttgcttttccactcctatttttcacttatggatgaccttcgtcttcagaaacctcctgacggggagccatatgagataagattgcttgatattcctggtgcactaatagcggctgcatttgggcttctacttgatggaataatgttcacattaattgccttctataagtgccccgtgatgcttttcaaaggatggaaacgactgatccaggacatgattgggagagaagggccctttctggagactgcttgtgtgccatttgctggtcttgctattcttctttggccatttgctgtagtaggagccgttctggcatccatactctccagtgcccctttaggtgcttatgctgcagttgtagcttatcaggaatcctcccttatcctgggaattgcctatgtgttctcgtcggtgtctatatttgatgaatacacaaatgatgttcttgacatggcgcctggttcttgttttccaagatttaaatatcggaagggcaaagatgagtcttcacacgggcacagtgttccattatccagaccagcctcattcaatagggagaagcaagaagggaaaaggcctccgtctcgtgttacttcatttaagaacagcattgatgatttcaatccattcaagctgctggaccacctatttgccgaatgcaggaaccagggggaggatttggttaacagaggagtgataacaatgaaggacattgaagaaacgaagtctggcaaagttggcagcggtgttcttaatgttggtctaccagcgtatgttattcttaatgcactccttcggtctgcgaaagctgattctgtcgggctaatcttaagtgacggctctgagattacatctgacaatagacctaaaaacaccatctttgattggttctttgaccctcttatggttataaaggaacagatcaaagctgagaatctcactgacgaagaggaagagtatctgaaaatgcgagtgctattggctggtgatcccagtcgcctgaaaggctctctgcctcatgttccatccttgactgaacgtaaaaaggcagatatagacgcattcgctcgcaggttgcaaggaatcacaaagtcgatatctagatatcctacatcaaagcgccgcttcgacgtccttgtgaaggcgctcttgtcagagctggagaggacgatgggccaatctggcaatggatcccagtcccaggcgcagaggctgcgaaactcggtagcccggatgttgagccagaaatctatgggcaagactgccaacattagggatgaagacccagaagcgcagatgacgagactgtctcgcaccccgtgatcgtctgtttgttagtttgacgatgccgtatcacatgctattccagccttgtacaaatgatgagtagatagaatgctgcggcttgaactgatgctcttacatctcatgtatgatctgtatattttaggcactatatgtatcgtgtatgcaatgtttttttgctcccgaaaagaaaagagtatgcacagaggagaacaataaataaaaatacgcaatcctcaacggataacgccggcgcgcatgtgttttagacaaattgtgggaggttaagctacagcaattgcaaagcacaccggctttggggctcgcatgaaacttgcaccgtattaggtggataattgcaaaaggttgacgcatgttcaaccccgaagaccatccgtgggctggctatcaggcacaatggtgtcatcatcgtctaacagctcctccagcttctttc

SEQ ID NO: 20151 - DNA, 3118 bp, Zea Mays
cctactcacacatttcccagccgttggtttagaaagcgtctgccagcgccgccgtgccgtggctactctgtactccggcccccatccgcagcaacagcccgcgcagacgcaaagcgtcaagtcaaagaccctgacgataaacatacaaaagcagaagccaggcttacctgcccagcgcgctgcgcaatcgccgccctcctcccctcgcccaacggcaacgaatctgcctgccttcctgcagcctcaccggctcatcacttcgtcagccatcttcacagcccgcctggcgccccccagcatcagattcccctgctaaaccctcctgttgcggtttctatctggtccagataatcactcccttccctccaattatttttccactgctcgaaggcccggggcgcccaccggagccaatcagttccgttcacctttccaccggaatccaccccaccgccaccggtggatgatttgatggagttgccgttttgcggaccgtggtaactactctctcccaccaccaacaatcaagagtccgctctcctccaacctcctgccaacagcacgcctgcctctctctctctgtgtgtgtgtgtgtgtgtgtgtgtgtgtcaccgagggtccgaggcggtcctactccctctgtcttggtgtcttcttgcgcacgccgcttggtggttctcctcctcacggttccatctccgggtccttgggtctggatggaactggagacacggtagaggagcccgcggtttcccttttcccctcccaacaaggaagggttgatagggaggattttttggattgatctataagccttttggtggctaacggttgggagctttggaggagaactcgagtccttgggctctaggttggtctggacgaggccggaggaagttgccaatggagccgccgactgggttctgggcctcgcttctgagcttcctcaagttcctcccctacttctgcggcctcctcgtccttggactcatcaaaggtgttttgttgtgcccttgggcatgtctgattatggcgattggaatatctgccctggtcctgggcttatggcctatgcatctgatttggacatactactgcattgtcagaaccaagctggttggacctgtggtaaagcttctgcttcttattgctgcgactgcagtcttgatcatatggttgataattggcatcccgggaagcatatttgctggattggtatatggttttctagcacccataatggctacatttgatgctgtaggagaaggcaaagaaaagccatttgttcattgctttgtggatggaacatggagtactatcactggaagctgtacagtagtcagggacgtgaaagatttgcttttccactcctatttttcacttatggatgaccttcgtcttcagaaacctcctgacggggagccatatgagataagattgcttgatattcctggtgcactaatagcggctgcatttgggcttctacttgatggaataatgttcacattaattgccttctataagtgccccgtgatgcttttcaaaggatggaaacgactgatccaggacatgattgggagagaagggccctttctggagactgcttgtgtgccatttgctggtcttgctattcttctttggccatttgctgtagtaggagccgttctggcatccatactctccagtgcccctttaggtgcttatgctgcagttgtagcttatcaggaatcctcccttatcctgggaattgcctatgtgttctcgtcggtgtctatatttgatgaatacacaaatgatgttcttgacatggcgcctggttcttgttttccaagatttaaatatcggaagggcaaagatgagtcttcacacgggcacagtgttccattatccagaccagcctcattcaatagggagaagcaagaagggaaaaggcctccgtctcgtgttacttcatttaagaacagcattgatgatttcaatccattcaagctgctggaccacctatttgccgaatgcaggaaccagggggaggatttggttaacagaggagtgataacaatgaaggacattgaagaaacgaagtctggcaaagttggcagcggtgttcttaatgttggtctaccagcgtatgttattcttaatgcactccttcggtctgcgaaagctgattctgtcgggctaatcttaagtgacggctctgagattacatctgacaatagacctaaaaacaccatctttgattggttctttgaccctcttatggttataaaggaacagatcaaagctgagaatctcactgacgaagaggaagagtatctgaaaatgcgagtgctattggctggtgatcccagtcgcctgaaaggctctctgcctcatgttccatccttgactgaacgtaaaaaggcagatatagacgcattcgctcgcaggttgcaaggaatcacaaagtcgatatctagatatcctacatcaaagcgccgcttcgacgtccttgtgaaggcgctcttgtcagagctggagaggacgatgggccaatctggcaatggatcccagtcccaggcgcagaggctgcgaaactcggtagcccggatgttgagccagaaatctatgggcaagactgccaacattagggatgaagacccagaagcgcagatgacgagactgtctcgcaccccgtgatcgtctgtttgttagtttgacgatgccgtatcacatgctattccagccttgtacaaatgatgagtagatagaatgctgcggcttgaactgatgctcttacatctcatgtatgatctgtatattttaggcactatatgtatcgtgtatgcaatgtttttttgctcccgaaaagaaaagagtatgcacagaggagaacaataaataaaaatacgcaatcctcaacggataacgccggcgcgcatgtgttttagacaaattgtgggaggttaagctacagcaattgcaaagcacaccggctttggggctcgcatgaaacttgcaccgtattaggtggataattgcaaaaggttgacgcatgttcaaccccgaagaccatccgtgggctggctatcaggcacaatggtgtcatcatcgtctaacagctcctccagcttctttc

SEQ ID NO: 20152 - DNA, 3125 bp, Zea Mays
cctactcacacatttcccagccgttggtttagaaagcgtctgccagcgccgccgtgccgtggctactctgtactccggcccccatccgcagcaacagcccgcgcagacgcaaagcgtcaagtcaaagaccctgacgataaacatacaaaagcagaagccaggcttacctgcccagcgcgctgcgcaatcgccgccctcctcccctcgcccaacggcaacgaatctgcctgccttcctgcagcctcaccggctcatcacttcgtcagccatcttcacagcccgcctggcgccccccagcatcagattcccctgctaaaccctcctgttgcggtttctatctggtccagataatcactcccttccctccaattatttttccactgctcgaaggcccggggcgcccaccggagccaatcagttccgttcacctttccaccggaatccaccccaccgccaccggtggatgatttgatggagttgccgttttgcggaccgtggtaactactctctcccaccaccaacaatcaagagtccgctctcctccaacctcctgccaacagcacgcctgcctctctctctctgtgtgtgtgtgtgtgtgtgtgtgtgtgtcaccgagggtccgaggcggtcctactccctctgtcttggtgtcttcttgcgcacgccgcttggtggttctcctcctcacggttccatctccgggtccttgggtctggatggaactggagacacggtagaggagcccgcggtttcccttttcccctcccaacaaggtattcctgggttcttgcttgcctttcgagctctgcgggattgacaattctgacaggaccggcgtggaggaagggttgatagggaggattttttggattgatctataagccttttggtggctaacggttgggagctttggaggagaactcgagtccttgggctctaggttggtctggacgaggccggaggaagttgccaatggagccgccgactgggttctgggcctcgcttctgagcttcctcaagttcctcccctacttctgcggcctcctcgtccttggactcatcaaaggtgttttgttgtgcccttgggcatgtctgattatggcgattggaatatctgccctggtcctgggcttatggcctatgcatctgatttggacatactactgcattgtcagaaccaagctggttggacctgtggtaaagcttctgcttcttattgctgcgactgcagtcttgatcatatggttgataattggcatcccgggaagcatatttgctggattggtatatggttttctagcacccataatggctacatttgatgctgtaggagaaggcaaagaaaagccatttgttcattgctttgtggatggaacatggagtactatcactggaagctgtacagtagtcagggacgtgaaagatttgcttttccactcctatttttcacttatggatgaccttcgtcttcagaaacctcctgacggggagccatatgagataagattgcttgatattcctggtgcactaatagcggctgcatttgggcttctacttgatggaataatgttcacattaattgccttctataagtgccccgtgatgcttttcaaaggatggaaacgactgatccaggacatgattgggagagaagggccctttctggagactgcttgtgtgccatttgctggtcttgctattcttctttggccatttgctgtagtaggagccgttctggcatccatactctccagtgcccctttaggtgcttatgctgcagttgtagcttatcaggaatcctcccttatcctgggaattgcctatgtgttctcgtcggtgtctatatttgatgaatacacaaatgatgttcttgacatggcgcctggttcttgttttccaagatttaaatatcggaagggcaaagatgagtcttcacacgggcacagtgttccattatccagaccagcctcattcaatagggagaagcaagaagggaaaaggcctccgtctcgtgttacttcatttaagaacagcattgatgatttcaatccattcaagctgctggaccacctatttgccgaatgcaggaaccagggggaggatttggttaacagaggagtgataacaatgaaggacattgaagaaacgaagtctggcaaagttggcagcggtgttcttaatgttggtctaccagcgtgacggctctgagattacatctgacaatagacctaaaaacaccatctttgattggttctttgaccctcttatggttataaaggaacagatcaaagctgagaatctcactgacgaagaggaagagtatctgaaaatgcgagtgctattggctggtgatcccagtcgcctgaaaggctctctgcctcatgttccatccttgactgaacgtaaaaaggcagatatagacgcattcgctcgcaggttgcaaggaatcacaaagtcgatatctagatatcctacatcaaagcgccgcttcgacgtccttgtgaaggcgctcttgtcagagctggagaggacgatgggccaatctggcaatggatcccagtcccaggcgcagaggctgcgaaactcggtagcccggatgttgagccagaaatctatgggcaagactgccaacattagggatgaagacccagaagcgcagatgacgagactgtctcgcaccccgtgatcgtctgtttgttagtttgacgatgccgtatcacatgctattccagccttgtacaaatgatgagtagatagaatgctgcggcttgaactgatgctcttacatctcatgtatgatctgtatattttaggcactatatgtatcgtgtatgcaatgtttttttgctcccgaaaagaaaagagtatgcacagaggagaacaataaataaaaatacgcaatcctcaacggataacgccggcgcgcatgtgttttagacaaattgtgggaggttaagctacagcaattgcaaagcacaccggctttggggctcgcatgaaacttgcaccgtattaggtggataattgcaaaaggttgacgcatgttcaaccccgaagaccatccgtgggctggctatcaggcacaatggtgtcatcatcgtctaacagctcctccagcttctttc

SEQ ID NO: 20153 - DNA, 3049 bp, Zea Mays
cctactcacacatttcccagccgttggtttagaaagcgtctgccagcgccgccgtgccgtggctactctgtactccggcccccatccgcagcaacagcccgcgcagacgcaaagcgtcaagtcaaagaccctgacgataaacatacaaaagcagaagccaggcttacctgcccagcgcgctgcgcaatcgccgccctcctcccctcgcccaacggcaacgaatctgcctgccttcctgcagcctcaccggctcatcacttcgtcagccatcttcacagcccgcctggcgccccccagcatcagattcccctgctaaaccctcctgttgcggtttctatctggtccagataatcactcccttccctccaattatttttccactgctcgaaggcccggggcgcccaccggagccaatcagttccgttcacctttccaccggaatccaccccaccgccaccggtggatgatttgatggagttgccgttttgcggaccgtggtaactactctctcccaccaccaacaatcaagagtccgctctcctccaacctcctgccaacagcacgcctgcctctctctctctgtgtgtgtgtgtgtgtgtgtgtgtgtgtcaccgagggtccgaggcggtcctactccctctgtcttggtgtcttcttgcgcacgccgcttggtggttctcctcctcacggttccatctccgggtccttgggtctggatggaactggagacacggtagaggagcccgcggtttcccttttcccctcccaacaagccttttggtggctaacggttgggagctttggaggagaactcgagtccttgggctctaggttggtctggacgaggccggaggaagttgccaatggagccgccgactgggttctgggcctcgcttctgagcttcctcaagttcctcccctacttctgcggcctcctcgtccttggactcatcaaaggtgttttgttgtgcccttgggcatgtctgattatggcgattggaatatctgccctggtcctgggcttatggcctatgcatctgatttggacatactactgcattgtcagaaccaagctggttggacctgtggtaaagcttctgcttcttattgctgcgactgcagtcttgatcatatggttgataattggcatcccgggaagcatatttgctggattggtatatggttttctagcacccataatggctacatttgatgctgtaggagaaggcaaagaaaagccatttgttcattgctttgtggatggaacatggagtactatcactggaagctgtacagtagtcagggacgtgaaagatttgcttttccactcctatttttcacttatggatgaccttcgtcttcagaaacctcctgacggggagccatatgagataagattgcttgatattcctggtgcactaatagcggctgcatttgggcttctacttgatggaataatgttcacattaattgccttctataagtgccccgtgatgcttttcaaaggatggaaacgactgatccaggacatgattgggagagaagggccctttctggagactgcttgtgtgccatttgctggtcttgctattcttctttggccatttgctgtagtaggagccgttctggcatccatactctccagtgcccctttaggtgcttatgctgcagttgtagcttatcaggaatcctcccttatcctgggaattgcctatgtgttctcgtcggtgtctatatttgatgaatacacaaatgatgttcttgacatggcgcctggttcttgttttccaagatttaaatatcggaagggcaaagatgagtcttcacacgggcacagtgttccattatccagaccagcctcattcaatagggagaagcaagaagggaaaaggcctccgtctcgtgttacttcatttaagaacagcattgatgatttcaatccattcaaggaaccagggggaggatttggttaacagaggagtgataacaatgaaggacattgaagaaacgaagtctggcaaagttggcagcggtgttcttaatgttggtctaccagcgtatgttattcttaatgcactccttcggtctgcgaaagctgattctgtcgggctaatcttaagtgacggctctgagattacatctgacaatagacctaaaaacaccatctttgattggttctttgaccctcttatggttataaaggaacagatcaaagctgagaatctcactgacgaagaggaagagtatctgaaaatgcgagtgctattggctggtgatcccagtcgcctgaaaggctctctgcctcatgttccatccttgactgaacgtaaaaaggcagatatagacgcattcgctcgcaggttgcaaggaatcacaaagtcgatatctagatatcctacatcaaagcgccgcttcgacgtccttgtgaaggcgctcttgtcagagctggagaggacgatgggccaatctggcaatggatcccagtcccaggcgcagaggctgcgaaactcggtagcccggatgttgagccagaaatctatgggcaagactgccaacattagggatgaagacccagaagcgcagatgacgagactgtctcgcaccccgtgatcgtctgtttgttagtttgacgatgccgtatcacatgctattccagccttgtacaaatgatgagtagatagaatgctgcggcttgaactgatgctcttacatctcatgtatgatctgtatattttaggcactatatgtatcgtgtatgcaatgtttttttgctcccgaaaagaaaagagtatgcacagaggagaacaataaataaaaatacgcaatcctcaacggataacgccggcgcgcatgtgttttagacaaattgtgggaggttaagctacagcaattgcaaagcacaccggctttggggctcgcatgaaacttgcaccgtattaggtggataattgcaaaaggttgacgcatgttcaaccccgaagaccatccgtgggctggctatcaggcacaatggtgtcatcatcgtctaacagctcctccagcttctttc

SEQ ID NO: 20154 - DNA, 3131 bp, Zea Mays
cctactcacacatttcccagccgttggtttagaaagcgtctgccagcgccgccgtgccgtggctactctgtactccggcccccatccgcagcaacagcccgcgcagacgcaaagcgtcaagtcaaagaccctgacgataaacatacaaaagcagaagccaggcttacctgcccagcgcgctgcgcaatcgccgccctcctcccctcgcccaacggcaacgaatctgcctgccttcctgcagcctcaccggctcatcacttcgtcagccatcttcacagcccgcctggcgccccccagcatcagattcccctgctaaaccctcctgttgcggtttctatctggtccagataatcactcccttccctccaattatttttccactgctcgaaggcccggggcgcccaccggagccaatcagttccgttcacctttccaccggaatccaccccaccgccaccggtggatgatttgatggagttgccgttttgcggaccgtggtaactactctctcccaccaccaacaatcaagagtccgctctcctccaacctcctgccaacagcacgcctgcctctctctctctgtgtgtgtgtgtgtgtgtgtgtgtgtgtcaccgagggtccgaggcggtcctactccctctgtcttggtgtcttcttgcgcacgccgcttggtggttctcctcctcacggttccatctccgggtccttgggtctggatggaactggagacacggtagaggagcccgcggtttcccttttcccctcccaacaaggaccggcgtggaggaagggttgatagggaggattttttggattgatctataagccttttggtggctaacggttgggagctttggaggagaactcgagtccttgggctctaggttggtctggacgaggccggaggaagttgccaatggagccgccgactgggttctgggcctcgcttctgagcttcctcaagttcctcccctacttctgcggcctcctcgtccttggactcatcaaaggtgttttgttgtgcccttgggcatgtctgattatggcgattggaatatctgccctggtcctgggcttatggcctatgcatctgatttggacatactactgcattgtcagaaccaagctggttggacctgtggtaaagcttctgcttcttattgctgcgactgcagtcttgatcatatggttgataattggcatcccgggaagcatatttgctggattggtatatggttttctagcacccataatggctacatttgatgctgtaggagaaggcaaagaaaagccatttgttcattgctttgtggatggaacatggagtactatcactggaagctgtacagtagtcagggacgtgaaagatttgcttttccactcctatttttcacttatggatgaccttcgtcttcagaaacctcctgacggggagccatatgagataagattgcttgatattcctggtgcactaatagcggctgcatttgggcttctacttgatggaataatgttcacattaattgccttctataagtgccccgtgatgcttttcaaaggatggaaacgactgatccaggacatgattgggagagaagggccctttctggagactgcttgtgtgccatttgctggtcttgctattcttctttggccatttgctgtagtaggagccgttctggcatccatactctccagtgcccctttaggtgcttatgctgcagttgtagcttatcaggaatcctcccttatcctgggaattgcctatgtgttctcgtcggtgtctatatttgatgaatacacaaatgatgttcttgacatggcgcctggttcttgttttccaagatttaaatatcggaagggcaaagatgagtcttcacacgggcacagtgttccattatccagaccagcctcattcaatagggagaagcaagaagggaaaaggcctccgtctcgtgttacttcatttaagaacagcattgatgatttcaatccattcaagctgctggaccacctatttgccgaatgcaggaaccagggggaggatttggttaacagaggagtgataacaatgaaggacattgaagaaacgaagtctggcaaagttggcagcggtgttcttaatgttggtctaccagcgtatgttattcttaatgcactccttcggtctgcgaaagctgattctgtcgggctaatcttaagtgacggctctgagattacatctgacaatagacctaaaaacaccatctttgattggttctttgaccctcttatggttataaaggaacagatcaaagctgagaatctcactgacgaagaggaagagtatctgaaaatgcgagtgctattggctggtgatcccagtcgcctgaaaggctctctgcctcatgttccatccttgactgaacgtaaaaaggcagatatagacgcattcgctcgcaggttgcaaggaatcacaaagtcgatatctagatatcctacatcaaagcgccgcttcgacgtccttgtgaaggcgctcttgtcagagctggagaggacgatgggccaatctggcaatggatcccagtcccaggcgcagaggctgcgaaactcggtagcccggatgttgagccagaaatctatgggcaagactgccaacattagggatgaagacccagaagcgcagatgacgagactgtctcgcaccccgtgatcgtctgtttgttagtttgacgatgccgtatcacatgctattccagccttgtacaaatgatgagtagatagaatgctgcggcttgaactgatgctcttacatctcatgtatgatctgtatattttaggcactatatgtatcgtgtatgcaatgtttttttgctcccgaaaagaaaagagtatgcacagaggagaacaataaataaaaatacgcaatcctcaacggataacgccggcgcgcatgtgttttagacaaattgtgggaggttaagctacagcaattgcaaagcacaccggctttggggctcgcatgaaacttgcaccgtattaggtggataattgcaaaaggttgacgcatgttcaaccccgaagaccatccgtgggctggctatcaggcacaatggtgtcatcatcgtctaacagctcctccagcttctttc

SEQ ID NO: 20155 - DNA, 2618 bp, Zea Mays
cctactcacacatttcccagccgttggtttagaaagcgtctgccagcgccgccgtgccgtggctactctgtactccggcccccatccgcagcaacagcccgcgcagacgcaaagcgtcaagtcaaagaccctgacgataaacatacaaaagcagaagccaggcttacctgcccagcgcgctgcgcaatcgccgccctcctcccctcgcccaacggcaacgaatctgcctgccttcctgcagcctcaccggctcatcacttcgtcagccatcttcacagcccgcctggcgccccccagcatcagattcccctgctaaaccctcctgttgcggtttctatctggtccagataatcactcccttccctccaattatttttccactgctcgaaggcccggggcgcccaccggagccaatcagttccgttcacctttccaccggaatccaccccaccgccaccggtggatgatttgatggagttgccgttttgcggaccgtggtgttttgttgtgcccttgggcatgtctgattatggcgattggaatatctgccctggtcctgggcttatggcctatgcatctgatttggacatactactgcattgtcagaaccaagctggttggacctgtggtaaagcttctgcttcttattgctgcgactgcagtcttgatcatatggttgataattggcatcccgggaagcatatttgctggattggtatatggttttctagcacccataatggctacatttgatgctgtaggagaaggcaaagaaaagccatttgttcattgctttgtggatggaacatggagtactatcactggaagctgtacagtagtcagggacgtgaaagatttgcttttccactcctatttttcacttatggatgaccttcgtcttcagaaacctcctgacggggagccatatgagataagattgcttgatattcctggtgcactaatagcggctgcatttgggcttctacttgatggaataatgttcacattaattgccttctataagtgccccgtgatgcttttcaaaggatggaaacgactgatccaggacatgattgggagagaagggccctttctggagactgcttgtgtgccatttgctggtcttgctattcttctttggccatttgctgtagtaggagccgttctggcatccatactctccagtgcccctttaggtgcttatgctgcagttgtagcttatcaggaatcctcccttatcctgggaattgcctatgtgttctcgtcggtgtctatatttgatgaatacacaaatgatgttcttgacatggcgcctggttcttgttttccaagatttaaatatcggaagggcaaagatgagtcttcacacgggcacagtgttccattatccagaccagcctcattcaatagggagaagcaagaagggaaaaggcctccgtctcgtgttacttcatttaagaacagcattgatgatttcaatccattcaagctgctggaccacctatttgccgaatgcaggaaccagggggaggatttggttaacagaggagtgataacaatgaaggacattgaagaaacgaagtctggcaaagttggcagcggtgttcttaatgttggtctaccagcgtatgttattcttaatgcactccttcggtctgcgaaagctgattctgtcgggctaatcttaagtgacggctctgagattacatctgacaatagacctaaaaacaccatctttgattggttctttgaccctcttatggttataaaggaacagatcaaagctgagaatctcactgacgaagaggaagagtatctgaaaatgcgagtgctattggctggtgatcccagtcgcctgaaaggctctctgcctcatgttccatccttgactgaacgtaaaaaggcagatatagacgcattcgctcgcaggttgcaaggaatcacaaagtcgatatctagatatcctacatcaaagcgccgcttcgacgtccttgtgaaggcgctcttgtcagagctggagaggacgatgggccaatctggcaatggatcccagtcccaggcgcagaggctgcgaaactcggtagcccggatgttgagccagaaatctatgggcaagactgccaacattagggatgaagacccagaagcgcagatgacgagactgtctcgcaccccgtgatcgtctgtttgttagtttgacgatgccgtatcacatgctattccagccttgtacaaatgatgagtagatagaatgctgcggcttgaactgatgctcttacatctcatgtatgatctgtatattttaggcactatatgtatcgtgtatgcaatgtttttttgctcccgaaaagaaaagagtatgcacagaggagaacaataaataaaaatacgcaatcctcaacggataacgccggcgcgcatgtgttttagacaaattgtgggaggttaagctacagcaattgcaaagcacaccggctttggggctcgcatgaaacttgcaccgtattaggtggataattgcaaaaggttgacgcatgttcaaccccgaagaccatccgtgggctggctatcaggcacaatggtgtcatcatcgtctaacagctcctccagcttctttc

SEQ ID NO: 20156 - DNA, 3114 bp, Zea Mays
cctactcacacatttcccagccgttggtttagaaagcgtctgccagcgccgccgtgccgtggctactctgtactccggcccccatccgcagcaacagcccgcgcagacgcaaagcgtcaagtcaaagaccctgacgataaacatacaaaagcagaagccaggcttacctgcccagcgcgctgcgcaatcgccgccctcctcccctcgcccaacggcaacgaatctgcctgccttcctgcagcctcaccggctcatcacttcgtcagccatcttcacagcccgcctggcgccccccagcatcagattcccctgctaaaccctcctgttgcggtttctatctggtccagataatcactcccttccctccaattatttttccactgctcgaaggcccggggcgcccaccggagccaatcagttccgttcacctttccaccggaatccaccccaccgccaccggtggatgatttgatggagttgccgttttgcggaccgtggtaactactctctcccaccaccaacaatcaagagtccgctctcctccaacctcctgccaacagcacgcctgcctctctctctctgtgtgtgtgtgtgtgtgtgtgtgtgtgtcaccgagggtccgaggcggtcctactccctctgtcttggtgtcttcttgcgcacgccgcttggtggttctcctcctcacggttccatctccgggtccttgggtctggatggaactggagacacggtagaggagcccgcggtttcccttttcccctcccaacaagggttgatagggaggattttttggattgatctataagccttttggtggctaacggttgggagctttggaggagaactcgagtccttgggctctaggttggtctggacgaggccggaggaagttgccaatggagccgccgactgggttctgggcctcgcttctgagcttcctcaagttcctcccctacttctgcggcctcctcgtccttggactcatcaaaggtgttttgttgtgcccttgggcatgtctgattatggcgattggaatatctgccctggtcctgggcttatggcctatgcatctgatttggacatactactgcattgtcagaaccaagctggttggacctgtggtaaagcttctgcttcttattgctgcgactgcagtcttgatcatatggttgataattggcatcccgggaagcatatttgctggattggtatatggttttctagcacccataatggctacatttgatgctgtaggagaaggcaaagaaaagccatttgttcattgctttgtggatggaacatggagtactatcactggaagctgtacagtagtcagggacgtgaaagatttgcttttccactcctatttttcacttatggatgaccttcgtcttcagaaacctcctgacggggagccatatgagataagattgcttgatattcctggtgcactaatagcggctgcatttgggcttctacttgatggaataatgttcacattaattgccttctataagtgccccgtgatgcttttcaaaggatggaaacgactgatccaggacatgattgggagagaagggccctttctggagactgcttgtgtgccatttgctggtcttgctattcttctttggccatttgctgtagtaggagccgttctggcatccatactctccagtgcccctttaggtgcttatgctgcagttgtagcttatcaggaatcctcccttatcctgggaattgcctatgtgttctcgtcggtgtctatatttgatgaatacacaaatgatgttcttgacatggcgcctggttcttgttttccaagatttaaatatcggaagggcaaagatgagtcttcacacgggcacagtgttccattatccagaccagcctcattcaatagggagaagcaagaagggaaaaggcctccgtctcgtgttacttcatttaagaacagcattgatgatttcaatccattcaagctgctggaccacctatttgccgaatgcaggaaccagggggaggatttggttaacagaggagtgataacaatgaaggacattgaagaaacgaagtctggcaaagttggcagcggtgttcttaatgttggtctaccagcgtatgttattcttaatgcactccttcggtctgcgaaagctgattctgtcgggctaatcttaagtgacggctctgagattacatctgacaatagacctaaaaacaccatctttgattggttctttgaccctcttatggttataaaggaacagatcaaagctgagaatctcactgacgaagaggaagagtatctgaaaatgcgagtgctattggctggtgatcccagtcgcctgaaaggctctctgcctcatgttccatccttgactgaacgtaaaaaggcagatatagacgcattcgctcgcaggttgcaaggaatcacaaagtcgatatctagatatcctacatcaaagcgccgcttcgacgtccttgtgaaggcgctcttgtcagagctggagaggacgatgggccaatctggcaatggatcccagtcccaggcgcagaggctgcgaaactcggtagcccggatgttgagccagaaatctatgggcaagactgccaacattagggatgaagacccagaagcgcagatgacgagactgtctcgcaccccgtgatcgtctgtttgttagtttgacgatgccgtatcacatgctattccagccttgtacaaatgatgagtagatagaatgctgcggcttgaactgatgctcttacatctcatgtatgatctgtatattttaggcactatatgtatcgtgtatgcaatgtttttttgctcccgaaaagaaaagagtatgcacagaggagaacaataaataaaaatacgcaatcctcaacggataacgccggcgcgcatgtgttttagacaaattgtgggaggttaagctacagcaattgcaaagcacaccggctttggggctcgcatgaaacttgcaccgtattaggtggataattgcaaaaggttgacgcatgttcaaccccgaagaccatccgtgggctggctatcaggcacaatggtgtcatcatcgtctaacagctcctccagcttctttc

SEQ ID NO: 20157 - DNA, 2668 bp, Zea Mays
ctgcggccgataaataaaacgagaaactccggcgagtctcgcccccctcttccccccactcgctcgcaactcgccgcgcggcggaaacgccacgcccggggtgagatccgcgcgggccctcgcctgcctcgtcaccgtcccgcggcctccgatctccacagggcggccggaggagtcggaggggcagagtgagatggcggcggaggagggggccatgtcgccgacgaggatgcttgcggaggggcacctgcgggtggccaccggcgggggcgcgccggcggacggcgggatcgccgtcagacacctcccgcaccatcaccccactaagaaagacaatgttggtgggaaaactgaaaaagacaatcatgaaggtgtaaattctttactatctgaggagttggaaaaactagctaatgggaatagcaagattcctggtacattagatgagtatagaaagcttgtcgttccaataattgaggagtattttagtacaggagatgtggaattggcagcttctgagctgaagtgtcttggatctgatcagtttcatcattactttgtgaagaagcttatatctatggcaatggatcgccatgacaaagaaaaagaaatggcatcgattctgttatcatctttgtatgctgatctactgagctcctacaggatcagtgaaggttttatgatgcttctggagtctacagaagatctaactgttgatataccggatgctactgatgtattggcagtttttattgcacgggctattgttgatgaaattttgcctcctgttttcctcactcgagctagggcactacttccagaattttccaagggcattcaagttctgcaggttgttgaaaagagctatttgtcagctccccaccatgcagaattagttgaacgcaaatggggtggaagcacacactctactgtagaagaagcaaaaagtaagattaagaatattctaagagaatatattgagaatgaagacatagatgaagcctttaggtgtataagagagctcagccttccatttttccatcatgaggttgtgaagcgtgctctcacctttggtatagagaacgtatcctcgcaaccatcaatccttaagttattgaaggaggcagctgcaagttgcttgatcagtcctaatcaaatctcaaagggtttttctagactagctgagggtgttgacgacttgagtcttgatattccttctgctaaagttctttttgacaagctggtttcaacagctatatctgaaggatggcttgatgcttcttttggtaaatcagctgcccctgatgaagagatacaaagtacaagcgttgtaaaggtgaagcgttttaaagaagaatgtggccacataattcatgagtattttctctcagatgatgtcccagaacttattcgaagccttgaagagctttctgctccagaattcaatcccattttcctcaagaagcttgtgacgcttgctatggatagaaagagcagagagaaggagatggcctcagtactcctttcttcattgagattagaattgttttcaactgatgacatcattgagggttttgtaatgctcttgcagtcagcagaagacactgcactcgacattgtggatgctcctagtgaacttgctctcttcctagctagggcagtgattgatgaagtattaattccgctcaatttggatgaaatcagcattaagcttcggccgaacagcagtggcagccaaactgtccagatggcgcgtgctctactgtcagctcgccattctggtgagcggatactgcggtgctggggcggtggcactggatgggctgtggaagatactaaggacaagatcactaagctattggaggaatacaacactggtggtgacctaggagaagcctgcagatgcatccgtgatcttgggatgcccttcttcaaccatgaggtggtaaagaaggcactggtcatggcgatggagaagcagaatgacaccagcatcttggtcctgctgcaggagtgtttcggcgaggggctcataaccatcaaccagatgaccaaaggctttgcccgtgtcaaggaaggccttgatgatctgatcctcgacatcccaaatgcccaggagaagtttggagagtatgtggagctggcaacagagcgcggctggctgctgccgaccttcgcctccgttccctgagcatccaccactggcgataccttccttatgtgtacatttgtgcccatgatgtcattagctccgtaccaaagttttcctattcctagtttacttatgttaccgtatactggaggattgtaggatggatgtggtgtcggttgttgagatagtgtcctattggtctagtctgggagggtacttttgagagttaaaagaataaagccatttcgtttcaggttatgagatgtacgctgcaacctttgtccctggatggacctggtggtaccatattcttaatatgatttattgccgatctgggaagtggaagtgcttggaactattgcatggatatcaacacaatacatgatgtaattctcgcgatgtactaacttgattcagatttagacagcaaggactatgaaatggtgtagaaggaaagtttagctaatcagcaaaaagaggtgcagcgcagaaggcaggacctttcagtgcagtggg

SEQ ID NO: 20158 - DNA, 2578 bp, Zea Mays
ctgcggccgataaataaaacgagaaactccggcgagtctcgcccccctcttccccccactcgctcgcaactcgccgcgcggcggaaacgccacgcccggggtgagatccgcgcgggccctcgcctgcctcgtcaccgtcccgcggcctccgatctccacagggcggccggaggagtcggaggggcagagtgagatggcggcggaggagggggccatgtcgccgacgaggatgcttgcggaggggcacctgcgggtggccaccggcgggggcgcgccggcggacggcgggatcgccgtcagacacctcccgcaccatcaccccactaagaaagacaatgttggtgggaaaactgaaaaagacaatcatgaaggtgtaaattctttactatctgaggagttggaaaaactagctaatgggaatagcaagattcctggtacattagatgagtatagaaagcttgtcgttccaataattgaggagtattttagtacaggagatgtggaattggcagcttctgagctgaagtgtcttggatctgatcagtttcatcattactttgtgaagaagcttatatctatggcaatggatcgccatgacaaagaaaaagaaatggcatcgattctgttatcatctttgtatgctgatctactgagctcctacaggatcagtgaaggttttatgatgcttctggagtctacagaagatctaactgttgatataccggatgctactgatgtattggcagtttttattgcacgggctattgttgatgaaattttgcctcctgttttcctcactcgagctagggcactacttccagaattttccaagggcattcaagttctgcaggttgttgaaaagagctatttgtcagctccccaccatgcagaattagttgaacgcaaatggggtggaagcacacactctactgtagaagaagcaaaaagtaagattaagaatattctaagagaatatattgagaatgaagacatagatgaagcctttaggtgtataagagagctcagccttccatttttccatcatgaggttgtgaagcgtgctctcacctttggtatagagaacgtatcctcgcaaccatcaatccttaagttattgaaggaggcagctgcaagttgcttgatcagtcctaatcaaatctcaaagggtttttctagactagctgagggtgttgacgacttgagtcttgatattccttctgctaaagttctttttgacaagctggtttcaacagctatatctgaaggatggcttgatgcttcttttggtaaatcagctgcccctgatgaagagatacaaagtacaagcgttgtaaaggtgaagcgttttaaagaagaatgtggccacataattcatgagtattttctctcagatgatgtcccagaacttattcgaagccttgaagagctttctgctccagaattcaatcccattttcctcaagaagcttgtgacgcttgctatggatagaaagagcagagagaaggagatggcctcagtactcctttcttcattgagattagaattgttttcaactgatgacatcattgagggttttgtaatgctcttgcagtcagcagaagacactgcactcgacattgtggatgctcctagtgaacttgctctcttcctagctagggcagtgattgatgaagtattaattccgctcaatttggatgaaatcagcattaagcttcggccgaacagcagtggcagccaaactgtccagatggcgcgtgctctactgtcagctcgccattctggtgagcggatactgcggtgctggggcggtggcactggatgggctgtggaagatactaaggacaagatcactaagctattggaggaatacaacactggtggtgacctaggagaagcctgcagatgcatccgtgatcttgggatgcccttcttcaaccatgaggtggtaaagaaggcactggtcatggcgatggagaagcagaatgacaccagcatcttggtcctgctgcaggagtgtttcggcgaggggctcataaccatcaaccagatgaccaaaggctttgcccgtgtcaaggaaggccttgatgatctgatcctcgacatcccaaatgcccaggagaagtttggagagtatgtggagctggcaacagagcgcggctggctgctgccgaccttcgcctccgttccctgagcatccaccactggcgataccttccttatgtgtacatttgtgcccatgatgtcattagctccgtaccaaagttttcctattcctagtttacttatgttaccgtatactggaggattgtaggatggatgtggtgtcggttgttgagatagtgtcctattggtctagtctgggagggtacttttgagagttaaaagaataaagccatttcgtttcaggttatgagatgtacgctgcaacctttgtccctggatggacctggtggtaccatattcttaatatgatttattgccgatctgggaagtggaagtgcttggaactattgcatggatatcaacacaatacatgatgaggtgcagcgcagaaggcaggacctttcagtgcagtggg

SEQ ID NO: 20159 - DNA, 2273 bp, Zea Mays
aaaagcgttcgcgcccctgcgcccctcactgcgcatccgcatcactgcgtgtcctcctcctctccccctcactgcggcgcatccacatctgccaatttctccacctcctcctcctcgcccctgtgcctcgacatctcgcatccgctccatctatggaaggccaccacgcgccatggatcgccgctctctaccgccacctcaattgaaggttcaccgctctctacgcggatccgccacctcctcctcggccgccgtcaatagaaggtcccagatctcctctcccattacttctctccccattaccgcgctcgaggtctgccatttttggaggtccgccacttccgcctctgctcgccgtcaatggaaggtcctagatctcctctccctattaccgcgctcgagtcagtgggaggtccgccatttttggaaggtccgccacctcctcctcgacccgcggcaaaaatggcgtgggagatccgccacctcctcctcggcccgcggcaaaaatggtgtgggagatccgccacctcacctcctcccattctcacgcccgcgcctgatatggaaggtccgccgaagggactcggacgtcgaggccatggctgagccgcaccccttctccccctgcctcgcgcgcggcggccgagatggtgttggctgggttgttcgggatggtggtcctacctgccctccctgctatcctcgccccaaatcgacgagaatcatgcagcccaaatctgaggtggaggcgcctgcactgtcgatggaggtgtcgagtctgcggtggtgtctgtagatgggaaggcatggtgtgcagcagcagtggccaggtggtgtcgctgagcctgtcctcctacgggctcactagcacgctctccacggccatcggggacctcacgttcctacgtatgctgaacctgagctccaattggttccacggggaggtcccagcgaccatcgttcgccttgcgcatctgcaggcgctagacctgagctacaacgccttcactgaattccagagatgcaattcccgaggccatggagcagcagacaatatcaattgccaaagcagccattacaatagtactcattttagggacttcatttcttgcagctgccaatccaattacaggatgctatgacgctcttaagtgatcatgaacttatacattgaaataatggtgggcctcgagaggccaggaggtggagaggagttcaacaagtactacatcttgtctgctctcctatccgtggattgggtgcctgaaatatcctatagatgtctttagtagaggatccaaataatggcctgcaaggtttattgaatcggatcgcacaaaactccatctgcttcagaattgagctaagcgcatcctaacatcttgactcctatatcgatcaattatttttgttacacatttgattctttagtttcgtagagggaggaacatcgtgggatgcaggccccacggaacaccagatattttgaggtagaccgcggcgaggtgcccaagggcagcgcctagatcttcttctggatggtcaagttctgtaacgacaatgtggcagaggagatgccctgatcttcgtacgtcagtttgcctactaagcatccacaaaatctcattataagttctgagaaggccaagtcaattgttcagtatattacaaaagtcaggttggagaactcccttgttcaggcttttgtctttcttctgcagaaggagagatgacgtgctgcatgacatgatggcatgtgaggcagcaacctcttctccgcaacccttgtcatggcctggagttggtgttctaggaaggagcacaattttattagggtagccaccagagttgaggtcccttttcaatggacgaacttggtgctgtggacgacatctgctattgtagctaggcgcatacatgttttcctataaatgctagctctgcaatcaccaaaggaaaacacaagagtactcttggaggaaagtttagcattcagtttaacaaaccttaccaactcatgccttgtttgaatgcaataatgcatgttatgttgccctgttgttgcttggacacatgcttggcatggctattttctggttatgtcacaactcacatctcccatgtaaatttatggctatgatatgcatcaaacaagcttatattttgctcttaagttggttcaaacagttctaattcattttaataattatctaaaattggtttgataattggtgcaataaggaactcatttgaaaggtaagagttatgtgttg

SEQ ID NO: 20160 - DNA, 2268 bp, Zea Mays
aaaagcgttcgcgcccctgcgcccctcactgcgcatccgcatcactgcgtgtcctcctcctctccccctcactgcggcgcatccacatctgccaatttctccacctcctcctcctcgcccctgtgcctcgacatctcgcatccgctccatctatggaaggccaccacgcgccatggatcgccgctctctaccgccacctcaattgaaggttcaccgctctctacgcggatccgccacctcctcctcggccgccgtcaatagaaggtcccagatctcctctcccattacttctctccccattaccgcgctcgaggtctgccatttttggaggtccgccacttccgcctctgctcgccgtcaatggaaggtcctagatctcctctccctattaccgcgctcgagtcagtgggaggtccgccatttttggaaggtccgccacctcctcctcgacccgcggcaaaaatggcgtgggagatccgccacctcctcctcggcccgcggcaaaaatggtgtgggagatccgccacctcacctcctcccattctcacgcccgcgcctgatatggaaggtccgccgaagggactcggacgtcgaggccatggctgagccgcaccccttctccccctgcctcgcgcgcggcggccgagatggtgttggctgggttgttcgggatggtggtcctacctgccctccctgctatcctcgccccaaatcgacgagaatcatgcagcccaaatctgaggtggaggcgcctgcactgtcgatggaggtgtcgagtctgcggtggtgtctgtagatgggaaggcatggtgtgcagcagcagtggccaggtggtgtcgctgagcctgtcctcctacgggctcactagcacgctctccacggccatcggggacctcacgttcctacgtatgctgaacctgagctccaattggttccacggggaggtcccagcgaccatcgttcgccttgcgcatctgcaggcgctagacctgagctacaacgccttcactgaattccagagatgcaattcccgaggccatggagcagcagacaatatcaattgccaaagcagccattacaatagtactcattttagggacttcatttcttgcagctgccaatccaattacaggatgctatgacgctcttaagtgatcatgaacttatacattgaaataatggtgggcctcgagaggccaggaggtggagaggagttcaacaagtactacatcttgtctgctctcctatccgtggattgggtgcctgaaatatcctatagatgtctttagtagaggatccaaataatggcctgcaaggtttattgaatcggatcgcacaaaactccatctgcttcagaattgagctaagcgcatcctaacatcttgactcctatatcgatcaattatttttgttacacatttgattctttagtttcgtagagggaggaacatcgtgggatgcaggccccacggaacaccagatattttgaggtagaccgcggcgaggtgcccaagggcagcgcctagatcttcttctggatggtcaagttctgtaacgacaatgtggcagaggagatgccctgatcttcgtactttgcctactaagcatccacaaaatctcattataagttctgagaaggccaagtcaattgttcagtatattacaaaagtcaggttggagaactcccttgttcaggcttttgtctttcttctgcagaaggagagatgacgtgctgcatgacatgatggcatgtgaggcagcaacctcttctccgcaacccttgtcatggcctggagttggtgttctaggaaggagcacaattttattagggtagccaccagagttgaggtcccttttcaatggacgaacttggtgctgtggacgacatctgctattgtagctaggcgcatacatgttttcctataaatgctagctctgcaatcaccaaaggaaaacacaagagtactcttggaggaaagtttagcattcagtttaacaaaccttaccaactcatgccttgtttgaatgcaataatgcatgttatgttgccctgttgttgcttggacacatgcttggcatggctattttctggttatgtcacaactcacatctcccatgtaaatttatggctatgatatgcatcaaacaagcttatattttgctcttaagttggttcaaacagttctaattcattttaataattatctaaaattggtttgataattggtgcaataaggaactcatttgaaaggtaagagttatgtgttg

SEQ ID NO: 20161 - DNA, 1035 bp, Zea Mays
aaggaattggttgatacttattgatggtgcctgaaatatcctatagatgtctttagtagaggatccaaataatggcctgcaaggtttattgaatcggatcgcacaaaactccatctgcttcagaattgagctaagcgcatcctaacatcttgactcctatatcgatcaattatttttgttacacatttgattctttagtttcgtagagggaggaacatcgtgggatgcaggccccacggaacaccagatattttgaggtagaccgcggcgaggtgcccaagggcagcgcctagatcttcttctggatggtcaagttctgtaacgacaatgtggcagaggagatgccctgatcttcgtactttgcctactaagcatccacaaaatctcattataagttctgagaaggccaagtcaattgttcagtatattacaaaagtcaggttggagaactcccttgttcaggcttttgtctttcttctgcagaaggagagatgacgtgctgcatgacatgatggcatgtgaggcagcaacctcttctccgcaacccttgtcatggcctggagttggtgttctaggaaggagcacaattttattagggtagccaccagagttgaggtcccttttcaatggacgaacttggtgctgtggacgacatctgctattgtagctaggcgcatacatgttttcctataaatgctagctctgcaatcaccaaaggaaaacacaagagtactcttggaggaaagtttagcattcagtttaacaaaccttaccaactcatgccttgtttgaatgcaataatgcatgttatgttgccctgttgttgcttggacacatgcttggcatggctattttctggttatgtcacaactcacatctcccatgtaaatttatggctatgatatgcatcaaacaagcttatattttgctcttaagttggttcaaacagttctaattcattttaataattatctaaaattggtttgataattggtgcaataaggaactcatttgaaaggtaagagttatgtgttg

SEQ ID NO: 20162 - DNA, 1935 bp, Zea Mays
ctagctcatcagctctcggccccaaaaaggcacggcaggggcgggcgcttaaacaaaacgcgcgagctccagaaaccatagattctttccatgggatgcgttccctcccctcctccgaaggccgaggccggagccggagagagaggggaggggagaggagagggggacaggacggaggtattaaaactcggaaccacccctgcacacactccactgctgcggtgctagagccaaatctcctgttgtgtgtcgtctttgacctgcgagccgcgttgcccaactgtctttgacgagagccttgccctctagctagctatatatgcacacgcgcgcgcgcgctcgcagatgcgaggaggaggtagtagtaggtgagagcagtgagaccggccggccgtgagaaggaagacaggtgactggtggtgaaagagctagcagcaccagcatggtggtggggatcgtgattaggctggtcgtcgctttcgtgcttttggtactagtcttcagttcgtcactgcatcgacaagcaggcgttggcagcacgcgcagcagtgggcggaggagaggaaccagctgaggtcgtacatgaccatggactacgccccatggcaccgccgcgtgcccaagcacaactgatctgattgatccactgcactgccagcagtactgctcttttcgtcggcagcgctagcaatctgcatctgtgcgaagcatggtgacacacaggagaagaagttgatagtaggtttcattctttttcgtcgttgttagctgtatgtcagtatgtgtatctacgtactacgtgtcgtccacgcagctagcgtgcagatatatgcacgcaaattttgccacccccactgcaccctgacctactaatgatggtattgctaggataaatataatatatacgcagttatatatagtacctgatatcagtacgtgtgtactcagtttctgtaataaggcctaggtgtgtttggttaggtaaaagtttctgcttcttctgtaataattaagtgcaacgatataggaggtatacgtactaaggggttgtttggtttgctatctaagacgccacaatgtgtctaacttttctgcttaactttagttcttcaattcgaacgactaaggttaggcagattatgacgtcttaggtagtaaaccaaacagacctagtggaaagttcagagactcgaaaatgcatatatgtgcactgatgaacatgcatgcatgctggccatgcataatgggataagtaagtatactgaaggccggatcgagcatttgcatcacaatcttcgctctgccggccattctcatcatctgatctctgtttcaattggatgaagcgaaatcgccgggcaagtacccgcggcgctcctcctcctgttggcatcggcggcgcgcccagaccccagtcagcagcagaccgaaaggttgctcccgaccgccctgatcgaacggaaagctagcgacgcaacgggggctccaggcacacaacggcgattagctttttgactgctggccaccgcctgtacggtgtcgccgcgctttgacccacctacgtcgtactgcgtcatcggacgggcactgtaccatgccaggggcagctcggcgtgcccggcaccgtgattggccggggcgtgaaaacggggggaaaagtagaaggcagatataatgataggtggcactgaaaaaaataaaattacccccaccgagcgagcggcacgaagcggagatcgggcgacctcgccggggaagccgcgtccccgccgtgtcgacccgtaccgaattgtgagctccagatcggtcgccggtcgggctcggagacttgcctcgcccccgtcagtcaccgcgagccggacgctggcggccttgccaaggccgggcggggtgaccaccgaggtggcggtggcgcacgggcgcggcttgagatcg

SEQ ID NO: 20163 - DNA, 1898 bp, Zea Mays
ccacagaggcccagttgcgtaggcactttccactgtgagttgtgacgccgccgtccctggctccttgctgcgtgctgcccttgtgcagttgtgctccttccttccttgccccgtaccccgccggcgcgccctgagccaaatcgcaggctgccattgtgccatggacgaaggacctgattcacgccatcttcaagctggtgtggaggcggcgggcggggaagggggccggcggcggcggcagcattgaggacatcgatgcggagagacatcgaggagaaatcggagcacaactggtaagcgagtcttttttccttctttattactagagctggcggcatgaaaaggtttccaggaagtgcatgtgttggtgcagtcatatcaaatgtctcatggggccacccatttgaacatcggctgcaagaaggctgtgtcagccacgctagggcatcagataaagatttaattcgctttgttgtcaagttttagcttggtttgattgttaggattggaactgggtttgttagacatgcacatcgttgttagcttggatggattgtaagaatgactgaactgggaaatcaagcatggaaagaacctccttccccatgttgcatctaatgcagctcaaaggctcgtgttgtttctccagtctccaccacaacgcacaacataatgagtagtgctatttttttaaaagaatttctgttcttttgtctagattggaactagatggcgtaaggttcccatatactatgttaaaactggcttttaactttggtatttgtcctttttatgtctcagcgacttaattctgctgtgacttggggtaagagtatcagtaagacaaaacttggtgaataaaagatttctttaggtctagtttgagaactccatttttccaaatgattcctattttctcaagggaaaataaactaatttcccttgggaaaatggaaatcctttgggaaaataggatttccaaactagcccttaacgaaattgcgggactggttttctttctttttttattaagagatgaagaattgacactagaaagagttccaaagattttttttttgagaagtcaacgggagggaagatactcttcacctgaataattttctactgataccgggaaagtcagaaattgagggtgccaggcgtcagttacacggttgggtcacgaaccccagaggtgcaaagtaaaaggcgaggaagatgtatttaacccaattagtcaattataatcacgttttggtttctagcggacaatatacagttcaaagtaacttgactgagttctcgttcttgttcatgatatgctgacacagtatgttcacctgacagccaatgcgactgctcttaaagtcagctgcgaacttctacggatatttgtaacagaggctattcaacgctctgcttttatcgctgaagcggaggatggtgctgttattgaacccacccacctagagcgtgtgttgccgcagctgctcttggacttctgaggtaccccatggagcctccaaaagcatttatctaggcgtgtctgctatggaaggatacagatgcctggatgcatcaacagaatcttattgctgatctatgtcttgtaatctgtaaacacacgagatttctatatggctttataaaaatgcatgcatttcttggaatgttttcctgttcgtgttgtgtttgacgagattattgccattataaaacacgacagagttggtttcgatgaaatggagatgtagggaagggcttcgacggtttggaggcgcagacgactgcgaagcgctgatatagacatgaaaatcccattagttgttacggacactaattgatctcccgctgtgagaataagtctccttaaccaggttgccgtcttcagcgccgtc

SEQ ID NO: 20164 - DNA, 1838 bp, Zea Mays
gtgagttgtgacgccgccgtccctggctccttgctgcgtgctgcccttgtgcagttgtgctccttccttccttgccccgtaccccgccggcgcgccctgagccaaatcgcaggctgccattgtgccatggacgaaggtgcgacgacgagcgactcgtccgctgccgagacatttgatccggacctgattcacgccatcttcaagctggtgtggaggcggcgggcggggaagggggccggcggcggcggcagcattgaggacatcgatgcggagcgtgctccagagacatcgaggagaaatcggagcacaactgtcatatcaaatgtctcatggggccacccatttgaacatcggctgcaagaaggctgtgtcagccacgctagggcatcagataaagatttaattcgctttgttgtcaagttttagcttggtttgattgttaggattggaactgggtttgttagacatgcacatcgttgttagcttggatggattgtaagaatgactgaactgggaaatcaagcatggaaagaacctccttccccatgttgcatctaatgcagctcaaaggctcgtgttgtttctccagtctccaccacaacgcacaacataatgagtagtgctatttttttaaaagaatttctgttcttttgtctagattggaactagatggcgtaaggttcccatatactatgttaaaactggcttttaactttggtatttgtcctttttatgtctcagcgacttaattctgctgtgacttggggtaagagtatcagtaagacaaaacttggtgaataaaagatttctttaggtctagtttgagaactccatttttccaaatgattcctattttctcaagggaaaataaactaatttcccttgggaaaatggaaatcctttgggaaaataggatttccaaactagcccttaacgaaattgcgggactggttttctttctttttttattaagagatgaagaattgacactagaaagagttccaaagattttttttttgagaagtcaacgggagggaagatactcttcacctgaataattttctactgataccgggaaagtcagaaattgagggtgccaggcgtcagttacacggttgggtcacgaaccccagaggtgcaaagtaaaaggcgaggaagatgtatttaacccaattagtcaattataatcacgttttggtttctagcggacaatatacagttcaaagtaacttgactgagttctcgttcttgttcatgatatgctgacacagtatgttcacctgacagccaatgcgactgctcttaaagtcagctgcgaacttctacggatatttgtaacagaggctattcaacgctctgcttttatcgctgaagcggaggatggtgctgttattgaacccacccacctagagcgtgtgttgccgcagctgctcttggacttctgaggtaccccatggagcctccaaaagcatttatctaggcgtgtctgctatggaaggatacagatgcctggatgcatcaacagaatcttattgctgatctatgtcttgtaatctgtaaacacacgagatttctatatggctttataaaaatgcatgcatttcttggaatgttttcctgttcgtgttgtgtttgacgagattattgccattataaaacacgacagagttggtttcgatgaaatggagatgtagggaagggcttcgacggtttggaggcgcagacgactgcgaagcgctgatatagacatgaaaatcccattagttgttacggacactaattgatctcccgctgtgagaataagtctccttaaccaggttgccgtcttcagcgccgtc

SEQ ID NO: 20165 - DNA, 813 bp, Zea Mays
gtgacgccgccgtccctggctccttgctgcgtgctgcccttgtgcagttgtgctccttccttccttgccccgtaccccgccggcgcgccctgagccaaatcgcaggctgccattgtgccatggacgaaggacctgattcacgccatcttcaagctggtgtggaggcggcgggcggggaagggggccggcggcggcggcagcattgaggacatcgatgcggagcgtgctccagagacatcgaggagaaatcggagcacaactgccaatgcgactgctcttaaagtcagctgcgaacttctacggatatttgtaacagaggctattcaacgctctgcttttatcgctgaagcggaggatggtgctgttattgaacccacccacctagagcgtgtgttgccgcagctgctcttggacttctgaggtaccccatggagcctccaaaagcatttatctaggcgtgtctgctatggaaggatacagatgcctggatgcatcaacagaatcttattgctgatctatgtcttgtaatctgtaaacacacgagatttctatatggctttataaaaatgcatgcatttcttggaatgttttcctgttcgtgttgtgtttgacgagattattgccattataaaacacgacagagttggtttcgatgaaatggagatgtagggaagggcttcgacggtttggaggcgcagacgactgcgaagcgctgatatagacatgaaaatcccattagttgttacggacactaattgatctcccgctgtgagaataagtctccttaaccaggttgccgtcttcagcgccgtc

SEQ ID NO: 20166 - DNA, 806 bp, Zea Mays
gtgcagttgtgctccttccttccttgccccgtaccccgccggcgcgccctgagccaaatcgcaggctgccattgtgccatggacgaaggtgcgacgacgagcgactcgtccgctgccgagacatttgatccggacctgattcacgccatcttcaagctggtgtggaggcggcgggcggggaagggggccggcggcggcggcagcattgaggacatcgatgcggagagacatcgaggagaaatcggagcacaactgccaatgcgactgctcttaaagtcagctgcgaacttctacggatatttgtaacagaggctattcaacgctctgcttttatcgctgaagcggaggatggtgctgttattgaacccacccacctagagcgtgtgttgccgcagctgctcttggacttctgaggtaccccatggagcctccaaaagcatttatctaggcgtgtctgctatggaaggatacagatgcctggatgcatcaacagaatcttattgctgatctatgtcttgtaatctgtaaacacacgagatttctatatggctttataaaaatgcatgcatttcttggaatgttttcctgttcgtgttgtgtttgacgagattattgccattataaaacacgacagagttggtttcgatgaaatggagatgtagggaagggcttcgacggtttggaggcgcagacgactgcgaagcgctgatatagacatgaaaatcccattagttgttacggacactaattgatctcccgctgtgagaataagtctccttaaccaggttgccgtcttcagcgccgtc

SEQ ID NO: 20167 - DNA, 1216 bp, Zea Mays
atttcgttgacacaacgaaacgcagcccagaagtcatcaccgcgctggagctccgggtgctaacaatctgggcctgcagtatttaaaaactcgccggcgctggcagagtggcaggctttgcaactacaagggccgtggccggtgtcccgtggcggtagaacgcgtgcgtcggcaggagcccccccacctgtcgagacgaggcttctccaaaccgccaccgcagccgacccctgctgccccggctttgttataacggatttttttcccgacacggctggtcggctgccatcgccatgtgcctcgccgccgcgtgcgcgtccgccaccctagcccgccgcctctcgccctccaccgcgctcccgcgccgcttcctcctcggcgcccccacgaggccttccccgccaccgcctctgctgcggcgctgcctcccgttccacttctaccatatggcgcaatattggactcaaccatcactggacaggaacaaagctatggttgagtacctaaagcagtatggtgctgttagaactgataaagtgaaggaagtaatggaaacgattgatagagcactatttgtaccagagggtaccccttacattgacagtcctatgcctattggtttcaacgcgacgatatctgctcctcacatgcatgcgacctgcttagagctattgaaggatcatttgcaaccaggaatgcatgctctggatgtcggatcaggtagtggctacctgacagcttgttttgccatgatggttggaccagaaggccgtgcagtgggaattgaacacgttcccgagatcgttgcttcttctgttgaaaatgtgcagagaagtgctgcagctccactactgagggatggatcgctctcttttcatgttacagatggcaggcttggctttccagacgcggcaccctacgacgctatccatgttggtgcagcggcacctgagatccctcagcctctgcttgatcagctaaagcctggcggccggatggtgataccggttggcacctactcccaggacctgcaggtggtggacaagaacacggatggatcattcagcgtccggagcgacgcggctgtgcgctacgtcccactgaccagccgcgccgcgcagttgcagggcccctaaataaggggactgcaggtactgcacgctgacggtgcagagcacggcatcgaaggtgccgctctccagctccagccgctgct

SEQ ID NO: 20168 - DNA, 1279 bp, Zea Mays
ggccgtggccggtgtcccgtggcggtagaacgcgtgcgtcggcaggagcccccccacctgtcgagacgaggcttctccaaaccgccaccgcagccgacccctgctgccccggctttgttataacggatttttttcccgacacggctggtcggctgccatcgccatgtgcctcgccgccgcgtgcgcgtccgccaccctagcccgccgcctctcgccctccaccgcgctcccgcgccgcttcctcctcggcgcccccacgaggccttccccgccaccgcctctgctgcggcgctgcctcccgttccacttctaccatatggcgcaatattggactcaaccatcactggacaggaacaaagctatggttgagtacctaaagcagtatggtgctgttagaactgataaagtgaaggaagtaatggaaacgattgatagagcactatttgtaccagagggtaccccttacattgacagtcctatgcctattggtttcaacgcgacgatatctgctcctcacatgcatgcgacctgcttagagctattgaaggatcatttgcaaccaggaatgcatgctctggatgtcggatcaggtagtggctacctgacagcttgttttgccatgatggttggaccagaaggccgtgcagtgggaattgaacacgttcccgagatcgttgcttcttctgttgaaaatgtgcagagaagtgctgcagctccactactgagggatggatcgctctcttttcatgttacagatggcaggcttggctttccagacgcggcaccctacgacgctatccatgttggtgcagcggcacctgagatccctcagcctctgcttgatcagctaaagcctggcggccggatggtgataccggttggcacctactcccaggacctgcaggtggtggacaagaacacggatggatcattcagcgtccggagcgacgcggctgtgcgctacgtcccactgaccagccgcgccgcgcagttgcagggcccctaaataagctaggtggtctcagtccgttcgtgtttcacgaacgacgacggtgaaaaaagagtggttctttctgtaataagaaggatcgctagcatgtttctgaatcagatggtcggtggatgatgttttgagcttctgaacgaacttgcatctgcccgccgctgagctagacagctaatgctgaagtgtgcatgtacaagtacaaactagctttgcaccagtagtgattctatagatcgtatgcactgcatatcgcaatgctgcacgggttctgtc

SEQ ID NO: 20169 - DNA, 1036 bp, Zea Mays
ctcacctcttgtcgcaactttctggtgcatagcaatattggactcaaccatcactggacaggaacaaagctatggttgagtacctaaagcagtatggtgctgttagaactgataaagtgaaggaagtaatggaaacgattgatagagcactatttgtaccagagggtaccccttacattgacagtcctatgcctattggtttcaacgcgacgatatctgctcctcacatgcatgcgacctgcttagagctattgaaggatcatttgcaaccaggaatgcatgctctggatgtcggatcagaaggccgtgcagtgggaattgaacacgttcccgagatcgttgcttcttctgttgaaaatgtgcagagaagtgctgcagctccactactgagggatggatcgctctcttttcatgttacagatggcaggcttggctttccagacgcggcaccctacgacgctatccatgttggtgcagcggcacctgagatccctcagcctctgcttgatcagctaaagcctggcggccggatggtgataccggttggcacctactcccaggacctgcaggtggtggacaagaacacggatggatcattcagcgtccggagcgacgcggctgtgcgctacgtcccactgaccagccgcgccgcgcagttgcagggcccctaaataaggttctctatgctctgtacctcgaaatgcctgtacatatatatatatggtggtcgctacgttcttacctgttcgtgtttcttcttctgagtagctaggtggtctcagtccgttcgtgtttcacgaacgacgacggtgaaaaaagagtggttctttctgtaataagaaggatcgctagcatgtttctgaatcagatggtcggtggatgatgttttgagcttctgaacgaacttgcatctgcccgccgctgagctagacagctaatgctgaagtgtgcatgtacaagtacaaactagctttgcaccagtagtgattctatagatcgtatgcactgcatatcgcaatgctgcacgggttctgtc

SEQ ID NO: 20170 - DNA, 1081 bp, Zea Mays
ctcacctcttgtcgcaactttctggtgcatagcaatattggactcaaccatcactggacaggaacaaagctatggttgagtacctaaagcagtatggtgctgttagaactgataaagtgaaggaagtaatggaaacgattgatagagcactatttgtaccagagggtaccccttacattgacagtcctatgcctattggtttcaacgcgacgatatctgctcctcacatgcatgcgacctgcttagagctattgaaggatcatttgcaaccaggaatgcatgctctggatgtcggatcaggtagtggctacctgacagcttgttttgccatgatggttggaccagaaggccgtgcagtgggaattgaacacgttcccgagatcgttgcttcttctgttgaaaatgtgcagagaagtgctgcagctccactactgagggatggatcgctctcttttcatgttacagatggcaggcttggctttccagacgcggcaccctacgacgctatccatgttggtgcagcggcacctgagatccctcagcctctgcttgatcagctaaagcctggcggccggatggtgataccggttggcacctactcccaggacctgcaggtggtggacaagaacacggatggatcattcagcgtccggagcgacgcggctgtgcgctacgtcccactgaccagccgcgccgcgcagttgcagggcccctaaataaggttctctatgctctgtacctcgaaatgcctgtacatatatatatatggtggtcgctacgttcttacctgttcgtgtttcttcttctgagtagctaggtggtctcagtccgttcgtgtttcacgaacgacgacggtgaaaaaagagtggttctttctgtaataagaaggatcgctagcatgtttctgaatcagatggtcggtggatgatgttttgagcttctgaacgaacttgcatctgcccgccgctgagctagacagctaatgctgaagtgtgcatgtacaagtacaaactagctttgcaccagtagtgattctatagatcgtatgcactgcatatcgcaatgctgcacgggttctgtc

SEQ ID NO: 20171 - DNA, 312 bp, Zea Mays
ggttcggttgctgtggcagctgccccccggcagcgacggtgccgccggtgacgggtacccgtagatcggcagcggctgcgccggtggctcacacccctcgccgttgcataggaccgccggggacgcgtccgtcttgctaccgtcgtatgttgcgttgcccacggcggcgactgcggcgggggctgcagccgttgccagcaggaaggcgaggagcgagagaagcgccatggctcgatctgctccgctgctgatgtgtgagagacaaggtgcaatgcatgcaagcacaggcgcagctagctgcagggagactgc

SEQ ID NO: 20172 - DNA, 477 bp, Zea Mays
gaagatacattgaggcaagttcccttgattcagcgtcatccttctcagccgtaacattttcatcaccaccgtcgttatcaccaccaccagcagcagcatttgtgctcggggtggggcttgaaggcgttgagcggcggcttcttgtgcgcgacggcgtggtcaatgagcgcgaggcggcaggcgcgggaccgcgcgtaggcctccttctcccgctccggcagctcgtgccccgtctccgcgcaccgccaccgcccgctgccgggccttcgctcttcgccatgaccatgacttcatgagggggttgttcgtaactgggggctggaaagtggaaaggccgaaaagatttgggagcgagggttttggccgttttgtactaggttgctcgtcagttgcaaaaatggtcaccgtccggctggctatcttcattgccaaagcaatcactcgtttattgcaagcgtgtaatcaaatgatttgtac

SEQ ID NO: 20173 - DNA, 829 bp, Zea Mays
cgcatcccaccatccccgtgcgaccccttcaccgtgatgctcgcccacgcatgatagaaggcacgcccgcatctcgattctcaccaaccccgccccgccaccgcaatcttcgcctctcactgacttcgatggaaggcgtaccgctcgccctcacctgcccgcgacgctcacccctccccattgctggggccagtgtaggagaagaggacggaggttagcagatctcgttgcgcttccatcgaacgacgacattcacaggaggagcggtacctgtttgcctatgcaaacgacgacgtagggatcgctggatcagaggtcgcggacggcgaggttcaccccctcaccacgtgcagcttcagcagcccaacgagatggtccagcatggggatttccctcttcttcaccactgagttctctcttctctgactactatatattcatccaagcagatctcgtcgcgctggtggagatggccgaagccgcggagtgcgaggaggagcgggacctatttgccgatgcgaatgacgacgtagggatcgctggattggaggtcgcggatggcgaggttcacccccctcaccacgcgcagcttcagcagcccgacgagatggtccagcatgcttctcttgtaacattggatataatgacgctgctacatgactattattttgacatcataacctacatataaagattagagactaatctgtttttttttctgaactaaggtgttaacacatttccaaatatcgaacatctatcttttagtatgcaagcattttagtttctcagaggtatactgttccccatctctgtattttatttcatc

SEQ ID NO: 20174 - DNA, 952 bp, Zea Mays
agataactgtatcactttctgcaagtacaaatacacaagcacagaatatctttcccctttatgtacttttagctagacctaccagtaatatttcgcttgagggcattctccgatatatcgagcgggatgatgcttggtggacgtgtacatactaatattaatcggtctcgaagcttccgatacactcagttctcacatgaacgagtgggatggacctccctagaaaccaaacactcctgaatcgcagtcatcatcagcgaacgacaatctgtgtgatgttgcgatgtagtagtactactgaagcacggagcgaaccgcacaggctagcccacacggagcgaaccacacgggaaaagttgatgggaagaaacaaaaaagtcaagaaaaggcagttcctgcagcttcaaaatcaagtccggcttccaagaagagcaaggatgacgatgattctgatgaggacgagactgatgattctaacgaggacgagacagacgattctgatgagggtgagggtttgtctcctgaagaaggcgatgatgatgattcaagtgatgaagatgataccagtgacgatgaggaggaagacacttcaactcctaagaagcatgaggcaggcaagaagagagctgctgaaagttccgtgctgaaaactcctctatctgataagaaagcaaaagttgccacaccgtcagctcaaaagacaggtgtgactctgttcaaggatagtcttgaggttctagaacagaagagtagtggtgtgcatcagtgtatctgtttaccggataatagtggttggttaggtgtgtgcagaaaaagtttagtgttatggtttttcaagttgcgttttctacatggccatggggaccatctaccgacattttctttttttgatttggtgaaaaaggaaaggatgtgcacctttgcaagcgggcatggagatgagctgcgctaa

SEQ ID NO: 20175 - DNA, 1004 bp, Zea Mays
atccaatgatccaagcacaatcttggcatgcctgcagattggtagcacatccatttgatctcactccatgccggagtctgatgaagaaagaaatttgaaagaagaaatcaacctcctgaaggtggatcttaaagaaatcgagggaaagatgagtaatggttctgagcagacatcggtagatgcaaaagatttgtctgagaagatatctatgttggaaagccagcttgagcagctttcaagggagttggatgacaagattcgatttgggcaaaggccacgttctggtgcaggcagggttacaacacttgcacccactagtttaggggaggaaccacaggctacagtggtggacagaccacgttctcgtggtggtatggaaccacccccaaggcaggaagaaagatggggatttcaaggaagccgagaaaggggctcgtttggtggaagcagaaattcagacaggccaatggcaagacagagatggtgaagttgggacaacaagcatctcttagggacacttctggatcgcagtcccttttttgttctgaaaggatgggcaaaaataagtcgttttctgtttgtcgtgtttgtttggtcttagaagattgttgagggtggagataactccacatgaagctattggttgtcaagtctgtatgccgtaggatgctttacatttccctttttgccgtcttccatgtcaaaacaatatctggcaacctccgatactaactgttattcatgggtcactgaattccggatcagcttttgtcataggtcgtttatttcagcattgagtaatggaaaccttgaatttgcacttttactactgccatgccttcattctgtccgttttttttaactagtgtctgtatgttgaggcaacgagctgtgactcccagtcgtctgtattagtttcagactgcgggaatgctttatcacgggtttatatgtgggagattggctggtggctgataagttacccacatgtagagcaaggggcg

SEQ ID NO: 20176 - DNA, 1098 bp, Zea Mays
gtttgcacccagatcattatgtgatagcatgctaccaccaccatagcccaccatatgaccaccaggaatacgctggggtgatcatgcctgaagcattggatattgatgtggattttgatcttataatgtcatccttactaataattatttgaacgttgtgcaggccggagtctgatgaagaaagaaatttgaaagaagaaatcaacctcctgaaggtggatcttaaagaaatcgagggaaagatgagtaatggttctgagcagacatcggtagatgcaaaagatttgtctgagaagatatctatgttggaaagccagcttgagcagctttcaagggagttggatgacaagattcgatttgggcaaaggccacgttctggtgcaggcagggttacaacacttgcacccactagtttaggggaggaaccacaggctacagtggtggacagaccacgttctcgtggtggtatggaaccacccccaaggcaggaagaaagatggggatttcaaggaagccgagaaaggggctcgtttggtggaagcagaaattcagacaggccaatggcaagacagagatggtgaagttgggacaacaagcatctcttagggacacttctggatcgcagtcccttttttgttctgaaaggatgggcaaaaataagtcgttttctgtttgtcgtgtttgtttggtcttagaagattgttgagggtggagataactccacatgaagctattggttgtcaagtctgtatgccgtaggatgctttacatttccctttttgccgtcttccatgtcaaaacaatatctggcaacctccgatactaactgttattcatgggtcactgaattccggatcagcttttgtcataggtcgtttatttcagcattgagtaatggaaaccttgaatttgcacttttactactgccatgccttcattctgtccgttttttttaactagtgtctgtatgttgaggcaacgagctgtgactcccagtcgtctgtattagtttcagactgcgggaatgctttatcacgggtttatatgtgggagattggctggtggctgataagttacccacatgtagagcaaggggcg

SEQ ID NO: 20177 - DNA, 2423 bp, Zea Mays
ggctataaataacccttaaacattattttataagcctcttgattacataatttgattatgaactcactaatgaaagtttttaacatgcaatacgccaccagcacagaactcaaagcatcctggatacattattgaatcgtgtgatgaacaaaagatgttagaaataaaaaattaaaaagaaaaaaaggcccatctaaaagtccattacttgagaaacccaatttccaccagaccctaacctttccattgttccagcgaacgcacacagccgccgctgtttcttcatcttcctcgcagcgccggcgctgaggctcgggctctcagcgacggcggcagcggcagcggcttcccctcccgcctctcgccagtcgcctcgcgccctcgcctccggtcctccgcacaccggtcggtgaccctgcgtgcgtgcctctctagtggctcctggttcagatggcgggctgctgacacggccgcgccgcccgcggcctgagggcagcgggagccaccagctgctgctccaccaaggcggtctcgccgctttgaggagcgcttatgcccaaagcgaagcgttagcgcttcagcgcgctgaagcgtgcgcttagtgctgttttttagaaccctgatctttttcatcattccctaccattttttgtattttcaggataatggctcatcgtggacatctagatggactgactggccaagctcctgctcttatgcgccatggttccttcgctgcaggcagcctctctagccgctcacctttgcagtcttcatccacactggagatgctggagaacaagcttgccatgcaaactacagaagtggaaaagcttatcacggagaatcagcggttagcatcaagccatgtggtcttgaggcaggacattgttgatacggagaaagagatgcaaatgatccgcacccacctaggtgaagttcagacagagactgatttgcagattagagatttgttggagagaatcagattaatggaggtagatatacatagtggtaatgtagtgaacaaggagcttcaccaaatgcatatggaggcaaagagacttattactgaaaggcagatgctaacccttgagatagaggatgtgactaaagaattacagaaactctctgcctctggggacaataaaagccttcctgaattgctttctgagctagataggctacggaaagagcatcataatttacgatctcagtttgaatttgagaaaaatacaaacgtcaagcaagttgagcagatgcggacaatggaaatgaacttgataaccatgaccaaacaagctgagaagttacgtgttgatgtggcaaatgctgaaagacgggcacaagctgcggctcaagcagcagcacatgcagctggtgcacaggtgacagcttcgcagcctgggacagctcaagctaccacggtttcagcagcagcagccacagactcatatgcaggtgcatataccagctacccccctgcatatcagcagggagcccaggctggggcatatcagcagggtgctcaggctggggtatatcagcagggagcccaggctggggcatatcagcagggagcccaggctggggcatatcagcaggggggccaggatggggcatatcagcagggggctcaggctggggcatatcagcagggagcccaggctggggcatatcagcagggagcccaggctggggcatatcagcagggtgctcaggctggggcatatcagcagggagcccaggctggggcatatcagcagggggcccagtctggggcatatcagcagggggcccaggctggggcatatcagcagggagcccaggatggggcatatcagcagggagcccaggatggggcatatcagcagggtgctcaggctggagcatacaactatgcttatgatgctggcacggcttatgcatatgcaggttactctggctatccagttgcaggctacgcgcaaagtgcagtgcccaactattcctatgctgcacctccgcagccaacaagcagcggtgcagctacgaacgccgcaggaggccagtatggggcagttggtagtgctggatatcctactgggcaagttcagccgagcagtggcactgcaaatgcagcgcaagcacctcctcctccaccaccaccggcagcaccatatccccccagcacatatgaccaaaccagaggagcccagagataaaatctgggatgtaaaccagatggatgtttgccatgcacatttgttgagcagacaaatatggtgaaatctgggatgtaaaaccagatggctgtctgtgcctccatcccattgactagggcgtattttcaccaatattgtgcctccagtgcaatttcttctgtgttatatatcaccaccatttgttgagcaccgtagaaatgagttccagacggccgggac

SEQ ID NO: 20178 - DNA, 2008 bp, Zea Mays
ggctataaataacccttaaacattattttataagcctcttgattacataatttgattatgaactcactaatgaaagtttttaacatgcaatacgccaccagcacagaactcaaagcatcctggatacattattgaatcgtgtgatgaacaaaagatgttagaaataaaaaattaaaaagaaaaaaaggcccatctaaaagtccattacttgagaaacccaatttccaccagaccctaacctttccattgttccagcgaacgcacacagccgccgctgtttcttcatcttcctcgcagcgccggcgctgaggctcgggctctcagcgacggcggcagcggcagcggcttcccctcccgcctctcgccagtcgcctcgcgccctcgcctccggtcctccgcacaccggataatggctcatcgtggacatctagatggactgactggccaagctcctgctcttatgcgccatggttccttcgctgcaggcagcctctctagccgctcacctttgcagtcttcatccacactggagatgctggagaacaagcttgccatgcaaactacagaagtggaaaagcttatcacggagaatcagcggttagcatcaagccatgtggtcttgaggcaggacattgttgatacggagaaagagatgcaaatgatccgcacccacctaggtgaagttcagacagagactgatttgcagattagagatttgttggagagaatcagattaatggaggtagatatacatagtggtaatgtagtgaacaaggagcttcaccaaatgcatatggaggcaaagagacttattactgaaaggcagatgctaacccttgagatagaggatgtgactaaagaattacagaaactctctgcctctggggacaataaaagccttcctgaattgctttctgagctagataggctacggaaagagcatcataatttacgatctcagtttgaatttgagaaaaatacaaacgtcaagcaagttgagcagatgcggacaatggaaatgaacttgataaccatgaccaaacaagctgagaagttacgtgttgatgtggcaaatgctgaaagacgggcacaagcagctgcggctcaagcagcagcacatgcagctggtgcacaggtgacagcttcgcagcctgggacagctcaagctaccacggtttcagcagcagcagccacagactcatatgcaggtgcatataccagctacccccctgcatatcagcagggagcccaggctggggcatatcagcagggtgctcaggctggggcatatcagcagggtgctcaggctggggcatatcagcagggagcccaggctggggcatatcagcagggggcccagtctggggcatatcagcagggggcccaggctggggcatatcagcagggagcccaggatggggcatatcagcagggagcccaggatggggcatatcagcagggtgctcaggctggagcatacaactatgcttatgatgctggcacggcttatgcatatgcaggttactctggctatccagttgcaggctacgcgcaaagtgcagtgcccaactattcctatgctgcacctccgcagccaacaagcagcggtgcagctacgaacgccgcaggaggccagtatggggcagttggtagtgctggatatcctactgggcaagttcagccgagcagtggcactgcaaatgcagcgcaagcacctcctcctccaccaccaccggcagcaccatatccccccagcacatatgaccaaaccagaggagcccagagataaaatctgggatgtaaaccagatggatgtttgccatgcacatttgttgagcagacaaatatggtgaaatctgggatgtaaaaccagatggctgtctgtgcctccatcccattgactagggcgtattttcaccaatattgtgcctccagtgcaatttcttctgtgttatatatcaccaccatttgttgagcaccgtagaaatgagttccagacggccgggac

SEQ ID NO: 20179 - DNA, 1877 bp, Zea Mays
cctctttagttcagttgggcattgtgatatcttaaatgctttgggttttctagttcctagtttatatggtctttgctaacctcgtgctcgttgttgactttagctttctgcgtttgtgcatgtagttgcgacattaggtttttgtttgttctttgctggttctgtgctgtgctaatcagcttctgctcaagtgtttagcttttgatgacgccttcctggaaacaacaaacccttctgctctggaaagttgatgtttgggttattgcttcaggagtttatatctcttcgataggaagcctgtgtcaaagacagctctgacgatgtcaaggctaaagtgcgctctccggggatttgatttaagggcacttatggtcctcttgattggtgtgccaattctaatcctaatgatatatgcgcatggtcagaaggtcacatacttcctgcggcccatctgggaatctcctcccaagcccttcaagacaatccctcactactaccatgagaacgtcaccatggagaacctgtgcaagttacatggttggaaagtccgtgacttcccgcgtcgtgtctttgatgctgtactcttcagcaatgagcttgatatcctggagatccgctggaatgagcttagtccctatgtgtccgagtttgtgcttcttgaatccaactcaacctttactggcataaaaaagcccctccacttcaaggaaaacaagcaccgttttgggttcgctaaatcacggctgacatatggtaatattgggggaaggttcgtgaagggggagaacccatttgttgaggagtcatatcagagggttgccctggaccggcttcttaagcttgcaagaatagaagacgatgacctgctgatcatgtcggacgttgatgaaatcccgagcggccacacaatcgatctcttaaggtggtgcgacggcattccagacatacttcaccttcagctcaggaattatctctactcgttcgagtttttcctggacgacaagagctggagggcatcgatacacaagtaccaagctggaaagacgaggtacgcgcacttccggcaggcagacgagctcctcgccgattcagggtggcattgcagcttctgcttccgctacataagcgatttcgcattcaagatgcaagcgtatagccacgtcgaccggatcaggttcaagtacttcctgaaccctgagaggatccaagatgtcatctgcagaggggcggaccttttcgatatgcttccagaagagtacacgttccaagagatcatcgccaagctggggccgatcccgagcacgtattctggcgttcatcttcctagctatctgctaaggaatgtcgaccggtttagataccttctaccgggcaactgcaggagagaaagtggctaggttttatggcccactaccctgcaacctgttgtgcgtgggtgggtgggtgccagtgccacactgccccgctgcaaagctgctgtccatgggatatctgtggcagttcacctggtacggttgcctaacgtagttgaacaaatgctttggggaagaattggttcatggatgggggtgagcacatgattctctaatgtgtaatagaacatgggaggaggatctaacggcatagcgcacgcttggtcctggctgggtgtgcatgagctgagcggtttgtcattgtcattcattacttccctgattgatatatataaactcaaaaaggctgttgtagattgcaatccaagtggtatttcagaattacatattgtagaaccggaccttgctcgtcagatgattgatactccctcagttcttttttatttgtgcgtataaatattcgagaacagagggagtataatttgcatatggatttgttcttac

SEQ ID NO: 20180 - DNA, 2903 bp, Zea Mays
atggcgccgcccacctcccccgccgccgtggcggcggccgcccgcgcgtctccgacgccggccgctgcgctcgcgctcttcaagtcggcgctttccgcagaccgtgctctgtgcccgctttccgtgctcccgcacctctccgcgtccccgtcgctgccgcacctcctcctcaccgcctccgccgccgcgcgcccccacgccacctcactccgcctctacgcgcagctcaagtcgctctccgtccccatccccgtcgcctcgctccacccgctgctctcctccctcccctccgcccccgccttcgccctcttcgccgacatctaccgcctccgcctaccgctctgcaccaccaccttcaacatcatgctccgccacctctgcgccacgggtaagcccgtgcgcgcgctcgagctgctccgccagatgccccgcccaaacgccgtcacctacaacaccgtcatagccgggttctgcgcgcgcggccgtgtccaggccgcgctggaggtcatgcgcgagatgcgggagcgcggagggattgctcctgacaagtacacctatgccacactgatctccgggtggtgcaagatcggccgaatggaggacgccgtgaaggtgttcgacgaaatgctgaccaagggagaggtggcaccatctgcggtgatgtacaacgcattgatcggtggctactgtgacgtgggcaaactggatgtggctctgcaataccgggaggatatggtacagcgagggattgccatgacagttgctacatacaatttgcttatgcatgcgttgttcatggatgcacgtgcatcagatgcttatgctgtgcttgaggagatgcagaagaatggtttttccccagacgtgttcacgtataacatactaatcaatgggtattgcaaagagggcaatgagaagaaagcactggaggtgtttgaggagatgtctcagaaaggggtgcgtgcaactgcagtgacctacacgtcattgatatatgttttttccaggaaagggcaagttcaggagacggataggttgtttaacgtggctgtgaagaagggcatcaggcctgacgttgtcatgtacaatgctctgatcaatagccactgcacaggtggtgatatggaaagagcatatgagatcatggcagagatggagaagaagagaatccccccagatgatatgacatacaatacgctgatgagggggttttgcttgcttgggcgacttgatgaagctcgcacgctcattgacgagatgacaaagaggggtattcaaccggaccttgtcagctataacacgctgatcagtggctatagcatgaagggtgacataaaggacgctttgagagtccgggatgagatgatggataaggggttcaatccaacacttatgacatataatgcgcttatacaggggctgtgcaagattagacagggagatgacgccgagaacctgatgaaagagatggtggcgaagggtatcaccccagatgacagcacatatatctccctgattgagggacttaccactgaagatgaacgaatggctgcagcagatgctgcaaaagcttgagcttgctaggaagcacatcataagctcaatgttcgcagtggaccaaagacttgtttgttcaacatgtgctggattgtattatagcattttacaacgccatagcatttcctgacaaagcagtgaatacaagttgccagttccatgattagcagcattggcaataagggccaggtgacactagcattttatgcaccagtggcccttaacaaagttgcaggcctttgtcaacagtgctttcagtcaatctgtgatgaatacccgtaaacattaaggatggattaaaaaggcatacttgatgttttgaaggctttgaacaatagtaagtggagtctcctttcaatctggttagattacaagtcatcttgtttattttttttgtttctatgttccctacagtcataatcttctactccctctattatgaattgtaagccgttttggtttattaggcgcatatcttttgatatgtatctaggatatacaatttcatctaggtatagagtagaacttatgaatctatatatcaaaaaatgtatatgctatctaacacgtttaatcaagatagtatatgagtagaagatcatggatcgttatagcatctctaacaatccgtcctaaaatagtgtcctaaaaattgaaatactacttcatttgaaaagtttagggcacataaaacaacaatgtgccctttaaatggggcaattaaccgaagatctgttttaccatttctcgcccgcgcactttttggtgcctcttttctcaccagcgatcgtttccccgctgccgctatcatttgttccaacaattgctggcatcttctgatcctgaacagtggagccgggagtcacatagacggtggagcaccgtcatcaccagcaactagtgttagcaccgcgcttgtagcgagaaaaacggtgacaatgtcttgggcacccgcaaccttattgagagacgacgacggcaactaagatgattctctagcaagtcatcctcttcgtatatatagattcttgctaatgggcttttaacctaaaggctcattaacgttcttatagatcatgattgcattttaggtatatattcaaccttaagaaatctaaaacaacttacaatttagtacaaatagagtattaatttgattatattaaaagtaacaactgtggcttgctgctgatgagttcagcaaggtgaataaggtcctggcttgtccaaagaagtggtgagcggagtaaaaggaccctttcacactgagcatcatattgtatgcacacccttccatttgacggccattgaaagcatcatattgtctgcactttgtgtggtcctag

SEQ ID NO: 20181 - DNA, 1965 bp, Zea Mays
atggcgccgcccacctcccccgccgccgtggcggcggccgcccgcgcgtctccgacgccggccgctgcgctcgcgctcttcaagtcggcgctttccgcagaccgtgctctgtgcccgctttccgtgctcccgcacctctccgcgtccccgtcgctgccgcacctcctcctcaccgcctccgccgccgcgcgcccccacgccacctcactccgcctctacgcgcagctcaagtcgctctccgtccccatccccgtcgcctcgctccacccgctgctctcctccctcccctccgcccccgccttcgccctcttcgccgacatctaccgcctccgcctaccgctctgcaccaccaccttcaacatcatgctccgccacctctgcgccacgggtaagcccgtgcgcgcgctcgagctgctccgccagatgccccgcccaaacgccgtcacctacaacaccgtcatagccgggttctgcgcgcgcggccgtgtccaggccgcgctggaggtcatgcgcgagatgcgggagcgcggagggattgctcctgacaagtacacctatgccacactgatctccgggtggtgcaagatcggccgaatggaggacgccgtgaaggtgttcgacgaaatgctgaccaagggagaggtggcaccatctgcggtgatgtacaacgcattgatcggtggctactgtgacgtgggcaaactggatgtggctctgcaataccgggaggatatggtacagcgagggattgccatgacagttgctacatacaatttgcttatgcatgcgttgttcatggatgcacgtgcatcagatgcttatgctgtgcttgaggagatgcagaagaatggtttttccccagacgtgttcacgtataacatactaatcaatgggtattgcaaagagggcaatgagaagaaagcactggaggtgtttgaggagatgtctcagaaaggggtgcgtgcaactgcagtgacctacacgtcattgatatatgttttttccaggaaagggcaagttcaggagacggataggttgtttaacgtggctgtgaagaagggcatcaggcctgacgttgtcatgtacaatgctctgatcaatagccactgcacaggtggtgatatggaaagagcatatgagatcatggcagagatggagaagaagagaatccccccagatgatatgacatacaatacgctgatgagggggttttgcttgcttgggcgacttgatgaagctcgcacgctcattgacgagatgacaaagaggggtattcaaccggaccttgtcagctataacacgctgatcagtggctatagcatgaagggtgacataaaggacgctttgagagtccgggatgagatgatggataaggggttcaatccaacacttatgacatataatgcgcttatacaggggctgtgcaagattagacagggagatgacgccgagaacctgatgaaagagatggtggcgaagggtatcaccccagatgacagcacatatatctccctgattgagggacttaccactgaagatgaacgaatggctgcagcagatgctgcaaaagcttgagcttgctaggaagcacatcataagctcaatgttcgcagtggaccaaagacttgtttgttcaacatgtgctggattgtattatagcattttacaacgccatagcatttcctgacaaagcagtgaatacaagttgccagttccatgattagcagcattggcaataagggccaggtgacactagcattttatgcaccagtggcccttaacaaagttgcaggcctttgtcaacagtgctttcagtcaatctgtgatgaatacccgtaaacattaaggatggattaaaaaggcatacttgatgttttgaaggctttgaacaataactataactcgatctggaagagctaccctagctggtcatgtcacatctcgaaagcgacctcaaacctcttc

SEQ ID NO: 20182 - DNA, 287 bp, Zea Mays
gtaaatagaaagctagtcaatccttacgtttcaattaagtaatgtgggacagtgcattaaaagtgaatgggacataatgggtcagaggacacttgccttcaccaaacagatgctcaggatcttcaacctcataaaactcagagagcttgatcatttggtcgccgacgcttgatcgtcgattcctcggagcgcggaaacaaatcgcgatctaatcgcaatgcgaagcgaagacaaacaggaacaaacaaacaaacatatatgcataagaacattacactatacaaagg

SEQ ID NO: 20183 - DNA, 1059 bp, Zea Mays
taagaacctgtccatagaaaatcctgcacggtagaagtggccaaagaaaagtcctaaacttggccacgttttcctggggttgttttcatgcatgcgcccaagaggtttctcaaggcatgcatgagcacatgggtgggcccaccagccatttctccacatggtttcttcgttttctggctctgcccggacgaacgaattgcaccagcggtccctcttcttcctttgactttcttggaccatccaacacagccacagcaaggggatagaaaggaggaggctctctaccgtccgactaggcttggccattgggctgctcggccactcgccgccaattcgctggccggattgacgacagcgcacaaccgggcgcgcagcaagaccaggaacgaggcgtttagcggcacatggctaggagctggcgttcggtgatgtgcaaagggggtggaacgcggacctcgtgggctggatgcggctagcagcggcggagggcggagcggtgttacaacgcgcggctggggcaggaagcccgcgagtagcagctctacagcgacgctggcgttgctcggctcgccggggcaagacggcgaagcacgaccagaccgtgggagcggggacgcacgtgtgcagggaaggaagggagagaggagagctcacctcggcaacggctccacgcaggctcctcggcggacgacgatgcgagctcagagcggcggggcaccaggtgatgggcgatggcgcggctgcagatgcagcacggcgtgaacggcggtggcagcggaggtgtgggcgcgtgtgagggagagggagagggaaatggggtgctggggcaaatggaaccgtcgtgggggagtcatgcgtggagggcggtttcggagaagataaacaggaggtggggcgtggggcagattggtgagtggggcccaagcgcaggacgataggatgcggtggctcggcgctcgcgcgggcgcgcgggcgggaagccagggcgcgctggccatcgaagctgtgttgggctgcgcatcatgggccagcgcaggccgaggaaccggggtagattag

SEQ ID NO: 20184 - DNA, 2898 bp, Zea Mays
gcagcacacaacccaacactactctccctcccagtctcgccaacgccaccacccccaccattccaaacccccgtctcccaccggctgccgtttccctcccccctccctccctgcctccctcggcggctcctcgcggacggagagaaccccgctcccttgcctagggttcccggaaccctagccccgatccgtacgcgcgagggtccccggcgacgaggaggctgctgtgaggggagggggcagaaggcgcgggaggcggaggcctgtgctgtatgtcagatcgtgggagccggcgaggcggaggcggaggaggagactacggacacggtcagctcgcgaacccgctccaatggccgcagctaaggaaaaggcgtcggtatgctgccgcgatgcgcccgcgcgtgtcgctggcgccccagtcgtccccatgcgcgcgatcgccgcgtccccggtcggcaaggtcgtcgccctcgccgcgggaggcggtgagcgcgtttctgcgtcggctgctggctcaagcggcgccgtgatcgaggagatcgccgcggtccagcccaccaccgcgaaggcatcctccaaagggataccaataatgacaagagcccagaggtgtcaccctttggacccattatctgctgctgaaattgcagttgctgtagcaactgtaagagttgctggaagatctcctgaggaaagagacagcatgcgctttgttgaagctgtgctgttggagccagaaaagaatgttgtggcactggccgacgcctacttctttccacctttccaaccatcactgctccctagaagcaaaggttctgctgttattccaagcaggctacctcctaggagggccagacttgttgtctataacaaacaatcaaatgagacaagtatttggatagtggaactatctgaagtgcatgccgctactaggggtggacatcacagagggaaggtgatatcatctgaagttattccggatgttcaacctgccatggatgctatggagtatgctgaatgtgaggctactgtcaaaagttatcctccatttattgaagctatgaagagaagaggtgtgctggctactacagcgaagctgatgctcctagtcgcagacttggcaagcctttgatattttgcagaactgagagtgatagccccatggagaatggttatgctcgtcctgtagaaggaatccatgttgttgttgatatgcagaataatgctgtgatagagtttgaagataggaagttggttcctctaccccctccagatcatttgagaaactatactcctggggagacaagaggaggtgttgatcgaagtgatgtaaaaccacttatcatcaatcagcctgagggtccaagttttcgaattaatggctattttgtggaatggcagaagtggaacttccgtattggcttcacccccaaagagggtttggttatctattctgttgcttatgttgatggtagccgtggacgtagacctatagcacataggctgagctttgttgagatggttgttccttatggagatccaagtgaaccacattatcgcaagaatgcatttgatgctggagaagatggacttggaaaaaatgctcattctcttaagaagggatgcgattgcttgggctacataaaatattttgatgcacatttcacaaacttcactggtggtgtggagacaattgagaactgtgtttgtttgcatgaggaggatcatgggatcctttggaaacatcaagactggagaactggtttagcagaagtaaggcggtcaaggaggctcactgtttcatttatctgtacagttgcaaactatgagtatggtttttactggcacttctatcaggatgggaaaatagaggcagaagtaaagcttactggaattctcagtttaggggccttgatgcctggggaatcgaggaaatatggcacaactattgcccctggtctgtatgcaccagttcatcagcatttctttgttgcccgtatggacatggctgttgattgcaaacctaatgaagctcataaccaggtggttgaggttaatgttaaagtggaaagtgcaggcacacataatgtgcataataatgctttctatgctgaagagaagttgctcaaatctgagttgcaagcaatgcgtgattgcgacccttcatctgcccgccactggattgtacgcaacacacgaactgtgaatcggacggggcagccaactggctacaggctcgtacctggttcgaactgcctgcctttggctctgcctgaggcgaaatttctgaggagggctgggttcttgaagcacaacctctgggtcactcaatacaagcgtggcgagatgttccctggaggggagtttcccaaccagaatcctcgcatccatgagggtctgccaacatgggtcaagaatgataggcctctggaggaaaccgacattgttctctggtacgtgttcgggctcacccatatccccaggctagaagattggccagtcatgccggtggagcacataggcttcatgctcatgccacatggattcttcaactgctcgcctgcggtcgacgtgcctcccagctcgtccgatgcggatgtcaaggaagccgagtcgcccaaggccatccagaatagcctcatatcgaagctgtgagctttgctgttctgccgaggaaaaaggatccgcgcgcggctgctctccctactatttttttatcgtattccgcgagtaaaaaggaaaactgctcgatgtccttttgtttgttgcttggtaataccgttctgtttgctataattatcgatcagcgggatgtgaagtactgtttacattgctcgcgttctaataaagtactgtttggacttgcttaaaaaaaaaaaaaaaaaaaaacaacaacaa

SEQ ID NO: 20185 - DNA, 2588 bp, Zea Mays
aacaggttaagtgatgattggagcacgggtttgatgtgatgtctaagaccacggagccatactagtcggtcttagctgtcacaaatataaaaatatagtcacgctttgtagcctaccgttcataactgtgcaacagtttggtgctccaatttttcctctctctttgatcactagttgtagtgatcaacttgttttttacttccgcatatgacgaggtttccgcctttccggtagggataccaataatgacaagagcccagaggtgtcaccctttggacccattatctgctgctgaaattgcagttgctgtagcaactgtaagagttgctggaagatctcctgaggaaagagacagcatgcgctttgttgaagctgtgctgttggagccagaaaagaatgttgtggcactggccgacgcctacttctttccacctttccaaccatcactgctccctagaagcaaaggttctgctgttattccaagcaggctacctcctaggagggccagacttgttgtctataacaaacaatcaaatgagacaagtatttggatagtggaactatctgaagtgcatgccgctactaggggtggacatcacagagggaaggtgatatcatctgaagttattccggatgttcaacctgccatggatgctatggagtatgctgaatgtgaggctactgtcaaaagttatcctccatttattgaagctatgaagagaagaggtgtggatgacatggatcttgttatggtggatgcttggtgtgctggctactacagcgaagctgatgctcctagtcgcagacttggcaagcctttgatattttgcagaactgagagtgatagccccatggagaatggttatgctcgtcctgtagaaggaatccatgttgttgttgatatgcagaataatgctgtgatagagtttgaagataggaagttggttcctctaccccctccagatcatttgagaaactatactcctggggagacaagaggaggtgttgatcgaagtgatgtaaaaccacttatcatcaatcagcctgagggtccaagttttcgaattaatggctattttgtggaatggcagaagtggaacttccgtattggcttcacccccaaagagggtttggttatctattctgttgcttatgttgatggtagccgtggacgtagacctatagcacataggctgagctttgttgagatggttgttccttatggagatccaagtgaaccacattatcgcaagaatgcatttgatgctggagaagatggacttggaaaaaatgctcattctcttaagaagggatgcgattgcttgggctacataaaatattttgatgcacatttcacaaacttcactggtggtgtggagacaattgagaactgtgtttgtttgcatgaggaggatcatgggatcctttggaaacatcaagactggagaactggtttagcagaagtaaggcggtcaaggaggctcactgtttcatttatctgtacagttgcaaactatgagtatggtttttactggcacttctatcaggatgggaaaatagaggcagaagtaaagcttactggaattctcagtttaggggccttgatgcctggggaatcgaggaaatatggcacaactattgcccctggtctgtatgcaccagttcatcagcatttctttgttgcccgtatggacatggctgttgattgcaaacctaatgaagctcataaccaggtggttgaggttaatgttaaagtggaaagtgcaggcacacataatgtgcataataatgctttctatgctgaagagaagttgctcaaatctgagttgcaagcaatgcgtgattgcgacccttcatctgcccgccactggattgtacgcaacacacgaactgtgaatcggacggggcagccaactggctacaggctcgtacctggttcgaactgcctgcctttggctctgcctgaggcgaaatttctgaggagggctgggttcttgaagcacaacctctgggtcactcaatacaagcgtggcgagatgttccctggaggggagtttcccaaccagaatcctcgcatccatgagggtctgccaacatgggtcaagaatgataggcctctggaggaaaccgacattgttctctggtacgtgttcgggctcacccatatccccaggctagaagattggccagtcatgccggtggagcacataggcttcatgctcatgccacatggattcttcaactgctcgcctgcggtcgacgtgcctcccagctcgtccgatgcggatgtcaaggaagccgagtcgcccaaggccatccagaatagcctcatatcgaagctgtgagctttgctgttctgccgaggaaaaaggatccgcgcgcggctgctctccctactatttttttatcgtattccgcgagtaaaaaggaaaactgctcgatgtccttttgtttgttgcttggtaataccgttctgtttgctataattatcgatcagcgggatgtgaagtactgtttacattgctcgcgttctaataaagtactgtttggacttgcttaaaaaaaaaaaaaaaaaaaaacaacaacaa

SEQ ID NO: 20186 - DNA, 708 bp, Zea Mays
tcacgggttttccggttaatataacaactaaagctttttttgtcagtctgagtctcataggagagctgctgcagccacgacctctggaaaattcaaggatgagatcgtccccgtgccaacaaagcatgggactacaactgcaggcaattccagtcaagtgagtgatggtgctggagctgttcttctcatgaaaagatctgtggctctgaagaaagggctgcccattcttggtgttttcaggtgcccggcgcgtggctactcttctaaatgaaatgaagcgccggggcagagactgcagatttggtgttgtcaccatgtgtatcggatctagaatgggggcagcagctatgttcgagctgtgttcggcccggctggaggtatcgaccatcactcaacactgtaacccgatggtgatcggcgaccgtgagcttccatgttattgcgttctgatacttgagacttttattatgactatgtatgagatattgtctcttattagtactggatgatgagatgtgtcttattatgactatggatgagacttttgtgatgtaattgatgagacttttgtgatgtaattgatgagactatggatttaaatattgttatgtgattgtgtgtgagatgttttatgtgaaaatatgttgtgctatatagctgttgatatatttgttatgttgtggaatgtggtgtaaaataaaaataaac

SEQ ID NO: 20187 - DNA, 897 bp, Zea Mays
gtctgagtctcataggagagctgctgcagccacgacctctggaaaattcaaggatgagatcgtccccgtgccaacaaaggcaattccagtcaagtgagtgatggtgctggagctgttcttctcatgaaaagatctgtggctctgaagaaagggctgcccattcttggtgttttcaggttgcccaacctgccctatcttgattagtccacattgtgtttgtcgtcgatgttcagacacattttgctcaattccttgttacatttaacgctgcttggcatcgtccattagaagctttgccactgttggagtggatctagctgttatgggcgctggtcttactgtggccattcctgctgctgtgaagtctacttacctgctatattttttctgagcaaagtcggttaaacttgtgattctttgtatgttcaggtgcccggcgcgtggctactcttctaaatgaaatgaagcgccggggcagagactgcagatttggtgttgtcaccatgtgtatcggatctagaatgggggcagcagctatgttcgagctgtgttcggcccggctggaggtatcgaccatcactcaacactgtaacccgatggtgatcggcgaccgtgagcttccatgttattgcgttctgatacttgagacttttattatgactatgtatgagatattgtctcttattagtactggatgatgagatgtgtcttattatgactatggatgagacttttgtgatgtaattgatgagacttttgtgatgtaattgatgagactatggatttaaatattgttatgtgattgtgtgtgagatgttttatgtgaaaatatgttgtgctatatagctgttgatatatttgttatgttgtggaatgtggtgtaaaataaaaataaac

SEQ ID NO: 20188 - DNA, 1369 bp, Zea Mays
ttccagtctccactcacccgtcagtccgtcacccgagactgaccgccgccgccgtacagcacgggcgccggtcaccggggaacgcaggaagcagcacccttctccagctcgggcacgcagcagtgcagcacgggcatgcagcagcaggcagcacgacaccggcttctctagactccagctcgccaccaccagcgtccagccttcagcagctagaatgtgaaccgcaagtcggcagtacaaacgaactctgaatctgtcatgctgtcagcctatccagaactgctgcagtcccacgccactatccaattcgagcagaggcaggcggggatgctctctctacccgcctgctcacccattccgcttaccccctacccgttgtggcgctcgccggaagagcgcggccgccgcgaccatcacgatgcgggaccgcagcaagaaccggaagccgacgcagcgagggcggtacctcagcaccgaggccatccaggctgtccagtccctcaagcgcgccgcgctccgcggcgcccccgccgcgtccgccgctgccgtggtggagcccaagctgcgacgcctcctcaaggcagacatggtcgccgtcttccgcgagctcgccgcgcagggcgaggccctcctggccctccaggtgtttgaggagatccggaaggagcattggtacaagccgaggttgctttggtacgtagatcttgttacagtgcttgcaagcaaaggtctccggactgaggtcgacagagcctgttcatatctgaagagggaacagttggagcctgacactgaaggtttcaatttgcttctgaaggcactcctagactctgggttcacacagttaacactggactgtttccgtctaatgaaattgtgggacagtgatcctgacaggataacgtatacaacattgatcaaaggccttgaatccctaggaaagatggagctatctgctggcattcggttggaggcagaaaatgattatggttccttggacttcctcgatgaagtggagatcgatgaggcttgcagaagtagaccttaacaggatgggtcaatcttgctctttgatgcaaccagcaggagtaaatctttgtgaagtgcagaatgagattatacagaaccttagtaaataattctttcctagatcttatacacaattttagaaattagaacagaccttgttgcagcaagtactagtattgactactaatatctagctgtttgttgtgtatccaaaatcttgaggggtcacctgttatcttaacttgatttttgtttgacatctgtatggatgtctaaccatgctgttattccctgaattatagtgacattactattttcgcttcatcaaactgtatttttt

SEQ ID NO: 20189 - DNA, 1356 bp, Zea Mays
ccactcacccgtcagtccgtcacccgagactgaccgccgccgccgtacagcacgggcgccggtcaccggggaacgcaggaagcagcacccttctccagctcgggcacgcagcagtgcagcacgggcatgcagcagcaggcagcacgacaccggcttctctagactccagctcgccaccaccagcgtccagccttcagcagaatgtgaaccgcaagtcggcagtacaaacgaactctgaatctgtcatgctgtcagcctatccagaactgctgcagtcccacgccactatccaattcgagcagaggcaggcggggatgctctctctacccgcctgctcacccattccgcttaccccctacccgttgtggcgctcgccggaagagcgcggccgccgcgaccatcacgatgcgggaccgcagcaagaaccggaagccgacgcagcgagggcggtacctcagcaccgaggccatccaggctgtccagtccctcaagcgcgccgcgctccgcggcgcccccgccgcgtccgccgctgccgtggtggagcccaagctgcgacgcctcctcaaggcagacatggtcgccgtcttccgcgagctcgccgcgcagggcgaggccctcctggccctccaggtgtttgaggagatccggaaggagcattggtacaagccgaggttgctttggtacgtagatcttgttacagtgcttgcaagcaaaggtctccggactgaggtcgacagagcctgttcatatctgaagagggaacagttggagcctgacactgaaggtttcaatttgcttctgaaggcactcctagactctgggttcacacagttaacactggactgtttccgtctaatgaaattgtgggacagtgatcctgacaggataacgtatacaacattgatcaaaggccttgaatccctaggaaagatggagctatctgctggcattcggttggaggcagaaaatgattatggttccttggacttcctcgatgaagtggagatcgatgaggcttgcagaagtagaccttaacaggatgggtcaatcttgctctttgatgcaaccagcaggagtaaatctttgtgaagtgcagaatgagattatacagaaccttagtaaataattctttcctagatcttatacacaattttagaaattagaacagaccttgttgcagcaagtactagtattgactactaatatctagctgtttgttgtgtatccaaaatcttgaggggtcacctgttatcttaacttgatttttgtttgacatctgtatggatgtctaaccatgctgttattccctgaattatagtgacattactattttcgcttcatcaaactgtatttttt

SEQ ID NO: 20190 - DNA, 1212 bp, Zea Mays
cactcacccgtcagtccgtcacccgagactgaccgccgccgccgtacagcacgggcgccggtcaccggggaacgcaggaagcagcacccttctccagctcgggcacgcagcagtgcagcacgggcatgcagcagcaggcagcacgacaccggcttctctagactccagctcgccaccaccagcgtccagccttcagcagcctatccagaactgctgcagtcccacgccactatccaattcgagcagaggcaggcggggatgctctctctacccgcctgctcacccattccgcttaccccctacccgttgtggcgctcgccggaagagcgcggccgccgcgaccatcacgatgcgggaccgcagcaagaaccggaagccgacgcagcgagggcggtacctcagcaccgaggccatccaggctgtccagtccctcaagcgcgccgcgctccgcggcgcccccgccgcgtccgccgctgccgtggtggagcccaagctgcgacgcctcctcaaggcagacatggtcgccgtcttccgcgagctcgccgcgcagggcgaggccctcctggccctccaggtgtttgaggagatccggaaggagcattggtacaagccgaggttgctttggtacgtagatcttgttacagtgcttgcaagcaaaggtctccggactgaggtcgacagagcctgttcatatctgaagagggaacagttggagcctgacactgaagtgatcctgacaggataacgtatacaacattgatcaaaggccttgaatccctaggaaagatggagctatctgctggcattcggttggaggcagaaaatgattatggttccttggacttcctcgatgaagtggagatcgatgaggcttgcagaagtagaccttaacaggatgggtcaatcttgctctttgatgcaaccagcaggagtaaatctttgtgaagtgcagaatgagattatacagaaccttagtaaataattctttcctagatcttatacacaattttagaaattagaacagaccttgttgcagcaagtactagtattgactactaatatctagctgtttgttgtgtatccaaaatcttgaggggtcacctgttatcttaacttgatttttgtttgacatctgtatggatgtctaaccatgctgttattccctgaattatagtgacattactattttcgcttcatcaaactgtatttttt

SEQ ID NO: 20191 - DNA, 859 bp, Zea Mays
ggggaacgcaggaagcagcacccttctccagctcgggcacgcagcagtgcagcacgggcatgcagcagcaggcagcacgacaccggcttctctagactccagctcgccaccaccagcgtccagccttcagcaggtgtttgaggagatccggaaggagcattggtacaagccgaggttgctttggtacgtagatcttgttacagtgcttgcaagcaaaggtctccggactgaggtcgacagagcctgttcatatctgaagagggaacagttggagcctgacactgaaggtttcaatttgcttctgaaggcactcctagactctgggttcacacagttaacactggactgtttccgtctaatgaaattgtgggacagtgatcctgacaggataacgtatacaacattgatcaaaggccttgaatccctaggaaagatggagctatctgctggcattcggttggaggcagaaaatgattatggttccttggacttcctcgatgaagtggagatcgatgaggcttgcagaagtagaccttaacaggatgggtcaatcttgctctttgatgcaaccagcaggagtaaatctttgtgaagtgcagaatgagattatacagaaccttagtaaataattctttcctagatcttatacacaattttagaaattagaacagaccttgttgcagcaagtactagtattgactactaatatctagctgtttgttgtgtatccaaaatcttgaggggtcacctgttatcttaacttgatttttgtttgacatctgtatggatgtctaaccatgctgttattccctgaattatagtgacattactattttcgcttcatcaaactgtatttttt

SEQ ID NO: 20192 - DNA, 7464 bp, Zea Mays
gtattcttaattttgcccagtgattatccagatcggcaatagatcaaatatggatccaggaaaatcaatagatgataaattcagcaagttgcatccaagttttccagtagacaccagaattggcatagttggagcagggccaagcggcttatcagcagcatatgcactagctaagctagggtatcacaatgtaaccgtgtttgagagatgtcataatgtttcagggatgtgcgagtccattgatatcgagggaaggacatatgatctgggaggacaagttatagcagcaaacagtgcccctgttataactcatctggcaaaggaactaggttctgaatttgaagacatggatacacacaagcttgctcttattgacagccaaacaggaaacattcgagatcttgaagttgctgaggactatgtatccatggatgaggcaaataggtctggaggagtgggaattcatgcagtcagtggattggcctcagatccaactcttgactttttgatgcaacatggaataagttcaatgccaaaatctgtagtatatggttacactgcttctggctatggttttgttcaagacatgccctatgctttcatacatgagtttactagaacctctatggctggcaagatccgacgtttcaagcatggttacatgagtctgtgggataaacttagtcagtcattaccatttgaagttctttgtggcacggaggttctcagagtcaagcgtaacaactgtgtcgcaagtgtaattatcaagaacaacaatgatgatgtagaagttagggagtttgacaaaattatattgtcaggggctcttcctttcaaaaatgggaaaacatatcgttctttaagtatgactgatggagaaaatgaagtggtagaactgaatgatcttgaaagagagctattcagtaaggtacagacaattgactactatactactgttgttaagattgaaggatttgagcacataccaaagggctttttctacttcggggaatacatggaggatccaacaacagtaggacatccagtggcaatgcaaagattctttgctgacacaaatattttcttgttctggtcttatggaaattcagcggacatcaaggagtcatatgtggctaaatgtgtaaccaatgttgtgacatctatgggaggaactgtccagagagtgcttttacagcgacgatttaaatatttccctcatgtcagcagtgaagacatgaaaaatggattctacgagaaggtggagtctcagctgcaaggttttcagaacacttactttgttggaggcctgctagcgtttgagctaactgaaagaaatgcattttactccatttcatctgtttgtaaacactttgccattgccagtgagctaccaaaggttccttatgttaagagacttttccccctatccaaaggaattccttcacctcctagagatattggtgaacttgaaggggttgaattcccccatcttccatccctggatggatatttacaatactggggaactcatagagtcaccgcagagaagtttatctacacttggatcaatgaagaagggaagatcatgaatcgtagaacctaccaggagcttcatgataatgtatcttacattgcatataagctattgacaagcacaaagcctattatcaagcctggtgatagagttctccttattcatctacctggtttggagtttgttgatgcattctttggatgcatcagagcaggagttataccagtaccagttttgccccctgacccaatgcaaaggggtgggcaagcgcttctgaaagttgagaatgtttctaaggtgtgcaatgctgtggcaattctatccacctcttcataccatgctgctgtacgtgcaggctatatcaagaatattgtcactctaacgaagagtgctcagaaatgctcagctcagtggcctgacctcccatggattcacactgactcatggattaagaactatcgacgaagtccaggcagcttcaactcagaaagtgttgtgcctatgattaccaagccccaaccaagtgagttatgctttctacaattcacttcaggttccactggtgatgccaagggtgtgatgataacacatggtggactaatccacaatgtgaagatgatgaagaagcgatatagaagtacttcaaaaactgtccttatcagttggcttccacaataccatgacatgggtctaatagggggtcttttcactactcttgtaagtggaggaacttccattctattttcaccaatgacatttatcagaaacccccttatatggctcaaaacaataagtgactaccatggaacacacagtgcagggccaaactttgcatttgaattggttataagacggcttgagactgagaagaacaaaatgtatgacctctcttcaatggtctttctcatgattgccgcagagccagtaaggcaaaaaactgtcaaaaggttcatagagttgactcaacctttgggcttttctgaaggtgtacttgctcctggatatggcctggctgagaactgtgtctatgttagctgtgcttttggtgaatgcaagcccatttttatagactggcagggaagaatttgttgtgggtatgttgatacaaatgatacagatgttgtgatcagaattgttgatccggactatttgacagagcatcaagaggatggtgctgagggtgagatatggatcagcagttctagttctggagttggttattggaacaataaggaaacaagccagagaaccttttgcaattggctcaagaattaccctaacataaagtttacaaggactggtgatttaggacggatcattgatggtaaactttttattacaggaaggatcaaagatcttatcattgttgctggtagaaatatttattctgcagatgtagagaagacagtggaatgttcttctgatgttcttcgaccaggctgttgtgctgttgttggtgttcctgaggatgttttaacccagaaaggcatctcaatccctgattcttctgatcaggttgggcttgtcgtgatcgctgaggttagggagggtaaagtaatctctgaagagatcgtagacagtatcagaacacgtgtagcggaggagcatggtgtaactattgcatctgtcaagcttatcaagcctagaaccatatccaagacaacatctgggaaaatacggagatttgaatgcatgaagcaatttgtcgataatactcttagcttggcaagtggtagtcgtatatctaataagaagtctctttttcggtctctcactacaggaactggcatggacatcaggagacctttcttgaagcacactgttgatcctaccattcgccctcagcctagaagcaaagtgaaaaatctcatggagattattgagtttttaatgcagttagtatctgatcaaaaaggtatttcaaaggataaaatttccccaaatgacagcctaccttcttatggctttgactcaattgcagtggtccgagcagcacaaaagctctcagattttcttggtacacctgttggagcaatcgacatctttactgcaagcagcatttcagagcttgctaattccttggagaatctggtgcataagtcgcaaccacagctggcacctcaacctagaagcaaagtgaaaaggtccagtgacattattgagtttctaacagagatagtatcagatcaagcaggcgttccaaaggacaaaatttctccaactgatagtctaccttcttatggttttgattcaattgcagtggtccgagctgcccagaagctctcagattttcttggtattcctgttggagccattgacatttttacagcaagttgtattgctgatcttgccagttttttggagaatttggtgctcaagtcacaaccacagttaaaacctgatgtatctcactccgctgaagatgagaatctagttatcacagatgccactgatttagatcttagcgtgtttgctactgggatcctccaactcctggctcttacttatgtatgttttatcctgttacttccagcatatctcgcaagctcgatgtacaagagcatgatatcttcagtcagtctagtgaaatcatcactactgagctatcttagttctttggtcttggcacctgttgcatggatctgctatgccttgttcacttcattatccctgtctaccttggggaagccattccttcagccaaattatattctaacccctgatatttcaatatggtcagttgactttgtgaaatggtgggcattaaacaaggctcaatcattagcagcaaagatgctagctgtgcatctaaagggcacaatcttcttgaattattggttcaagatgcaaggagctcggattggttcacatgtcgtcattgatacagtagacatcacggacccatccttactagcagtcgcagatggtgcagtgatcgcagaaggtgttctcattcagagccatgaagtccgtaatgaagtgctgagtttcaggcatgtcaagattggtcggaaggcatcagttggcccttatgcggtgatccagaagggaactgttgtgcatggtggcgttgtcattccaccgttgcaaaaaactgagcaagggaaatcagcatatcctcctagcggagcttctgcttacacgaaggacgaagaagggacagcaaacatagcatttgaacacctcgttagcatctatgcagttggcttcttgggtgctttgtcgggtgcaacagtcttcatgttgtacacccgcttttcaggcacgacggcttcgcttcagcacttctcctttgcatgcgttgctggtgccttccattggttgccagctgtccttgccgcttatgccgtgattgtccgggagacaaagacaaccaagagcccagtggaatttgctctcttcattgccttcgcctacttaagttatgggatcatcgttagtcttctcgccagtgtcaccaacaaagctctggctacaaggtcagggaccaagaagaaggatgtagcacgtttgatccagcagcgcataaccatcgctgcacacctcagatttgcaaagatgatatccggtacagaagccttttgcatgtacttgaggcttcttggagcaaagattggcaggcattgctccatccgagccatcaacccggtggcagatcctcagctgatcagcatcggtgatggggtccatctaggtgatttctgcaacattgttccaggattctactcaaaggggtttaccagtgcagagataaaggtccgggacaacactgtggttggcagtggcagcttgctccttcctggctccgtcctccaagagaatgtcatcctgggagcactgtctgtcgccccacagggttcggttctccttcaaggtggcgtctatgtcggggcgcagtctctgaccttggtgaagaacacattgctcgcagaagatgaacggattgtggagatggacccgatgtataagaagattgttgggaaccttgccgcgaacctggccatcactaccatgaacgtcaaatcaagatacttccaccgcactggcgtcagcgggcggggggtcctgaggatgtaccaagacataccttcgctgactgagcacaagatatttggcgctggaaagtctttcccggtgattgtccggcacagcaacagcctcagcgcagatgacgacgccaggctcgacgctcgtggcgcagcagtgcggatcctctcggatgatggcgaggtgcctcttcttgacctcacactgaagagcggcaaggcgttttacgcgcgcacaatcgccgacttcgccacctggcttgtctgtggcctgccggcgagggaagaccaagtgaagcgtgcaccgcacatccgcgacgccgtctggggctcgttacggaacaccgattcgtacaccaagctccattactactccaacatatgccggctgctgcggttcgaggacggcaggcagatgtatgcaaagttcaagcttcgtcctgcggaccaagccatctcagaggactccggccaggtggtgccgcgtggcatcctgccgccggaaactggtgcgatcccgagggacgagggtgacacacgcccgctgctgttcctcgccgacgacttccgccggaaggtggagtctcccgagggggtgcgctatgtcttccagctgcagctcagggacgtccctgctgacagcgccactcgcgagatcgctctagactgcacacggccttgggacgaggacgagttcccgtacatcgaagtcggagagataagcattggcagcaatctctcagcagaggagacggagaagctcgagttcaacccgttcctgcggtgccaagaggtggacgtgatctcggcgacgtcctgcaagcagagcgcgtccatcgaccatggacgctcgctggtctacgagatctgccagcgcgtgcgaaacggcgagccactgccggcctcgtggcgggcgttcctcgagcagtcagacaccaagatcgacttgtcaggctgtccggtcatcgcggcgaagcgctcaagcccggacgtccgtcaagccaccaaggtgacgctggctcggacatggtaccaggcgctctgggccacgctgtgccagccactgctgcagactctcgtgccctacttcgtcgtgggcctagtcatcttcctccccctccgtggcctcctcgccaccatggccgccggcgtgccgctctactggactctgcccatcttctgggccacgtcaggcgtcgccgcgatgggtgcctgtgccgcagcgaagtgggccctggttggcaggcgggccgacggtgacacggtgcacatctgggcgccgcccgtgttcctggacacggtctggcaggccgtgcgcacggcgaccgaggagtacttcgcggagctgacgcccgggtccgtgctgttcgcttggtggatgcgggcgatgggcgcgtccgtggccgtgtccgacggcgtgtacgtggactccacgggggcgctgctgaacccggagatggtgcacctggagcgcggcgcgagcgtggggcgggacgccttgctgttcggccacgtgtacgagggcgagggcggggaggtgaagtttggcagggtccacgtgggcgaggacgggttcgtcggcagccgcgcggtggccatgccgggcgtcagggtcgacgacggtggctgcctcggtgccctgcggctggccatgaaggaggagatcgtgatgaacaggacgtagccatgtaggacggcaaaagctgaaggcctcgtcatagcagttaagcattttcttctccttttgagggtttgttgcagcagctgctgctgctgtttttacaattttatcgagtactattcgctggtacttgtagtcttgtacccattggatcatagtatagctataataatatgatcaataagtggctggacataaataag

SEQ ID NO: 20193 - DNA, 2961 bp, Zea Mays
acttgatacatgttgggaatgaggggagtagcagcacgtccactttcactctcactataacgctgcccaggcgcaaccatgatttaattagaaacttattgtcaaaggaagtttgtttattttttttttatttttttatatggtcgtgcgcactggttaattcagttcaggtcttatgtttatctttccttgctagccgattaataatacttagtatgttttagtcatgatatatgtttatactctgttgcccccctcttttatgcaatcttgcaaaggggatgctgccgaaattttatatatggacgtcggaagtgtagtacagtagcattccgggttgtttgtggaacctggagtgttacagttggtatcagaggataggctttagattctacgcaatttgaagataaatttgacacacttgcacatataggaagggtatgggttcatatatctttcatattagtattttattgtatagatgactagaatttccttactccaaacccctttatggtttgatgaggtatgtcgttagcgacgtaatgcttgatatgaaatgttacttctatttaatattggtttcttgatgtggttgttattgaaattattatgcgagtgaagctactaatgtactttttttatatacatatcgtcatgatgttttttgggatgcaatgtttactaatctctgagctattaccatcatatatttctatatgcttgactgtggatgtttttttccccaaaaggattcttgggttctagtaattgtaggaccgattgtttattgagcttgtgtatagaggatctaatccgacttggtgtagtgtgaaaacactatacaatgaagttttatggtgttgttgagtttgattgactgttgggttacaacccaacttatcaatgtgatttttcaatgggtgcagtgctttacacctcacctttttgttttgggctagtgtggctacttgccaacttgatcttagagtacaataggtttgtctccatagagcaaaggcaatgttgtactgtctatgaaatcttgagactagaagaactcaagtgaatttgcaagatgacgtggatagataagttcaaccatgtttacatgataggttttcttattgtgtgcaaccttatctttaataatagatagggtgatctcaagtggattttatgtctatattatagttgaagaggcatgcatgttttccttctatggtttgtttctatagccaaaaaggttatgcataatttttatttgttggaggctagtcatgcggacgatacggacaacccgttttatattgtttttaatcgccgatggtacatggtagtttttttatatgatcagttctctatgcatgcttgtggaattattatttggaccgctttatcttaaacaaagtcaatgtttaactggaagttgcttatgtttgttagtcatctatctctataatgatgtggttgttgcattagatggagatttttattatatgaatgatggtttgatagatcatgtatgtccactactttgaattcatcctatgacatcactaggtacaaattgttcaagtgcaataataggaggtattgttgtatgtgaggttaatcaaagtagttgggttaggtggattatcttattgaagtccaattactcctgttgagcatagtatcgtgttattattttagtgttgaaagtaatatttatgaagcttttgcatgagtctgtgtcaagaagtacattaatttttcttgttgttatccctccattgctttatgagtattgcaaattttatctcttttgagagggggaaaagatgttatatgacatgagcaccatttgcttcacatcaacagaatagttttggagatttctagtagttggattctagtgtaataacaaccatgttttatagtgctggagacgggtatgtcaggtgtttcatacattgtcgatacatggatgtttgaccttagtggcattaacaaatgaggttgttgaattcattgattgttgtgcttagtgttctaacctatttggtagagtgttatttaaagactttgtggagttgcatcccagtttggcagtggaaaatcctagtgttgatggcacctgccaatgacttgggttttgattttatcttgtttttttattgttgataatgtgttgtttggtttcgggaggcattttaaattagttggaggctgaatcaggcttcacttatctagaatgttttgtagtatgtttctgcatctttccataggatgcttaatcaccatgtttggtctaaacatttgagagatatgggtttcttaaaacatctttgttggtgtctctagcagagtgggtctttaattttgtacggaagagtagacattgaagacagtataatttggtctttgtggattatgaaagttttagtaatttcatgatcttttcaaagagtatgggtttctaattctcattgcatataattggagttaggttgctctgaagtgttgcactgttgtgtctgaactttaggcgtcgttataatcatcaataaatcgaccgcgttttgatagttgcagagcacaaatttgcgaattctctttaagcaaaacttgtaggtcttttcagtacctttttaatgggtatttacttataactgtctgttaaatagatttggagaggtggttgcccgaatataagtcgaatctctaatgtgcagtatctcaggctgagtttagctgtaggtcatgcagagttgtgggctataaggataaatttgggtgcaactttattgcaaaagtcgtggacaattttcaaaacttttccaacgcgggttcgttgtagtttaagttgagtatagcaggagttataggtttttgaattttagttgtccattgtttcaatcttatcagttttgaaacaaaagagttgcattgttttatcggtttggaaaccaattccga

SEQ ID NO: 20194 - DNA, 1490 bp, Zea Mays
catattgcttctatacttatatttgttctaggtgtctcgtaatgaagaaccgaaagttattagcctttcaatgaacgcttaatcttagaagagtaatgaacctgataaaatctattgcttgctattgggactgcatgaccagttgtagttatgcagctagttcagtgaagtaaaccatcttttctgtcgagatgttatatataaaagttgtagccaacttctttatcttacttgtgtaaaaatttcatgaccataggtctagtagtttgggagttatgattttctcaagtccagtcttgaaatatgtgcagattctatacagatttcaaagctgaccttgtttgcccaatttaaacttcgaataacttattataaattataaagaagttgtagtacttttttcttaatcgttacaacaaattttggattaattttttttggagatctataagttaagttacagctgatttaagtgtgatctctgaatctgtccaaatttggacagcagagcctttctcgtgtcttttgaccttaatatgcattgaattaacttgatatgtttataaatgaattatagacaattctactagcttaataaaaagtctgggagcacctgaattggatgattgagactccaattatggatttttgaattgagtagttgagttatgtccaagtctggacagaatttacgtttagcactgtttgacctttctaagtgtcaaatcttgttgtgatgataataccaagggtatagtggactttataagttttccataaagtcctagtttactaattttcgatgcatattttgtgagttaggagcaaaacaatcaaccactgtgctgctatctagaaatatgcaagcattaagttgctctcttgaagttgctcttgtgtggctaagtttggtttagcctataggaacattatatgccttgcattcatatatacattccttgaagtacttgcatatgtccatgattgatttggtgtcaggaaagcttggtccgaggtgtataggaccgtctgctatcttggccgagttggcagctgggcttagcacatgtaattgtcggaatctgtgatcagagtaagtattccatgtctttttgttgacgaagtatttgcggaatccagaccatcaaatcgagctagagccgattcctctgtagcaagagcagactctagagtgtcgtctactgcgtatcttagaatcctaggagcttgaggagctgatgcggcagaagtactcgaacttttctttatgtgtgagttttgttgattcactaacctttcttttgttgttccgatagaagcgtcagaattcgaggtcgaattctttttaagaggggtagagtgtgatacccggtttgcaaagaagagaagttgggggttgttctttttgtttttttcctcatccggttgttgttttggggatttgggattttgtggaaaacattcacaactagggcagtagaatttatttg

SEQ ID NO: 20195 - DNA, 1349 bp, Zea Mays
ctcctcccaaggtgccaatccttgccgctcggatcatcgtctcgtggtgcgaatctccaaccgttttggtggagggaagaagggaggaagaagagggggagaacccaaggtgatttttgtgttcatcccttgttcatttgcgctgcgattcaattgaatagatgttgcgtttgcgattagatagagggggctgtccagaattttacgtggtggacgaacagcggaagttctagcagtttttagggttttttcgtgaagaattaatggggatcaatttggggatcttgtagaactttgttttacctttccaacgagtatttatgcgctcaatttggagttataaatcaaaagttatcatcgtttgaatccgggtatgtggctgtccaaaaaacagatttttcagagtgatgaacagcagcagtattagcagtttctggggatttttcgggagtaattagtgttaatcagtatgagaatcatgtagggctttatgttatctttccaacaagtacttatgcgctcgattcggagttataattcaggagatatcgttgtttgaatccggttatgttgctgtccaaaaaaacagatttttctggtgggtgaacagcagtggtattagcagtttctgggaatttttcgtgggtaattagtgttaaccagtatgataatcatgtagggatttgtcttatctttccaatgagtacttatgcgcttgatttggaattatattttaaaagatatcgctgtttgaatctgggtatgtcgctgtccaaaagataaagaaaaacagattacagggttcatcttgtggactgttttgggctaattagatattagaatttaattataaattgtatacaaaacttgtgggtaattttatgtagatgcctctggagtttttgtttgttaccactgctgtcataattttaaagttatgaaattattaagcagcgccgctgcagtttggtgggtgtagggagagatgtaacccacgacggggtttgagtttgtgcgtaggtgcggcgtcgcttatgagcctgattatgtgaaattggtgtactaagttgggtgtcaaaaacaggtggtggacttccggatcgtacttagggatttgcccgaacttccggtaaaggcaagtaaatacagtggtggttgctaccgtttggtttgcatcctattccctgtcattgagtatgcataagttttaattatgttaatcattgaattctatgatgaagtttatttgtttggaagtattaattctcaattgtctaatattgtggatgatcataattcggtaatgatatatgtggttgattcccatctggatgaagttgaagtgtctt

SEQ ID NO: 20196 - DNA, 590 bp, Zea Mays
gtttctacctgcgaggtgtggtaactaggtgcattgtacgttgtatacgtgctgcaccttcgtaataggaaggttgtggaatcaagtggtggtaaaacaatgttcttatgtggttaaactgtttgatattattttacttgctgagatgtgtcatctcactcttgcattactcaatgcaggtacttgatacatgttgggaatgaggggagtagcagcacgtccactttcactctcactataacgctgcccaggcgcaaccatgatttaattagaaacttattgtcaaaggaagtttgtttattttttttatttttttatatggtcgtgcgcactggttaattcagttcaggtcttatgtttatctttccttgctagccgattaataatacttagtatgttttagtcatgatatatgtttatactctgttgcccccctcttttatgcaatcttgcaaaggggatgctgccgaaattttatatatggacgtcggaagtgtagtacagtagcattccgggttgtttgtggaacctggagtgttacaaaatgtgcccttgggccatttctaagtattttggtgattaagtgtcca

SEQ ID NO: 20197 - DNA, 2517 bp, Zea Mays
ctctctctctccacacccgcccgtttcgagtcccaacggatccttccgcacatctcccacccttctcttggttaggttgaataatccaagcttgagatggaaggtcatgtagcaatggagtggaatgatcctaatccaggcccagaatccttgacgagcttccaaaccgaagctgttcgaccagacaccgcagggggccacagcaacgacgacgttgaagctggatttgagaagcatggcttggcagtcaccgtaaggccgcctgaggaggaagctcggtcagtgccactaaccccacagcttggccagaagtccagtcctggcagcagcctcgcggagaggatgcaggcaagagctggattcatggtgtcgaagctcaacatgcccttcagcacagcagctggagctgacaattcagtacccgaagttccatcgccctacctcacgattccgcctggcctgagcccagcaacgctgctggagtcaccagtcttcgtttctaattccatgggccaggcctcgccaaccacggggacgctattcatgtttggtagcacaaatgacaatgatcctattagatttggaggtggtcctccttcagttggagatggccctaatgcttttcctttcaagcccttagatctgaaatcctcacactacactgctgaagcaatgaaggaacaaaatacgaagtcttctgtcaagactgaaaccaagattctgacagtacaagaggctagtttgctcagccaactgaaccagctgaatcacaattcgcagaccattattaatagtggcggtcctcatgaccccaagctcagccgtcctgcatctggcgccggtgcaggcaatgaacacatatcacccccggatcacggacagacagctgaggaaagtgatgcgagggaagactacccggcaatggctactaccacgccagcagaggacgggtacagctggaggaagtacgggcagaagcaggtgaagcacagcgagtacccgcgtagctacttcaagtgcacgcatcccaactgcctggtgaagaagaaggtcgagcgctcgcacgaggggcacatcacggagatcatctacaagggcgcgcataaccacccgaagcccacgcagagccgccgtccaggcgtccagcccgtgcacccgtttggcgacagtgcgcaggcggacgcagccgacaacctggggtcacaggcaaacgcactggacgccaaccagccgaggcgtgcgggtgttcaggatggcatggacgcgacgtcgtcgccctcagttcccattgagcgctgtgactcgccggcctcgatgcaggtcgactcggcaactcggtttgggtcccccgagggcgcggatgtgacgtctgtgtccgacgaggtgggcggggacgacagggtgactcgtggcagtatgtctcagggcggtgccgacgcggagggtgacgagctggaatgtaaacgaaggaagctggagtcgtacgccatcgatatgagcaccgcgtcgagagctgttcgcgagcctcgcgtggtgatccagacgacgagcgaggtggacatcctagatgacggctaccgctggcgcaagtacgggcagaaggtcgtcaagggcaacccgaatccaaggagctactacaagtgcacgtacccgggctgcgtggtgcggaagcacgtggagcgcgcgtcgcacgacctcaagtccgtgatcaccacgtacgagggcaggcacaaccacgaggtccccgccgccaggaatagcggccacccgggcaccgcggcggcgacaggcgcgggtggcccgcgcaggctggagcacccgtcgctgcgcgacggcctgatggggcacttgggcggctgcggcgtgccgttcggcctgccgccgcctagggatccgctggcgccgatgggcaattacccgacgtatgcctcctccattccccttggcggcgccggccccacgtcactgccgagcctgccggtgccggcggggaccctcagcgccgtcgatgggctgaagctcccgatgctggcgccgtcgtccctgcagcagcacccgctgctgaggcaccggcaggcgatgcaggccgctggcctcgtggcgcccaaggacgacgtgaaggtcgagggcaacgttgccggcggcgctgccccgtcggtgtaccagcagatgatgtgcagcgggctgcggttgcgccagcagatgtagatacataaataaatgtggagaggattagtgattctcaagttattagtttcttaccagtcgtattaggatgagttcgtgataattgttataacgtgggaacaaacacccgttgctttctgttttttttttcacccttccacttcatttttagctcagcaactatttatttatttactgcccctcttcattgaggtttggtattcgttgagcgacaggcatcatatggtgtttcggtgcctctgatgttcaattgagaaatgtgttgtttctgggctggtgatttggcagcagcccagaaagcacttagcg

SEQ ID NO: 20198 - DNA, 2476 bp, Zea Mays
ctctctctctccacacccgcccgtttcgagtcccaacggatccttccgcacatctcccacccttctcttggtcagaaaccgcccctgctcctccgtcctcacaccctgctctctctctctctctctctccctctgcttctgatccttcctcctccaccctttattctactcctcttctctctccggcgtaaaacaatcgtgctgtgagaacgatgggagagaaagagagtgagggagccaagtaatggcagggggggaaccttcttttcctgactcccccctgtgcctgctgcagcccatcatttgtccctgatccttgtgcttcgttcctgttgcgctttttttttcttgggccatcggtggactggagccgtcgccgaatcaggagacacttcccatttcttacaaggaaaggggccggggtggagcctcgccatccggcgatcatcctcctccagtcacagcacagggccaggcctcgccaaccacggggacgctattcatgtttggtagcacaaatgacaatgatcctattagatttggaggtggtcctccttcagttggagatggccctaatgcttttcctttcaagcccttagatctgaaatcctcacactacactgctgaagcaatgaaggaacaaaatacgaagtcttctgtcaagactgaaaccaagattctgacagtacaagaggctagtttgctcagccaactgaaccagctgaatcacaattcgcagaccattattaatagtggcggtcctcatgaccccaagctcagccgtcctgcatctggcgccggtgcaggcaatgaacacatatcacccccggatcacggacagacagctgaggaaagtgatgcgagggaagactacccggcaatggctactaccacgccagcagaggacgggtacagctggaggaagtacgggcagaagcaggtgaagcacagcgagtacccgcgtagctacttcaagtgcacgcatcccaactgcctggtgaagaagaaggtcgagcgctcgcacgaggggcacatcacggagatcatctacaagggcgcgcataaccacccgaagcccacgcagagccgccgtccaggcgtccagcccgtgcacccgtttggcgacagtgcgcaggcggacgcagccgacaacctggggtcacaggcaaacgcactggacgccaaccagccgaggcgtgcgggtgttcaggatggcatggacgcgacgtcgtcgccctcagttcccattgagcgctgtgactcgccggcctcgatgcaggtcgactcggcaactcggtttgggtcccccgagggcgcggatgtgacgtctgtgtccgacgaggtgggcggggacgacagggtgactcgtggcagtatgtctcagggcggtgccgacgcggagggtgacgagctggaatgtaaacgaaggaagctggagtcgtacgccatcgatatgagcaccgcgtcgagagctgttcgcgagcctcgcgtggtgatccagacgacgagcgaggtggacatcctagatgacggctaccgctggcgcaagtacgggcagaaggtcgtcaagggcaacccgaatccaaggagctactacaagtgcacgtacccgggctgcgtggtgcggaagcacgtggagcgcgcgtcgcacgacctcaagtccgtgatcaccacgtacgagggcaggcacaaccacgaggtccccgccgccaggaatagcggccacccgggcaccgcggcggcgacaggcgcgggtggcccgcgcaggctggagcacccgtcgctgcgcgacggcctgatggggcacttgggcggctgcggcgtgccgttcggcctgccgccgcctagggatccgctggcgccgatgggcaattacccgacgtatgcctcctccattccccttggcggcgccggccccacgtcactgccgagcctgccggtgccggcggggaccctcagcgccgtcgatgggctgaagctcccgatgctggcgccgtcgtccctgcagcagcacccgctgctgaggcaccggcaggcgatgcaggccgctggcctcgtggcgcccaaggacgacgtgaaggtcgagggcaacgttgccggcggcgctgccccgtcggtgtaccagcagatgatgtgcagcgggctgcggttgcgccagcagatgtagatacataaataaatgtggagaggattagtgattctcaagttattagtttcttaccagtcgtattaggatgagttcgtgataattgttataacgtgggaacaaacacccgttgctttctgttttttttttcacccttccacttcatttttagctcagcaactatttatttatttactgcccctcttcattgaggtttggtattcgttgagcgacaggcatcatatggtgtttcggtgcctctgatgttcaattgagaaatgtgttgtttctgggctggtgatttggcagcagcccagaaagcacttagcg

SEQ ID NO: 20199 - DNA, 1986 bp, Zea Mays
ctgaaattttgccccgagtctagatgagaaatcggttaaatccaaatggttttgctctgaacaaaatacgaagtcttctgtcaagactgaaaccaagattctgacagtacaagaggctagtttgctcagccaactgaaccagctgaatcacaattcgcagaccattattaatagtggcggtcctcatgaccccaagctcagccgtcctgcatctggcgccggtgcaggcaatgaacacatatcacccccggatcacggacagacagctgaggaaagtgatgcgagggaagactacccggcaatggctactaccacgccagcagaggacgggtacagctggaggaagtacgggcagaagcaggtgaagcacagcgagtacccgcgtagctacttcaagtgcacgcatcccaactgcctggtgaagaagaaggtcgagcgctcgcacgaggggcacatcacggagatcatctacaagggcgcgcataaccacccgaagcccacgcagagccgccgtccaggcgtccagcccgtgcacccgtttggcgacagtgcgcaggcggacgcagccgacaacctggggtcacaggcaaacgcactggacgccaaccagccgaggcgtgcgggtgttcaggatggcatggacgcgacgtcgtcgccctcagttcccattgagcgctgtgactcgccggcctcgatgcaggtcgactcggcaactcggtttgggtcccccgagggcgcggatgtgacgtctgtgtccgacgaggtgggcggggacgacagggtgactcgtggcagtatgtctcagggcggtgccgacgcggagggtgacgagctggaatgtaaacgaaggtcactgattagtatctgcgcgtctgtaggtttcttgctagtcatgtcatgctctatctagactagagctgaccgtctggttatttcaggaagctggagtcgtacgccatcgatatgagcaccgcgtcgagagctgttcgcgagcctcgcgtggtgatccagacgacgagcgaggtggacatcctagatgacggctaccgctggcgcaagtacgggcagaaggtcgtcaagggcaacccgaatccaaggagctactacaagtgcacgtacccgggctgcgtggtgcggaagcacgtggagcgcgcgtcgcacgacctcaagtccgtgatcaccacgtacgagggcaggcacaaccacgaggtccccgccgccaggaatagcggccacccgggcaccgcggcggcgacaggcgcgggtggcccgcgcaggctggagcacccgtcgctgcgcgacggcctgatggggcacttgggcggctgcggcgtgccgttcggcctgccgccgcctagggatccgctggcgccgatgggcaattacccgacgtatgcctcctccattccccttggcggcgccggccccacgtcactgccgagcctgccggtgccggcggggaccctcagcgccgtcgatgggctgaagctcccgatgctggcgccgtcgtccctgcagcagcacccgctgctgaggcaccggcaggcgatgcaggccgctggcctcgtggcgcccaaggacgacgtgaaggtcgagggcaacgttgccggcggcgctgccccgtcggtgtaccagcagatgatgtgcagcgggctgcggttgcgccagcagatgtagatacataaataaatgtggagaggattagtgattctcaagttattagtttcttaccagtcgtattaggatgagttcgtgataattgttataacgtgggaacaaacacccgttgctttctgttttttttttcacccttccacttcatttttagctcagcaactatttatttatttactgcccctcttcattgaggtttggtattcgttgagcgacaggcatcatatggtgtttcggtgcctctgatgttcaattgagaaatgtgttgtttctgggctggtgatttggcagcagcccagaaagcacttagcg

SEQ ID NO: 20200 - DNA, 4102 bp, Zea Mays
ttccccttttgccttgcctcgctcctcctccctcacctctcccccccgtctgcttccagtccccagaaatcaaaacctccaccaccacagagctccgagaccctcaccctcctccccgtctgctcgctgcgtggatctaccggcaggatgctctctccatcgcgcgcgccgcccggggagcgcctgtgaagaaggaacggaagagattatgtttttgcttcaaggagcaaaggcatcaagagaagctggcctttccatccacactcgttgcagctttgcctggagcatggtgtgaaggatccattgcctccatttgagcctcccgatttgatccggtctcagccattaaatatttccacagacattaagcaatctgctgcgtgctcagaacccatcattagtgttggtctggtgaagaccaaagatgccggttcgtcaaacgagtatacaggcgatatcaacttccagtcatgccagccagtagatgagtcacctggaccttcgccatacacatcaccggaggatgggaaatccggtatcgaccaagtgggaagtacaaatgaatcagatcatactgacgaggctataccaatagatctgcaagataatagctgtacaagagcaagtcggcgaactgaggttgctgtgcccttgcggcggttgagaaatcttgactcatcgtgcgagccatctgaaaagaagtgcaaatttgttgtcaagttaggtgcctcggcagatattcggcggccagaggatatagcatctaactctagctcagtttcagatccgatggcttcaaagacttgtcctgtgtgcaaagtatttgcttccacttcgaacaccacattgaatgcccacatagatcagtgcctttctgttgagtctaatactgagcttgttgaaactgtccttgtaaagcctaaagtgaagccaaggaagaagcgattaatggtggacatatacaagactgctcttccatacacccttgaggatcttgatcggaggaattgcactaattgggcagttgagttggctatgtctccagtgagcaaagaggtttgcactgagaacggaagcccagaagtggtatcatttgacagaagagatgatgaaagagaaggagatgtttatgttgattctaatggcataaaaattagaattttgtccaagtgtaatgatgtacctttggtgttgaaagatgaccttggttctagcaaagttgcgaagcatggaactggaaaaggtatactgatgagcaaaaagatgctgaagtcaaagcttttgaagaataagaagctgaagatgcatggaaagaagtacaacaaaacaagccatttgaactcccaggttcaagcagacccgcatgacgatattaatgaggaaacctccgaggaggagaggaatgcatggaatccttctgaaagcaccagcaattgtggttccaggactatgcagcagtgggtatgctccaaacgatcagatatcaacaagaaattaagcaaaaaccatagtggtaaaacatttgacaaagtggcacctggagcacagaaatcggataggagcagcatgtttggctttaatgattctcaagttccagaaagtcctgttggggtgttttcttctgagtcattatacatggccacaacttcagaagccactggtgttgagcagagtaatggtccttcaaaagtgcttagatcgattcctacatggtcttcaaaaactcatcttcagagcagtgtcataccaaaagtacctagatcagctgctgctcttgcaaagagaaaaattaaggagattgggaggagagaagctaccaaactagataattatgatgtagtgaggaatcccacttcagtgaaaagatttgaagctaggactctttccttctccactgcagggccaagcaatggaccaaacaggtcagcatctacatcaaagaagatccggaagcaccgatctccgttgaggactggcaagcgtgcattttcaccttctagtactagattagttcatggctttggtgacgagcatgaacctgagaccagacatgtaaataagaaattcaggattactagtaatgaggctcccaagaagtttttgaagcatactgaagaggatactgcagataatgacttctcttttgcaagtgacatgccagtatcgggacaacagaatgatcaatatgatgttgcacaggaaacagagggtacacaaatggattgtgaaggtgaagatgctgaaactgatgtgccatatgattcagtatccagaagtgatcctgctgagtgttgcaaccaaataagtgatgtttctctgagtcctgaaaactacagaacagcagacgatgatgttttggttgaaggctgtagtgtagctgtggaggatccaaactccagtgagcaattagcacatggccatgaatccaacagtgctgccaataatgaaatggatgaatggcagatggatcctacttcaacaaaggaatctagtccctgcttaactagtaacagggacatgggccctggaggtcatcaagataactcatcaataacatcaaatggagaagaagactttaatgaagagcatggtctgccactcggaaggggctcactagattctcccatttcgactgcctcaactatggcccttccagctgctttgaaggattcaaggactaatgaggaagaacctggcccatctactggtaggactgttgaagagcaaaccaccgggtgcttgaatcaagaaaccaattcaatacctatggccagagaaggtgaactgcccagtgagaagccttttcgttgttcttgccaggaaaacattgccagagagtctcgtcaaagtcctgttgccagaccaatgctgaattctactgggaagcaggttccgcaattgcacattggttcgagggcatcatcatctttcagcacgtaccaaagaaccagcgcaaagcccaacccttgctttgatccacatgatcatcttttagcggctaaggtcccagcagaatctgctatcagcttcccttactccacagactgtataagcccctcattccaaactcagcttccttcaccatcaaatcctgtcttgaggctgatgggtaaggatttgatggtgatgaacagtgaagagagtgtgcatcctcaagcaccaagttcagactacatcttgagagggaattatccagcacctgttggtttcatgcctccaaactaccaacatctcagtaattctgcatttatcaacatgccgccgaccacagccagccaccagatccctctaccaagtgttcaagctagcggcttcgttgctcctccattgcgtggtggttctgtgatgcaatctgaccatcactcccagcagaagccctacagaaacatcatgcctgccatgcatcgcccaacctacatgatgaaagaagtgatcgtgatcaacgactctcctgagcgcagaagtgagccacaaggtagcatgctgttcccccctgctccgcctccaccacttccggtagtaccaaacaacatgccaccccgtccgttctactgctttccaccgcagagcccagttttgccaagggagaggggggctgttgggtccatgctcgtgtacgcaaacgttggctcaatggtcggcgtcaattcgtcgagtcaaggaagccaaacggaagtcgccagtccttacatgccaaacccgttcttcgtgcagtctcgagccggttacatgaacccgccagtgtactactcgcagaatctggggtgatggtttctcagtaactcgaatgaccaggagaactccatttggcttgccggtcgtcatcgctctgtaaaagtgggggtacatgggagtttcgtgatgggtctaaaatgctgagactagtcagcctgcaagatgtctgagtttcatgaggattttcacataggttgctttagattttcttttcttttttttggttccgacttaaaggtacaacatgtttgccgtcaaaagtgttttaattacttccctgcaaagtcgcagtaaattatagtatgcaattcccaacagttctgcaaaggaatatatctcagtatttatcgaaaaggcagctagaatc

SEQ ID NO: 20201 - DNA, 1358 bp, Zea Mays
gacggacatccttttcttccccggcttcgtttcgtgctttcctcaacctcccctcttccgtgccgcacagtttatccgctgcttcacggaaatccttacggggctgcatatactatattccctgcgttccaggcggccccgcccccgccccccaccggctcttgctgtctcctctcgcacggtcgcaccccgctagcctcccggcgtcccaatcccaggaacttccgtcgcgtcagcaactacaggtgtaggacaatgtcgatgaactatgatggggataggagtgaggaccgccaaagcgaggaggtccagtcagcatacaaaagggacagtgacgttggtgaggaaatgataataagtagcgaagagcaaaatgatgagaatgaatggagctgggtgaaccaagatagaaatggtgatccttttgctgaatcggtttcctcacttcatacgacacagcaaatcctcgaaaatgagatacgaaaattatcagaacttggcaaagaacttgaggcggaggaatccacttccggtaacaaagaccaagatgtgatccttttgccgtatagtgaggctgatgtgttggaactgagtgagaagatggaacatcttgaacagaaagtgaaagaagcatcaaacaccatcagagagaaagacctgatgctttccaagcttcaaatactcatcggtactgcagacagggcagcgctggaggaggagttggaggaggcagcagctagcatcgaccaattggagacagagctggagcgccatctccaggagaaactagaggctgaaattcagtgtctgttgatgttgaaagcgagccagaattggcaggtccgagcggaggaccgggtggccttggaggagcacagggcgctgtctgccggggacaagaccagaatgctgctcaagctacgagagacggagagcaagatcgtgatgctgaaagagcaggtagacaagctggaggtccgggagaaggagctcaaccggacgaccgaggtcctgaagatgcagagcaggaccttcagagcgtccctctttggcctcgtccagctggtaatgctatgcctgtccctgaaggtgttcttcgcgcgggtctcggccccatttgacgaggctgtgccgacatgatgccgtcagctggtgctctcttctgcctgtaaattagctcgccggggttgcgatgccttaacgcgtgtcctgctgtcttactgtagctgtagccagtaggtagtatagtttcgttacactgatgcagtgtaggctgtggtgaatgacgtctgaaactacgcgtgttctgttaaaaaaattactgcaggtctgtgcataaattgggttggattggcaaa

SEQ ID NO: 20202 - DNA, 737 bp, Zea Mays
aaattttctgcgatctgaagaggcttcaaattttaaggtgttgacataagcatgaacactcatctgaagacagtgaagcttacactgaaagggaagaaccctgtaacacttgaccacctcagcgtgcgaggaaacaacatccgctactacatccttcccgacagcttaaacctggaaaccttgctggtagaggaaacccctagggtgaagcctaagaagccaactacaggaaagcctttggggcgtggtcgcggccgaggtcgtggacgtggtcggggccgggggccacgctgagctttatcgttcccctgctgtcggctcccttgcaagacaagtttcctctacaatgtaaaacatctttcctctgcacgctgtgtgaaagaatgttgcatcgttacccttctgatgaaggtggacgaaatatctcaatgtcagtagttcttgctgtgaaatcacgctgtctacctggcccccctactcatgcctatcttaggtttacactctagttaatttgtaatgttttttttctcccccgtggaatacatgtaagctgccgcagagctttggatgtctagggttgtatacttgtgtttgccacatgggggggactggggattattgatctggagctatgcctgtggctggctctgttagatcttgacctctgcttgaaactaaattaccattgtgctgctcgggggatcgcagatactggttttgctaaagcagttggcatc

SEQ ID NO: 20203 - DNA, 530 bp, Zea Mays
cactattatacagctttacacgccgatgattcgtacggcgggagaaaaagatagccatgtgttcgtggcattagtccacgcagtccgcggcgatcagattcttggcatggcacaaaggcaaaaggcacatcatcatcactaacagcctgacacacacacagcacagcacagctctgcccgataccgtcgccataccgccgaagggacaggggcgaccgggcgagcgacaggcactcgcctagcatatttccctcctccgataagaaccccctcctcccggtcccggagagggagagggagagggagagaggcggcaaccagggccgggggagagagccatgtgcaagctcagatgcaccaaggagtgggtgggttgctacctgctggtgatcctggtcatcgtcctcctcgtcggcgtcctcttcggcctcggcgtcttcaggcacggctacgacaggatcacggagatcggccgcaaccacacctgcttcgactgcaacacaacagctccaggacagtcaagattcagg

SEQ ID NO: 20204 - DNA, 433 bp, Zea Mays
acatcatcatcactaacagcctgacacacacacagcacagcacagctctgcccgataccgtcgccataccgccgaagggacaggggcgaccgggcgagcgacaggcactcgcctagcatatttccctcctccgataagaaccccctcctcccggtcccggagagggagagggagagggagagaggcggcaaccagggccgggggagagagccatgtgcaagctcagatgcaccaaggagtgggtgggttgctacctgctggtgatcctggtcatcgtcctcctcgtcggcgtcctcttcggcctcggcgtcttcaggcacggctacgacaggatcacggagatcggccgcaaccacacctgcttcgactgcaacacaacaggtccagatcttgagcagactggccaaggaaataaacgaccatggagatgagg

SEQ ID NO: 20205 - DNA, 442 bp, Zea Mays
acagcacagcacagctctgcccgataccgtcgccataccgccgaagggacaggggcgaccgggcgagcgacaggcactcgcctagcatatttccctcctccgataagaaccccctcctcccggtcccggagagggagagggagagggagagaggcggcaaccagggccgggggagagagccatgtgcaagctcagatgcaccaaggagtgggtgggttgctacctgctggtgatcctggtcatcgtcctcctcgtcggcgtcctcttcggcctcggcgtcttcaggcacggctacgacaggatcacggagatcggccgcaaccacacctgcttcgactgcaacacaacagatggaatctgcagcgaaagtctctcgatgcaggagcaggactggggccggggggctcatctagctacatcacctttgtatttgacgtctttc

SEQ ID NO: 20206 - DNA, 385 bp, Zea Mays
acagcacagcacagctctgcccgataccgtcgccataccgccgaagggacaggggcgaccgggcgagcgacaggcactcgcctagcatatttccctcctccgataagaaccccctcctcccggtcccggagagggagagggagagggagagaggcggcaaccagggccgggggagagagccatgtgcaagctcagatgcaccaaggagtgggtgggttgctacctgctggtgatcctggtcatcgtcctcctcgtcggcgtcctcttcggcctcggcgtcttcaggcacggctacgacaggatcacggagatcggccgcaaccacacctgcttcgactgcaacacaacagactggccaaggaaataaacgaccatggagatgagg

SEQ ID NO: 20207 - DNA, 4629 bp, Zea Mays
ggcggaggcggaggcgatggcggcgagcggcgccgtccaaccccacgtggcgttggatgtcaatgtggaggaggacgccaacgacgacgaggcggccgaccggctctgggcgaccatcgagcaggtcgcctcccctcagcggcgcaacctcgcgatcgtcgccctcgaccccggcagtgcatcacagaagaaggaggaggtcatggacgtgcggaggctcgaccgccgcggcgcccagcgcgtgctccagagggcgctggccaccgccgactgcgataacgcgaaactcctccgcggcatcagggaccgccttgacgcggcgggactggacgtgccacgggtggaggtgaggttccgcaacctgacggtgtccacggaggtccactacggccgccgggcgttgccaacgctcctcaactacgtccatgacattgccgagaggcttttaatttgctgccatcttttacgtcctaagaagaccaagctcactattctggatgatgttagtgggcttctacagcctgggagaatgacactgttgctggggccaccatcatctgggaaatcgacgctcttgttggcccttgctggtaaactggatcctcagctaaagaaaactggacaagtaacctacaacggaacttcgcttactgaattctttgtacaaaggacttctgcgtatgtcagccagacagacaaccatattggagaattgacagtgagggaaactttagattttgctgcaaaatgccagggtgcaagcgaaaactggcaagagtgcttgaaggagctacgcgatcttgaagggaagagaggaataagaccaaatccagaaatagatgccttcatgaagacagcatcagttggaggacagaaacacaatcttgttacggactatgttcttagagtgcttggactggatctatgtgctgatactgctgttggtactgatatggacagaggtgtctctggtgggcagaagaaacgagtcacaacaggtgaaatggttgttggaccaagaaaaacccttcttatggatgaaatatctactggtcttgatagctcaacgacttatcaaatagttaaatgcatgaggaactttgttcatgagatggaggctactgtgctgatgtcacttctccaacctgcaccagagacatttgacctttttgatgatataattcttctctcagaaggacaaatcgtttatcaaggccccactgtgcaagttgtggattatttcaattcattaggattttcactgccgcctcgtaagggaattgcggattttctccaagaggtaacatcaaggaaagaccaatcccaatactggtcagataagtcaagaccttattcttttatttctgcagcgacaatggcttctgcatttaaacaatccgagtatggcagagctctggattctgttttatgcaactcttatgatggcacaaattctcctaaggtgcttgcaagatcaaagtttgccgtatcaaaacttagccttgttaaagcatgcttttccagggagcttgttttaataagtcgcaaccgttttctctacattttcaggacatgccaagttgcttttgttgggataatcacctgcacaatctttctccgcacaagattgcaccctgtcgatgagcaaaatggcgatctttatctctcttgtctgttctatgggcttgtacatatgatgttcaatggttttacagaattgcccattactatttcacggcttccagtgttttataagcagagagacaatttctttcatcctgcatgggctttctcaatccccaactggatattaagaattccatattctcttattgaggctctagtgtggtcatgtgttgtttactacacagtaggctttgaaccaactgctgataggttctttcgctttatgctattgttgttctctctccatcaaatggctttgggccttttccggatgatgggggctatagcaagagacatgactattgctaatacttttggatcggctgccttattggcaatttttcttttaggagggttcattgtccctaaagaggctataaaaccatggtggcagtgggcttattggctttctcccttgatgtatggacaacgtgctatttcagttaacgaattctcagcatccagatggtcaaaggtatttggcgttggcaacagtcccgttggatccaatgttcttattttacacaatctccctacacaagattactggtactggattggagtttgtgctttattagcttatgctatcttgttcaatgccttgtttactcttgctttgacattccttaaccctctacggaaggcccaagcaattgttccatccaattttgaagaaacaaatgatgcattgactgatagtatatcagatggacatgcaattgcagaaaataatagcagaaattgtgaagtcaaagggcagactgaaggcgaactcaacaagggaatgatattaccatttcaacctctaacaatgacatttcacaatattaactattttgttgatatgccaaaggaaatgaaatcaagagagaaaagactacagttgctatctgaagtaagtggagtatttaggccacgtgtcttaacagcactggttggctcaagtggtgctggaaagacgacccttcttgacgttttagctggtagaaaaacaggtggatatattgaaggtgatatcaagatttctggccataagaaagaacaaagaacctttgccaggatagctggatatgttgagcaaaatgatatacactcgccacaagtaacagttgaagagtccttgtggttttcatcaatcttacgacttccgaaagatataagtacaaaaacgagacatgaatttgttgaggaagttatggctttggtagagcttgatcagctgagacatgcattagtagggaaggagggttctactggattatcaacagagcaaagaaagcgcctcacaatagctgttgaactagttgcaaatccttcaattatttttttggatgaacctacttctggtttggatgctcgagcagctgccattgtgatgcggactattagaaatactgttgatactggaagaactgttgtttgcactatacaccagcccagcattgacatatttgaagcttttgatgagctcctccttctgaaacgtgggggacgcgttatatatggtggttctctgggtgtcaattcaatcgatatgattgattactttcagtccattcctggtgttaatcatatttctgaaggctacaatccagcaacctggatgcttgaaatcaccacacaagcatgtgaagagattcttggtttagattttgcagtggtgtacaaaaactccgaccagttcagttaattaaagaatcgagtattccagctattggcacggaacctttaaaattctcatcagagttttcacagaactttcttactcagttcaaagcttgctggcgtaagcaaagacttgtttactggagaagtccagagtacaatgttgtgcggttatttttcacggcaattgcagctatcatattcggatcgatattttggaatgttgggatgaaacgagacacaacagaagatttgatgcttgtcatgggatctctttacgcggcatgcctgtttcttggtgtaaataacgcctcatccgtgcagcctgtagtatcaactgagaggactgtctactaccgggaacgtgctgctaaaatgtactcatcgttcccatatgctgcagcacagggtcttgtagagattccttacattgcagttcagacactgatatttggcctcatcacgtacttcatgatcaactacgagaggaacataggaaagctgcttctgtatcttcttttcatgttccttactttcacctacttcacgttctacgggatggtggcggtaggcttgaccccaacacaacaagttgcagcagtagtgtcatctgctttttactccttgtggaatcttctctccgggttcctcatcccccagtctaggatccctggctggtggatctggttctattacatctgtccagtggcctggaccctgcgaggcatcattacatctcagctgggcgatgtgcaggccaggatagtcggccctggtttcgatgggaccgtgcaggagttccttgaggaaagcctggggttccaacaggggatggctggtgtcacggttgcggtgctcattggcttctcccttttcttcttcgccgtctacgcgacttctatcaaggttctgaatttccagagaagatgaccagctgcctgagctaagtaagcctccgtggtttgcttttgctactgtgtggtgccaacatcaaagtctacttgctagctactcggcggatgccggatggatgaagcacccgttggtcgtaggattgaagttttcacacgtagagaggatggtagataattaaaggttcatgtctgtatatgattactatcgcaaatataatgagaaacagtagtgatgcatttgtgctatacgtaagatatacagaagagtatgcctcatctgttgccttgacaatagccaaccatgtgactatttatctggtttttctatatatatatcaacagagaagtaaaatgtcttctaaat

SEQ ID NO: 20208 - DNA, 4545 bp, Zea Mays
ggcggaggcggaggcgatggcggcgagcggcgccgtccaaccccacgtggcgttggatgtcaatgtggaggaggacgccaacgacgacgaggcggccgaccggctctgggcgaccatcgagcaggtcgcctcccctcagcggcgcaacctcgcgatcgtcgccctcgaccccggcagtgcatcacagaagaaggaggaggtcatggacgtgcggaggctcgaccgccgcggcgcccagcgcgtgctccagagggcgctggccaccgccgactgcgataacgcgaaactcctccgcggcatcagggaccgccttgacgcggcgggactggacgtgccacgggtggaggtgaggttccgcaacctgacggtgtccacggaggtccactacggccgccgggcgttgccaacgctcctcaactacgtccatgacattgccgagaggcttttaatttgctgccatcttttacgtcctaagaagaccaagctcactattctggatgatgttagtgggcttctacagcctgggagaatgacactgttgctggggccaccatcatctgggaaatcgacgctcttgttggcccttgctggtaaactggatcctcagctaaagaaaactggacaagtaacctacaacggaacttcgcttactgaattctttgtacaaaggacttctgcgtatgtcagccagacagacaaccatattggagaattgacagtgagggaaactttagattttgctgcaaaatgccagggtgcaagcgaaaactggcaagagtgcttgaaggagctacgcgatcttgaagggaagagaggaataagaccaaatccagaaatagatgccttcatgaagacagcatcagttggaggacagaaacacaatcttgttacggactatgttcttagagtgcttggactggatctatgtgctgatactgctgttggtactgatatggacagaggtgtctctggtgggcagaagaaacgagtcacaacaggtgaaatggttgttggaccaagaaaaacccttcttatggatgaaatatctactggtcttgatagctcaacgacttatcaaatagttaaatgcatgaggaactttgttcatgagatggaggctactgtgctgatgtcacttctccaacctgcaccagagacatttgacctttttgatgatataattcttctctcagaaggacaaatcgtttatcaaggccccactgtgcaagttgtggattatttcaattcattaggattttcactgccgcctcgtaagggaattgcggattttctccaagaggtaacatcaaggaaagaccaatcccaatactggtcagataagtcaagaccttattcttttatttctgcagcgacaatggcttctgcatttaaacaatccgagtatggcagagctctggattctgttttatgcaactcttatgatggcacaaattctcctaaggtgcttgcaagatcaaagtttgccgtatcaaaacttagccttgttaaagcatgcttttccagggagcttgttttaataagtcgcaaccgttttctctacattttcaggacatgccaagttgcttttgttgggataatcacctgcacaatctttctccgcacaagattgcaccctgtcgatgagcaaaatggcgatctttatctctcttgtctgttctatgggcttgtacatatgatgttcaatggttttacagaattgcccattactatttcacggcttccagtgttttataagcagagagacaatttctttcatcctgcatgggctttctcaatccccaactggatattaagaattccatattctcttattgaggctctagtgtggtcatgtgttgtttactacacagtaggctttgaaccaactgctgataggttctttcgctttatgctattgttgttctctctccatcaaatggctttgggccttttccggatgatgggggctatagcaagagacatgactattgctaatacttttggatcggctgccttattggcaatttttcttttaggagggttcattgtccctaaagaggctataaaaccatggtggcagtgggcttattggctttctcccttgatgtatggacaacgtgctatttcagttaacgaattctcagcatccagatggtcaaaggtatttggcgttggcaacagtcccgttggatccaatgttcttattttacacaatctccctacacaagattactggtactggattggagtttgtgctttattagcttatgctatcttgttcaatgccttgtttactcttgctttgacattccttaaccctctacggaaggcccaagcaattgttccatccaattttgaagaaacaaatgatgcattgactgatagtatatcagatggacatgcaattgcagaaaataatagcagaaattgtgaagtcaaagggcagactgaaggcgaactcaacaagggaatgatattaccatttcaacctctaacaatgacatttcacaatattaactattttgttgatatgccaaaggaaatgaaatcaagagagaaaagactacagttgctatctgaagtaagtggagtatttaggccacgtgtcttaacagcactggttggctcaagtggtgctggaaagacgacccttcttgacgttttagctggtagaaaaacaggtggatatattgaaggtgatatcaagatttctggccataagaaagaacaaagaacctttgccaggatagctggatatgttgagcaaaatgatatacactcgccacaagtaacagttgaagagtccttgtggttttcatcaatcttacgacttccgaaagatataagtacaaaaacgagacatgaatttgttgaggaagttatggctttggtagagcttgatcagctgagacatgcattagtagggaaggagggttctactggattatcaacagagcaaagaaagcgcctcacaatagctgttgaactagttgcaaatccttcaattatttttttggatgaacctacttctggtttggatgctcgagcagctgccattgtgatgcggactattagaaatactgttgatactggaagaactgttgtttgcactatacaccagcccagcattgacatatttgaagcttttgatgagctcctccttctgaaacgtgggggacgcgttatatatggtggttctctgggtgtcaattcaatcgatatgattgattactttcagtccattcctggtgttaatcatatttctgaaggctacaatccagcaacctggatgcttgaaatcaccacacaagcatgtgaagagattcttggtttagattttgcagtggtgtacaaaaactccgaccagttcagttcaaagcttgctggcgtaagcaaagacttgtttactggagaagtccagagtacaatgttgtgcggttatttttcacggcaattgcagctatcatattcggatcgatattttggaatgttgggatgaaacgagacacaacagaagatttgatgcttgtcatgggatctctttacgcggcatgcctgtttcttggtgtaaataacgcctcatccgtgcagcctgtagtatcaactgagaggactgtctactaccgggaacgtgctgctaaaatgtactcatcgttcccatatgctgcagcacagggtcttgtagagattccttacattgcagttcagacactgatatttggcctcatcacgtacttcatgatcaactacgagaggaacataggaaagctgcttctgtatcttcttttcatgttccttactttcacctacttcacgttctacgggatggtggcggtaggcttgaccccaacacaacaagttgcagcagtagtgtcatctgctttttactccttgtggaatcttctctccgggttcctcatcccccagtctaggatccctggctggtggatctggttctattacatctgtccagtggcctggaccctgcgaggcatcattacatctcagctgggcgatgtgcaggccaggatagtcggccctggtttcgatgggaccgtgcaggagttccttgaggaaagcctggggttccaacaggggatggctggtgtcacggttgcggtgctcattggcttctcccttttcttcttcgccgtctacgcgacttctatcaaggttctgaatttccagagaagatgaccagctgcctgagctaagtaagcctccgtggtttgcttttgctactgtgtggtgccaacatcaaagtctacttgctagctactcggcggatgccggatggatgaagcacccgttggtcgtaggattgaagttttcacacgtagagaggatggtagataattaaaggttcatgtctgtatatgattactatcgcaaatataatgagaaacagtagtgatgcatttgtgctatacgtaagatatacagaagagtatgcctcatctgttgccttgacaatagccaaccatgtgactatttatctggtttttctatatatatatcaacagagaagtaaaatgtcttctaaat

SEQ ID NO: 20209 - DNA, 4642 bp, Zea Mays
ggcggaggcggaggcgatggcggcgagcggcgccgtccaaccccacgtggcgttggatgtcaatgtggaggaggacgccaacgacgacgaggcggccgaccggctctgggcgaccatcgagcaggtcgcctcccctcagcggcgcaacctcgcgatcgtcgccctcgaccccggcagtgcatcacagaagaaggaggaggtcatggacgtgcggaggctcgaccgccgcggcgcccagcgcgtgctccagagggcgctggccaccgccgactgcgataacgcgaaactcctccgcggcatcagggaccgccttgacgcggcgggactggacgtgccacgggtggaggtgaggttccgcaacctgacggtgtccacggaggtccactacggccgccgggcgttgccaacgctcctcaactacgtccatgacattgccgagaggcttttaatttgctgccatcttttacgtcctaagaagaccaagctcactattctggatgatgttagtgggcttctacagcctgggagaatgacactgttgctggggccaccatcatctgggaaatcgacgctcttgttggcccttgctggtaaactggatcctcagctaaagaaaactggacaagtaacctacaacggaacttcgcttactgaattctttgtacaaaggacttctgcgtatgtcagccagacagacaaccatattggagaattgacagtgagggaaactttagattttgctgcaaaatgccagggtgcaagcgaaaactggcaagagtgcttgaaggagctacgcgatcttgaagggaagagaggaataagaccaaatccagaaatagatgccttcatgaagacagcatcagttggaggacagaaacacaatcttgttacggactatgttcttagagtgcttggactggatctatgtgctgatactgctgttggtactgatatggacagaggtgtctctggtgggcagaagaaacgagtcacaacaggtgaaatggttgttggaccaagaaaaacccttcttatggatgaaatatctactggtcttgatagctcaacgacttatcaaatagttaaatgcatgaggaactttgttcatgagatggaggctactgtgctgatgtcacttctccaacctgcaccagagacatttgacctttttgatgatataattcttctctcagaaggacaaatcgtttatcaaggccccactgtgcaagttgtggattatttcaattcattaggattttcactgccgcctcgtaagggaattgcggattttctccaagaggtaacatcaaggaaagaccaatcccaatactggtcagataagtcaagaccttattcttttatttctgcagcgacaatggcttctgcatttaaacaatccgagtatggcagagctctggattctgttttatgcaactcttatgatggcacaaattctcctaaggtgcttgcaagatcaaagtttgccgtatcaaaacttagccttgttaaagcatgcttttccagggagcttgttttaataagtcgcaaccgttttctctacattttcaggacatgccaagttgcttttgttgggataatcacctgcacaatctttctccgcacaagattgcaccctgtcgatgagcaaaatggcgatctttatctctcttgtctgttctatgggcttgtacatatgatgttcaatggttttacagaattgcccattactatttcacggcttccagtgttttataagcagagagacaatttctttcatcctgcatgggctttctcaatccccaactggatattaagaattccatattctcttattgaggctctagtgtggtcatgtgttgtttactacacagtaggctttgaaccaactgctgataggttctttcgctttatgctattgttgttctctctccatcaaatggctttgggccttttccggatgatgggggctatagcaagagacatgactattgctaatacttttggatcggctgccttattggcaatttttcttttaggagggttcattgtccctaaagaggctataaaaccatggtggcagtgggcttattggctttctcccttgatgtatggacaacgtgctatttcagttaacgaattctcagcatccagatggtcaaaggtatttggcgttggcaacagtcccgttggatccaatgttcttattttacacaatctccctacacaagattactggtactggattggagtttgtgctttattagcttatgctatcttgttcaatgccttgtttactcttgctttgacattccttaaccctctacggaaggcccaagcaattgttccatccaattttgaagaaacaaatgatgcattgactgatagtatatcagatggacatgcaattgcagaaaataatagcagaaattgtgaagtcaaagggcagactgaaggcgaactcaacaagggaatgatattaccatttcaacctctaacaatgacatttcacaatattaactattttgttgatatgccaaaggaaatgaaatcaagagagaaaagactacagttgctatctgaagtaagtggagtatttaggccacgtgtcttaacagcactggttggctcaagtggtgctggaaagacgacccttcttgacgttttagctggtagaaaaacaggtggatatattgaaggtgatatcaagatttctggccataagaaagaacaaagaacctttgccaggatagctggatatgttgagcaaaatgatatacactcgccacaagtaacagttgaagagtccttgtggttttcatcaatcttacgacttccgaaagatataagtacaaaaacgagacatgaatttgttgaggaagttatggctttggtagagcttgatcagctgagacatgcattagtagggaaggagggttctactggattatcaacagagcaaagaaagcgcctcacaatagctgttgaactagttgcaaatccttcaattatttttttggatgaacctacttctggtttggatgctcgagcagctgccattgtgatgcggactattagaaatactgttgatactggaagaactgttgtttgcactatacaccagcccagcattgacatatttgaagcttttgatgagctcctccttctgaaacgtgggggacgcgttatatatggtggttctctgggtgtcaattcaatcgatatgattgattactttcagtccattcctggtgttaatcatatttctgaaggctacaatccagcaacctggatgcttgaaatcaccacacaagcatgtgaagagattcttggtttagattttgcagtggtgtacaaaaactccgaccagttcagggaagtcgaacagttaattaaagaatcgagtattccagctattggcacggaacctttaaaattctcatcagagttttcacagaactttcttactcagttcaaagcttgctggcgtaagcaaagacttgtttactggagaagtccagagtacaatgttgtgcggttatttttcacggcaattgcagctatcatattcggatcgatattttggaatgttgggatgaaacgagacacaacagaagatttgatgcttgtcatgggatctctttacgcggcatgcctgtttcttggtgtaaataacgcctcatccgtgcagcctgtagtatcaactgagaggactgtctactaccgggaacgtgctgctaaaatgtactcatcgttcccatatgctgcagcacagggtcttgtagagattccttacattgcagttcagacactgatatttggcctcatcacgtacttcatgatcaactacgagaggaacataggaaagctgcttctgtatcttcttttcatgttccttactttcacctacttcacgttctacgggatggtggcggtaggcttgaccccaacacaacaagttgcagcagtagtgtcatctgctttttactccttgtggaatcttctctccgggttcctcatcccccagtctaggatccctggctggtggatctggttctattacatctgtccagtggcctggaccctgcgaggcatcattacatctcagctgggcgatgtgcaggccaggatagtcggccctggtttcgatgggaccgtgcaggagttccttgaggaaagcctggggttccaacaggggatggctggtgtcacggttgcggtgctcattggcttctcccttttcttcttcgccgtctacgcgacttctatcaaggttctgaatttccagagaagatgaccagctgcctgagctaagtaagcctccgtggtttgcttttgctactgtgtggtgccaacatcaaagtctacttgctagctactcggcggatgccggatggatgaagcacccgttggtcgtaggattgaagttttcacacgtagagaggatggtagataattaaaggttcatgtctgtatatgattactatcgcaaatataatgagaaacagtagtgatgcatttgtgctatacgtaagatatacagaagagtatgcctcatctgttgccttgacaatagccaaccatgtgactatttatctggtttttctatatatatatcaacagagaagtaaaatgtcttctaaat

SEQ ID NO: 20210 - DNA, 815 bp, Zea Mays
tataccgtcagcttagtgttatactagtagctagtcttcttctatttagcctcggaccgcaccgttggccccgcgcgcgtacgtacgtgtgtatataaactagccgcgagagtagctagctacttcacgagcaagtcgatcggtcgagcagtgtggccagcccatcacatcatcaagtcgattgcaattgcaataatactactagcttgacgccggcgttgggggtgcgggcgacgtgatgtccaagcaaaagatcgtgatcaagctgggcgtacccaacgccaagaaccggtctaaggccatgcagctggcatccaaatttgggtgagcaaggtggggatcaccggcgacggcaaggaccggctggaggtggaaggagaaggcgtggacaccgtcctcctggtcaactacctgcgcaagaaggtctgccgcagcgctgacatcgttaaggtggaagtgaaggacaagaaggacgagaagaaaccggaagagccgccgtattattgctggcccaattactactactgtccgccgccgccgccgccgctgcccatggtcgagcgagccgacgacagttgccacgtcatgtgataaagctacttactattcgagatatatgtttcggtagacgtattacgtatactatatcatatgagcataataatgaagtactcatatcatcacttagcttgctatatatatatgcatgcatgtatcgtctacgcacgtaaagccatcgttgcatgacatatcatgcagttcatatttgccaatgtaatcacacacgtatatatatactcccactgttaagaggt

SEQ ID NO: 20211 - DNA, 1327 bp, Zea Mays
gctagctacttcacgagcaagtcgatcggtcgagcagtgtggccagcccatcacatcatcaagtcgattgcaattgcaataatactactagcttgacgccggcgttgggggtgcgggcgacgtgatgtccaagcaaaagatcgtgatcaagctgggcgtacccaacgccaagaaccggtctaaggccatgcagctggcatccaaatttgtcggggtgagcaaggtggggatcaccggcgacggcaaggaccggctggaggtggaaggagaaggcgtggacaccgtcctcctggtcaactacctgcgcaagaaggtctgccgcagcgctgacatcgttaaggtggaagtgaaggacaagaaggacgagaagaaaccggaagagccgccgtattattgctggcccaattactactactgtccgccgccgccgccgccgctgcccatggtcgagcgagccgacgacagttgccacgtcatgtgataaagctacttactattcgagatatatgtttcggtagacgtattacgtatactatatcatatgagcataataatgaagtactcatatcatcacttagcttgctatatatatatgcatgcatgtatcgtctacgcacgtaaagccatcgttgcatgacatatcatgcagttcatatttgccaatgtaatcacacacgtatatatatactcccactgttaagaggtaaaatttccattttttttaatctggtcatcagtgcaatctgcatggcaaggaccagctggaggtggtaggagaagacatcgacatcccctgcctcgtcaattcgctgcgcaagaaggtctgccgctccgccggcatcgtcgtggtggaggaagtcaaggacaaggcgaaggtggaggaggagaagaagaagaaggaagaggaggagaagaagaagaaggccaaggagttgcaagaagcgatccagaagcactgcccgccgccgccgttctacggcggcccgccgtttctctgcgaggaacagacaacaggctgccacatcatgtgaagctgatggattctggcccgccgtttaaatatatacgtatactagtcagtacccgtgcgttgcaacgggaacatataataccatgataacttatatacaaaatgtgtcttatattgttataagaaaatatttcataatccatttgtgatcctagccatacataaattttgttattttaatttagttgtttcactactacattgcaaccatcagtatcatgcagacttcgatatatgtcatgatttgcatggtctcattattggagagcacgtgtcacacctgccggtagaagttcc

SEQ ID NO: 20212 - DNA, 856 bp, Zea Mays
attcttcacaactgcggcttagtacacgtaggccgcgcgcgctagctcttggtctagctttaggtgcaccagcagcgcgcgaacggcggatcgatcagcttcgtctttcaattcttctccacatcatcatttgcgccacgtacgtaaatcggctgctgcgggagagacgaccggccgccggcgacgccgccatgaccaagcaaaaggcagtgatcaggcttggcgtaacgaacgaccagaaccggtctaaggccatgcagctggcgtcccgatttcacggcaaggaccagctggaggtggtaggagaagacatcgacatcccctgcctcgtcaattcgctgcgcaagaaggtctgccgctccgccggcatcgtcgtggtggaggaagtcaaggacaaggcgaaggtggaggaggagaagaagaagaaggaagaggaggagaagaagaagaaggccaaggagttgcaagaagcgatccagaagcactgcccgccgccgccgttctacggcggcccgccgtttctctgcgaggaacagacaacaggctgccacatcatgtgaagctgatggattctggcccgccgtttaaatatatacgtatactagtcagtacccgtgcgttgcaacgggaacatataataccatgataacttatatacaaaatgtgtcttatattgttataagaaaatatttcataatccatttgtgatcctagccatacataaattttgttattttaatttagttgtttcactactacattgcaaccatcagtatcatgcagacttcgatatatgtcatgatttgcatggtctcattattggagagcacgtgtcacacctgccggtagaagttcc

SEQ ID NO: 20213 - DNA, 593 bp, Zea Mays
cgtcccgtccgttcattccctactgctcagacctgtcgttcgccacaacatctgctggtcctaatccccagcggcagcgcgatgaagcaaaagatcgtgatcaaggtgtgcatgccatgcgacaagtgccggtccaaggccatggggctggccgccaaagcaggggcgaacaagatggggatcaccggcgacggcagggaccagctggaggtggagggcgacgacatcgacaccgtctgcctcgtcaactgcctgcgcaagaaggtcggccgcgccgacatcgtcaaggtggaggaggtgaagcccgcggagaagaagccgcccgaggagaaggagaaggagaagcccgccgaggccgtgccgctgccctactgctggaagaatgagtcagcaaaaggtccaaggtgttagcaatacgagtgaacgagtggcatgtcgttcgtcacaaattaaaagaaggcagtgctggataagtagacgacacgagatcagagacgtgggatttgaaaatgacgcacgcactagcatcttttgcatgtacctgtaccgttgatgcatcaggtcaggtggaaataatgcatttacaattggat

SEQ ID NO: 20214 - DNA, 610 bp, Zea Mays
cgaataataacataaaagagtacttattacatcatagagtcatagacatccacatagtcattgtcttaacaagtaaatcaaagtactagcgaaacgcagtaaagataaggccttcacaggcagctgactgggggtttgccaccaacccacacctaaaactcgtcgtagtcttggaactcctggaagtctccttccacggcttcgccttctcctgagcagtggttacaatgcgggcaacctggtgttttgtggtaaagcaaggatgagtacacatcaacgtactcagcaaatgtcccgtttggctgaagtggactagctttatgtggggttaggctcaagcagttgcttttagttggtcaggtatttatcattagtagaagccagattttagcattatccaacccgtaaaccatttcctcatcgaggaacaacatcatcatagtcgaaccataacataatccttgtatctcgaaccatctgtatatctaatcaaagaggatcccaaggctgctcttaaccgtgagcacggctgatatatcaatttcactaccctctgcagaggttgcacactttacccatgagtcatgattccctttctacccggggagag

SEQ ID NO: 20215 - DNA, 712 bp, Zea Mays
cagtgcgcgattgtcttttcatgtatggaatagccgggttcaagcttaccatgtcccattctcagggcatgtggctagataagatagtccttgatcaacaggcctacatacgcatccaatccttaattgtcccgggcggagcatcacctgttcctagcccaagtctcgatttaagtacttccatccttaggattgtttctgttccttaggatgaaaagagcatcacagggaactttgcagtaagatcccaccattgctccaaatgaaaatattcttgcaggtagaagtcatcctctcccgggttaaattgaggacaacctctatccacaagatctaagcaaggctaagcatttttgtaaatcatattttgatacttcacagaagtatctataaaggtatggatatcaaggaaagcaatgcatcaaagggttccaagcaactcctatgaacctaatgcacatttcactagacttaaagtgtgcgaaaagtatttaaaacacaaggaaagaggttgcgtgcaccggggcttgcctgggtaacactagattagtgtttgttaggcgatgtccgcttgacgagtatccctcgaccgagtacttgcttgatttaaccatcttcaggttggtccatcagcttcatcctgcggattagcccatgcttggggtcgacttgggtcttcttccgcatcacgcgattaattatcgtacctcat

SEQ ID NO: 20216 - DNA, 2168 bp, Zea Mays
gtccgattcgcaaaagggcccccctcccccccacagcgcatcaaatttattgcactgctctgctgcctctcatgaatggcgtttatttaagtctccaccctccgccccggggaactcttttctgtgtatcgcggaattttttgggttctcgggctccgccgcgatcccatccccatccccgccttgccgttgccgttgccggcccccccggttctcccggagctttctttctggccggcgcagtagagaagcaagacagaattgcggcggcgcctgcccgcgcaaaggaaataatcagcactgtttgccaaaggcagctcctgacgcatggctagtacttaaggatactttatgtgcagtgcagaccatgaagatagatgacgaaaggccttaccaaactcatatttttcatgatcttgcatctaacggcagtcctaaattagactgtgaggctgaaagacaaagtaatcacaaggttgaggcagataaaatggttgagcaaaccaatcaatctgaagttagctttgtgaaggctgagcatctgaatggaggtaaaattcggaagacacgcattgaggattactcctatgacaaggatgttgtagagatcaaactgccagacacagatctttcttctgattacggtgtccattttgtcaaggatgtctgcattgatgaaggagttcttccagatcaaaagatttcatcagaaaagcaagtagaccaaaaggtgtctataaactttgattcctcggaatatacaaacggggacctaagggaagatataagtgctgactctacaaaaactgcacatgaattaaaaacagaaatagttgtcctacctgtcctgtgtgatactcataacaataatactgtggaacagaactcctcatgcaaaaagcaggatcttgaagataacaatactacagatgtatctaccgattctcacgatgagggattaaatcccaaacaattaccatttcatgaagttgcacaagattaccaggaggttgacagtgtcattccggagagcaatgaaaatcaggaccggcttttcactggagatgcaacccatcaggtttcatcgaatgattgttatgaagctggaattggtatcgcgtcagaggccagtaacatcattcacaatgatttaccagaagaatcagccgctgctgatttcccggtggtgatacctgaggaagttgctgtcactgctgcattgggtatggaagtatccaaccaagttaatcactataacccttttattgcctatggatcgctagacgagacatgggaacccaatctctctctccctactactgtggatgccgcttctatagcacccatatgtcctgtcgaaaagacagatagttttagtgatcttgtcaacaggccactggaaggatttgatcctattgaactagacgaagctataattgaagagaacaggtcagattcagttgaagaaagctcaagcacattggacgtgcaagcatctgaacaacgcgatgatcagagagagagtctcactaataatgacgtgaaaactgatgcagcacatgaaacgggcaccgctatatctctatccaccagcaatggagagcacagtggcgtcaagggtgagaaatgtcagaaacatgagactgatggtcgagatacagatgatttcaacccaagagatgtggagcctggcacaaaagtaagcgaggacacaacggatgttaagagctcagctcatgtgcagacagaatctgtggttcaacaaaacggacctgatagcgcgaaagtgactactgcacagactgttattcgcaaccccttcgagtccagcttctctggacctagcattacgtcaggtcctctaacgccctctggtcacataccatattctggcaacatttctcttcgatcagagagcagcacaacgagtactcgatccttcgcgtttccagtactacagaacgagtggaacagcagccccgtgaagatggccaaggccgaccgcaggcgtcagaaggaagaccgaggctggggttacagaatcctttgctgtaaattctgaatggcgcttgcctcccctgcatcctttttgcctgtcgagttgagcccttcgtctctgtcatgcttgagccccgtggagttcattcttgtatgggtttagcacggca

SEQ ID NO: 20217 - DNA, 3533 bp, Zea Mays
cacaattctattccaggccgcatgttatgggcctgtcagctgggccgttccatatctcaacgttctctcttgctctgcctgtccatcccgacgacaaaaaacgcctcctccgcctcctccgccgccttccgcctgttctcacttcccgccccttcctccggacctagactcctccaagcgccagcgccggtgaacaccactttcccatacctgcgccatgggccgcccaaagggcggcgccgcgtcctcctcgaagaagccgaaggcgaagcagaaacagcgaggcggcgtcgacttcaagaagtacaagcacaaggtcgggcgcaagcttccgccgccgaagaatgccaccaacacggaaatcaagtccaaagcgatcgtgctgccggagcagagcatggcgtcggagaggacgggcatggcagtgaacaagcgcgggctcacgctacgggagctcctgcagcagacgggacactacaatgccaatgtgcggcggggtgagttttctctagtctgtatgctgcactgaatggaataaaggacattgttgtcaagcacccaacagagcttaaactgcacaaggttgctataattgagaagctgcaggagagaatatgtgatactgacaaggtggtccgtgaatcgttatacaatatactgcagtctctgatcttcccatctttgaaagaggataacactatatctgtgcggagtacactgtttttgctgatggctaatattctgaatggaacgacccatctatctgtggagatccagttaatggcttttaggtttttggagcttgtggttcttaatttcccgtcatccttttctagttatgctgaacagaccttcaacaactttgttgcggtactgagcaacgacagaatcaacctacatgataggaataaacttaacagtgttcttagtgggcttggccactgcctttccttggttgctaaaacgatagaaaatgatgatacatcaaatcgacaggctcataacctctctgcaagggaaaattggaaatttaccactgatgaagatagcacaggaggggcattttcaatgtccaatttattaacgaagcttcagaaccttgtccaaatcctcactaattctgtagaggtttcagcttcagagctctgtgcaaagtcagctcttgatgttcagtcaagtgaagcattgctatcagcccttcagtgtctggatctaatctgtaggatatttgttcatgaggtgaagaaacctcagttgaaattctccataccaaaaaatcagcatggaccagactggttgagaagttctttactggtacatctaaataatttatggggagtgaagcgcttgtttcatggaaagggagacgacaaatttttcattttcaatttaaggattgctgaaatctttctgcgcttgaatgtatggatagataacactgtgttttcagctgaagaattttgcctttttgtgtcttctctgttcgcaaaggcaaaaacacttcgcaataaggacctcatcgaaatatatttgagcccacttataacctgcattccaggtcttatatccaatgctccagatgactcaaaaggctatttgttggaggtatttacggactcatttaaagattgcaaggtggattgcaagctaatgttgccatatttggatgcagttggaggaatgctttttcctgagaaaacaagcatatggcttgctgaaaatgattcaggtgtgttgggctatcatgacatatggatacatgagctacctggaattttgctacaatcaattgataaagcccccttagttacaaaggttgctttggagcttcttctaagaattgggcaatacttccctgcagtggactgtggaaggctgcgccccttcatgaagttatttggtgttgagtcattaccaggagctgtggatcttggtccttttgttaaacttcctcgtgattgccaagaacttgccatttcatgcctttattattttcccagtctgctccctgacgtcattgagccattggcctcatgttgcttaagtgatgcgctggaacccctcatactgttcagggccattgaagtcctacagtcaacatacaaggctggtagtttacatataacagagcaactcagtttcttgttgctgctaatggcaagattcagagttcatcctggggacatagttactctggaggattctagcaagctttcaaattgggatactttcaagtcattgaatcgcctaattttgacttccctatctgaaatgggcgatggctcgctggtccttgaattgatttggaataatttatttaatgcaattgctcaaaaaccatcgttgcataacatgaatggcttgcttagaattattgttacacttgatgccggaactagtaagctcatgaatggaaatgttgtaaagcttatagctggttacttggttgatgcatctttggatctgtctaaatccaccgaatttggttttcaacccgataagacgagactatttcagtactttctcaagccatgcaccatcatgtttgacaagaatgacaaggttctttgcagcacattggagtccctcaaatcttttgtaacaggaggcgatcatctgctttcatctgtctccaacttaaactacccaggagagctgtcgtgtcgagtttgtgctgtcacaaccatactcattttcttatgcaatgaccggaaactccataggaatctttctcttggcaaattggttattaaaggcatcctggaatatataaggcatcagctggattctagtgtgcctgatgtaacacatgtaggaaaacaaaagttaaaatctgcttttgagcaactcaagaccaaagcattgcagttgaattgctgggatagaagtgagctggagggtttttcgagtgctacatgatgtaaaatgattttttcccactatatgatgatactagctagttttgttatgcaaatgagcaatccgattgtattctaaggtatgggcaacaccgttttagggcacgttggttttaatctcaatccatatggatccgaccgaatagagtgggtttaaatctataccaaatcaaaatctttcataattcctttcaatcccgtctaatccatataggatggtaataactgaacaagttttagagtttgttcgttttgtgccaatccatatggatttgacggattggatggatttaaattcatagtaagttaaattttttttttattttttttatattcttcaatccatgtgcattggaaataactgaacaagattttattggtttttttttctctcgaatgattgacatagatgaatagagtttcacgagaggactggggtcagttatctcaattctgatttgtgttatgagttagagcaagaggaaccgccttcctcttgcaatctaaggcactcgtgctcccttatttatttggctatggttgtattcgtctcaatccattgtaactagggatgataatgagctctgcattttatactataaaatcttaggattg

SEQ ID NO: 20218 - DNA, 3448 bp, Zea Mays
ctcaacgttctctcttgctctgcctgtccatcccgacgacaaaaaacgcctcctccgcctcctccgccgccttccgcctgttctcacttcccgccccttcctccggacctagactcctccaagcgccagcgccggtgaacaccactttcccatacctgcgccatgggccgcccaaagggcggcgccgcgtcctcctcgaagaagccgaaggcgaagcagaaacagcgaggcggcgtcgacttcaagaagtacaagcacaaggtcgggcgcaagcttccgccgccgaagaatgccaccaacacggaaatcaagtccaaagcgatcgtgctgccggagcagagcatggcgtcggagaggacgggcatggcagtgaacaagcgcgggctcacgctacgggagctcctgcagcagacgggacactacaatgccaatgtgcggcgggctgcactgaatggaataaaggacattgttgtcaagcacccaacagagcttaaactgcacaaggttgctataattgagaagctgcaggagagaatatgtgatactgacaaggtggtccgtgaatcgttatacaatatactgcagtctctgatcttcccatctttgaaagaggataacactatatctgtgcggagtacactgtttttgctgatggctaatattctgaatggaacgacccatctatctgtggagatccagttaatggcttttaggtttttggagcttgtggttcttaatttcccgtcatccttttctagttatgctgaacagaccttcaacaactttgttgcggtactgagcaacgacagaatcaacctacatgataggaataaacttaacagtgttcttagtgggcttggccactgcctttccttggttgctaaaacgatagaaaatgatgatacatcaaatcgacaggctcataacctctctgcaagggaaaattggaaatttaccactgatgaagatagcacaggaggggcattttcaatgtccaatttattaacgaagcttcagaaccttgtccaaatcctcactaattctgtagaggtttcagcttcagagctctgtgcaaagtcagctcttgatgttcagtcaagtgaagcattgctatcagcccttcagtgtctggatctaatctgtaggatatttgttcatgaggtgaagaaacctcagttgaaattctccataccaaaaaatcagcatggaccagactggttgagaagttctttactggtacatctaaataatttatggggagtgaagcgcttgtttcatggaaagggagacgacaaatttttcattttcaatttaaggattgctgaaatctttctgcgcttgaatgtatggatagataacactgtgttttcagctgaagaattttgcctttttgtgtcttctctgttcgcaaaggcaaaaacacttcgcaataaggacctcatcgaaatatatttgagcccacttataacctgcattccaggtcttatatccaatgctccagatgactcaaaaggctatttgttggaggtatttacggactcatttaaagattgcaaggtggattgcaagctaatgttgccatatttggatgcagttggaggaatgctttttcctgagaaaacaagcatatggcttgctgaaaatgattcaggtgtgttgggctatcatgacatatggatacatgagctacctggaattttgctacaatcaattgataaagcccccttagttacaaaggttgctttggagcttcttctaagaattgggcaatacttccctgcagtggactgtggaaggctgcgccccttcatgaagttatttggtcattaccaggagctgtggatcttggtccttttgttaaacttcctcgtgattgccaagaacttgccatttcatgcctttattattttcccagtctgctccctgacgtcattgagccattggcctcatgttgcttaagtgatgcgctggaacccctcatactgttcagggccattgaagtcctacagtcaacatacaaggctggtagtttacatataacagagcaactcagtttcttgttgctgctaatggcaagattcagagttcatcctggggacatagttactctggaggattctagcaagctttcaaattgggatactttcaagtcattgaatcgcctaattttgacttccctatctgaaatgggcgatggctcgctggtccttgaattgatttggaataatttatttaatgcaattgctcaaaaaccatcgttgcataacatgaatggcttgcttagaattattgttacacttgatgccggaactagtaagctcatgaatggaaatgttgtaaagcttatagctggttacttggttgatgcatctttggatctgtctaaatccaccgaatttggttttcaacccgataagacgagactatttcagtactttctcaagccatgcaccatcatgtttgacaagaatgacaaggttctttgcagcacattggagtccctcaaatcttttgtaacaggaggcgatcatctgctttcatctgtctccaacttaaactacccaggagagctgtcgtgtcgagtttgtgctgtcacaaccatactcattttcttatgcaatgaccggaaactccataggaatctttctcttggcaaattggttattaaaggcatcctggaatatataaggcatcagctggattctagtgtgcctgatgtaacacatgtaggaaaacaaaagttaaaatctgcttttgagcaactcaagaccaaagcattgcagttgaattgctgggatagaagtgagctggagggtttttcgagtgctacatgatgtaaaatgattttttcccactatatgatgatactagctagttttgttatgcaaatgagcaatccgattgtattctaaggtatgggcaacaccgttttagggcacgttggttttaatctcaatccatatggatccgaccgaatagagtgggtttaaatctataccaaatcaaaatctttcataattcctttcaatcccgtctaatccatataggatggtaataactgaacaagttttagagtttgttcgttttgtgccaatccatatggatttgacggattggatggatttaaattcatagtaagttaaattttttttttattttttttatattcttcaatccatgtgcattggaaataactgaacaagattttattggtttttttttctctcgaatgattgacatagatgaatagagtttcacgagaggactggggtcagttatctcaattctgatttgtgttatgagttagagcaagaggaaccgccttcctcttgcaatctaaggcactcgtgctcccttatttatttggctatggttgtattcgtctcaatccattgtaactagggatgataatgagctctgcattttatactataaaatcttaggattg

SEQ ID NO: 20219 - DNA, 3355 bp, Zea Mays
cgacgacaaaaaacgcctcctccgcctcctccgccgccttccgcctgttctcacttcccgccccttcctccggacctagactcctccaagcgccagcgccggtgaacaccactttcccatacctgcgccatgggccgcccaaagggcggcgccgcgtcctcctcgaagaagccgaaggcgaagcagaaacagcgaggcggcgtcgacttcaagaagtacaagcacaaggtcgggcgcaagcttccgccgccgaagaatgccaccaacacggaaatcaagtccaaagcgatcgtgctgccggagcagagcatggcgtcggagaggacgggcatggcagtgaacaagcgcgggctcacgctacgggagctcctgcagcagacgggacactacaatgccaatgtgcggcgggctgcactgaatggaataaaggacattgttgtcaagcacccaacagagcttaaactgcacaaggttgctataattgagaagctgcaggagagaatatgtgatactgacaaggtggtccgtgaatcgttatacaatatactgcagtctctgatcttcccatctttgaaagaggataacactatatctgtgcggagtacactgtttttgctgatggctaatattctgaatggaacgacccatctatctgtggagatccagttaatggcttttaggtttttggagcttgtggttcttaatttcccgtcatccttttctagttatgctgaacagaccttcaacaactttgttgcggtactgagcaacgacagaatcaacctacatgataggaataaacttaacagtgttcttagtgggcttggccactgcctttccttggttgctaaaacgatagaaaatgatgatacatcaaatcgacaggctcataacctctctgcaagggaaaattggaaatttaccactgatgaagatagcacaggaggggcattttcaatgtccaatttattaacgaagcttcagaaccttgtccaaatcctcactaattctgtagaggtttcagcttcagagctctgtgcaaagtcagctcttgatgttcagtcaagtgaagcattgctatcagcccttcagtgtctggatctaatctgtaggatatttgttcatgaggtgaagaaacctcagttgaaattctccataccaaaaaatcagcatggaccagactggttgagaagttctttactggtacatctaaataatttatggggagtgaagcgcttgtttcatggaaagggagacgacaaatttttcattttcaatttaaggattgctgaaatctttctgcgcttgaatgtatggatagataacactgtgttttcagctgaagaattttgcctttttgtgtcttctctgttcgcaaaggtcttatatccaatgctccagatgactcaaaaggctatttgttggaggtatttacggactcatttaaagattgcaaggtggattgcaagctaatgttgccatatttggatgcagttggaggaatgctttttcctgagaaaacaagcatatggcttgctgaaaatgattcaggtgtgttgggctatcatgacatatggatacatgagctacctggaattttgctacaatcaattgataaagcccccttagttacaaaggttgctttggagcttcttctaagaattgggcaatacttccctgcagtggactgtggaaggctgcgccccttcatgaagttatttggtgttgagtcattaccaggagctgtggatcttggtccttttgttaaacttcctcgtgattgccaagaacttgccatttcatgcctttattattttcccagtctgctccctgacgtcattgagccattggcctcatgttgcttaagtgatgcgctggaacccctcatactgttcagggccattgaagtcctacagtcaacatacaaggctggtagtttacatataacagagcaactcagtttcttgttgctgctaatggcaagattcagagttcatcctggggacatagttactctggaggattctagcaagctttcaaattgggatactttcaagtcattgaatcgcctaattttgacttccctatctgaaatgggcgatggctcgctggtccttgaattgatttggaataatttatttaatgcaattgctcaaaaaccatcgttgcataacatgaatggcttgcttagaattattgttacacttgatgccggaactagtaagctcatgaatggaaatgttgtaaagcttatagctggttacttggttgatgcatctttggatctgtctaaatccaccgaatttggttttcaacccgataagacgagactatttcagtactttctcaagccatgcaccatcatgtttgacaagaatgacaaggttctttgcagcacattggagtccctcaaatcttttgtaacaggaggcgatcatctgctttcatctgtctccaacttaaactacccaggagagctgtcgtgtcgagtttgtgctgtcacaaccatactcattttcttatgcaatgaccggaaactccataggaatctttctcttggcaaattggttattaaaggcatcctggaatatataaggcatcagctggattctagtgtgcctgatgtaacacatgtaggaaaacaaaagttaaaatctgcttttgagcaactcaagaccaaagcattgcagttgaattgctgggatagaagtgagctggagggtttttcgagtgctacatgatgtaaaatgattttttcccactatatgatgatactagctagttttgttatgcaaatgagcaatccgattgtattctaaggtatgggcaacaccgttttagggcacgttggttttaatctcaatccatatggatccgaccgaatagagtgggtttaaatctataccaaatcaaaatctttcataattcctttcaatcccgtctaatccatataggatggtaataactgaacaagttttagagtttgttcgttttgtgccaatccatatggatttgacggattggatggatttaaattcatagtaagttaaattttttttttattttttttatattcttcaatccatgtgcattggaaataactgaacaagattttattggtttttttttctctcgaatgattgacatagatgaatagagtttcacgagaggactggggtcagttatctcaattctgatttgtgttatgagttagagcaagaggaaccgccttcctcttgcaatctaaggcactcgtgctcccttatttatttggctatggttgtattcgtctcaatccattgtaactagggatgataatgagctctgcattttatactataaaatcttaggattg

SEQ ID NO: 20220 - DNA, 3268 bp, Zea Mays
cgacgacaaaaaacgcctcctccgcctcctccgccgccttccgcctgttctcacttcccgccccttcctccggacctagactcctccaagcgccagcgccggtgaacaccactttcccatacctgcgccatgggccgcccaaagggcggcgccgcgtcctcctcgaagaagccgaaggcgaagcagaaacagcgaggcggcgtcgacttcaagaagtacaagcacaaggtcgggcgcaagcttccgccgccgaagaatgccaccaacacggaaatcaagtccaaagcgatcgtgctgccggagcagagcatggcgtcggagaggacgggcatggcagtgaacaagcgcgggctcacgctacgggagctcctgcagcagacgggacactacaatgccaatgtgcggcgggctgcactgaatggaataaaggacattgttgtcaagcacccaacagagcttaaactgcacaaggttgctataattgagaagctgcaggagagaatatgtgatactgacaaggtggtccgtgaatcgttatacaatatactgcagtctctgatcttcccatctttgaaagaggataacactatatctgtgcggagtacactgtttttgctgatggctaatattctgaatggaacgacccatctatctgtggagatccagttaatggcttttaggtttttggagcttgtggttcttaatttcccgtcatccttttctagttatgctgaacaggctcataacctctctgcaagggaaaattggaaatttaccactgatgaagatagcacaggaggggcattttcaatgtccaatttattaacgaagcttcagaaccttgtccaaatcctcactaattctgtagaggtttcagcttcagagctctgtgcaaagtcagctcttgatgttcagtcaagtgaagcattgctatcagcccttcagtgtctggatctaatctgtaggatatttgttcatgaggtgaagaaacctcagttgaaattctccataccaaaaaatcagcatggaccagactggttgagaagttctttactggtacatctaaataatttatggggagtgaagcgcttgtttcatggaaagggagacgacaaatttttcattttcaatttaaggattgctgaaatctttctgcgcttgaatgtatggatagataacactgtgttttcagctgaagaattttgcctttttgtgtcttctctgttcgcaaaggcaaaaacacttcgcaataaggacctcatcgaaatatatttgagcccacttataacctgcattccaggtcttatatccaatgctccagatgactcaaaaggctatttgttggaggtatttacggactcatttaaagattgcaaggtggattgcaagctaatgttgccatatttggatgcagttggaggaatgctttttcctgagaaaacaagcatatggcttgctgaaaatgattcaggtgtgttgggctatcatgacatatggatacatgagctacctggaattttgctacaatcaattgataaagcccccttagttacaaaggttgctttggagcttcttctaagaattgggcaatacttccctgcagtggactgtggaaggctgcgccccttcatgaagttatttggtcattaccaggagctgtggatcttggtccttttgttaaacttcctcgtgattgccaagaacttgccatttcatgcctttattattttcccagtctgctccctgacgtcattgagccattggcctcatgttgcttaagtgatgcgctggaacccctcatactgttcagggccattgaagtcctacagtcaacatacaaggctggtagtttacatataacagagcaactcagtttcttgttgctgctaatggcaagattcagagttcatcctggggacatagttactctggaggattctagcaagctttcaaattgggatactttcaagtcattgaatcgcctaattttgacttccctatctgaaatgggcgatggctcgctggtccttgaattgatttggaataatttatttaatgcaattgctcaaaaaccatcgttgcataacatgaatggcttgcttagaattattgttacacttgatgccggaactagtaagctcatgaatggaaatgttgtaaagcttatagctggttacttggttgatgcatctttggatctgtctaaatccaccgaatttggttttcaacccgataagacgagactatttcagtactttctcaagccatgcaccatcatgtttgacaagaatgacaaggttctttgcagcacattggagtccctcaaatcttttgtaacaggaggcgatcatctgctttcatctgtctccaacttaaactacccaggagagctgtcgtgtcgagtttgtgctgtcacaaccatactcattttcttatgcaatgaccggaaactccataggaatctttctcttggcaaattggttattaaaggcatcctggaatatataaggcatcagctggattctagtgtgcctgatgtaacacatgtaggaaaacaaaagttaaaatctgcttttgagcaactcaagaccaaagcattgcagttgaattgctgggatagaagtgagctggagggtttttcgagtgctacatgatgtaaaatgattttttcccactatatgatgatactagctagttttgttatgcaaatgagcaatccgattgtattctaaggtatgggcaacaccgttttagggcacgttggttttaatctcaatccatatggatccgaccgaatagagtgggtttaaatctataccaaatcaaaatctttcataattcctttcaatcccgtctaatccatataggatggtaataactgaacaagttttagagtttgttcgttttgtgccaatccatatggatttgacggattggatggatttaaattcatagtaagttaaattttttttttattttttttatattcttcaatccatgtgcattggaaataactgaacaagattttattggtttttttttctctcgaatgattgacatagatgaatagagtttcacgagaggactggggtcagttatctcaattctgatttgtgttatgagttagagcaagaggaaccgccttcctcttgcaatctaaggcactcgtgctcccttatttatttggctatggttgtattcgtctcaatccattgtaactagggatgataatgagctctgcattttatactataaaatcttaggattg

SEQ ID NO: 20221 - DNA, 2008 bp, Zea Mays
tgggacaacacacattcacacgagcacacactgctagaacccagccgaggatcaccgtacgctttgctccgctcatctcctcctccgcggagcaattccgtcgaacgcctcgcgcgcgcacgcgctctcgcaccgccctcggcctttgtcccatcgaatgccgtagcgctgtggacgggcgcgcgcggcggtgcctgccatggcttcgctctgccccttatcagccgcgcccgctttcccgcgcgctgctcgacctcgtgccgcaagcttcaggggacccgcttcctggagcggcctcgcggcgaccgcgagcaatgcctgtgtctgtagctgtggacttctgcccactggaggctacgcgaggctgcggtcgcgactaaggagtcccgtgcgcgccaagatcgacgaggcggacaagggcacgggcgccggtctgggcttcccctcgccacgccgtaggaagctacgcttgcgcctgcgaccacggctgcgcctcttgtggtggcggctccggcggctgtcgccgcgggagctcatgaccgacgccggggccgcgctgcggcgcgccgttcgccgcgtgcctcccgcggccgcggcgccggtcgtcctggcgcttctcctcgccgtggcgcggctcgcgctgcccaagaacgtggcccgggaggtggcctactcggacctcgtcgcggggctccgcgagggcgccgtggccgccgtcgctttcgaggaggactcgcgccgtatctacttcagcaagaacgctggggatgatgttggctccgacacgaacgagaccggtgagaacgctgcggcgccggcgccgaagtggccgtactacgcgcggagggtgccgcacgatgagggcttcttgctcgggctaatgcgggatggccgggtggactaccgttcgtcgccgcggcctgctgggaggctgctcgtggacatgctgagcacgctgctcacgctttgggtctcgctggtgcccgtgatgtggttcatacagcgtcagatgtctggtgcgggcggtgctgacaagcgacgcaaaccgaggaagcagagggtgggctttgatgatgttcagggcatagatgaagccaaggaggagcttgttgaggtcggaatactgtgtctcgggaggatattatggatgcaatcgagagggagaaatacggggtcactgggaggcaagaagctgattctgaaaggcaaggcctcaccaagttatttccatggctatctaaacctggaaataaaccatcaagccctgatgatttccgaggattgatgggttatcacacattaagctaacttagtagctcttgcaaggtctgagaaagaatataaagtgcaactaaatctggggaactgttgcctgtaattttatgtacatcagcaaatatacttgtcgatattatgtacgaagtatgctgcaaattgcaaccggtggccattgggactttgagaagaaagctattacgaactacacgaggacagtttgcgaatacaaaattccaacaattttcctagcttaagagtcagtttggataccaagggctaatcagtttcgtgcttcataattttgttagaaacacgactcaagtttcgtcacataccctgtaaagctagtggcgctcctgcttctttacacagaccaatcattcctctgattcttcccaactagaagtctggatgtgcaacgctgtgcaagtttacaaatgcagtgtcaagtgcggcgcatgggaactgaatctgcagcgaatgtgcaagaaatacacggcatcatatttcacagttcacaccgagcaacatttaatttctttttcctgttaacttacactaccgctgtctgtattttcattgaattactgtcaagaacaaactgcaactctagcagtttgagatgtgaaaccacccgatctgtaaacatgttgacagaaacctagaacccaaaaccatgtttttaaaaaccaattaaatcaatatttactctgctcatttatgtgccatt

SEQ ID NO: 20222 - DNA, 1513 bp, Zea Mays
atgtgggatgatgccaatttgaagcaactcattgaaattttcaaagaggggatagaagccaggaatagaccacatggatgttggaccagaaaaaggttggaagaaccttgggcaaaagcttttttttttacaaaatctgggatgaaacttgtcaagacacggttgaagaacaaactggatgacttggatgggatgatgcaaagcaaattgttgtgtgctcgaaggaatggtgggatgaaacatcttgccagatgcaacaaccctgaaagaggactcgagtgtggccatgtcaagtttcaaaagcgtggtccgaagtacctcgatgatctccaccggttgtttgataaggtgcatgtcagtgaaggcttccgcatcatgtccggtagatgtctcatcgagtgaaatcgagtgatgaggacacaacggagttggctgaagtgaagttgtcttctttaaagaattcaaaagaaacacgaaaaaacgcaaagagatgtcttgtccagttgaagaggagaagagtccttttccgcacatgtacaagaacacatgcctcagccctcaagattgaaagtgcacctaaaaattatgtcagctctctagaaaaaaaaacagtgtattacgatcaatttaaatataaacagtctatagccctcccagtctcagggtcattatagacaaatcatgtgaagtctacaatttcacagtagattgaaccaaacgactttctgcattttcacagcaaacaactcagctgagcagacaactcacaatatatagtttttctcatagtagacagcagaaccaaacacaccctcagtctatgaccaagagttgggaatggttggaggaatatttgtcaggggcttatagcaaaatacgtgtacaaatgacaggtactcatcagacatacagggagcccctattgaggacagatgtaaaggtaacccctagttgtattctgctgcgaaattaggaatgaaggatgctacaatgatatgacatgacatgatgctgacaccagagataagcacacctgcatctttttgcaattttcccatggaatcagaaaaatcagctgggcagagcctagagacgacgaccatacaacactgctacacggcacagtgctgaacgccttttggttgttgccttgttgagccaagcgtatagcaactcaggaagagataaggaacggccgggaggattaaggaagaagacaagtgagatgacggagaatattgtaagagacaagaagcgaaagcaagaacaaagcggcgcacactgatgagtgactttcagctgctaaagacctagagcttgctgtgtgagagccgaatactttctatgccgtaggcttctggttgagttgctttcccgacaaaaagctcattcccactcgtcccctgtacaacgctatttctcagatgcttttacaatggccgtcgatcaggtgtacatactcaggaacggtggtgggaacaggtggggctccgctccccctcctaaaatttag

SEQ ID NO: 20223 - DNA, 2930 bp, Zea Mays
aagcaatcgaaggtattatactgttgaaagctgaaacaacacagtatcaaatcttaaaggtactattcaaattggagtgtgaaatgacacggtatcaaatctcaaggcatataaatacagttgaagcagtatggtatcgaattctcccaccaatagtgagcctacatttgatggcgtcatgaaatttcgtcttcatagtatgacaggatcattccctataaattatccctgtgtgttcacagatccaaacaagagatttgcgaagtagtacatctggcgagttcaagtcgattataacaacttaacatccacatatccaacaaaacaatcaacataaggacaggctgaacagcagtaaaaaccaacagacagttgaagacaaagtgtgcctgaaaagagcagggaggttacacttgagtacaaaatacgtgtggatggttagatgatctgctccagtagttaatgtttaaagaacaaagaacatgttgtttctaactcctagtttggctcatttgaagccgtccaagtagaggagtgctccagtaatctacttcatattttacacgggcccattgtacattattaaaccatgcgtatagagttgccacgtttgacatttgtctatctctcctctgctttgttgcaaatgtattgattactaaatagaaagggtgaaaactaatggatctccactaacccaacaacacaccaatccaagtccatctgtacatgtacaatcatacttgacactgctgacgttggattcagaatttctgatcaatacccccaaacaaattatgggatataatatttttttagtgcttttggcttcttctatgcggctatgccttgaccggcaatggttagtcattaacactttaattacgggatatgatttatttttgtgtttttggcttcttccatgcctatgcattggacggcaatggtcagtcactacacgcttcattggtaacatcgactggttatagattgtccatggagacatacttgtcttcattattagaacaacaacaaggtgagcgagaagcattcttgtgttcttccggtaagtgccataagctaaaggggatgcagagaggttggtttattttacttctcttgcacatacctttctacttgatctttcaagctttgagctcctcaaaatttatcaacaggatacgaagcgttgctaggatgcctctgtgctggggtgataattggggccatagctgttttctgcagtgttaggagaagaagagccagcaagtcccaaccatcaagaaacgatattggtaatttcactaattaattgcacatccatatgcatatagaagttactgagatagatgtttttttacccactaatagcaatacgaagttgcacatgtttttttttcttgcagaggtcgcgttggcatcccttgagtatgaggagactacctgcaagccgatgtcgatcaaagaaatatacacagcaactgaaaacttgagtccatcaaacgtcattggacagggtattgcaggcaaggtatacagaggagtgctgacaaatggctggcctgttgcagtgaagcacattgttaagaatgagcatgcagaaacattcctaagggaagttaaaagcctgtcacatgtcaggcacccgaaccttgtgtcattaagaggttactgtgacgggcaggaggagtgttttcttgtgtatgagctgtgcatcaacggtaacctatcagaatggctatttggaaaagacaagaaccttccatggattcagaggcttcagatagcacttggaagtgcttgtggcctttggttcctgcacatataccctgaaggctgcatcgttcaccgtgacatcaagccaaccaatatacttcttggggttgatatggaacccaagctgtcagattttggactctctagagtcatcgacttaggtgtgtcgcacgtaagctctgaagtcagaggaacatttggctatgttgatccagaataccgccacaaccacagggtgaatgctgcaggggatgtgtacagcttcggcatggtgctcctccaactcctctcaggaagacgagcaatcaacatcatgaatactgctatgccaatgtcactggacaaaatggcttctacacttatccaagatggcaatgtatcagagtttgctgatcctaggttgaatggagagtattcaacggaggcatttgacctcagtttgaagcttgctctgttatgcactggccacaagaagcaacggccatccatggagcaagttgtgtcaagacttgagaaggctcttgagatatccatgagagatgatgcaaaacacaacaacattagcattgtcgaatcccttgcatagctattatgtgtaatccttaagacccttgatgtttacatgaccatgcttaagcatttttgtgcgctaagtgaacgaaaaaccattcgagtgatgagaaatttacatcagaaaagttaagacaaaccaatagaattagttcacacctataaccagagatactgaaagaccaaatctagggacagtactacgatctagacttctattagagcacaggcttgaatatttcagcaccttttctgtcacactatacagagaagtatagctacagtagagaaaaacctataagggctagtttggtgacaagggaattgtgggggattgaggaggaaattagtccatttcctcctcaatcccgcccaatcctcctcaattgctttgtcaccaaactagccctaaaggtgtcaagcatgatacctcttagtataatgagtttaatgcagcacttgaattcactgtgatggtccaagtgaatatgctatctttcaacttactataaaaaggaaacgctggtaagtgtacaaggcacgataactagcttgacagacatcatcactttatagcatatacc

SEQ ID NO: 20224 - DNA, 2557 bp, Zea Mays
aagcaatcgaaggtattatactgttgaaagctgaaacaacacagtatcaaatcttaaaggtactattcaaattggagtgtgaaatgacacggtatcaaatctcaaggcatataaatacagttgaagcagtatggtatcgaattctcccaccaatagtgagcctacatttgatggcgtcatgaaatttcgtcttcatagtatgacaggatcattccctataaattatccctgtgtgttcacagatccaaacaagagatttgcgaagtagtacatctggcgagttcaagtcgattataacaacttaacatccacatatccaacaaaacaatcaacataaggacaggctgaacagcagtaaaaaccaacagacagttgaagacaaagtgtgcctgaaaagagcagggaggttacacttgagtacaaaatacgtgtggatggttagatgatctgctccagtagttaatgtttaaagaacaaagaacatgttgtttctaactcctagtttggctcatttgaagccgtccaagtagaggagtgctccagtaatctacttcatattttacacgggcccattgtacattattaaaccatgcgtatagagttgccacgtttgacatttgtctatctctcctctgctttgttgcaaatgtattgattactaaatagaaagggtgaaaactaatggatctccactaacccaacaacacaccaatccaagtccatctgtacatgtacaatcatacttgacactgctgacgttggattcagaatttctgatcaatacccccaaacaaattatgggatataatatttttttagtgcttttggcttcttctatgcggctatgccttgaccggcaatggttagtcattaacactttaattacgggatatgatttatttttgtgtttttggcttcttccatgcctatgcattggacggcaatggtcagtcactacacgcttcattggtaacatcgactggttatagattgtccatggagacatacttgtcttcattattagaacaacaacaaggtgagcgagaagcattcttgtgttcttccgaggtcgcgttggcatcccttgagtatgaggagactacctgcaagccgatgtcgatcaaagaaatatacacagcaactgaaaacttgagtccatcaaacgtcattggacagggtattgcaggcaaggtatacagaggagtgctgacaaatggctggcctgttgcagtgaagcacattgttaagaatgagcatgcagaaacattcctaagggaagttaaaagcctgtcacatgtcaggcacccgaaccttgtgtcattaagaggttactgtgacgggcaggaggagtgttttcttgtgtatgagctgtgcatcaacggtaaccttccatggattcagaggcttcagatagcacttggaagtgcttgtggcctttggttcctgcacatataccctgaaggctgcatcgttcaccgtgacatcaagccaaccaatatacttcttggggttgatatggaacccaagctgtcagattttggactctctagagtcatcgacttaggtgtgtcgcacgtaagctctgaagtcagaggaacatttggctatgttgatccagaataccgccacaaccacagggtgaatgctgcaggggatgtgtacagcttcggcatggtgctcctccaactcctctcaggaagacgagcaatcaacatcatgaatactgctatgccaatgtcactggacaaaatggcttctacacttatccaagatggcaatgtatcagagtttgctgatcctaggttgaatggagagtattcaacggaggcatttgacctcagtttgaagcttgctctgttatgcactggccacaagaagcaacggccatccatggagcaagttgtgtcaagacttgagaaggctcttgagatatccatgagagatgatgcaaaacacaacaacattagcattgtcgaatcccttgcatagctattatgtgtaatccttaagacccttgatgtttacatgaccatgcttaagcatttttgtgcgctaagtgaacgaaaaaccattcgagtgatgagaaatttacatcagaaaagttaagacaaaccaatagaattagttcacacctataaccagagatactgaaagaccaaatctagggacagtactacgatctagacttctattagagcacaggcttgaatatttcagcaccttttctgtcacactatacagagaagtatagctacagtagagaaaaacctataagggctagtttggtgacaagggaattgtgggggattgaggaggaaattagtccatttcctcctcaatcccgcccaatcctcctcaattgctttgtcaccaaactagccctaaaggtgtcaagcatgatacctcttagtataatgagtttaatgcagcacttgaattcactgtgatggtccaagtgaatatgctatctttcaacttactataaaaaggaaacgctggtaagtgtacaaggcacgataactagcttgacagacatcatcactttatagcatatacc

SEQ ID NO: 20225 - DNA, 1558 bp, Zea Mays
gcacaaaataagaataatcacccttttggtgctcaacaatgtgatgacttataagagcttatgcaactactttacaacacaaagctgtacatattttgacgtttatgtttctggatttaactcttgatagctgctaagctccacgactttgttaaccaaaacgtcaagtatttgtggaaagtcaaaactcacatgagtagtagtagcgttggactgttggaggtttggtagacgatcgcaggggggacagaacatgtcacgactcgagggtggtcaagcagccaccccaagcccccaacaactttagggccggggaactcggtgacccatacgtaacggcttagctaaccgtacctgcttctagtcatcagcaagggcggcaaatcatgattccacggttccaccatacgtacgcctgttaggaggagctcaagacaacccgcgctaacttctttttacagcaatcagcgctcagcgtggcacctccgtctaggaaccgtcgcagtccatgggcacggcggcgtcttccacccgcttccggcacctgcgcgccgccttgatggccagcagggtgtcgcagatgatccacgggaagctccagaaccgcttctccccgcggcggtccgggtgcgcgtcgacggcggcgatgatgcggtccttcatctcgaagtagcgcttgttgtcccgccgcaggtacaccagcttgttccggatgttgcctgtcagaatctcgtcctcgcgctccgccgagtagtaggtcatcagggcgcccagcctctcggcgtacgcctcgtaccgctcctccgctgcgtccaggaactcgtcgaaaccggcgacctcgaggtccgggtcgtacacgcagctcggtgggcccgcaggcaggagcgcttctgcgtcctcctcgtgccgcagggcagcgcggtagagcttgccgaggacgccgttggagacgtacattggcctctcccaccgttccatgaagtccggaaactcccggggcctcagcgccaggggcatctcggctggagctcccgtcttggcgaagtcgaccgccatggagtgcagagcggccagctggacgcactcggggctgcgagctttcagtggatcacggtctgcgtggatcaagtgggcggtggagatggcaccgagggtatcgtttatcatgtaactgacgaagtgcttctgaatttcctgcaaccatttgcatgcagatgttaacatttttgctcaagcgagatggcaaaatatgcaggaatttgctgaatgctcacggtgagcatattcaggttcaaaacatcatttttttcattttaaacatgtatttttcaagtaggtagattacttccacatgccagccaatgcacataccgtcttaataccatgctggctggatggtcttgtgctcgttattgccctatcagggcctgtttcatggatttaatccttattacataaacacattttagaaacacgccaggtttcttagctcaatacagtagacagcacaaatcaatgtatccatcgtctcaggggaaagataacggcaattcataaa

SEQ ID NO: 20226 - DNA, 248 bp, Zea Mays
aaaacagtatatacataaaaatcaataaggaattatgttgatttagactaaaatttctcttctcctacctcctcctagccggcccaatagattgtgtgcatgcgtggcccattagtctcaactgagcgtgtgagcaaaagaaggcccaatagattgtgtccaattagtttccgtgcccgatttgtctcgctagctcagcagagtatctcttcctccctttcctgtttaaaagaatcctaagaaaaaaa

SEQ ID NO: 20227 - DNA, 2461 bp, Zea Mays
atcttcagttcaagccctagagaattgacaagttaaggtttatcatcacctgaaccatcatctccatgtgagctattactttctaattgtcgcctgcaaagtgagagtggaaccacagggataagcaaccagttacattttacagaagaaaaaggaaaagtagtgacctgtttgcagtgacagaatgtaacaaaatgaacacaataaatggaaacacacatgctattagtgcttcacaaatatataagataaactaaaaacaatgaacaaaagaatgtaatatgcaaaggaggagcatgcagtgcagtgcacaattgaatagaagaacaacattggtgtgcaagtccatatatatagataagctaatttgctaaattatgaacaagagaagtaaagatgagaccataaattaatacacatctgcttatgattatcacaaatatgtgtatccgaaattaattgcaaaattgttattgttagtaacaacgtcatagcagtaacccaaatacattggctgcatggcagagtggtcattgttttgaaatcgtctggttaatcgcgattagtcagcctggtcgccagcaagtcctcgactaggaggacgccttgatcagatcctttggtcgtccgactagtcgttgacttgatcaattaaatcgtccaattaaggagcaattcgaccagccagatttttttatgggcctctatttttggcccagctacagtagccgaaaaggcacactatgccgacgcccctgttacactggatacaaaccgatgcccctgttccaagaccggtggctgcggctcttgatctcctctccacctctcctctcctctcctgctccagagtcgacagctgatcctattccagttgaccgatgatggctcctgttctccggcaaggcaaccacaacatgagctcctcaagtgaaggtcccccgccccaagtttccctcttttctctcctgttttctggtctgctcttcatctgaatgagttaagtggtgctgagtgccgactgccgatggtctgtaactctgtatgagttaagtggtgccaaaaagtggttgttttgcccttcctttgatctgtacagagatccatggtagccgccgtggtgctgataacgttgaggtgatctttcctgagtctcatgtggttggtggagcccctgcatcctctgttgctgacagcaccgagcctgcgtcgacatcgttggccgctgcagattcttcggcacttgctgagaaggccattgcagcgctgtctcctgagcttcgtgcacaagcaactgatccgaagagcaggcaaggtcacaggaccctggatggaagtttgggaggtggccagacactgtcacactgcaaaggactttgttcagtgtattttctgtttgaagattcttccttctggaattaaaagatttaaacagcaccttgccggtaggtttggtggcactatgaatgggtacaatagactgatgaagctgatggtgataacagcctatggggtgctgtggatggtgcattaggtgcaagtcagggactctggggcagaaattttcctagggctgacgctgtcagtgctggttcatcttttcaacctcaaagaacataagttaggacaaggaaacgttccagaaatgcagcagctcaagatcttggtgaagaagatgacaatgatcagcatgaagatgatccagaaccagctgaacagcaaccaccaacagaaacagcaacaaatgtggaccaggatgaatctgaatcagttggagggggagctgctgctgatgcctttcagttggacaatgatcttctgctctaggtctctacactctaataactgtgagtttgcttgtttgaatgtttagaactttagatgaggtcaataggtcataagaaatttatctactttcagttttagtatgaactttgcatcaatattaagtttcagatttgcctattacagtattactacccatttgccttcatagcagtgtagtacctatataattatatattattaggttgttgttgttgttatatatagctcctgaaatatacagggcgacccgggccaacctaatcacgattagtcacctggtcggttccctggaccgaccagctgatcgtccgacctgtaaacattgagagtgaaagagttgacattagtgtataaactataaaaagcatttagttttgtgtcattaaaacattgtgatgaagctgaagccacggttcataattgggggtgaattaccatagaggaacaaaccctgtgcctaatgatgtggaaagaatcctttgtatattacaaatgtagttcaaaactttgaagcctatacaaacaatggaaatagcagatccaagaaatataccgtttgtttctctgctggctttcataaaaatcagaatcagacacattacttcctaacctatccctcacagatcgctttttc

SEQ ID NO: 20228 - DNA, 1584 bp, Zea Mays
caaacgaaaaggcccaacagatttcgtctccatttcctcctttctttccactaaaactccgcccccgtgtgccgtgttatctatccacccatcggttcgccttcctctcgccgctcgccgcatcgctttttagggttttctcgctcctgctcccccatcctccgcaccctcgctcctcccaacgcacgcgcgtcgacgacgaccggcagccgcgcatctgtccgccgccgccactcactacaaggagaaatgggcaacagcgacgctgcatcgcccgcatcggcggccgccgcgcgcgactccaagaagaagagggcaataaggatgccaaatctgcagcttcgccaacaggagcagtttctgggtcgcccatactcgcttccccgcaccctccacttcctcgtcgccgtgctgattccagatcaaggggcagtgatccggaggatagggatgaggctattgctgctggccttgaggcagatggcagtggccttgactccccaggctcagacaagcgccaaagtggtgactgccctcagaggaaggggttccctggcaatggcggtggtcccagcctcagcagtggaagcagtgtatggtccagctcaaggagtgtgagtgatgctgaggaggatacaggcggccctgaggatgagagtgaagtcttcgatgattgggaaatggctgctgatgcgctttatgtcgatgacagttcttgtaaccagagttcaggtcccacaccgacactcccacaagctccgaccactgcagaaccttctcatgcagcgaaaccagaaccgattcaaagcaagacaagggcttgggcaccggatgacatatttcgaccacagagcttacccagcatctccaagcagaccagcttcccagcaagcattggtaaccgctggcaggatatgggaatgagtgctgcgcagcagggaattctttcattgccgctgtcgtgccccatttgctgtgacgatcttgacctgacagattcgagcttctgtccctgtccttgtgggtttcacatgtgcctcttctgccacaacaggatcttggtggaagatgggcgctgcccaggttgcaggaagcaatacaacacagtttctgcagcagaaggcggcggtggaggtggctcaagagcaacagttgggactggacgagagatggaaaagcgactgtcccgttcttgtagcatgggtccaagttactaaactgccagggttatgctagatctatgttgtagcgctacccgttgcatgttactgtcagatatgctcgttttttgcgtatcgtctgcttttggtataaagaaatgtgaatattcgaaataggtgctgaatccatatagacttgtccagaaactcagttccataccgttctcgttgcatgtgatgcatatgttgctggagaggactgtttgttgcttacagtttgtgagataatatatatgccatataaggtgactgttttgtccttgtctacgagtatatgggcacttgagcagtaactgttgtttatttaattttagacattaagtttaggtattcacaatctcattctttgtgttggatttattat

SEQ ID NO: 20229 - DNA, 1618 bp, Zea Mays
aacagatttcgtctccatttcctcctttctttccactaaaactccgcccccgtgtgccgtgttatctatccacccatcggttcgccttcctctcgccgctcgccgcatcgctttttagggttttctcgctcctgctcccccatcctccgcaccctcgctcctcccaacgcacgcgcgtcgacgacgaccggcagccgcgcatctgtccgccgccgccactcactacaaggagaaatgggcaacagcgacgctgcatcgcccgcatcggcggccgccgcgcgcgactccaagaagaagagggggagccgctcggcggcgaagctgaagcagagcaagcgcgacacacgccgcaataaggatgccaaatctgcagcttcgccaacaggagcagtttctgggtcgcccatactcgcttccccgcaccctccacttcctcgtcgccgtgctgattccagatcaaggggcagtgatccggaggatagggatgaggctattgctgctggccttgaggcagatggcagtggccttgactccccaggctcagacaagcgccaaagtggtgactgccctcagaggaaggggttccctggcaatggcggtggtcccagcctcagcagtggaagcagtgtatggtccagctcaaggagtgtgagtgatgctgaggaggatacaggcggccctgaggatgagagtgaagtcttcgatgattgggaaatggctgctgatgcgctttatgtcgatgacagttcttgtaaccagagttcaggtcccacaccgacactcccacaagctccgaccactgcagaaccttctcatgcagcgaaaccagaaccgattcaaagcaagacaagggcttgggcaccggatgacatatttcgaccacagagcttacccagcatctccaagcagaccagcttcccagcaagcattggtaaccgctggcaggatatgggaatgagtgctgcgcagcagggaattctttcattgccgctgtcgtgccccatttgctgtgacgatcttgacctgacagattcgagcttctgtccctgtccttgtgggtttcacatgtgcctcttctgccacaacaggatcttggtggaagatgggcgctgcccaggttgcaggaagcaatacaacacagtttctgcagcagaaggcggcggtggaggtggctcaagagcaacagttgggactggacgagagatggaaaagcgactgtcccgttcttgtagcatgggtccaagttactaaactgccagggttatgctagatctatgttgtagcgctacccgttgcatgttactgtcagatatgctcgttttttgcgtatcgtctgcttttggtataaagaaatgtgaatattcgaaataggtgctgaatccatatagacttgtccagaaactcagttccataccgttctcgttgcatgtgatgcatatgttgctggagaggactgtttgttgcttacagtttgtgagataatatatatgccatataaggtgactgttttgtccttgtctacgagtatatgggcacttgagcagtaactgttgtttatttaattttagacattaagtttaggtattcacaatctcattctttgtgttggatttattat

SEQ ID NO: 20230 - DNA, 1906 bp, Zea Mays
aacagatttcgtctccatttcctcctttctttccactaaaactccgcccccgtgtgccgtgttatctatccacccatcggttcgccttcctctcgccgctcgccgcatcgctttttagggttttctcgctcctgctcccccatcctccgcaccctcgctcctcccaacgcacgcgcgtcgacgacgaccggcagccgcgcatctgtccgccgccgccactcactacaaggagaaatgggcaacagcgacgctgcatcgcccgcatcggcggccgccgcgcgcgactccaagaagaagagggggagccgctcggcggcgaagctgaagcagagcaagcgcgacacacgccgtgagcagtttctgtctagggggcaaggtctgatctcatgtctggtctgtgcgatacattagtcttaatccgtgtttgtgattttggggatttctggttttcgattgacgattcggcagtggtgtgcatgacggatttgagctctccatgcgttggatcgcggtttttatatacaaagttatgatattttttgtgagacgttttgaccttcttctggatttaagctctccatgcgtcggatcaaggttatcttctctgagacgtacttctgaaatttatgtttttcaggcaataaggatgccaaatctgcagcttcgccaacaggagcagtttctgggtcgcccatactcgcttccccgcaccctccacttcctcgtcgccgtgctgattccagatcaaggggcagtgatccggaggatagggatgaggctattgctgctggccttgaggcagatggcagtggccttgactccccaggctcagacaagcgccaaagtggtgactgccctcagaggaaggggttccctggcaatggcggtggtcccagcctcagcagtggaagcagtgtatggtccagctcaaggagtgtgagtgatgctgaggaggatacaggcggccctgaggatgagagtgaagtcttcgatgattgggaaatggctgctgatgcgctttatgtcgatgacagttcttgtaaccagagttcaggtcccacaccgacactcccacaagctccgaccactgcagaaccttctcatgcagcgaaaccagaaccgattcaaagcaagacaagggcttgggcaccggatgacatatttcgaccacagagcttacccagcatctccaagcagaccagcttcccagcaagcattggtaaccgctggcaggatatgggaatgagtgctgcgcagcagggaattctttcattgccgctgtcgtgccccatttgctgtgacgatcttgacctgacagattcgagcttctgtccctgtccttgtgggtttcacatgtgcctcttctgccacaacaggatcttggtggaagatgggcgctgcccaggttgcaggaagcaatacaacacagtttctgcagcagaaggcggcggtggaggtggctcaagagcaacagttgggactggacgagagatggaaaagcgactgtcccgttcttgtagcatgggtccaagttactaaactgccagggttatgctagatctatgttgtagcgctacccgttgcatgttactgtcagatatgctcgttttttgcgtatcgtctgcttttggtataaagaaatgtgaatattcgaaataggtgctgaatccatatagacttgtccagaaactcagttccataccgttctcgttgcatgtgatgcatatgttgctggagaggactgtttgttgcttacagtttgtgagataatatatatgccatataaggtgactgttttgtccttgtctacgagtatatgggcacttgagcagtaactgttgtttatttaattttagacattaagtttaggtattcacaatctcattctttgtgttggatttattat

SEQ ID NO: 20231 - DNA, 965 bp, Zea Mays
gactctctctttcagtctttctctctctctctcctgtcgttaattattaaactttaaacgataaaaaccccagatatcagcctgacccaaaaacgttttctttttcaccaatgtctgtaaaattctatttatagaggcagcaaaacctcgcccactctacaaacacgtgacacctccgcccaccctcgccccctccctaccggcaccgcccagatggcctgctcccacatcgccgccgcgggggtctcctcccccgccgcagcggcggctcgttccccggcgcattctcccgcttccgccttcgcgcgcctccggtcgacgcctcgtttcgcgagcgctggcttgtcggttaagggaaacggagcggcgttcccgttggtcgccgccgcggggccggccgcggcggcaccggtggccgacctggacggccgcccggccacggagaagcagcccatcatcgtcatcgacaactacgacagcttcacatacaacctctgccagtatatgggggagcttggattgaacttcgaagtataccgcaatgatgaactgaccatagaagatgtgagaaggaagaacccaaggggaatacttatttctccaggacctggtgaaccacaagattcgggaatatcattgcagactgttcttgaattaggcccaaccatcccaatttttggagtttgcatgggtctgcaatgcattggagaggcatttggaggaaagattatccgtgctccttctggagtgatgcatgggaaaagctctccagtttattacgatgaggaattaggaaaggcattgttcaatggcttgccaaacccttttactgccgcgaggtaccacagcttggtcattgagcaagaaaccttcccacatgatgctttggaggctactgcatggactgaagatggacttatcatggctgctcgccacaagaagtacaaacacatccagctgttttc

SEQ ID NO: 20232 - DNA, 1062 bp, Zea Mays
ggctgcctctgcctgcgggctgtggccacacagtatatgggggagcttggattgaacttcgaagtataccgcaatgatgaactgaccatagaagatgtgagaaggaagaacccaaggggaatacttatttctccaggacctggtgaaccacaagattcgggaatatcattgcagactgttcttgaattaggcccaaccatcccaatttttggagtttgcatgggtctgcaatgcattggagaggcatttggaggaaagattatccgtgctccttctggagtgatgcatgggaaaagctctccagtttattacgatgaggaattaggaaaggcattgttcaatggcttgccaaacccttttactgccgcgaggtaccacagcttggtcattgagcaagaaaccttcccacatgatgctttggaggctactgcatggactgaagatggacttatcatggctgctcgccacaagaagtacaaacacatccagggtgtccaattccacccggagagcatcatcacccctgaaggcaagaaaatcatcctcaactttgtcagattcattgaggaactggagaagcagcgttcgtaggggaggtagacgcgacaggtggtttcatttcatagatcagacggaagcagagacaaggcgcttaaagctgcgccaggttccggggctggcagttgaagcatagctaggaaacagctttccctctcttaattcgttgtgttcgtggtgacataatctgtgtgcggaccgaatttagaataaagtacaggcgtccgtctgatcaaataagcaccggtgttggtgctctatagatgaatatatccggtgattttcggcatgggaggcattggcacatttttgtctgagttctggcggtagcaagaccggagtaataaccatcaggcgtttctatgttggttacgtgccgcacgcaggccgggcgtgcggaggatttatgccctgagaggctgagactatctccctcgtcccttattttaaacagtatcattatacaattccgcgttacctgctggagagttgcatgtttggttt

SEQ ID NO: 20233 - DNA, 2520 bp, Zea Mays
agggaagagtgcagttagcaagggtattctttatgaaatatacaaaactaaagcgttgcgggcttgcggcgtccccgtctttccccaccggcaggcgccagcttcagctaaacgacgccgcaccaggaaaaaggtctaccttccgatattccactgtcttgtttccattctcccctcctctccggctctccctcccccgacagctgcccccgcatggtgtgatcaggccatctggtgcgggaagaaaagacgcgacacagcgagccatgctcccgccgcgcgccgccgccgtgccgctgctgctgctggccctggcggccggcgcggcccggggcgccgacgacctggcatcggacgccgtggcgctgcaagccttcctcgcgccattcggatccgcgaccgtgtcgtggaactcgtcccagccgacatgctcctggacgggtgtcgtctgcaccggcggccgcgtcacggagatccacctgcccggggaaggcctccggggcgcgctccccgtcggcgcgctcggcgggctcaacaagctcgccgtgctgtcgctgcggtacaacgcgctctccggcccgctgcctcgggacctcgcctcctgcgtcgagctccgggtgatcaacttgcagtccaacctcctctcgggggagctcccggtggaggtgctggcgctaccggcgttgacgcagctcaacctcgcgcagaaccgcttgtcggggaggatatcgccggccattgccaagaacgggcggctgcagctgctcttcctgaacggcaaccgccttaccggagagctaccgaacgtcagcatgccgtcgctcaccgcgctaaacgtctccttcaacaacctcagcggcgagatacccaagagcttcggcggcatgccgtccacgtctttcctcggcatgccgttgtgcggcaagcccctcccgccgtgccgagcgccgggttcggaagcatcgccgtctcagcctcccactcccacgcttcggcccgaggcaccggccccgactgacaaccgcggacggggcaggcatcacctcgccggcggcgccatcgctggcattgtggttggctgcgcgtttggcttcctcctgatcgcggccgtcctcgtcctcgtgtgtggcgcgctgcggcgggagccgagaccgacataccgcagccgtgacgccgttgcggcggagctggccctgcacagcaaagaggcaatgagccccaacggctacaccccacgtgtctcagacgcgcgaccgccgcccccgccttcagtcccgccaccgccagccgtctccgccgcagccgtggggcggaagaagctcttcttcttcggtaggattccccggccctacgacctcgaggacctgctccgcgcgtccgccgaggttcttggcaagggcacgcacgggaccacgtacaaggccgcgatcgagtctgggccggtcatggcggtgaagcgcctcaaggagacctcgttgcccgaacgcgagttccgggacaaggtcgcggccatcggcgggatcgaccacccaaatgtcgtgcccctgcaggcctattacttcagcaaggacgagaagcttatggtgtacgagttcgtggccatgggcagcctttcctccatgcttcacggcaatcgcggctccggccggtcgccactgagctgggagtcgaggaggcgcatcgctttggcctcggcgcgcggtctcgagtacatccacgccacgggctccatggtcacgcacggcaacatcaagtcgtccaacatcctcttgagccgcaccgtggacgcgcgcgtggccgaccacgggctcgcgcacctcgtcaacccggcgggcgcggcgacgacgacccgcgtcgcggggtaccgcgcgcccgaggtggtggcggacccgcggcgggcgtcgcagaaggcggacgcgtacagcttcggcgtgctgctcctggagctgctgacggggaaggccccggcgcacgcggtgctgcacgacgagggcgtggacctcccgcgctgggcgcggtccgtggtgaaggaggagtggacgtccgaggtgttcgacacggagctgctcaggcacccgggcgccgaggacgagatggtggagatgctgcggctggccatggactgcaccgagcccgctccggaccagcggccggccatgcccgagatcgtggcgcgcatcgaggggctcggcggcacggcgtcgacgtcgacggcgacggcgcggtccggccggagtgcgtccgtggacgaggcggacgaccggccgctgaggaccaccggatcgatccgtcagagctgaggtccgtccgcgtccgatcacttgtgttattgtcactgacggaaggttctgaacaagggggaaaaaaagaagagatctttctgttctgtcttcttgcgcttgtcgtaggggcgttgtcgtgtgctgtttattctttcatgcgtctcttgacgcttgttcgccctcagatgaattctttcgttttagcagcggtgatgagtgtgcgctgatggtgtgtgaa

SEQ ID NO: 20234 - DNA, 2528 bp, Zea Mays
cggggcaccatacaccacaccacttcgcgcccaagatggcgctttattatctctggtctggtcgctgcgcctcccgcttggccgcgagcccgcgaccatggcggcgccacccgtccccgtcctctgcagcgcttccccatgtcgcatcaccacccacctcgcccctcctgcctttcggaccgttgccgcggcgcggccgcaggccttgcccttcgtcttgtgcgtcgagcagcgcgtggggccctcggcgcgcgcgcgcgcgccgttcgcggccaagcgcggcggcggcggcgaggtatccgcggaagctccagacggcacgcgcgcgctgctccaggcggcgctctggggcgccgaggctgcctatatactctggctcttccttctgccttacgccccgggcgacccggtctgggcaatctcgcaggctaccatcagcgacctcatcggcctatcactcaacttcttcttcgtcctgccgctgctcaactcagtgtagttggcgttcacctgctcgaatcgcctctacttcaccctatggcagaaggattgttcaacttggtgctcgcttggacgctgctttttgcgccactcctcttcacggattgtaggagggaccgctacaagggatcgctcgatgtcctgtggggctttcagatgttcctcacaaacactttcttgataccttacatggcgatccgactgaacggtccggaagcggaccggtctccgccacgaagatcacagctgggttcagtcatggtcaacggcgcgccggctgtgggcgcggtcggcggcctcgtctgcgttctctcgatcgtttgggcgttctctggccgcggagattctggtttcggaggcattgcggaacggtggcagtatctgcagagctacctgttctcggagcggcttgcttacgcgtttctctgggatatgtttctgtactccgtattccagccgtggctgatcggggacaatcttcggaacgtgaaggcggatgctgctgggcttgtgagtgtggtgcggttcgtccccgttgtgggtttagttgcctaccttctttgcttagaggaagaggattagctgttaactgtgtttttttatatattttttgtgatcatttggatcgttgatcagtgtgcagttgagtggattatgtacttggtggcagtgagtttgcaactgaaaacacaaatcttgtagccgaacaagaacaaccgggatggacatacagtattttttttcctgggcggctagtctctctaggaaacaagcccatcagaaaagcaactaattttctctaagacataattctaactgcctgacgaatgccgctcaattcttcagaaagctaggactgacaccaatgccacgaaaccaagagtgacagagaagccgtgagctatcatcttggacccccggctgtatcgcggcggcgtctggctgctcaccgacggtgacggtatcatacgtggtgtcgtcggcgttggcgtcgctggcgtggtgagggtcgctggagcactggagttggcgcttgcgtgtggagtgaccgccgccgcgggcggcggcggcggcggtggcagcggcggtgatggtccatggggaagaagaccggcaactgcaagagggctcatcatcaaacacaacttcagtgagtgccaaatccctggcacgagaaggggaggcgaaatatccgtgcacgtaatggagatcgcgtgcgtacgagtattacctgcgcaggcgccggtggcgggcgggaggtcgaggcggcagagccgaggcatggccatcacgcgcgtcatgttgacggcgacgggggccgtgctggggttgctgagagcctggcagaggcactgcggctcgtcgtgcaccatgctgccaaggttggcgcagcaggtgtccgccggcacggtggcggtgccctcgatgaagggcaggcaggggaggaggcggaggaggtcagtgctgcaggtggacgacgtgccggcctggggcggcaccgcatggacggcagcgacggaagccagcagcagcagcagcgcgacgtagaacgcaggagccgacgccattgcttctctcgctagctgatcttttctgctctgcatggaaactggagacaactgttttcttgatttgctcttctggcgattggttgcagtggatttatagcatcggagcaacggcgatgcacggtaatggtgtgtgttcctgagctgggagcctgggactgggacctcgcatcgcatgcatggcgggctggcggctgcttggcagatttgcgtgacgccctgcatggaaggcgggagcgttccgtgtgagccgctgcggcgttagtaggattcgctcgcagtcgtaggtgtagcaggctttgccaacgggcaatgaagcacagggatggtgtgcttcagacccttcagttcagtgcttgtacgtcgccgtgtcgtgctccatgtgcgtgccatgtgaactgctgtctatattaccggcttgttgaaactgataaatcataaatgcagatcactctggct

SEQ ID NO: 20235 - DNA, 1376 bp, Zea Mays
cggggcaccatacaccacaccacttcgcgcccaagatggcgctttattatctctggtctggtcgctgcgcctcccgcttggccgcgagcccgcgaccatggcggcgccacccgtccccgtcctctgcagcgcttccccatgtcgcatcaccacccacctcgcccctcctgcctttcggaccgttgccgcggcgcggccgcaggccttgcccttcgtcttgtgcgtcgagcagcgcgtggggccctcggcgcgcgcgcgcgcgccgttcgcggccaagcgcggcggcggcggcgaggtatccgcggaagctccagacggcacgcgcgcgctgctccaggcggcgctctggggcgccgaggctgcctatatactctggctcttccttctgccttacgccccgggcgacccggtctgggcaatctcgcaggctaccatcagcgacctcatcggcctatcactcaacttcttcttcgtcctgccgctgctcaactcagttggcgttcacctgctcgaatcgcctctacttcaccctatggcagaaggattgttcaacttggtgctcgcttggacgctgctttttgcgccactcctcttcacggattgtaggagggaccgctacaagggatcgctcgatgtcctgtggggctttcagatgttcctcacaaacactttcttgataccttacatggcgatccgactgaacggtccggaagcggaccggtctccgccacgaagatcacagctgggttcagtcatggtcaacggcgcgccggctgtgggcgcggtcggcggcctcgtctgcgttctctcgatcgtttgggcgttctctggccgcggagattctggtttcggaggcattgcggaacggtggcagtatctgcagagctacctgttctcggagcggcttgcttacgcgtttctctgggatatgtttctgtactccgtattccagccgtggctgatcggggacaatcttcggaacgtgaaggcggatgctgctgggctttggatttatagcatcggagcaacggcgatgcacggtaatggtgtgtgttcctgagctgggagcctgggactgggacctcgcatcgcatgcatggcgggctggcggctgcttggcagatttgcgtgacgccctgcatggaaggcgggagcgttccgtgtgagccgctgcggcgttagtaggattcgctcgcagtcgtaggtgtagcaggctttgccaacgggcaatgaagcacagggatggtgtgcttcagacccttcagttcagtgcttgtacgtcgccgtgtcgtgctccatgtgcgtgccatgtgaactgctgtctatattaccggcttgttgaaactgataaatcataaatgcagatcactctggct

SEQ ID NO: 20236 - DNA, 1267 bp, Zea Mays
gtgtcgcgtctcgcgtaagcaagtggggaagacttcatcgccgtgcgcgcccgccataccgcgcaccgccacctccatcgcgcgccggccagcccccgctcctccacctccactacacgcgccggccagcccccactcctccacctccactgcacgcgccggccagcccccacttctccacctccaccgcgcgccggaagcccccgctcctccacctccactgtgcgcgccggccagcccgctcctccaccgcatcaggaaggcgagccagagatcgagcggcccgagaaaaggaggaaacacaagcttaatcagaagccgaagcccagggagctcaatccaatggagtggatcgctgaagcccggcaccagacacattcagtgaagatttgttctcaggttgatctgtgcaattttgaaggcactcatggtgtcaagtgaggactggcaatttccaccagcgcgagacgttgatggtgtccatcttactgtatttagttgggttttagtacctcgtacctccaaaaggtttcagttaaaggacatgtcctggagatcaaaggtgactgagctaactgcaatctcttatttccttgcattttaggattttggttgcctggattctgcagctcttcattttgcaatatttgaaaaatagtcgagtagcctctagggcttaccatgcctaaaatggtgagattcagctctgatgatgctaaggatgtagtccattaccaaacaatctcaccaaagagcttagctaaatctgttctcgaggaaggtggctggtcaaacttcatgttctcaagggaggatactcagaataatattgatgttgccattgtttttattggctcaaagctgcaatcgtcagacatatctaaagataagcaagttgatccagctttagcagacacactgaagtctggagcaaaaaaaagtggtggctgtattctcaaggaacatgagaccactgagctctggagtgaatgaaggacgtcgtctttggaagtcagacatcacctagagctagggtgtccattcttgacatgtttctcttagtgataggtggatactgtctagctaggaataaagtcttgagggattgatggacgcatgcatctccaattcctgtgtgttgtattactactggtacaatctccaattcctgtgaacttatgtatttggactgtgaatttgtgatatgaacatatatcaatgtgtttgaaatctgtattgtatgtgatattctgtattggatgtgata

SEQ ID NO: 20237 - DNA, 2166 bp, Zea Mays
ctcgcgtaagcaagtggggaagacttcatcgccgtgcgcgcccgccataccgcgcaccgccacctccatcgcgcgccggccagcccccgctcctccacctccactacacgcgccggccagcccccactcctccacctccactgcacgcgccggccagcccccacttctccacctccaccgcgcgccggaagcccccgctcctccacctccactgtgcgcgccggccagcccgctcctccaccgcatcaggaaggcgagccagagatcgagcggcccgagaaaaggaggaaacacaagcttaatcagaagccgaagcccagggagctcaatccaatggagtggatcgctgaagcccggcaccagacacattcagtgaagatttgttctcaggttgatctgtgcaattttgaaggcactcatggtgtcaagtgaggactggcaatttccaccagcgcgagacgttgatggtgtccatcttactgtatttagttgggttttagtacctcgtacctccaaaaggtttcagttaaaggacatgtcctggagatcaaaggtgactgagctaactgcaatctcttatttccttgcattttaggattttggttgcctggattctgcagctcttcattttgcaatatttgaaaaatagtcgagtagcctctagggcttaccatgcctaaaatggtgaggtaagtctattgcgcttctactgacatgaccatttaatcactgggacttcacactcaatacttttcttgaatatatagagatgataggaacattgctgcccatcagtaataatcttgtgccttgtttctatgggttgagcatccactgagattttacaaataaagttgataggccacattttgcacattcacatctgctagtaagattgttttctttccaaacagtaaatactttaaatcaggtaatggtatttattctggtgcagggtaatgtacaattgtgttcccttaaacacactttatgcttttcccctcaccttctatagaatttacccatgattccatggtgtacgattatgtgcagtgcagttgttgttagttctttagaaaacctcttgttgttagggccaagcgtaattagttcaaatatcgccacaatggttttcaagttgtcggtgcaggatatgactcatgtgctcttgtaatggtctgtactttaagaacagggtcgagaaatagtgaatgtttcagaacttttttttcattttctaccataggaaacttaatgtgttttgtgacaggatactactgtcaatgggaaagagaaccatgatcaagagataagttgcatcgtagacacaatgttactctgttcaatattgatgtcttttctgtttgcatagtgttaaccttagtcgaaatttctagctcatgacaaatatttattgtacctttaaatggttatttaagcaagaatatatgagcttactgtcatagaatgacctacattccatccaccttggtcatccagattcagctctgatgatgctaaggatgtagtccattaccaaacaatctcaccaaagagcttagctaaatctgttctcgaggaaggtggctggtcaaacttcatgttctcaagggaggatactcagaataatattgatgttgccattgtttttattggctcaaagctgcaatcgtcagacatatctaaagataagcaagttgatccagctttagcagacacactgaaggtaatcataggcactcatctctcagatactgttctatatgcatggtacttgagttattctgcgctactactgacactactaaattggagccttggagtctggagcaaaaaaaagtggtggctgtattctcaaggaacatgagaccactgagctctggagtgaatgaaggacgtcgtctttggaagtcagacatcacctagagctagggtgtccattcttgacatgtttctcttagtgataggtggatactgtctagctaggaataaagtcttgagggattgatggacgcatgcatctccaattcctgtgtgttgtattactactggtacaatctccaattcctgtgaacttatgtatttggactgtgaatttgtgatatgaacatatatcaatgtgtttgaaatctgtattgtatgtgatattctgtattggatgtgata

SEQ ID NO: 20238 - DNA, 1416 bp, Zea Mays
gggaagacttcatcgccgtgcgcgcccgccataccgcgcaccgccacctccatcgcgcgccggccagcccccgctcctccacctccactacacgcgccggccagcccccactcctccacctccactgcacgcgccggccagcccccacttctccacctccaccgcgcgccggaagcccccgctcctccacctccactgtgcgcgccggccagcccgctcctccaccgcatcaggaaggcgagccagagatcgagcggcccgagaaaaggaggaaacacaagcttaatcagaagccgaagcccagggagctcaatccaatggagtggatcgctgaagcccggcaccagtcggcgcggccgcgggcgctgccgcattggcaggcagtgctgatgggaatcgggatggactgcatccgctaggcctctccatcgaccagtgggttcccctgctcaagttgtattgatttgcgtgcgcgcggtttctgccaatctggcgacctgcttcagaatctgatcttcaagacacattcagtgaagatttgttctcaggttgatctgtgcaattttgaaggcactcatggtgtcaagtgaggactggcaatttccaccagcgcgagacgttgatggtgtccatcttactgtatttagttgggttttagtacctcgtacctccaaaaggtttcagttaaaggacatgtcctggagatcaaaggtgactgagctaactgcaatctcttatttccttgcattttaggattttggttgcctggattctgcagctcttcattttgcaatatttgaaaaatagtcgagtagcctctagggcttaccatgcctaaaatggtgagattcagctctgatgatgctaaggatgtagtccattaccaaacaatctcaccaaagagcttagctaaatctgttctcgaggaaggtggctggtcaaacttcatgttctcaagggaggatactcagaataatattgatgttgccattgtttttattggctcaaagctgcaatcgtcagacatatctaaagataagcaagttgatccagctttagcagacacactgaagtctggagcaaaaaaaagtggtggctgtattctcaaggaacatgagaccactgagctctggagtgaatgaaggacgtcgtctttggaagtcagacatcacctagagctagggtgtccattcttgacatgtttctcttagtgataggtggatactgtctagctaggaataaagtcttgagggattgatggacgcatgcatctccaattcctgtgtgttgtattactactggtacaatctccaattcctgtgaacttatgtatttggactgtgaatttgtgatatgaacatatatcaatgtgtttgaaatctgtattgtatgtgatattctgtattggatgtgata

SEQ ID NO: 20239 - DNA, 1254 bp, Zea Mays
ggaagacttcatcgccgtgcgcgcccgccataccgcgcaccgccacctccatcgcgcgccggccagcccccgctcctccacctccactacacgcgccggccagcccccactcctccacctccactgcacgcgccggccagcccccacttctccacctccaccgcgcgccggaagcccccgctcctccacctccactgtgcgcgccggccagcccgctcctccaccgcatcaggaaggcgagccagagatcgagcggcccgagaaaaggaggaaacacaagcttaatcagaagccgaagcccagggagctcaatccaatggagtggatcgctgaagcccggcaccaggcagtgctgatgggaatcgggatggactgcatccgctaggcctctccatcgaccagtgggttcccctgctcaagttgtattgatttgcgtgcgcgcggtttctgccaatctggcgacctgcttcagaatctgatcttcaagacacattcagtgaagatttgttctcaggttgatctgtgcaattttgaaggcactcatggtgtcaagtgaggactggcaatttccaccagcgcgagacgttgatggtgtccatcttactgtatttagttgggttttagtacctcgtacctccaaaaggtttcagttaaaggacatgtcctggagatcaaagattcagctctgatgatgctaaggatgtagtccattaccaaacaatctcaccaaagagcttagctaaatctgttctcgaggaaggtggctggtcaaacttcatgttctcaagggaggatactcagaataatattgatgttgccattgtttttattggctcaaagctgcaatcgtcagacatatctaaagataagcaagttgatccagctttagcagacacactgaagccttggagtctggagcaaaaaaaagtggtggctgtattctcaaggaacatgagaccactgagctctggagtgaatgaaggacgtcgtctttggaagtcagacatcacctagagctagggtgtccattcttgacatgtttctcttagtgataggtggatactgtctagctaggaataaagtcttgagggattgatggacgcatgcatctccaattcctgtgtgttgtattactactggtacaatctccaattcctgtgaacttatgtatttggactgtgaatttgtgatatgaacatatatcaatgtgtttgaaatctgtattgtatgtgatattctgtattggatgtgata

SEQ ID NO: 20240 - DNA, 1366 bp, Zea Mays
atcgccgtgcgcgcccgccataccgcgcaccgccacctccatcgcgcgccggccagcccccgctcctccacctccactacacgcgccggccagcccccactcctccacctccactgcacgcgccggccagcccccacttctccacctccaccgcgcgccggaagcccccgctcctccacctccactgtgcgcgccggccagcccgctcctccaccgcatcaggaaggcgagccagagatcgagcggcccgagaaaaggaggaaacacaagcttaatcagaagccgaagcccagggagctcaatccaatggagtggatcgctgaagcccggcaccagtcggcgcggccgcgggcgctgccgcattggcaggcagtgctgatgggaatcgggatggactgcatccgctaggcctctccatcgaccagtgggttcccctgctcaagttgtattgatttgcgtgcgcgcggtttctgccaatctggcgacctgcttcagaatctgatcttcaagacacattcagtgaagatttgttctcaggttgatctgtgcaattttgaaggcactcatggtgtcaagtgaggactggcaatttccaccagcgcgagacgttgatggtgtccatcttactgtatttagttgggttttagtacctcgtacctccaaaaggtttcagttaaaggacatgtcctggagatcaaagattcagctctgatgatgctaaggatgtagtccattaccaaacaatctcaccaaagagcttagctaaatctgttctcgaggaaggtggctggtcaaacttcatgttctcaagggaggatactcagaataatattgatgttgccattgtttttattggctcaaagctgcaatcgtcagacatatctaaagataagcaagttgatccagctttagcagacacactgaaggtaatcataggcactcatctctcagatactgttctatatgcatggtacttgagttattctgcgctactactgacactactaaattggagccttggagtctggagcaaaaaaaagtggtggctgtattctcaaggaacatgagaccactgagctctggagtgaatgaaggacgtcgtctttggaagtcagacatcacctagagctagggtgtccattcttgacatgtttctcttagtgataggtggatactgtctagctaggaataaagtcttgagggattgatggacgcatgcatctccaattcctgtgtgttgtattactactggtacaatctccaattcctgtgaacttatgtatttggactgtgaatttgtgatatgaacatatatcaatgtgtttgaaatctgtattgtatgtgatattctgtattggatgtgata

SEQ ID NO: 20241 - DNA, 1800 bp, Zea Mays
caggccgcacagtcgcgcacgccggctcacatgctcggttccggcgacaccccgcaaaaggcagccatgccgcttcgcctcggctgtccgcctgcccccgatcggcggaggcgaaggtacacctgtcggggtgcgcgcagcacagcggcagcgccccctttggaaatagcgccggggcgacgtggccgggctgcgcaccgctcctccgcaccattttttactcctcttcttctcccccaaggccccaaccatcccactctctctatacaacagccacccccgcgcccttccgcccttgtcgagtccaaatccaggttatagatcctctcgcgccgccgctcgcagccgctcgccgcccggtacatctcccccgcgcctctccctgctcctggatttcaccgatctggcatgctttactgtcccgtcatacggtggcagcgggagccgcccccttcctgcctccacagctcatgccatgcatggccgatccattccctcagatcgggattgccgcatacatgccgttgcttccccgttagcttctcccttgttacaccccctcgcttcgttctgcgtagtttcggggtttgacaccgcttgtctatcccgttcctatagcttttagggtttcgagctcaaactccgcgccggcgtctcagttgctgcaagtggcggcagcaagctagaggcagcaactgcataccttgcaagaaaaaatcggttttgttgacgtaccgatgattttcttgcaagttgtgcagttgttgtctcaagcttgctgcctccctttgccagaactattgaatgtgaaagcacagatttagctaaaggctataataatcttcaaaggttcaatataaattcttggactatagactgaagtatggctgctgatcttccaagatctctccagttcagaggatgggattatgggagcttagaccagagctgtctaagcaattccagagtacagaagggtatactctgatcctagaaaagatggcatattctatcggaccagagtcaccagaccttggatgaaagggcttcagtttaagtcctacaagagatggtacgatgtaggcaggaaaaaaatggcattcctaccctatcttggttctaagctgtaaaccttggcctaatttggttaaatctgtctgagcctttgtagaacgatggcaaccaccaaaagtccaactacgtagaacgatggcaaccaccaaaaattgcccattgttcatccgacgggcaatttgccgtttcttctcatggtgagacatgggatgctgcaacatgacccgaaaaactggatttcaattcaagtgaacagtttctccatttgtacggtattccattgcaatttctgcctatgatggtgcgcggatacctgggctaagccatgtggagacacagacaccatatatgaagttggtctttttgctgccaaccaatcatgaacaccaaattcagagttaggaatgaactataactattcatagtcttgttattaccttaagctcttgattttgcaacgaacctgttgatgcgcagttgatctaacacatgagatgtggtttaatagacaatacaagtgtattctagttgtctttttcatagtgggtcagtgaaaaaaagtgttttgaaccattgttccttgacccatatgttcgacgcacacaatttgccaagaactatctgcacatatggttttgtatcggttgcaagggctgatgttgtactagtaaatgctttctccgttcaaagttattttaactatctcaaaacatattaagttgaact

SEQ ID NO: 20242 - DNA, 1141 bp, Zea Mays
gcacagtcgcgcacgccggctcacatgctcggttccggcgacaccccgcaaaaggcagccatgccgcttcgcctcggctgtccgcctgcccccgatcggcggaggcgaaggtacacctgtcggggtgcgcgcagcacagcggcagcgccccctttggaaatagcgccggggcgacgtggccgggctgcgcaccgctcctccgcaccattttttactcctcttcttctcccccaaggccccaaccatcccactctctctatacaacagccacccccgcgcccttccgcccttgtcgagtccaaatccaggttatagatcctctcgcgccgccgctcgcagccgctcgccgcccggtacatctcccccgcgcctctccctgctcctggatttcaccgatctggcatgctttactgtcccgtcatacggtggcagcgggagccgcccccttcctgcctccacagctcatgccatgcatggccgatccattccctcagatcgggattgccgcatacatgccgttgcttccccgttagcttctcccttgttacaccccctcgcttcgttctgcgtagtttcggggtttgacaccgcttgtctatcccgttcctatagcttttagggtttcgagctcaaactccgcgccggcgtctcagttgctgcaagtggcggcagcaagctagaggcagcaactgcataccttgcaagaaaaaatcggttttgttgacgtaccgatgattttcttgcaagttgtgcagttgttgtctcaagcttgctgcctccctttgccagaactattgaatgtgaaagcacagttaagtaatgccacgcccagagaatccaaaaggatttagctaaaggctataataatcttcaaaggttcaatataaattcttggactatagactgaagtatggctgctgatcttccaagatctctccagttcagaggatgggattatgggagcttagaccagggttgaaattagcctgaggttttggcttcctccagtaaaaaaaaaattgcttggagggccacttttggcatatgaaccatctgtgttttgtgcttaatgttcagagtactagtttgtattaattgcacatttgcagccactttttttgaaaccgtaaatcctaccata

SEQ ID NO: 20243 - DNA, 1101 bp, Zea Mays
gcacagtcgcgcacgccggctcacatgctcggttccggcgacaccccgcaaaaggcagccatgccgcttcgcctcggctgtccgcctgcccccgatcggcggaggcgaaggtacacctgtcggggtgcgcgcagcacagcggcagcgccccctttggaaatagcgccggggcgacgtggccgggctgcgcaccgctcctccgcaccattttttactcctcttcttctcccccaaggccccaaccatcccactctctctatacaacagccacccccgcgcccttccgcccttgtcgagtccaaatccaggttatagatcctctcgcgccgccgctcgcagccgctcgccgcccggtacatctcccccgcgcctctccctgctcctggatttcaccgatctggcatgctttactgtcccgtcatacggtggcagcgggagccgcccccttcctgcctccacagctcatgccatgcatggccgatccattccctcagatcgggattgccgcatacatgccgttgcttccccgttagcttctcccttgttacaccccctcgcttcgttctgcgtagtttcggggtttgacaccgcttgtctatcccgttcctatagcttttagggtttcgagctcaaactccgcgccggcgtctcagttgctgcaagtggcggcagcaagctagaggcagcaactgcataccttgcaagaaaaaatcggttttgttgacgtaccgatgattttcttgcaagttgtgcagttgttgtctcaagcttgctgcctccctttgccagaactattgaatgtgaaagcacactaaaggctataataatcttcaaaggttcaatataaattcttggactatagactgaagtatggctgctgatcttccaagatctctccagttcagaggatgggattatgggagcttagaccagggttgaaattagcctgaggttttggcttcctccagtaaaaaaaaaattgcttggagggccacttttggcatatgaaccatctgtgttttgtgcttaatgttcagagtactagtttgtattaattgcacatttgcagccactttttttgaaaccgtaaatcctaccata

SEQ ID NO: 20244 - DNA, 1756 bp, Zea Mays
atggccgccgccattgccgcggcgcttctccgccgctccacctcgcaccaccgtctcatattacctctcctctctcacctccaccgcacctttccgcaaccctcgtccccatggctcccaccccaacaccgcttcttctccaccggcgaatcagccggcgatcccacccagaaaccgacgtcttctcttgacccgaagaagctatggcgcgagctatccgcctcggaccccgccgtcggatcctgccgcctgccgaaggccacgtgggatgccattgtaggcctcgtccgcggcttcgccaaaagtccggccatatccgaccaggcgctcgcgctctacgtcccctcttctgccttcccatcctacgtccgccgcttccgcgcgttcatcctcccgcgactctcccgggagtccgcggcgcatctcctctcgctccccgctgaggacgcacacgagctcctcctcccggccttcgcagagttctgcttctccaacttcgcagacaagctgaggcagcacaggtcggtcatggccgcggccgacctcacggccccgcacacctggtaccccttcgcgcgcgctatgcgccgccgtatcgtgtaccactgcgggcccacgaacagcggcaagacgcacaacgcgctcacccgctttgccgcagccaagtctggggtctactgcagcccgctccgtctcctcgccatggagatcttcgacaaggtcaatgcgctcggtgtctactgcagcctgcgcactggacaagaggttaaggaagtgcctttctccaaccatgtcgcatgtaccattgaaatgatgtccactgaggagctctacgaagtcgccgtggttgatgagatacagatgatggctgaccctgtcaggggctttgcgtggtcgcgcgctgtgcttgggctcaaggcggatgagatacacctctgcggtgaccctagcgtgctcaagattgtccagaagatttgtgcagatactggggatgatttagtggtgcatcaatatgagagattcaagcctcttgttgttgaagcaaagacacttcttggggacctcaagaatatccgctctggtgactgcgttgttgctttctcacgcaaggagatattcgaggtgaagctggcaattgagaagtttacaaagcacaagtgttgtgttatctatggagctctgccaccagagacacgacgacaacaagcaaagttgttcaacgagcaggataatgagtatgatgtgcttatagcaagtgatgcagtcggtatggggctgaaccttaacattaggagagttgtgttctatagcttggcaaaatacaatggggaaaggatggttccagttcccgcttcgcaggtaaagcagattgctggtcgtgctggtcggaggggcagtgtctatccagatggactcacaacaactttcttgaaagatgatttagattatttgattcagtgcctgcagcagccatttgaggaggcacaaaaagctggacagtatcaagaaggttgctaatatgcttgagagggtgcaggggctatgcctcaaggatcgctataatttttgctttgctccggtaaatataagggatccaaaagccatgtaccatcttttaagatttgccaccaactattctcatagccgtcgtgttggcatcgcaatgggaataccaaggggttctgcaaaaaattttgttgagcttctggaccttgagacaaaacatcaggtcctatcaatacgaattcaagcttga

SEQ ID NO: 20245 - DNA, 1663 bp, Zea Mays
atggccgccgccattgccgcggcgcttctccgccgctccacctcgcaccaccgtctcatattacctctcctctctcacctccaccgcacctttccgcaaccctcgtccccatggctcccaccccaacaccgcttcttctccaccggcgaatcagccggcgatcccacccagaaaccgacgtcttctcttgacccgaagaagctatggcgcgagctatccgcctcggaccccgccgtcggatcctgccgcctgccgaaggccacgtgggatgccattgtaggcctcgtccgcggcttcgccaaaagtccggccatatccgaccaggcgctcgcgctctacgtcccctcttctgccttcccatcctacgtccgccgcttccgcgcgttcatcctcccgcgactctcccgggagtccgcggcgcatctcctctcgctccccgctgaggacgcacacgagctcctcctcccggccttcgcagagttctgcttctccaacttcgcagacaagctgaggcagcacaggtcggtcatggccgcggccgacctcacggccccgcacacctggtaccccttcgcgcgcgctatgcgccgccgtatcgtgtaccactgcgggcccacgaacagcggcaagacgcacaacgcgctcacccgctttgccgcagccaagtctggggtctactgcagcccgctccgtctcctcgccatggagatcttcgacaaggtcaatgcgctcggtgtctactgcagcctgcgcactggacaagagatgatggctgaccctgtcaggggctttgcgtggtcgcgcgctgtgcttgggctcaaggcggatgagatacacctctgcggtgaccctagcgtgctcaagattgtccagaagatttgtgcagatactggggatgatttagtggtgcatcaatatgagagattcaagcctcttgttgttgaagcaaagacacttcttggggacctcaagaatatccgctctggtgactgcgttgttgctttctcacgcaaggagatattcgaggtgaagctggcaattgagaagtttacaaagcacaagtgttgtgttatctatggagctctgccaccagagacacgacgacaacaagcaaagttgttcaacgagcaggataatgagtatgatgtgcttatagcaagtgatgcagtcggtatggggctgaaccttaacattaggagagttgtgttctatagcttggcaaaatacaatggggaaaggatggttccagttcccgcttcgcaggtaaagcagattgctggtcgtgctggtcggaggggcagtgtctatccagatggactcacaacaactttcttgaaagatgatttagattatttgattcagtgcctgcagcagccatttgaggaggcacaaaaagctgcaggacagtatcaagaaggttgctaatatgcttgagagggtgcaggggctatgcctcaaggatcgctataatttttgctttgctccggtaaatataagggatccaaaagccatgtaccatcttttaagatttgccaccaactattctcatagccgtcgtgttggcatcgcaatgggaataccaaggggttctgcaaaaaattttgttgagcttctggaccttgagacaaaacatcaggtcctatcaatacgaattcaagcttga

SEQ ID NO: 20246 - DNA, 865 bp, Zea Mays
ctgccacaaactgtcgaccggaggccggagcaaatgcgactagccgaagcggccgcggcggaacacctcggcgatcggcgtgcgtaccttccacgcgggagtgcgggaccgttgctgcgacgctgcgtcagatcgacgcgcggcgcgtccgccccccaccctctcgccgcctatataactcgcgcccgaatcggcggctccctcctttgccctctccgcgcaccttccaccacgctctggaagctgtttcccctttctcgagagtttagaaagctggtgcagagatggccggggagagctgcgtccccaagcccctgttcggcggcgccatcttcaccaccttccccgaccgcttccaggacgtgagcaacatccgggaggtccccgaccatcaggaggttctcgttgatccatcccgcgacgagagcctcattttcgagctacttgacctcaagggcgaggtggacgacgccggcagcgcgctctggttcctgcaagacatcgccaacgagcaagacgccggggacaacttggtggtagagcattctgggacacttgaactggctgctttgcatctcggagaagctcctgcagtggctgcaactgcagttggccagctggccgtctcaaaagggaggcagggcagagaagcacaaaacattgttcgaatttacctggcaaacatacgccttaagaatgcggcaaccgatgtacttatcaccgcatatgagccattgttgataaaggataaggcttgagttggtcattcctgtcaagggcgtattgatcaagggtaggcggccctcgactacggagttcgtagtctcctgtcgtgtcttccaggaccgaaggttatgccccttac

SEQ ID NO: 20247 - DNA, 1178 bp, Zea Mays
ctgccacaaactgtcgaccggaggccggagcaaatgcgactagccgaagcggccgcggcggaacacctcggcgatcggcgtgcgtaccttccacgcgggagtgcgggaccgttgctgcgacgctgcgtcagatcgacgcgcggcgcgtccgccccccaccctctcgccgcctatataactcgcgcccgaatcggcggctccctcctttgccctctccgcgcaccttccaccacgctctggaagctgtttcccctttctcgagagtttagaaagctggtgcagagatggccggggagagctgcgtccccaagcccctgttcggcggcgccatcttcaccaccttccccgaccgcttccaggacgtgagcaacatccgggaggtccccgaccatcaggaggttctcgttgatccatcccgcgacgagagcctcattttcgagctacttgacctcaagggcgaggtggacgacgccggcagcgcgctctggttcctgcaagacatcgccaacgagcaagacgccggggacaacttggtggtagagcattctgggacacttgaactggctgctttgcatctcggagaagctcctgcagtggctgcaactgcagttggccagctggccgtctcaaaagggaggcagggcagagaagcacaaaacattgttcgaatttacctggcaaacatacgccttaagaatgcggcaaccgatgtacttatcaccgcatatgagccattgttgataaactggtccggcaatacctgctgaacaagtagggtgcttgccaatgtctgaggtcttcaaacttgcagtgacgaatttcaatgtgcgtgattggaaccttttcgatggtggcccttgaaccagagtggataatctctccaaaatcagatgtagagcatctggttgacatacggaagactactacctgttttctagatttacaattcattgtcagaaattatgctatctgacttaatcttccaaatactcctattgaacttacctctggaacattagctgagtttgtcatgatagattctactagtggattgtacgcagatggtctgtgtcgcttcatcggtaaagcaaactctgctcgttcctgttgaacacaggccatttaaatttagaaattagaattgatgctacgaaaaatccaatagtagcatgctttca

SEQ ID NO: 20248 - DNA, 1137 bp, Zea Mays
ctgccacaaactgtcgaccggaggccggagcaaatgcgactagccgaagcggccgcggcggaacacctcggcgatcggcgtgcgtaccttccacgcgggagtgcgggaccgttgctgcgacgctgcgtcagatcgacgcgcggcgcgtccgccccccaccctctcgccgcctatataactcgcgcccgaatcggcggctccctcctttgccctctccgcgcaccttccaccacgctctggaagctgtttcccctttctcgagagtttagaaagctggtgcagagatggccggggagagctgcgtccccaagcccctgttcggcggcgccatcttcaccaccttccccgaccgcttccaggacgtgagcaacatccgggaggtccccgaccatcaggaggttctcgttgatccatcccgcgacgagagcctcattttcgagctacttgacctcaagggcgaggtggacgacgccggcagcgcgctctggttcctgcaagacatcgccaacgagcaagacgccggggacaacttggtggtagagcattctgggacacttgaactggctgctttgcatctcggagaagctcctgcagtggctgcaactgcagttggccagctggccgtctcaaaagggaggcagggcagagaagcacaaaacattgttcgaatttacctggcaaacatacgccttaagaatgcggcaaccgatgtacttatcaccgcatatgagccattgttgataaaccccctgagtgaaagtgctgcggcagttgcagctggtccggcaatacctgctgaacaagtagggtgcttgccaatgtctgaggtcttcaaacttgcagtgacgaatttcaatgtgcgtgattggaaccttttcgatggtggcccttgaaccagagtggataatctctccaaaatcagatgtagagcatctggttgacatacggaagactactacctgttttctagatttacaattcattgtcagaaattatgctatctgacttaatcttccaaatactcctattgaacttacctctggaacattagctgagtttgtcatgatagattctactagtggattgtacgcagatggtctgtgtcgcttcatcggtaaagcaaactctgctcgttcc

SEQ ID NO: 20249 - DNA, 2807 bp, Zea Mays
ttttgtgcgagccgtcaagggatttgtctctatcaccagcgcacggccgagaatacttcctcttcctccttcccacgatggccgccaccgccatggccgccgccgccgccgcctcgcgggccttcctgcgcccgcaccgttgcctcctcctcccacacacccatccgcttcgccgccgtctctccaccaacgctactgcttccgctcccgccgccaccgccgcgtcgcccggcgtcgtggacgtgctcatgaagcgaggactcgtcgaggccatcacctcggaggcgctcgccgcagcgcgtccaggggagctcaaggtttactgcggcttcgaccctaccgccgagagcctgcatctcggtaacctcctcggcctggtcgcgctctcctggttccgccgatgcggccacaccgccgtcgcgctcatcggtggcgccactggccgcgttggcgatccctcgggaaagagttccgagcgcccggagctcggcatagctgccgtcgagggcaactccgacgccattaagtccctcgtcgcccagattctcggccgcgtcccggagcctgcccaccgttcccactccggtcaaaaagagttgtctttggacaattcagcgaattcgtcacagacaatgggttcttttttgatcctcgacaactacgactggtggaaggacatcacgctgctggatttcctgagagaggtgggccgttttgcacgcgtgggtacaatgatcgccaaggagagcgtcaagaagcgtcttgcgtcggaagacgggatgagctacaccgagtttacctaccagctgctgcagggctacgacttcctttacatgttcaagaatatgggtgtcaatgtgcagatcgggggcagcgatcagtgggggaacatcacagcgggaactgagttgatcagaaaaatcttgcaggttgaaggggcgcatggactcacattcccacttctgctgaagagcgacggtaccaaatttggaaagacggaggatggggcaatctggctctcttcgaagatgctttctccttacaagttctatcagtacttctttgcggtgccagacatcgatgtcatcaggtttatgaagatcctgacgttcctgagcttggatgagattctggagctagaagactcgatgaagaagcctggctatgtgccaaacactgttcagaagaggcttgcagaagaggtgacgcgatttgttcatggcgaggagggattggaggaggcattgaaggcaaccgaggccttgagacctggtgctcagacacaattggatgcacaaacaattgaggggatagcagatgatgtgccttcatgctctttagcttatgatcaagtgttcaagtctccacttattgatttggctgtttccacaggtttgctcactagtaagtcagcagttaagcggcttattaagcaaggtggtctgtacttgaataacgtgaggattgatagtgaggataagctggttgaggaaggtgatatagttgatgggaaggtgctcttgttgtctgctggaaagaagaacaagatggttgtgaggatatcttgactactcttatttgttctttataacttattttagccattgaggagaaaagtaacggtgttgtgtcttcaaaactcaaatgagctgtctatgagcatacagattgttatattggagaggttgaacacacctttttttttgctctattaattttgttcatgagaactttttgtgtgctatctattggctttgagaatgacagctgttttctcatatcatgttatagtatcaatcctttagggctagtttggaagcaagggaaggcaaacccagggaggaaaaacctctcatgtataattaaatatcttaaggctagtttgggaaccctatttttctaagggattttatatttttacaggagaaaatgaactaatttcccttgaaaaaatggaaatcccttggaaaaatggggttcccaaactagcccttattcaaatattatctacagggatttctcaccctgggaaaagaggggggtcccaaagggatttgggtttcgaaactagcccttagaggatcttttaccgccatcaatatcatatcaggtgctgtttggttgggagtcagagggaacggggtcatcctctcatccccccatagtggaatatccctaagatatggagtgagcctatccctttgattcgagcggactgactcattcgccttcttctcgtgcgtgcatgcaggtgtggaggatgagcaagagtgcatgctccaagcacagatgttcaaacgagctttgggttcagcatagacacgcataggcaatgtgagctccagctttggcactggcacgcacaagcgtgagatgacctccggttacaatgagtggcccagtgtcaagggaacaaggtgcaagttgagacgcaggcgggcgagctccatctgcttgaactgtgagtgggttggtgagctctggctgagctgctgtgtcggtggggagcggcgctagtgaggggcgacggtgaggaggaacgaagaggagggtgtgtgcctgtgagtgcaaaggaagaggagggtgggcgtcagcaagggtcatagggcgagctccggtgagtgagaagaagcggtgtgtggcttcaacaagctcttggtgcaaggaagaagaaaagaggaggctgacatgtggacctcacatgctagatgcattgtcccaccttttgatgtacctgaaccaaatacggaacaaggatgggcctataggtgtacatttgtgctgtgcctaataggccggcccaaagc

SEQ ID NO: 20250 - DNA, 1249 bp, Zea Mays
tggggttcccaaactagcccttattcaaatattatctacagggatttctcaccctgggaaaagaggggggtcccaaagggatttgggtttcgaaactagcccttagaggatcttttaccgccatcaatatcatatcaggtgctgtttggttgggagtcagagggaacggggtcatcctctcatccccccatagtggaatatccctaagatatggagtgagcctatccctttgattcgagcggactgactcattcgccttcttctcgtgcgtgcatgcaggtgtggaggatgagcaagagtgcatgctccaagcacagatgttcaaacgagctttgggttcagcatagacacgcataggcaatgtgagctccagctttggcactggcacgcacaagcgtgagatgacctccggttacaatgagtggcccagtgtcaagggaacaaggtgcaagttgagacgcaggcgggcgagctccatctgcttgaactaagattgcttactgcttcggtgcttgctgattgacataatttataatttatttatacaggtgcagaaactggatgagatgggctaaacctttccctgaatctagctaacctgctgcggttgccttgttgtcaagtattcttggtggctatgtattgcaacaataatttaaattgatcattctgcagtgctgggcggggttgacagagagttagatgacgctgacgttgtcgtggtagacaagtgtgctactggtgaggggactgtgaagctcctggaggagctgagttggtgcatccagcttgccttagccaccccattgtcgacaactaggtactcaccctcagcacactggagcgtgagaccacatgctgacactcacttggaggactaagagatgaggttggccacaagaaacactgcatagccagaggtagaccgatgggtgtccgagtgctcatgtctagaggagtgctcgcatacggtcgttttggtagagcgggagtatttcaactatggtaaattttaatatttcaatatggagactccaagagccgttccgttcctcttttgtttgaagccaaacatccaaaaaataagaatgaaatagttacattctcttccattcaaccaaacacacccttaatctgacttaccactcgaatgaggtagcaattcattattaccatctaagccaatggctatggtaacatgcgaacaaatagtgacgagtaccaacaataataagcaacttcatatttg

SEQ ID NO: 20251 - DNA, 1316 bp, Zea Mays
cccttattcaaatattatctacagggatttctcaccctgggaaaagaggggggtcccaaagggatttgggtttcgaaactagcccttagaggatcttttaccgccatcaatatcatatcaggtgctgtttggttgggagtcagagggaacggggtcatcctctcatccccccatagtggaatatccctaagatatggagtgagcctatccctttgattcgagcggactgactcattcgccttcttctcgtgcgtgcatgcaggtgtggaggatgagcaagagtgcatgctccaagcacagatgttcaaacgagctttgggttcagcatagacacgcataggcaatgtgagctccagctttggcactggcacgcacaagcgtgagatgacctccggttacaatgagtggcccagtgtcaagggaacaaggtgcaagttgagacgcaggcgggcgagctccatctgcttgaactaagattgcttactgcttcggtgcttgctgattgacataatttataatttatttatacaggtgcagaaactggatgagatgggctaaacctttccctgaatctagctaacctgctgcggttgccttgtaaccttgctttgctgatttttatttttactttgacatttcttttgcaatttctgctcattcaaggatgttgtgtctcttttgcaggttgtcaagtattcttggtggctatgtattgcaacaataatttaaattgatcattctgtgctgggcggggttgacagagagttagatgacgctgacgttgtcgtggtagacaagtgtgctactggtgaggggactgtgaagctcctggaggagctgagttggtgcatccagcttgccttagccaccccattgtcgacaactaggtactcaccctcagcacactggagcgtgagaccacatgctgacactcacttggaggactaagagatgaggttggccacaagaaacactgcatagccagaggtagaccgatgggtgtccgagtgctcatgtctagaggagtgctcgcatacggtcgttttggtagagcgggagtatttcaactatggtaaattttaatatttcaatatggagactccaagagccgttccgttcctcttttgtttgaagccaaacatccaaaaaataagaatgaaatagttacattctcttccattcaaccaaacacacccttaatctgacttaccactcgaatgaggtagcaattcattattaccatctaagccaatggctatggtaacatgcgaacaaatagtgacgagtaccaacaataataagcaacttcatatttg

SEQ ID NO: 20252 - DNA, 2170 bp, Zea Mays
tttatactttttgttgatatattactgttgtatgtatatgagccggtctggcacattaaggtattttgggctatttgggccggcctggcacacataactaattgtgggccgtgccgtgggccgatgactgggcacacgtgctggcacggcacggcccataattagatatgtgcttttgtgggccgtgcctttgtgggccgtgcttttgtgggcctgtgccgtgccgggccaggccggcccacatgtacatgtatagatgggcccatctccctaacgcagacatgaaactggatcatcccatcttaaaaatcagggtcaaaactatcccatcccactatgtcccagatcaaacatatggttaatcagttttgggaagaggctaatggttggtttgttattggtgcacagaagattgcttactgcttcggtgcttgctgattgacataatttataatttatttatacaggtgattgttaagtgctttgacatgtcatgacactaatttcctattgcaagtacaaagtatgcatatcgtcaaaacattgatcatgaataaatgcaaaacattttgcttaggttttgatttaatactggttcatgtcaaagtgtggtgaaacttatctcgtgttagtatactatagtggcgttgttcaattttttaatttcaaatcgggtaaaccatacatgtactgttgacatgctaaattgctaatgttcatatataaggagttcaggtggcatttcttttttgatctcataactcagtggaaagttgcatgccagtatcacatttcagaacttcactgatcatcagtgtttgaccatataaagttgtcactttattctctttccttatgttatcaataaattatataaatgattgatcagattatgttcagtttttgaaccacaatgatgttgagtttttttagtactccctccgtcccaaaatagtagggggcaattccttgtgtgccataggaaattatactcgttccttgtgtgccactggccccatatatcatacacacacaaaaaattccatatatgtcactcaatagcacacaaggaatgagtataaaattcaatggtacatagggaaactttccaaatagtagttgttttagctcttaatttttatgtctatattcaaatggaatctagacatataccaaacatatacattaagtgttgcatgaacccactaatttgctaaaacgaattttattttgagacagagggagtattactaaatgtacatatagttccatgtttgcatttggtttagtggcatctttttttctgccaggttatttgacataataatctttttatatgctgggttcgatgtgtacatgaaccacaaattagtagtttagtacagtgaaccccctcttatcattccattgcatatataacatgtgtatgtatcggtgaatggtagtcaccctttgtctgtgcttgagtacaggtgcagaaactggatgagatgggctaaacctttccctgaatctagctaacctgctgcggttgccttgttgtcaagtattcttggtggctatgtattgcaacaataatttaaattgatcattctgtgctgggcggggttgacagagagttagatgacgctgacgttgtcgtggtagacaagtgtgctactggtgaggggactgtgaagctcctggaggagctgagttggtgcatccagcttgccttagccaccccattgtcgacaactaggtactcaccctcagcacactggagcgtgagaccacatgctgacactcacttggaggactaagagatgaggttggccacaagaaacactgcatagccagaggtagaccgatgggtgtccgagtgctcatgtctagaggagtgctcgcatacggtcgttttggtagagcgggagtatttcaactatggtaaattttaatatttcaatatggagactccaagagccgttccgttcctcttttgtttgaagccaaacatccaaaaaataagaatgaaatagttacattctcttccattcaaccaaacacacccttaatctgacttaccactcgaatgaggtagcaattcattattaccatctaagccaatggctatggtaacatgcgaacaaatagtgacgagtaccaacaataataagcaacttcatatttg

SEQ ID NO: 20253 - DNA, 1024 bp, Zea Mays
tggcacggcacggcccataattagatatgtgcttttgtgggccgtgcctttgtgggccgtgcttttgtgggcctgtgccgtgccgggccaggccggcccacatgtacatgtatagatgggcccatctccctaacgcagacatgaaactggatcatcccatcttaaaaatcagggtcaaaactatcccatcccactatgtcccagatcaaacatatggttaatcagttttgggaagaggctaatggttggtttgttattggtgcacagaagattgcttactgcttcggtgcttgctgattgacataatttataatttatttatacaggtgcagaaactggatgagatgggctaaacctttccctgaatctagctaacctgctgcggttgccttgttgtcaagtattcttggtggctatgtattgcaacaataatttaaattgatcattctgtgctgggcggggttgacagagagttagatgacgctgacgttgtcgtggtagacaagtgtgctactggtgaggggactgtgaagctcctggaggagctgagttggtgcatccagcttgccttagccaccccattgtcgacaactaggtactcaccctcagcacactggagcgtgagaccacatgctgacactcacttggaggactaagagatgaggttggccacaagaaacactgcatagccagaggtagaccgatgggtgtccgagtgctcatgtctagaggagtgctcgcatacggtcgttttggtagagcgggagtatttcaactatggtaaattttaatatttcaatatggagactccaagagccgttccgttcctcttttgtttgaagccaaacatccaaaaaataagaatgaaatagttacattctcttccattcaaccaaacacacccttaatctgacttaccactcgaatgaggtagcaattcattattaccatctaagccaatggctatggtaacatgcgaacaaatagtgacgagtaccaacaataataagcaacttcatatttg

SEQ ID NO: 20254 - DNA, 1141 bp, Zea Mays
caaaacccagcgggtttgtacccgttgccatctctacgccttgtgctgaacccagaggcagcgagagcgagtgcgagacaccggatcccgtccgcccccggaccaagaatcccaacctcacagcgatggcagcatcccgcagcgaggaacgtgatcagaatcagccagtggtgcttgtgacggggtgctcggagggcggcatcggccacgcgatggcacgcgccttcgctgcggccgggtgcgccgtcgtggccacggcgcggtcacgcggttccatgcgcggtctcgacggcgacccgcggttcctgctgctggagctcgacgtgcgctccgacgagagcgcgcgcgccgccgtggcggatgcgctgcgggagcacggccgcatcgacgtgctcgtcaacaacgctggggttcacctcgtcgcaccactcgccgaggtgcaatgaggttaattcaatctgttattcctcacatgatggaaagaaggaaaggaacaattgtgaatgttggaagtattaccgctctggcacctggaccatgggctggtgtgtattcagcatccaaagctgctcttcatgcattgagtgactcgttaagggttgaactaagaagcttcggcataaacgtgatgaccgtcgccccaggagggacgaggtcgaatcttgggaattcttctgcagccaagtatgatcagatgcacgagtggaagtactacaagaaatacgaggaagggctccgagccaggactggcatttcccagggccccaggtccactccagcagaagagcttgcaaaggcggtggttgcatcggttctaaagaagaaccctccagcttggttcgcttacggccagtactctgctattctgtcgattttgtattatgcaccgctatggttcagagattgcctctataagtttgtcatgaaatgttagtccctggaagaataatggctgtatggaccaaagagagagctggacaggcccagttcaattcatttcattgtactgacagcctgttacgtcgtactcctatattgtatatatagaactatgctctgtacctgttggcaacttggcatactacagcttctttcagggggcagattcaggttcaaaaagcttgatttcctcttcactaaa

SEQ ID NO: 20255 - DNA, 3184 bp, Zea Mays
gagcacgtcatctctctagaatatttctcaacgccttctttcttattctttatcctatccaccgtcgttctccttcattctcatttcttgcacactgacaccagcccctcctgctggctgccccttgctccctcccatggggctccccctggatccctctccatggcgtggatcagccccagcttcccatggatgtcgccctcctctccctgatggctggcgtctccactccctgcagcaaggacgctttcctctgctccctgctcttcctcccatggccccccatgtagcagtaaccatggaaacccctctgggacgcgccctcagcatgctcaatgatatgctgcagcgagctccaccttgatctatgccaacccggccgcaaatcatcgaaccttggggaacccttgggaccgatggtgaagaggtgaagcccatccaacgtttgttaaatgttcgatagaaggttcgaaccaaaagtcatcgtcgatcttgtgatttagagtttggtttagttattgtgatctccttcgcaatccatgttaattaacttgtatggtgggatggaatagatgtattggttgtgatggtcatcttgtttatgttcatgttgttatggaggtgtcagataattgatgaaatgtcgtagttgggtgcaaaaacatgattgtggtagtttgacctttgtgatttgtattcttgcaaagggacttgactttgaaatattgcaaatatgaataaggtattcctgacatgattttagccatctcgtagttgttactatattgcatggaggagctgtagctatagtttaaaatttaagttaatcaacttggtaggttgtggggttgtaatttcgatacttgctcagttggtctcatcctggtagcaatagaaacactaatgagatgtttatgatctcaataggtctcatttgactatgttttcctttctttgttgtatagttcttttttatctgagaatatcatatgttcatgatctgcagctgagcaagtttgtttgttcctctatgttttaacgatacaagatatattaataatctgctagcagacaacctggtgttgatagtgtcgggtttatattcatgcagtgtagttcatatacgtgttgatgtgtggtccatggtagtgttgggcaatctggatgcaagctggaatgtgattgtttctgtttgagtaattctctcatatctccaaattgctatgttcattcatcttgttgtgatggtggtttggttagattaatttcacactagaatagatgttgcctgccttacatagtggtctaggcattgagggtgacaatagtatcttaacatctaatatgtatgatgttcatattgcattatctacacacactatacgttagctgttttgtagctttgttcttcctgaaacttcctatagcactgtccttctcatggcatatttagtgcttgttatttggactgcatgtccagttttagttatgcaggtagtttagtgaagtaaattatgttttctatagaagttatatatatataacttgtagctaatctatttatcttgcttgtgtaaaaatttcatggccataggtttagtaatttgaaagttatgcttcccacaagtccaaaatctgaatctgttcgaattctatacagatttcaaaaatgaccttgtttgcttatgttaaactgagaattagtcctttagtaattataggagaattgtagtacttttcttaagctttccaaaagtcttaaatcaccatttttggtggtctagagaccaagttacagctgtttgaactatagagtctggatctgtccaaatctggacagaatagactgtttgtattaattgacctcaatatacattgaattaacctgaggtgtttataaatgaactgtagaaaattctattaggtttctaaaaagtctaggatcacctgatttggatgtatgagactgcagttatggatttttgaactgagtagtcgaattctgtccaaatctggaaagaatttacgattagcactgtttgacatttataaatgtcgaatcttgttctgatggtaataccaaagatgtagaggactttataagctttccaaaaagtcctagtttactatttttggatgaatatcttgtgagttatgagtaaaacaagtgactactgtgctgctgtccaaaaatctgcacgtgttaaattgattgcttggagtcattcttatttggctaggtaggattagtccactcttgatccttgattgatgacaacttcttgcatatgaagtgtttatcaaaatgccttattatattggagtaattcatttccttattaatgtttgctctagacttagtaattgggaagaaagttaatgctttgatgtgtgtatttgagttagtgactatttaggccttgtgtgagtatggtgaacaaaataatgcgaaaaaggttagtagacatatatatctagtattattgagttggttcgatcgtcttgtgtttataagtgtgttataagtgcctgatacatgagttgggtctatttaagtggaaaagggtgtgcttgtggtacttagaggtagatcaacatctagtacttgtttttgagtattgcaagccatcgatgttatattctaagtatgttagaacttgtttagttaatgttgcttaatatttagtgtaggtccatttgattaaaaagtcatgcttgaggtagagtgaagtgtatcccatctttagcttctttattaaggattgtcacttaagctagcatgtattttaaaacttataattgttttatacattcaaattgtaatatttttgaatcaatttcttttgtaatcaactccgatgatatatattctaatcttgttataacttgtaaatgttgtaacttgtaaccattttgtaataaagaatttctgctgcaaatgttggtgtgtgatttgtgtttacttaatcctgcggcgatcttggcaatcattggtttatccgaggtccttgggacactcggacagatcctgttaagttgtttggtacacatgcatagccgtctgaggtcgttgggacaaaggcaggtgcatgtgggcttgataacttaggaggttctgcgacattatacactttgtgttattgcatatgtatgatacggttgtgatgttgtaataagtcttgtg

SEQ ID NO: 20256 - DNA, 1659 bp, Zea Mays
aaataaaactgaaatatcgaggaagggacgggctcggcctctctgcccgaattcccgattgcgcctcctccgactccgagatcccgtcagccatggacgggctcctgtcgaagctccgcagcctggacgcgtaccccaaggtgaacgaggacttctacagccgcaccctctccggcggcatcatcacgctcgtctcctctgctgtcatgctcctcctcttcgtctccgagctccgattatatctccatgcagttactgagacaacactaagggttgatacttcaaggggagaaacacttcgcataaattttgatgtcacctttccagcccttcaatgttctataattagcctggatgcaatggacatcagtggacaggagcacctagatgtgaaacatgatgtattcaagcagcgaattgatgcccatggcaatgttattgcgactaggcaagatgtagttggtgggatgaagatggaggcacctctacaacatcatggtggaaggcttgaacacaatgaaacctattgtggctcttgttatggtgcacaagaatctgatgatcaatgttgtaacacatgtgaagatgttcgtgaagcctacaggaaaaaagggtggggtgtatcgaatccagatttgcttgaccagtgcaaaagggagggctttcttcaaagtataaaggacgaagaaggcgaaggatgcaatatttatggttttattgaagttaataaggttgctgggaatttccattttgctccagggaaaagtttccagcagtcaaatgtgcacgttcatgacttgctcccgttccagaaggacagcttcaatgtcagtcataagataaacagactaagttttggagaatactttccaggtgttgttaatccacttgatggggcaaattgggtgcagcattcatcatatggaatgtatcaatacttcatcaagttctctgtaacggaacattttagaagtggtgagagtggtcggatgcaggcccttcctggtgtgttcttcttttatgacctttctccaatcaaggtcacattcacggaacaacatgtgtcatttttacactttttaactaatgtttgcgctattgttggaggtgtgttcaccgtttctggaatcatagattcgtttgtataccatagtcaaagagcaatcaagaagaagatggaaataggcaaattcaactgatgttgccttactattgctgcaattaagtagctcctgttgcagctccaagatccagaaatgcaatgtggcttttcctcgaactcttggcacagttgcgtagttgacaaacaattgctcatcagataactcttgatgtgcttgccaacttgcttccggcaaagataccagcgagcaagatggtcatcttgtatacttcgatgttacatttttgtacgcttagtctgacaagaaaacattttacttcctcgagctgcaggtgttcgtgtactgttgtaaatttgtggtagagggagcctatctgtagtttttttttacaattatgtgtttgtaccagttttttctgagacatttgtagcttagacaggtaaagattgtttgaaatacatataaaccatttttgaaggaaagcaagcttatcgttgtaacccctggattctcattctgaactcataccgagtta

SEQ ID NO: 20257 - DNA, 1533 bp, Zea Mays
aaataaaactgaaatatcgaggaagggacgggctcggcctctctgcccgaattcccgattgcgcctcctccgactccgagatcccgtcagccatggacgggctcctgtcgaagctccgcagcctggacgcgtaccccaaggtgaacgaggacttctacagccgcaccctctccggcggcatcatcacgctcgtctcctctgctgtcatgctcctcctcttcgtctccgagctccgattatatctccatgcagttactgagacaacactaagggttgatacttcaaggggagaaacacttcgcataaattttgatgtcacctttccagcccttcaatgttctataattagcctggatgcaatggacatcagtggacaggagcacctagatgtgaaacatgatgtattcaagcagcgaattgatgcccatggcaatgttattgcgactaggcaagatgtagttggtgggatgaagatggaggcacctctacaacatcatggtggaaggcttgaacacaatgaaacctattgtggctcttgttatggtgcacaagaatctgatgatcaatgttgtaacacatgtgaagatgttcgtgaagcctacaggaaaaaagggtggggtgtatcgaatccagatttgcttgaccaggtcagtcataagataaacagactaagttttggagaatactttccaggtgttgttaatccacttgatggggcaaattgggtgcagcattcatcatatggaatgtatcaatacttcatcaaggttgttcctacagtctacacggacataaatgaacacattattctctctaatcagttctctgtaacggaacattttagaagtggtgagagtggtcggatgcaggcccttcctggtgtgttcttcttttatgacctttctccaatcaaggtcacattcacggaacaacatgtgtcatttttacactttttaactaatgtttgcgctattgttggaggtgtgttcaccgtttctggaatcatagattcgtttgtataccatagtcaaagagcaatcaagaagaagatggaaataggcaaattcaactgatgttgccttactattgctgcaattaagtagctcctgttgcagctccaagatccagaaatgcaatgtggcttttcctcgaactcttggcacagttgcgtagttgacaaacaattgctcatcagataactcttgatgtgcttgccaacttgcttccggcaaagataccagcgagcaagatggtcatcttgtatacttcgatgttacatttttgtacgcttagtctgacaagaaaacattttacttcctcgagctgcaggtgttcgtgtactgttgtaaatttgtggtagagggagcctatctgtagtttttttttacaattatgtgtttgtaccagttttttctgagacatttgtagcttagacaggtaaagattgtttgaaatacatataaaccatttttgaaggaaagcaagcttatcgttgtaacccctggattctcattctgaactcataccgagtta

SEQ ID NO: 20258 - DNA, 1705 bp, Zea Mays
aaataaaactgaaatatcgaggaagggacgggctcggcctctctgcccgaattcccgattgcgcctcctccgactccgagatcccgtcagccatggacgggctcctgtcgaagctccgcagcctggacgcgtaccccaaggtgaacgaggacttctacagccgcaccctctccggcggcatcatcacgctcgtctcctctgctgtcatgctcctcctcttcgtctccgagctccgattatatctccatgcagttactgagacaacactaagggttgatacttcaaggggagaaacacttcgcataaattttgatgtcacctttccagcccttcaatgttctataattagcctggatgcaatggacatcagtggacaggagcacctagatgtgaaacatgatgtattcaagcagcgaattgatgcccatggcaatgttattgcgactaggcaagatgtagttggtgggatgaagatggaggcacctctacaacatcatggtggaaggcttgaacacaatgaaacctattgtggctcttgttatggtgcacaagaatctgatgatcaatgttgtaacacatgtgaagatgttcgtgaagcctacaggaaaaaagggtggggtgtatcgaatccagatttgcttgaccagggagggctttcttcaaagtataaaggacgaagaaggcgaaggatgcaatatttatggttttattgaagttaataaggttgctgggaatttccattttgctccagggaaaagtttccagcagtcaaatgtgcacgttcatgacttgctcccgttccagaaggacagcttcaatgtcagtcataagataaacagactaagttttggagaatactttccaggtgttgttaatccacttgatggggcaaattgggtgcagcattcatcatatggaatgtatcaatacttcatcaaggttgttcctacagtctacacggacataaatgaacacattattctctctaatcagttctctgtaacggaacattttagaagtggtgagagtggtcggatgcaggcccttcctggtgtgttcttcttttatgacctttctccaatcaaggtcacattcacggaacaacatgtgtcatttttacactttttaactaatgtttgcgctattgttggaggtgtgttcaccgtttctggaatcatagattcgtttgtataccatagtcaaagagcaatcaagaagaagatggaaataggcaaattcaactgatgttgccttactattgctgcaattaagtagctcctgttgcagctccaagatccagaaatgcaatgtggcttttcctcgaactcttggcacagttgcgtagttgacaaacaattgctcatcagataactcttgatgtgcttgccaacttgcttccggcaaagataccagcgagcaagatggtcatcttgtatacttcgatgttacatttttgtacgcttagtctgacaagaaaacattttacttcctcgagctgcaggtgttcgtgtactgttgtaaatttgtggtagagggagcctatctgtagtttttttttacaattatgtgtttgtaccagttttttctgagacatttgtagcttagacaggtaaagattgtttgaaatacatataaaccatttttgaaggaaagcaagcttatcgttgtaacccctggattctcattctgaactcataccgagtta

SEQ ID NO: 20259 - DNA, 1613 bp, Zea Mays
tttccgcgaatcggcaccttctccttttttttaagctgaatccccatcttcgacttccgcacctcgcctgaatcgctcattcgctccccaccccaacgctccgtccccgcggcccaccaaccgccgccgccgccgccacagccatgcacggccgccggcacctcgcggcgtcccttacccgggccctgatccaggcgccatcccgctccatctcctccaccccgtctctcctccaaaccctcgacccctcagtgccgtcgcctcccgccgcgggagcagggcggctcgcggagctgcggcggcggctgcaggcggacgcgccgtcgctgggtgacttcacgtactcggtggaggtggggacgcggcagcgcccgctgcccaagcccaagtggatgaaggagaccgtgcctggcggcgccaagtacgcggccatcaaggccaagctgcgggagctgaagctgcacaccgtctgcgaggaggcccggtgccccaacctcggcgagtgctggtccggcggcgagactggcaccgccaccgccacaattatgatccttggggacacctgcacgcgcggatgcaggttctgtaacgtcaagacatctcgaacaccccctccaccggatcctgatgagccttccaatgttgctcaagctattgcctcatggggccttgaatatatagtaatcacgagtgttgaccgggatgatctacctgatcagggcagtggtcactttgctgaaacagtacagaagctaaaggctttgaagccagaaatgcttattgaagcgcttgtacctgatttccgtggagatccaagctgcgtagagaaggttgcgacttctggattgcatgtttttgcgcacaacattgaaactgtggaagagcttcaaaggaatgtcagagactaccgtgcaaatttcaagcaatctatagatgttctggaaatggcgaaagagtatgctcctcccggtacccttacaaagacatcgataatgctgggatgcggggagactccagatcaggttattaggaccatggaaaaagtgagggctgctgatgttgatgtcataacatttggccagtacatgaggccatcaaaacgtcacatgcctgtttctgagtatgttacgcctgaagcttttgagaagtatcgggcccttggtgtcgaaatggggttccgctacgttgcgtctgggccaatggtccggtcttcgtacaaggcaggtgaattctacatcaaggctatgatcgaagcggagcgagccaagggaaccgctgcagactcaagtgcataaccgagatagcacctcccggccccacccaccccttgacttgttccggcgccttcgtgccttggttcatcctccctctcaagtccaagaaaaaaaaagagatccaatctgccgcagatctgaatcagatatccagatcacacacacacacaagaggcagacggagcttgcaggtagtgcggaaatcctggagcactccgcgcgtggctgggacggagtcaatttgaccatcttttgcgcggtcaaccgactcgacatggcaaaagcaggaacgctgctgccctgccactggctcgtacgtgaacgatctgggattatggc

SEQ ID NO: 20260 - DNA, 1841 bp, Zea Mays
tttccgcgaatcggcaccttctccttttttttaagctgaatccccatcttcgacttccgcacctcgcctgaatcgctcattcgctccccaccccaacgctccgtccccgcggcccaccaaccgccgccgccgccgccacagccatgcacggccgccggcacctcgcggcgtcccttacccgggccctgatccaggcgccatcccgctccatctcctccaccccgtctctcctccaaaccctcgacccctcagtgccgtcgcctcccgccgcgggagcagggcggctcgcggagctgcggcggcggctgcaggcggacgcgccgtcgctgggtgacttcacgtactcggtggaggtggggacgcggcagcgcccgctgcccaagcccaagtggatgaaggagaccgtgcctggcggcgccaagtacgcggccatcaaggccaagctgcgggagctgaagctgcacaccgtctgcgaggaggcccggtgccccaacctcggcgagtgctggtccggcggcgagactggcaccgccaccgccacaattatgatccttggggacacctgcacgcgcggatgcagaaaatactacattcgcaggttctgtaacgtcaagacatctcgaacaccccctccaccggatcctgatgagccttccaatgttgctcaagctattgcctcatggggccttgaatatatagtaatcacgagtgttgaccgggatgatctacctgatcagggcagtggtcactttgctgaaacagtacagaagctaaaggctttgaagccagaaatgcttattgaagcgcttgtacctgatttccgtggagatccaagctgcgtagagaaggttgcgacttctggattgcatgtttttgcgcacaacattgaaactgtggaagagcttcaaaggaatgtcagagactaccgtgcaaatttcaagcaatctatagatgttctggaaatggcgaaagagtatgctcctcccggtacccttacaaagacatcgataatgctgggatgcggggagactccagatcaggttattaggaccatggaaaaagtgagggctgctgatgttgatgtcataacatttggccagtacatgaggccatcaaaacgtcacatgcctgtttctgagtatgttacgcctgaagcttttgagaagtatcgggcccttggtgtcgaaatggggttccgctacgttgcgtctgggccaatggtccggtcttcgtacaaggcaggtgaattctacatcaaggctatgatcgaagcggagcgagccaagggaaccgctgcagactcaagtgcataaccgagatagcacctcccggccccacccaccccttgacttggttgtgctgcaaataagctcctcactgcttttgtagtcagagagacatgtcgattttttacgtcataattgtaaccacacattcacttctattttttttggtcaattgaacagttccggcgccttcgtgccttggttcatcctccctctcaagtccaagaaaaaaaaagaggtatttgttgtagcagtatatttaggcgaccgcttcctttgtatctcgctcgtacagaacatgaatacagggcgtggggtttctgtgccgttggtagatccaatctgccgcagatctgaatcagatatccagatcacacacacacacaagaggcagacggagcttgcaggtagtgcggaaatcctggagcactccgcgcgtggctgggacggagtcaatttgaccatcttttgcgcggtcaaccgactcgacatggcaaaagcaggaacgctgctgccctgccactggctcgtacgtgaacgatctgggattatggc

SEQ ID NO: 20261 - DNA, 1368 bp, Zea Mays
accagtacagccagtggcaggcagcggtgtcaccggcaaaaaaattcgaaacgagcggtgtctgcctatcactgccatttcgctcgcgaagaaatcgcgaggggaagcgtgccgagctgagcaggcaggcggtagtggccgagcgaaagcatccccgatctcaacgtctcgtagtcgtagctgctgcctctcactcagggcaatggagagggcggtgccggttcggaagccgcacaccagcacggccgaccttctctcctggtcggccacggcccctgacgcatctgcctcgccggccgcgtcctcccgccccagcctcaagccggccgccgggattacgcctgcgatgttcggcgcgccggtcaccgagcaggaggccgaggatctgagcaagagtgaaaggaaattttgctccggatcgaagttgaaagagatgagtgggagtgggattttcgctgagaagagtgaaaatggtgactcagaggcttcaaatcctgataacaagacttccttgaggatgtaccagcaaactgtgactggaataagccagatttcatttagtgctgatggaagtgtttcaccgaagaagccgtcgtcaatacctgaggtggctaagcagcgagagcttagtggtaccctggaagatgctgatgctaaaatcaataagcagctttctgaagccaagaccaaggagcttagtgggagtgacatctttggtccgcctcctgagattcctgccaggccattggctgctcgtaacatggagctacaaggaaatgtcgatttttcacttccacagcgaagcgtccacacatcagttaaagtatcaaatcctgctggaggtccgagcaacatctcattcagtgaagagcccgtagtgaagacagcaaagaaaatccacaaccagaagttccaggagctgacaggtaacaacatcttcgccgatggaacgccagctccccgagaatacctcggcggcatccggaagccccctggtggcgagagcagcatcgcgctgatctgattgtcctggactgctttaattcggaccggctgtagctcccatcgccactaaagctcgcagagagtgcatttctcgacctctcgattctccatccgtgttgggatcataatttatgttgggtatcgttagtctaatataatgtagagtcagcagaatctgactcgtatcgtctgatacgctggtgtgtgatctcgcatcttttattgttgcgacattattatgttatatatttgtacacccgaaccgaaacttacgcaataattaaattttggactcattttcagggattatggcatcataggatgttttacttgtgctgttgtttgacgcaaaaggtccatact

SEQ ID NO: 20262 - DNA, 1422 bp, Zea Mays
accagtacagccagtggcaggcagcggtgtcaccggcaaaaaaattcgaaacgagcggtgtctgcctatcactgccatttcgctcgcgaagaaatcgcgaggggaagcgtgccgagctgagcaggcaggcggtagtggccgagcgaaagcatccccgatctcaacgtctcgtagtcgtagctgctgcctctcactcagggcaatggagagggcggtgccggttcggaagccgcacaccagcacggccgaccttctctcctggtcggccacggcccctgacgcatctgcctcgccggccgcgtcctcccgccccagcctcaagccggccgccgggattacgcctgcgatgttcggcgcgccggtcaccgagcaggaggccgaggatctgagcaagagtgaaaggaaattttgctccggatcgaagttgaaagagatgagtgggagtgggattttcgctgagaagagtgaaaatggtgactcagaggcttcaaatcctgataacaagacttccttgaggatgtaccagatttcatttagtgctgatggaagtgtttcaccgaagaagccgtcgtcaatacctgaggtggctaagcagcgagagcttagtggtaccctggaagatgctgatgctaaaatcaataagcagctttctgaagccaagaccaaggagcttagtgggagtgacatctttggtccgcctcctgagattcctgccaggccattggctgctcgtaacatggagctacaaggaaatgtcgatttttcacttccacagcgaagcgtccacacatcagttaaagtatcaaatcctgctggaggtccgagcaacatctcattcagtgaagagcccgtagtgaagacagcaaagaaaatccacaaccagaagttccaggagctgacaggtaacaacatcttcaaggaggacgtcccttcctcagccgagaagtctctgagctctgcgaagctgaaggagatgagtggcagtgacatcttcgccgatggaacgccagctccccgagaatacctcggcggcatccggaagccccctggtggcgagagcagcatcgcgctgatctgattgtcctggactgctttaattcggaccggctgtagctcccatcgccactaaagctcgcagagagtgcatttctcgacctctcgattctccatccgtgttgggatcataatttatgttgggtatcgttagtctaatataatgtagagtcagcagaatctgactcgtatcgtctgatacgctggtgtgtgatctcgcatcttttattgttgcgacattattatgttatatatttgtacacccgaaccgaaacttacgcaataattaaattttggactcattttcagggattatggcatcataggatgttttacttgtgctgttgtttgacgcaaaaggtccatact

SEQ ID NO: 20263 - DNA, 1075 bp, Zea Mays
aatagctggagatgctctagtatattgaaaggaaattttgctccggatcgaagttgaaagagatgagtgggagtgggattttcgctgagaagagtgaaaatggtgactcagaggcttcaaatcctgataacaagacttccttgaggatgtaccagcaaactgtgactggaataagccagatttcatttagtgctgatggaagtgtttcaccgaagaagccgtcgtcaatacctgaggtggctaagcagcgagagcttagtggtaccctggaagatgctgatgctaaaatcaataagcagctttctgaagccaagaccaaggagcttagtgggagtgacatctttggtccgcctcctgagattcctgccaggccattggctgctcgtaacatggagctacaaggaaatgtcgatttttcacttccacagcgaagcgtccacacatcagttaaagtatcaaatcctgctggaggtccgagcaacatctcattcagtgaagagcccgtagtgaagacagcaaagaaaatccacaaccagaagttccaggagctgacaggtaacaacatcttcaaggaggacgtcccttcctcagccgagaagtctctgagctctgcgaagctgaaggagatgagtggcagtgacatcttcgccgatggaacgccagctccccgagaatacctcggcggcatccggaagccccctggtggcgagagcagcatcgcgctgatctgattgtcctggactgctttaattcggaccggctgtagctcccatcgccactaaagctcgcagagagtgcatttctcgacctctcgattctccatccgtgttgggatcataatttatgttgggtatcgttagtctaatataatgtagagtcagcagaatctgactcgtatcgtctgatacgctggtgtgtgatctcgcatcttttattgttgcgacattattatgttatatatttgtacacccgaaccgaaacttacgcaataattaaattttggactcattttcagggattatggcatcataggatgttttacttgtgctgttgtttgacgcaaaaggtccatact

SEQ ID NO: 20264 - DNA, 1044 bp, Zea Mays
gtttggtacagtgattcttagagaagttgcacaaatttaaactggtacacatcattttcccaactattcccactattggggtttggtaatctgcctcagctggtgaaggtggaggaaatatcacaaaccattgattctgagaacttcacagtgcaaaactgtatcaagttttcaggacctttggctacaacctcagttgccactaatgcaaaatttgaaattagaagccccaagcgtgtgcagatcaaatttgatgaagggattgttggtacaccacagttgaccgactccattgtgctaccagagaagtttgagttatttggacagaacatcgacctgagtccactgaaaggcatattttcttccatcgaaaatgcagcatcctcggttgcaaagaccatatctgagcagcctccgctcaaaataccgatcaggacaaacaatgctgaatcgtggttgcttacgacataccttgacgaagagctcaggatctccagaggcgatggcagcagcatctttgtgctgttcaaggagggaagtactcttctatactgagatccaaatcccgagtccatgatcgttgaagctgaaccgtgaagtagttatactgcttatgcttttctttcttatagtaatatgctccgtctcaaaataagtcaatttctagaatcacttaaagtcaaattatcttaagtttgaccaattttataggaaaggcaccatcgtctatgtctctatgacaccaaatgagtacattatgaaaaatattttatggtgcattagtgacactaattcagtgccatgctctttttatgaatttggtcaaacttaaaaatagtttgatttaagataactctgagaaattgatttattttgggacagagagaatgtttctgggttgtcttgtaaatacagttcttgtcattagagtatatgatgactaggaccggtttaatccgaattatataaactctctatatatcagcgaaccccttttttatagttaactgatcgctcgtacttttaacttttttagctagcggg

SEQ ID NO: 20265 - DNA, 3371 bp, Zea Mays
gatcagaataagtgggagctcgaacacaaacagcaagaaccaccaagcgaccaagcctgcaagtcaccaagggagcccgatctgagtcaagcgagtcttcccgtttcatcgcctggaaaaaggcgagaaaccccaaagcgaaggaacagcagcgcgagtgctagcagcagcagcgattccttcgccataccgttcgctgcgctcgctcactcggatcgaaaccccctagggttcgcatcgtcctcccgccaactcctatccctcccctctccctccgccgcgcgcgcgcgtggagctaccaaaccctaggacggcaaatccggtgcgatcgcccacggtggaggcctctcggccgccgagaggagccgctcggggctcggatcagggttccggtacttcgccggtgccgcctctgggtggtgggaccggtggatggtcatgggagccagcggctccaagcttgagaaggccctcggagaccagttcccggaaggccagcgctacttcggcctcgagaacttcggcaacacctgctactgcaacagtgtccttcagaaatctggccaaacagcaatatcgtgcatagggagcagcactgctagaccacaacactatcgggatgagaagttgcactgtcaggctgagaagtggcaccgtcgtgctgctccgagagatttcagatttggcttccttcagatatttgggttttgatgtcttagaggtttacgtgaagttttggaagataagccaagattgtccaaagcaatatttttattggctctcattcatcccctttggtaacctaatctaatgattccaatatagttagaaaatcagcttatggctatatatattctacatattactattgtattgatcattattgtcattcactctactcccatttacctacaaaaaaggaaattttaatctagctgtagcttggacgaacaaaattgttggtgataagatctccactcaaaggtccgaattgatgaaatccatgtttaggtagttttgtaggatatggttgtcagccaaagccaaaggaaaaacactttgaagagcttagaagcatacaaacaagccaaaaataaatgaagacgaagatacgaaaagcctaagttttgttatataatgtagatatttatgaactttaacagtgttttgttaaaatatttataaattttatcagggtcaactaacctcgataaatacccctaaattagctcctggtgatgggtccttagcggaatcaaaggttgagatatctccaccataacgaatctttgtcaacgccctagtgtacaagctttacacctagtcagcgggcgacactgaatgaccctcatcttttttctttactttggtcaacttgattttctacgcctctttgtgtttcttagccaactcatccaccttcgacaaggaaaatataaggactcaatactagaagaataatgcaaaaataaatgaaaggtgaataaccaacttgttggggccttggtcttttaaaggtccttaaaaacacgtttaaccattggttgccaagtattataggagcttcggcactagaacaccttcgatgcaggacattagaggggcgacgaagctaactttgtcatagcgacacagggagacgatgcaaggaagagtcatcctgaatgctaaaagcaaaagacaatgttgcccttgcattatttgtaaatcatgtgtgtagtccttgtgggtgtaaatgtaatttcgtacgaagttgtacgattctctataaatagatgaatagtgtcctgcataaattaccttttggagggcaggacaattgttgtgtaatcttttctctaaagcaccttcgctcttcgctctaattcattctgtggaaccttcgaaagaggagaaatacgatattatatttatgcaattaagtcatgacttgtctggttaagtctcaaccttcgttttctgcttaagaatgaagattgattatctttttaacattgtgttgcctttttatgattgtacatagcaatccgaagcaagtgaccaacacaacttttttcatattagctttgacattggcccgtgctacctcattccccctttgctgcacatccttatgtttgaaggggtttggatgttgttcaccaaagtgtttaagtcctagtgtcatcatctttaggtgggagcaatcagccttctctagaatgcaggcaatgcctcgtgcattggccaaggcgtagtagtcaccacttgaatccaagacaggggaaaaacctttaacctcgccatccatccatctaagagctttgctggtatccgcatccttgaagatcatctgcttcggtcgtgccctaaccaaagataaggtatcatacatgtgttgcttgcagcatgagcatatgtcgtagagagaatccactgtgattgcatagcagccatggatattagcaattgagtggtctttttcttctcttcagcaagttcgtcaaagatatcatgattcttcttgttaccttcgacaagctgatgtagaagcccaaaaatttctgaattgttttcttcctgtttcttgatggcttcggcactaatccttttatacttggcctccaagacagactgaattacatccttctgctccgttagacccttgaccatgtttttgcattcaagaaaatctttggacaaagtagttagcgttttagtgtttttcgcggtgtcttttcttagctcgctgacctcttttcgaagttgggagagttccacatcactttgtgctttgaggaccttgctcagttttagcccctaaaacaaggcaaaggaaactaggtttcaatgacaaggcatggaaaaactgtatgataaaacaaagttaggttaatagtttgaactcattatagaaaacgaattaatcccgcgtgggatactgttgggggccaatgaaatctatgtttggatagttttttatgttatggttgttagaagccgaagaaaaaaaaactctttgaagagctttggagcacacagacaagccaaagatacatgaaaaggaagataaaggatttcggctccatagtaaaggatttcggagaagagaagattaagggagcgtctacaaagagaagacgtgcccaacacgcctatgcaacaatatgacattgttgtactctcctaaatattaaagcaactttgtaatagggagggatagaaattttattttacatggagatataactgagcccgaccttataaataaatgaacggtaccaccattctgaagggctggccatttgtagatttcttgtccatgcctccatggcatttctgtgattagagagtttcagaatttattgatatgttgaaactattgtattaag

SEQ ID NO: 20266 - DNA, 3728 bp, Zea Mays
gggagctcgaacacaaacagcaagaaccaccaagcgaccaagcctgcaagtcaccaagggagcccgatctgagtcaagcgagtcttcccgtttcatcgcctggaaaaaggcgagaaaccccaaagcgaaggaacagcagcgcgagtgctagcagcagcagcgattccttcgccataccgttcgctgcgctcgctcactcggatcgaaaccccctagggttcgcatcgtcctcccgccaactcctatccctcccctctccctccgccgcgcgcgcgcgtggagctaccaaaccctaggacggcaaatccggtgcgatcgcccacggtggaggcctctcggccgccgagaggagccgctcggggctcggatcagggttccggtacttcgccggtgccgcctctgggtggtgggaccggtggatggtcatgggagccagcggctccaagcttgagaaggccctcggagaccagttcccggaaggccagcgctacttcggcctcgagaacttcggcaacacctgctactgcaacagtgtccttcaggtatgggtacatgcctctgaaactaacagctaatagatttgatgcttggttatgcttggcttgatactggtaagtgcggcagtgtagtgaaacggcctggttcggtttttttaggtagtaggtgtgtatatgctagatattataatgttctagcacttgttcgccagtttcgagatatgccacctattggtatgggctattcatatcgagcacaagtctttaggagtttggacctttttttcgaaaactctaatttgtttttttaattcctaatctgatctcgaagttttgaccttttggagtttaagttttgggaatagtcttgaatcctccctatgtaactatggtcaatgtttatctcaatctctagaaatctggccaaacagcaatatcgtgcatagggagcagcactgctagaccacaacactatcgggatgagaagttgcactgtcaggctgagaagtggcaccgtcgtgctgctccgagagatttcagatttggcttccttcagatatttgggttttgatgtcttagaggtttacgtgaagttttggaagataagccaagattgtccaaagcaatatttttattggctctcattcatcccctttggtaacctaatctaatgattccaatatagttagaaaatcagcttatggctatatatattctacatattactattgtattgatcattattgtcattcactctactcccatttacctacaaaaaaggaaattttaatctagctgtagcttggacgaacaaaattgttggtgataagatctccactcaaaggtccgaattgatgaaatccatgtttaggtagttttgtaggatatggttgtcagccaaagccaaaggaaaaacactttgaagagcttagaagcatacaaacaagccaaaaataaatgaagacgaagatacgaaaagcctaagttttgttatataatgtagatatttatgaactttaacagtgttttgttaaaatatttataaattttatcagggtcaactaacctcgataaatacccctaaattagctcctggtgatgggtccttagcggaatcaaaggttgagatatctccaccataacgaatctttgtcaacgccctagtgtacaagctttacacctagtcagcgggcgacactgaatgaccctcatcttttttctttactttggtcaacttgattttctacgcctctttgtgtttcttagccaactcatccaccttcgacaaggaaaatataaggactcaatactagaagaataatgcaaaaataaatgaaaggtgaataaccaacttgttggggccttggtcttttaaaggtccttaaaaacacgtttaaccattggttgccaagtattataggagcttcggcactagaacaccttcgatgcaggacattagaggggcgacgaagctaactttgtcatagcgacacagggagacgatgcaaggaagagtcatcctgaatgctaaaagcaaaagacaatgttgcccttgcattatttgtaaatcatgtgtgtagtccttgtgggtgtaaatgtaatttcgtacgaagttgtacgattctctataaatagatgaatagtgtcctgcataaattaccttttggagggcaggacaattgttgtgtaatcttttctctaaagcaccttcgctcttcgctctaattcattctgtggaaccttcgaaagaggagaaatacgatattatatttatgcaattaagtcatgacttgtctggttaagtctcaaccttcgttttctgcttaagaatgaagattgattatctttttaacattgtgttgcctttttatgattgtacatagcaatccgaagcaagtgaccaacacaacttttttcatattagctttgacattggcccgtgctacctcattccccctttgctgcacatccttatgtttgaaggggtttggatgttgttcaccaaagtgtttaagtcctagtgtcatcatctttaggtgggagcaatcagccttctctagaatgcaggcaatgcctcgtgcattggccaaggcgtagtagtcaccacttgaatccaagacaggggaaaaacctttaacctcgccatccatccatctaagagctttgctggtatccgcatccttgaagatcatctgcttcggtcgtgccctaaccaaagataaggtatcatacatgtgttgcttgcagcatgagcatatgtcgtagagagaatccactgtgattgcatagcagccatggatattagcaattgagtggtctttttcttctcttcagcaagttcgtcaaagatatcatgattcttcttgttaccttcgacaagctgatgtagaagcccaaaaatttctgaattgttttcttcctgtttcttgatggcttcggcactaatccttttatacttggcctccaagacagactgaattacatccttctgctccgttagacccttgaccatgtttttgcattcaagaaaatctttggacaaagtagttagcgttttagtgtttttcgcggtgtcttttcttagctcgctgacctcttttcgaagttgggagagttccacatcactttgtgctttgaggaccttgctcagttttagcccctaaaacaaggcaaaggaaactaggtttcaatgacaaggcatggaaaaactgtatgataaaacaaagttaggttaatagtttgaactcattatagaaaacgaattaatcccgcgtgggatactgttgggggccaatgaaatctatgtttggatagttttttatgttatggttgttagaagccgaagaaaaaaaaactctttgaagagctttggagcacacagacaagccaaagatacatgaaaaggaagataaaggatttcggctccatagtaaaggatttcggagaagagaagattaagggagcgtctacaaagagaagacgtgcccaacacgcctatgcaacaatatgacattgttgtactctcctaaatattaaagcaactttgtaatagggagggatagaaattttattttacatggagatataactgagcccgaccttataaataaatgaacggtaccaccattctgaagggctggccatttgtagatttcttgtccatgcctccatggcatttctgtgattagagagtttcagaatttattgatatgttgaaactattgtattaag

SEQ ID NO: 20267 - DNA, 2278 bp, Zea Mays
gggagctcgaacacaaacagcaagaaccaccaagcgaccaagcctgcaagtcaccaagggagcccgatctgagtcaagcgagtcttcccgtttcatcgcctggaaaaaggcgagaaaccccaaagcgaaggaacagcagcgcgagtgctagcagcagcagcgattccttcgccataccgttcgctgcgctcgctcactcggatcgaaaccccctagggttcgcatcgtcctcccgccaactcctatccctcccctctccctccgccgcgcgcgcgcgtggagctaccaaaccctaggacggcaaatccggtgcgatcgcccacggtggaggcctctcggccgccgagaggagccgctcggggctcggatcagggttccggtacttcgccggtgccgcctctgggtggtgggaccggtggatggtcatgggagccagcggctccaagcttgagaaggccctcggagaccagttcccggaaggccagcgctacttcggcctcgagaacttcggcaacacctgctactgcaacagtgtccttcagggagacgatgcaaggaagagtcatcctgaatgctaaaagcaaaagacaatgttgcccttgcattatttgtaaatcatgtgtgtagtccttgtgggtgtaaatgtaatttcgtacgaagttgtacgattctctataaatagatgaatagtgtcctgcataaattaccttttggagggcaggacaattgttgtgtaatcttttctctaaagcaccttcgctcttcgctctaattcattctgtggaaccttcgaaagaggagaaatacgatattatatttatgcaattaagtcatgacttgtctggttaagtctcaaccttcgttttctgcttaagaatgaagattgattatctttttaacattgtgttgcctttttatgattgtacatagcaatccgaagcaagtgaccaacacaacttttttcatattagctttgacattggcccgtgctacctcattccccctttgctgcacatccttatgtttgaaggggtttggatgttgttcaccaaagtgtttaagtcctagtgtcatcatctttaggtgggagcaatcagccttctctagaatgcaggcaatgcctcgtgcattggccaaggcgtagtagtcaccacttgaatccaagacaggggaaaaacctttaacctcgccatccatccatctaagagctttgctggtatccgcatccttgaagatcatctgcttcggtcgtgccctaaccaaagataaggtatcatacatgtgttgcttgcagcatgagcatatgtcgtagagagaatccactgtgattgcatagcagccatggatattagcaattgagtggtctttttcttctcttcagcaagttcgtcaaagatatcatgattcttcttgttaccttcgacaagctgatgtagaagcccaaaaatttctgaattgttttcttcctgtttcttgatggcttcggcactaatccttttatacttggcctccaagacagactgaattacatccttctgctccgttagacccttgaccatgtttttgcattcaagaaaatctttggacaaagtagttagcgttttagtgtttttcgcggtgtcttttcttagctcgctgacctcttttcgaagttgggagagttccacatcactttgtgctttgaggaccttgctcagttttagcccctaaaacaaggcaaaggaaactaggtttcaatgacaaggcatggaaaaactgtatgataaaacaaagttaggttaatagtttgaactcattatagaaaacgaattaatcccgcgtgggatactgttgggggccaatgaaatctatgtttggatagttttttatgttatggttgttagaagccgaagaaaaaaaaactctttgaagagctttggagcacacagacaagccaaagatacatgaaaaggaagataaaggatttcggctccatagtaaaggatttcggagaagagaagattaagggagcgtctacaaagagaagacgtgcccaacacgcctatgcaacaatatgacattgttgtactctcctaaatattaaagcaactttgtaatagggagggatagaaattttattttacatggagatataactgagcccgaccttataaataaatgaacggtaccaccattctgaagggctggccatttgtagatttcttgtccatgcctccatggcatttctgtgattagagagtttcagaatttattgatatgttgaaactattgtattaag

SEQ ID NO: 20268 - DNA, 3361 bp, Zea Mays
gggagctcgaacacaaacagcaagaaccaccaagcgaccaagcctgcaagtcaccaagggagcccgatctgagtcaagcgagtcttcccgtttcatcgcctggaaaaaggcgagaaaccccaaagcgaaggaacagcagcgcgagtgctagcagcagcagcgattccttcgccataccgttcgctgcgctcgctcactcggatcgaaaccccctagggttcgcatcgtcctcccgccaactcctatccctcccctctccctccgccgcgcgcgcgcgtggagctaccaaaccctaggacggcaaatccggtgcgatcgcccacggtggaggcctctcggccgccgagaggagccgctcggggctcggatcagggttccggtacttcgccggtgccgcctctgggtggtgggaccggtggatggtcatgggagccagcggctccaagcttgagaaggccctcggagaccagttcccggaaggccagcgctacttcggcctcgagaacttcggcaacacctgctactgcaacagtgtccttcagaaatctggccaaacagcaatatcgtgcatagggagcagcactgctagaccacaacactatcgggatgagaagttgcactgtcaggctgagaagtggcaccgtcgtgctgctccgagagatttcagatttggcttccttcagatatttgggtagttttgatgtcttagaggtttacgtgaagttttggaagataagccaagattgtccaaagcaatatttttattggctctcattcatcccctttggtaacctaatctaatgattccaatatagttagaaaatcagcttatggctatatatattctacatattactattgtattgatcattattgtcattcactctactcccatttacctacaaaaaaggaaattttaatctagctgtagcttggacgaacaaaattgttggtgataagatctccactcaaaggtccgaattgatgaaatccatgtttaggtagttttgtaggatatggttgtcagccaaagccaaaggaaaaacactttgaagagcttagaagcatacaaacaagccaaaaataaatgaagacgaagatacgaaaagcctaagttttgttatataatgtagatatttatgaactttaacagtgttttgttaaaatatttataaattttatcagggtcaactaacctcgataaatacccctaaattagctcctggtgatgggtccttagcggaatcaaaggttgagatatctccaccataacgaatctttgtcaacgccctagtgtacaagctttacacctagtcagcgggcgacactgaatgaccctcatcttttttctttactttggtcaacttgattttctacgcctctttgtgtttcttagccaactcatccaccttcgacaaggaaaatataaggactcaatactagaagaataatgcaaaaataaatgaaaggtgaataaccaacttgttggggccttggtcttttaaaggtccttaaaaacacgtttaaccattggttgccaagtattataggagcttcggcactagaacaccttcgatgcaggacattagaggggcgacgaagctaactttgtcatagcgacacagggagacgatgcaaggaagagtcatcctgaatgctaaaagcaaaagacaatgttgcccttgcattatttgtaaatcatgtgtgtagtccttgtgggtgtaaatgtaatttcgtacgaagttgtacgattctctataaatagatgaatagtgtcctgcataaattaccttttggagggcaggacaattgttgtgtaatcttttctctaaagcaccttcgctcttcgctctaattcattctgtggaaccttcgaaagaggagaaatacgatattatatttatgcaattaagtcatgacttgtctggttaagtctcaaccttcgttttctgcttaagaatgaagattgattatctttttaacattgtgttgcctttttatgattgtacatagcaatccgaagcaagtgaccaacacaacttttttcatattagctttgacattggcccgtgctacctcattccccctttgctgcacatccttatgtttgaaggggtttggatgttgttcaccaaagtgtttaagtcctagtgtcatcatctttaggtgggagcaatcagccttctctagaatgcaggcaatgcctcgtgcattggccaaggcgtagtagtcaccacttgaatccaagacaggggaaaaacctttaacctcgccatccatccatctaagagctttgctggtatccgcatccttgaagatcatctgcttcggtcgtgccctaaccaaagataaggtatcatacatgtgttgcttgcagcatgagcatatgtcgtagagagaatccactgtgattgcatagcagccatggatattagcaattgagtggtctttttcttctcttcagcaagttcgtcaaagatatcatgattcttcttgttaccttcgacaagctgatgtagaagcccaaaaatttctgaattgttttcttcctgtttcttgatggcttcggcactaatccttttatacttggcctccaagacagactgaattacatccttctgctccgttagacccttgaccatgtttttgcattcaagaaaatctttggacaaagtagttagcgttttagtgtttttcgcggtgtcttttcttagctcgctgacctcttttcgaagttgggagagttccacatcactttgtgctttgaggaccttgctcagttttagcccctaaaacaaggcaaaggaaactaggtttcaatgacaaggcatggaaaaactgtatgataaaacaaagttaggttaatagtttgaactcattatagaaaacgaattaatcccgcgtgggatactgttgggggccaatgaaatctatgtttggatagttttttatgttatggttgttagaagccgaagaaaaaaaaactctttgaagagctttggagcacacagacaagccaaagatacatgaaaaggaagataaaggatttcggctccatagtaaaggatttcggagaagagaagattaagggagcgtctacaaagagaagacgtgcccaacacgcctatgcaacaatatgacattgttgtactctcctaaatattaaagcaactttgtaatagggagggatagaaattttattttacatggagatataactgagcccgaccttataaataaatgaacggtaccaccattctgaagggctggccatttgtagatttcttgtccatgcctccatggcatttctgtgattagagagtttcagaatttattgatatgttgaaactattgtattaag

SEQ ID NO: 20269 - DNA, 2044 bp, Zea Mays
attcatttatctcgaagaatcattctaacagagaatcagaataagtgtcgaacacaaacagcaagaaccaccaagcgaccaagccaccaagggagcccgatctgagtcaagcgtcttcccatttcatcgcctggaaaaaggcgagaaaccccgaagtgaaggaacagcagcacgagtgctagcagcagcagcgattccttcgccataccgttcgccgcgctcgctcactcggatcgaaccctccctagggtttcgcatcgtcctcccgccaactcctatccctcccccctccctccgccgcgcgcgcgcggggagctaccaaaccctaggacggcaaatccggtgcgatcgcccacggtggaggcctcgtcggccgccgagaggagccgctcggggctcgggtcagggttccggtacttcgccggcgccgcctctgggtggtgggaccggtggatggtcatgggagccagcggctccaagcttgagaaggccctcggagaccagttcccggaaggcgagcgctacttcggcctcgagaacttcggcaacacttgctactgcaacagtgtccttcaggcactttatttttgcattccattcagggagcagttactggaatattatgcaaataacaaaactccaggtgacgttgaggaaaatcttttgacttgtttggccgacctttttatgcagataagccaagcaaagaaaaagaccggtgttattgctccaaaacgttttgttcagagagtgaagaaacagaatgagttgtttcgcagctacatgcaccaggatgcacacgagttcttaaattttcttttgaatgaacttgttgatattctggaaaaagagtcaagtgctgctaaggactcaccccaatcatcatctccagaaaaagctccaaatggcccagttcaacctttagccaatggagttaaaaaagaaccaccagttactctggtccataaaaatttccagggcatattgaccaatgaaacaagatgcctaagatgtgaaacagtaactgcaagggatgaaacgtttcttgatcttagtgttgacattgaacaaaatagttctatcacaagctgcctgaaaaatttctgttctacagagactttaaacgcagaggataaattcttctgtgacaaatgctgcagtttgcaagaagcacagaagagaatgaagatcaagaaggctccccacatactggtgatccatctaaagcgtttcaagtacattgagcagcttggccggtataagaagctttcataccgggttgtattccccatggaactgaagctcagtaatacatctgacgatgtagacactgagtattccctctttgctgtcgtggtccatgttggaagtggccccaaccatgggcactatgtaagccttgtcaaaagccacaaccactggttgttcttcgatgacgaaaacgtcgagatggttgaagagcagaccctacaaacattcttcggttcctcacatgaatactcaggcaacacagaccatgggtatatcttgttttatgaggggcttggtgggaagagttagatgggtttattcatcttccttgtttcttttctccttttctctttggagcttgcaaattcactcttgtgcctacacagctactatttcattacctccatgggaaacgggtcaatcgaaggggtgttgtatgaggaaagctgactagcaacgttcccgctcatcgctctgacggggtgcggtcagagccagtgccgtctggaggctcacgtgaggccatctcgtccttcgcccaccataataattaaggttaacaagcagctctcagcttacttggtggcgctcgttcgttgatagcatcttctttctttctttctttctttccacttcaatcatcgcgcttctgtctcttgcgcctttccatgtagtaaggctttgccgcaatcaagttgatgtgtaagtaatcgtatatgtggtatttggtatcgtgatgttccaacaactgccaagtaatcatgatatcaatccccttacctttcaatagcgg

SEQ ID NO: 20270 - DNA, 1548 bp, Zea Mays
gaatcattctaacagagaatcagaataagtgtcgaacacaaacagcaagaaccaccaagcgaccaagccaccaagggagcccgatctgagtcaagcgtcttcccatttcatcgcctggaaaaaggcgagaaaccccgaagtgaaggaacagcagcacgagtgctagcagcagcagcgattccttcgccataccgttcgccgcgctcgctcactcggatcgaaccctccctagggtttcgcatcgtcctcccgccaactcctatccctcccccctccctccgccgcgcgcgcgcggggagctaccaaaccctaggacggcaaatccggtgcgatcgcccacggtggaggcctcgtcggccgccgagaggagccgctcggggctcgggtcagggttccggtacttcgccggcgccgcctctgggtggtgggaccggtggatggtcatgggagccagcggctccaagcttgagaaggccctcggagaccagttcccggaaggcgagcgctacttcggcctcgagaacttcggcaacacttgctactgcaacagtgtccttcaggcactttatttttgcattccattcagggagcagttactggaatattatgcaaataacaaaactccaggtgacgttgaggaaaatcttttgacttgtttggccgacctttttatgcagataagccaagcaaagaaaaagaccggtgttattgctccaaaacgttttgttcagagagtgaagaaacagaatgagttgtttcgcagctacatgcaccaggatgcacacgagttcttaaattttcttttgaatgaacttgttgatattctggaaaaagagtcaagtgctgctaaggactcaccccaatcatcatctccagaaaaagctccaaatggcccagttcaacctttagccaatggagttaaaaaagaaccaccagttactctggtccataaaaatttccagggcatattgaccaatgaaacaagatgcctaagatgtgaaacagtaactgcaagggatgaaacgtttcttgatcttagtgttgacattgaacaaaatagttctatcacaagctgcctgaaaaatttctgttctacagagactttaaacgcagaggataaattcttctgtgacaaatgctgcagtttgcaagaagcacagaagagaatgaagatcaagaaggctccccacatactggaaagctgactagcaacgttcccgctcatcgctctgacggggtgcggtcagagccagtgccgtctggaggctcacgtgaggccatctcgtccttcgcccaccataataattaaggttaacaagcagctctcagcttacttggtggcgctcgttcgttgatagcatcttctttctttctttctttctttccacttcaatcatcgcgcttctgtctcttgcgcctttccatgtagtaaggctttgccgcaatcaagttgatgtgtaagtaatcgtatatgtggtatttggtatcgtgatgttccaacaactgccaagtaatcatgatatcaatccccttacctttcaatagcgg

SEQ ID NO: 20271 - DNA, 3069 bp, Zea Mays
gtcgaacacaaacagcaagaaccaccaagcgaccaagccaccaagggagcccgatctgagtcaagcgtcttcccatttcatcgcctggaaaaaggcgagaaaccccgaagtgaaggaacagcagcacgagtgctagcagcagcagcgattccttcgccataccgttcgccgcgctcgctcactcggatcgaaccctccctagggtttcgcatcgtcctcccgccaactcctatccctcccccctccctccgccgcgcgcgcgcggggagctaccaaaccctaggacggcaaatccggtgcgatcgcccacggtggaggcctcgtcggccgccgagaggagccgctcggggctcgggtcagggttccggtacttcgccggcgccgcctctgggtggtgggaccggtggatggtcatgggagccagcggctccaagcttgagaaggccctcggagaccagttcccggaaggcgagcgctacttcggcctcgagaacttcggcaacacttgctactgcaacagtgtccttcaggcactttatttttgcattccattcagggagcagttactggaatattatgcaaataacaaaactccaggtgacgttgaggaaaatcttttgacttgtttggccgacctttttatgcaggtaacatgtagatatgattataccaaatgatataaatgactctagagtgtcgtaatttcttgttgaattttgacttttttgggtatcacttggactagaggttgaaacaatgattccataggttaacagctgtagtgctatatccgagtttcttgtggtacaagtgtacaaagaatgtatattttgtcttgcttcgaggtgatgatactcatgtagagtttacccactgtaaatgaaataaatccttctcattttctctatatttttatatgagcttattagttctcgttattgacagatacatttttggcttaaatatattaagagtttcaaaatctccaattatctggccctttcctgataggatatatgctgcattcctgcttactaacttttgttagctgcattcaagttctaaatattaacatgtgcagtattctagctgtatatgtatagctttctttgtataacactgtcaatagaggtccattcatggatatgctctttgcttggcactccatgttccttatgctgttcaatatattagttgttgggaaattagttttgcttcctacttaggttgtctccagcagatcgtgcatatggtcgtgcaaaatactgttttacactttagattgcactgcttacatagtgacgtttgaaataggagataagatgggagataggatgagtaagctgttggagacaaccttacagtgagataatagtatactactcatataaactgaaaacccacattcgtgcaacatagaacatacccactcatggacgcatcatgcatgcacatgtggcatgcttggatagcatcaccattgggcatttggataatgaatctcatgctaagtcgtacttaatgtgagctctgtgattgtagctataaaatattttttttgtacttcctcttgctttgcaattggttgttggacaacttgcttaaggtaatgggttctgttctactgctaattacctgacatataatcaatgtatcaaattgtctaatctatcctagtctccatggcacctatcagcctgactaattgtgacttatggtagtgcataaccgattgctatagcaccaatcatcctgatttatcacgattaatcagatcagatgacttgttaacattgcatataatatgatcctgatgccatttaaatttgtatggtaaatatctttgacttgacatctttgttgtcaatgcattgtttcacttcatgcttgtgtgtcagtgttactacatagtgttttgtatatcacgtgaaacttctgcaatctgcacgatattgcaaattgccaccataaagaacgaagaggtgaattaagaggtggtcattgtgtatcacgtagataagccaagcaaagaaaaagaccggtgttattgctccaaaacgttttgttcagagagtgaagaaacagaatgagttgtttcgcagctacatgcaccagaaaaagctccaaatggcccagttcaacctttagccaatggagttaaaaaagaaccaccagttactctggtccataaaaatttccagggcatattgaccaatgaaacaagatgcctaagatgtgaaacagtaactgcaagggatgaaacgtttcttgatcttagtgttgacattgaacaaaatagttctatcacaagctgcctgaaaaatttctgttctacagagactttaaacgcagaggataaattcttctgtgacaaatgctgcagtttgcaagaagcacagaagagaatgaagatcaagaaggctccccacatactggtgatccatctaaagcgtttcaagtacattgagcagcttggccggtataagaagctttcataccgggttgtattccccatggaactgaagctcagtaatacatctgacgatgtagacactgagtattccctctttgctgtcgtggtccatgttggaagtggccccaaccatgggcactatgtaagccttgtcaaaagccacaaccactggttgttcttcgatgacgaaaacgtcgagatggttgaagagcagaccctacaaacattcttcggttcctcacatgaatactcaggcaacacagaccatgggtatatcttgttttatgaggggcttggtgggaagagttagatgggtttattcatcttccttgtttcttttctccttttctctttggagcttgcaaattcactcttgtgcctacacagctactatttcattacctccatgggaaacgggtcaatcgaaggggtgttgtatgaggtgaggacgccagattttgggtggtttcagtgtacaggggataatggaatctagctccaacgatgaaataaggtgtattttttttaacttctcagggctaaagagttggactttactattgagcacaacgtacatattttccagtgatcttgtg

SEQ ID NO: 20272 - DNA, 3169 bp, Zea Mays
gtcgaacacaaacagcaagaaccaccaagcgaccaagccaccaagggagcccgatctgagtcaagcgtcttcccatttcatcgcctggaaaaaggcgagaaaccccgaagtgaaggaacagcagcacgagtgctagcagcagcagcgattccttcgccataccgttcgccgcgctcgctcactcggatcgaaccctccctagggtttcgcatcgtcctcccgccaactcctatccctcccccctccctccgccgcgcgcgcgcggggagctaccaaaccctaggacggcaaatccggtgcgatcgcccacggtggaggcctcgtcggccgccgagaggagccgctcggggctcgggtcagggttccggtacttcgccggcgccgcctctgggtggtgggaccggtggatggtcatgggagccagcggctccaagcttgagaaggccctcggagaccagttcccggaaggcgagcgctacttcggcctcgagaacttcggcaacacttgctactgcaacagtgtccttcaggcactttatttttgcattccattcagggagcagttactggaatattatgcaaataacaaaactccaggtgacgttgaggaaaatcttttgacttgtttggccgacctttttatgcaggtaacatgtagatatgattataccaaatgatataaatgactctagagtgtcgtaatttcttgttgaattttgacttttttgggtatcacttggactagaggttgaaacaatgattccataggttaacagctgtagtgctatatccgagtttcttgtggtacaagtgtacaaagaatgtatattttgtcttgcttcgaggtgatgatactcatgtagagtttacccactgtaaatgaaataaatccttctcattttctctatatttttatatgagcttattagttctcgttattgacagatacatttttggcttaaatatattaagagtttcaaaatctccaattatctggccctttcctgataggatatatgctgcattcctgcttactaacttttgttagctgcattcaagttctaaatattaacatgtgcagtattctagctgtatatgtatagctttctttgtataacactgtcaatagaggtccattcatggatatgctctttgcttggcactccatgttccttatgctgttcaatatattagttgttgggaaattagttttgcttcctacttaggttgtctccagcagatcgtgcatatggtcgtgcaaaatactgttttacactttagattgcactgcttacatagtgacgtttgaaataggagataagatgggagataggatgagtaagctgttggagacaaccttacagtgagataatagtatactactcatataaactgaaaacccacattcgtgcaacatagaacatacccactcatggacgcatcatgcatgcacatgtggcatgcttggatagcatcaccattgggcatttggataatgaatctcatgctaagtcgtacttaatgtgagctctgtgattgtagctataaaatattttttttgtacttcctcttgctttgcaattggttgttggacaacttgcttaaggtaatgggttctgttctactgctaattacctgacatataatcaatgtatcaaattgtctaatctatcctagtctccatggcacctatcagcctgactaattgtgacttatggtagtgcataaccgattgctatagcaccaatcatcctgatttatcacgattaatcagatcagatgacttgttaacattgcatataatatgatcctgatgccatttaaatttgtatggtaaatatctttgacttgacatctttgttgtcaatgcattgtttcacttcatgcttgtgtgtcagtgttactacatagtgttttgtatatcacgtgaaacttctgcaatctgcacgatattgcaaattgccaccataaagaacgaagaggtgaattaagaggtggtcattgtgtatcacgtagataagccaagcaaagaaaaagaccggtgttattgctccaaaacgttttgttcagagagtgaagaaacagaatgagttgtttcgcagctacatgcaccaggatgcacacgagttcttaaattttcttttgaatgaacttgttgatattctggaaaaagagtcaagtgctgctaaggactcaccccaatcatcatctccagaaaaagctccaaatggcccagttcaacctttagccaatggagttaaaaaagaaccaccagttactctggtccataaaaatttccagggcatattgaccaatgaaacaagatgcctaagatgtgaaacagtaactgcaagggatgaaacgtttcttgatcttagtgttgacattgaacaaaatagttctatcacaagctgcctgaaaaatttctgttctacagagactttaaacgcagaggataaattcttctgtgacaaatgctgcagtttgcaagaagcacagaagagaatgaagatcaagaaggctccccacatactggtgatccatctaaagcgtttcaagtacattgagcagcttggccggtataagaagctttcataccgggttgtattccccatggaactgaagctcagtaatacatctgacgatgtagacactgagtattccctctttgctgtcgtggtccatgttggaagtggccccaaccatgggcactatgtaagccttgtcaaaagccacaaccactggttgttcttcgatgacgaaaacgtcgagatggttgaagagcagaccctacaaacattcttcggttcctcacatgaatactcaggcaacacagaccatgggtatatcttgttttatgaggggcttggtgggaagagttagatgggtttattcatcttccttgtttcttttctccttttctctttggagcttgcaaattcactcttgtgcctacacagctactatttcattacctccatgggaaacgggtcaatcgaaggggtgttgtatgaggtgaggacgccagattttgggtggtttcagtgtacaggggataatggaatctagctccaacgatgaaataaggtgtattttttttaacttctcagggctaaagagttggactttactattgagcacaacgtacatattttccagtgatcttgtg

SEQ ID NO: 20273 - DNA, 2070 bp, Zea Mays
gtcgaacacaaacagcaagaaccaccaagcgaccaagccaccaagggagcccgatctgagtcaagcgtcttcccatttcatcgcctggaaaaaggcgagaaaccccgaagtgaaggaacagcagcacgagtgctagcagcagcagcgattccttcgccataccgttcgccgcgctcgctcactcggatcgaaccctccctagggtttcgcatcgtcctcccgccaactcctatccctcccccctccctccgccgcgcgcgcgcggggagctaccaaaccctaggacggcaaatccggtgcgatcgcccacggtggaggcctcgtcggccgccgagaggagccgctcggggctcgggtcagggttccggtacttcgccggcgccgcctctgggtggtgggaccggtggatggtcatgggagccagcggctccaagcttgagaaggccctcggagaccagttcccggaaggcgagcgctacttcggcctcgagaacttcggcaacacttgctactgcaacagtgtccttcaggcactttatttttgcattccattcagggagcagttactggaatattatgcaaataacaaaactccaggtgacgttgaggaaaatcttttgacttgtttggccgacctttttatgcagataagccaagcaaagaaaaagaccggtgttattgctccaaaacgttttgttcagagagtgaagaaacagaatgagttgtttcgcagctacatgcaccaggatgcacacgagttcttaaattttcttttgaatgaacttgttgatattctggaaaaagagtcaagtgctgctaaggactcaccccaatcatcatctccagaaaaagctccaaatggcccagttcaacctttagccaatggagttaaaaaagaaccaccagttactctggtccataaaaatttccagggcatattgaccaatgaaacaagatgcctaagatgtgaaacagtaactgcaagggatgaaacgtttcttgatcttagtgttgacattgaacaaaatagttctatcacaagctgcctgaaaaatttctgttctacagagactttaaacgcagaggataaattcttctgtgacaaatgctgcagtttgcaagaagcacagaagagaatgaagatcaagaaggctccccacatactggtgatccatctaaagcgtttcaagtacattgagcagcttggccggtataagaagctttcataccgggttgtattccccatggaactgaagctcagtaatacatctgacgatgtagacactgagtattccctctttgctgtcgtggtccatgttggaagtggccccaaccatgggcactatgtaagccttgtcaaaagccacaaccactggttgttcttcgatgacgaaaacgtcgagatggttgaagagcagaccctacaaacattcttcggttcctcacatgaatactcaggcaacacagaccatgggtatatcttgttttatgaggggcttggtgggaagagttagatgggtttattcatcttccttgtttcttttctccttttctctttggagcttgcaaattcactcttgtgcctacacagctactatttcattacctccatgggaaacgggtcaatcgaaggggtgttgtatgaggtgaggacgccagattttgggtggtttcagtgtacaggggataatggaatctagctccaacgatgaaataaggaaagctgactagcaacgttcccgctcatcgctctgacggggtgcggtcagagccagtgccgtctggaggctcacgtgaggccatctcgtccttcgcccaccataataattaaggttaacaagcagctctcagcttacttggtggcgctcgttcgttgatagcatcttctttctttctttctttctttccacttcaatcatcgcgcttctgtctcttgcgcctttccatgtagtaaggctttgccgcaatcaagttgatgtgtaagtaatcgtatatgtggtatttggtatcgtgatgttccaacaactgccaagtaatcatgatatcaatccccttacctttcaatagcgg

SEQ ID NO: 20274 - DNA, 2138 bp, Zea Mays
aaaatctaaaatccttgcattccaaaaagccctgcccacggcgtggcttcaccttcgccctgcgcggctgcgcccctgcccttccacgacgacgaccacgaccacagcagtacagcacccccgagtccccgaccccgtcctcggcggtggcccgccaggccttcttcttttacgttcccctctgacacgggtttcttttcctggcctcggagtccgcgccggccgcctcgtgcccgacccgagtggcctccatgtgcgttcttttattgtttgactatttagtccggcgatacggtttcctcaactgggatccgccatccacctcgcagatcggatctccttcgaggccgggctcaggcctcaggggtgccgccaccgcctcgtccgtctccagggaccgcgagctgtcccctcgcctccagcgcagccgctcatccgccggcggcggctccaaggcgtccctgtccccggagaggcggcgcggcgtgggcgcgatgcagcagcgggtggcgcagctggaggaggagctccggagggagcgggaggagaaggcccggaccgtgagggacctcgaggacctgaggcgggacggcggcgccaagggtgtcgcggacaaggtgcaccttctggagcgggaggtgagcaagtccaagcagtcggagcgcaagatgctggagtcgctgatataccagaccaagcagctggagcagaccaagatatcgctcgaggaggccaagctggagatggccacgctgcagcagcaggcgagcaagagcctcgcgtcagcccggcgcggcggcgtgctggagcagaggagcgtcagggacctcatgttcggcggcgcggacgaggagatcatggtcctgcgcgcggagctccgggcggcggtgcagggcgaggagaggagccgcaaggcgctggacgacctctccgccgcgctctcggacgtgaccgcggaggccaggcaggtcaaggcctggctctccgaggcgcaggccgagctggaggccgccaacgccgaggccgggcggctgcgcgcggcgctgcgcggcgcgtccgacgagcgcgaccgctacaggctcgaggccgacgagtgcgcggcggcctggggcgacaaggagcgcgtgctcctcgactgcgtgcgcgcgtccgagggcgacgcgagccgggcgcggcaggagaacaccaggctggtggagtcgcagcgcgtcgtccgcgacgagaacgcgcgcctgcgggacatcctcaagcaggccgtggccgaggccagcgccgccagggactcgctggagctcgccagggccgagaacgcgcgcctcagcgccgccgtcgccgacaaggacggcgcgctgcagagcctccgccaggagtacgagtgcgtcagggtcagcgaggccgcggcgcagggtagcctcagggagctcaacagcctcctcgccgccaccacaacgacggcgtgcaacacgcccgcgtcgtccgccaagaccgcccccgcgccgggctacggcctcgatcagcgccttccgaatggcagcagcaagaagggaacgccgcggtcggcgtcgcagcggtggatgcctgacaagccacggacgccgagcagccggcggacgtactcgatcggcgagccgggtaagctgacgactggcttctcgcggtccgcgcggatggggaacctgaaccccagggatcgggtgttcgcgtccctgagcaacatcgccgacctcaagtccgcggcggacgcggcgacggaggacttggacgacgagttcgaccacatcgacgagagccactacgttgacacggaggactccacgaagcacaagaagagcctgatattccgcagattcggtgattttttcaggaggaaaagcctctataagccgaattcagcgccagtacacacactctaaaaatcttttctttttttctccgccccatggatacacgcttgtagttccgttgtgttcttgttcatctgaatacacgagaaatgaaaaggttgttgaatcagatctgctcctttctcgtgttgaaacttcgatcgtttccaggacatagggcatgacgtgtattgaaatctgattatctgaagcctgaaggtgacgatgtagtaaagattggaagaaggtgcagct

SEQ ID NO: 20275 - DNA, 73 bp, Zea Mays
gcgaaaatctggcagctatatatcacgaaatgctcctaacaataaacaaatacagcaaaagaaaaaagaaaag

SEQ ID NO: 20276 - DNA, 831 bp, Zea Mays
catagccggctaggttttggacacagcagtgatgcaaagtttttgcctgtcatgggaggagcattatttggaacttttccatttatgtttttctattgttttggccttgccgttggtcttggtagctattgctagttgcctagttttgtacaaaaaattatccatttccacaacaaaaaaagaacacattagatcaaagttcattgcgcagcacagacaatgaattcaaccccgcattcacgaggcctatggcaggaggagcaataataacaagggacaaggattctgccggtgccgaacctcaagggcgtgcttgtagcgacggacgcgggtgaggtcgcgcgcgatgcggcggagctccgccgtgggtgcgtcgcgtccctcactggaccacttctcgagtgccgccgtcgcgctccgcttcgccaggcccagtcggaagatgcggctgcgcaggtcgtccccatcgtgctcgcccgtagccgcgaccacgcgatcgcccacggcggtcgacgcggcttcagatgagaaggtcccgtgccccgcgagaacagagcggaggtggaagccggagacggatcgcttggagcggccgccggctcgggtaagcaccgccgccatctcgttaccctgtgcggctgtaaccccgttcgagcgagcgaaccgtgccggcagcgaggtgcgcagtgttactgtcttgcagggccgaaccgttgtatgggctgagccgtgctttacaaatttggtgagactgggcccccaaaattggcctgtatgactattttcagcggctgtcttatagcaattataaataaataatttaaaaataac

SEQ ID NO: 20277 - DNA, 1733 bp, Zea Mays
ccactctcagttctgaacctattgtggcggctcagcggtgcggcaacggccatgaactgtgagtggtggctgtgagtgaccacaagagactgcaagtggcagctgcatgtgatggcctcaccgcctcggaggctgcggatgtggtacctgtgctttcttaactcctgtcctgtttttttataatgaatctaaatggtggctagatcgtggcacaagtgcaccaaagcttagggaattggttgaagggattctaggtttgacatgtaactcctcagattgtgagaggaattggagtgcatttgagcaactataagaaaggaataaatatttagaaaaaattacatgcatctcttactgttatattttccttgaacgtgaacatttctgcaattttgtttactttaacttaacctacaggttcacacaaagagacgtaacagacaacttcatgacaggatgattctaactcaaacaaagggagaaaaagaaaaagggaccgttgaaaaccccatgaccaatgttcttgaggatgaggaaaatgaatcaatcactggtattgtgcccaatgctgaaccagaaccagcagaaggagtacaagttagagcaaacgcatcatcatcacaaggagcagcaacacagaacaaaagaaagagagatacccagcttcgaaagagaaggaagttgattcctgatgacgaagaaatacaatcagctgatttctctacagattcagaagatgagaatcaccatttttacatgcattcaccatctgcatcatcttctgtgactttgttcagatctttttagactacaattatcaagtgatagatcattacttatgcagcccaatgtgatgtggccatgtgacagtagatacttatgtcttacggtagctattctacacttaattggttggcgattcgactatttgcttatgtcctagatagctggacaagtcttaaactacttatattgtttaaactttagcttaataaattcttatgtattgtgtcactatgtgagtggcccggtgtcacctactcacctatgtgttatgtgtattgttgctactacctactatgtgattacttattgcttcctgttgaaaatcccttcttttggcaatacaacaacaacaaagccttttagtcccaaccaaattggggtaggctagatttggaacccaatagaagccacaaatcaaggttcagacatgtagatagctgtttccatttgctcctattcaaggctaaatcattgggtatattccatccatgcaagtctccttttactgttttttatcaaattcttttggcaataatttgcatttgttttgtgaaacactatatgccttagcgctcctatagcagctgctataacgtgcttagaattttcccaaaggcactgctaaatgcttaagctcgcactttaaaacactatatcagagataaaaatttcatgggtttgaacttcagatgttaagttccctaactaataagtgaagtaaaaatatgaactataacccattaacagtttgtcgtcttccttcctagatgcaatcatcaataagcaaaaactatttgatgtttacacaaggaagcgctgcaatactgcatacttgttcttccagctgaatcactagcaattcatgatatcttgaacacatgcttcagaatagagtataatatgtatgaggtcccattctaaattcagctcaggtgaaagcaagtgtg

SEQ ID NO: 20278 - DNA, 2324 bp, Zea Mays
tacaaaaatatttataataaatgtcttataaaactatatttcataattagatattattattatatatatttaaaatatttgcatttcctttgaaaccgagggagtgtataacacagaaaaaaatacagacgcaaaggcgaaaacccctcccgcttctcctcccgctgtcccgcaagaacacgagcaggaggcgtggccgtggcagccggtttgacccgcccccgagcgttataagctgtttctccgggaacgtcttgtcgcgcaagtcgctcgcgccggccgcctccacctgcttgctcggtctcagattcccgcgcgcgaaagcgtggaccggacagccggcaggcgctcttttctttcattccctgtcgtggtctctcgtgctctccgtccgttctaacttctgcggcgcgcgaagcggtggtggtcgggcccgttgccgccgccgtgatgatagtgggcaacgtcggcgtcatactcgtgctcttcccggcgcacgtctggtgggcaatctactcgctcatcaagaccgaccgcatcaacgcgggcctgaagctagccgtgctcttggcgctacccgtgctgttcggcctctggctggggctgggcatcttgggcagcgcgctggtgggtctcgggtacggcttcttcacgccgtggatctccaccttcgaggcgttccggcaggaaagcgaggccaagaagttcgtgcacggcattgtggatgggacgtggggcacgatcaagggcagctgcacggtggtcagggacttcgcggacatctgcttccactcctaccctgtctacctcaaggagctgcgcgagggctcccagaatcgtgagccccattccataaggttgctggacgtgccctcatgcatagtcgtcgctctcctcgggctagtcgtggacataccactttacacggtgattgcgctggtcaagagcccctacatgctcttcaaaggctggcagaggctgctgcacgaccttataagccgagaaggcccgttcctcgagacggtctgcgtgccgatcgccggcctggctatcctgttctggccgctggtggtggtcgggagcgtcctgctggccatcgtctccagcatctttgtggggctctacggagcggtcatcgttttccaggagaggtcgtttcagaggggcgtttcgtatgtcgtggccatggttgcggagttcgatgagtacaccaacgactggctctacctccgtgaaggaacagttctcccaaagccgtcctacagaaagaggaaaccgtcgaactccacggaattctcggtgagaacaaacgcctccggcggcaaaggagctgaccaccctcctggccccagtgaagcaccggcaatgttggttccgaatctggcgcctgcgagatcagtgagagaggctatacaggaagtcaagatggtccagatatgggagaacatgatgaagtcatgcgagcagcgggggagggacctcctgaaccagaacgtgataacggccgcggggctggcggagtggctgaggggggcgaaggagggcgggcaccacgagaccgtgagcctgggcctgccgtcctactcgctgctgtgcaccgtgctgcagtcgatcagggccgggtccgggggcctggtgctgggcagcttcgaggtgaaccagcacaaccggccgcaggaccggctgctggactggttcttccaccccgtgctggtgctcaaggagcagatacaggcgctgaggatgaccgaggaggaggtcaggttcctggagaagctgaccgtcttcgccggcaacgtcgcgggcgctggcgctggcgggtgggagaacggcgccgggatgatggtggtgccccaggaccctgtgaggctggcgcagatccaggccataagtagaaggctggttgggattgtgaggagcctgtccaagttcccgacgtacaggaggaggtacaggcacgtcgtgaagctgctcatcgcctactccgtcgagagggagagctcgggcaggtcgtcggcttcagggcgctcggcctcctactttgagataacacagctggacgtgtagtatagtttgggaagcgttctccgattgtaattaagctgttaatttctaggatcaggtagtagctgtcagtgccttcgtgtgtttgaagcctagctggtgaggtttttgtagaacactagtgcatggttacaggagaaaggcgctccattgcagatgctgatcaggcgcgttcacgtgccaaaagcttcagacaattgtacacattctcttttgttctgtatatagcctgtaggttcaatgcacatgtgttgttcttt

SEQ ID NO: 20279 - DNA, 2372 bp, Zea Mays
ccctcctgccgcttttcgggatttcatttcgtagggcgaggggccggcgcgcgtgggagcgggctggatttgcgcgtcctgtaccgagcgccccatgtgacaggtcgctcgcttgcccccgctccgccgctccctccctcgtcccgcaaagcaaccgcaacgcgccgagcgggcagcggggtccccggccagccgagcaatcccccctccccaccaccccaaaaggcgaggcagcgagcgggcggaaaaggctagtgcgcgcctcgtgctcgtgctcccccgagcagactagaccagcgcgctagcgccagcaaggccaaggcgagggaggggcgatgctcgcccgatctgctacagccgccgccgccgccgggatctggctgtgattaaggatgtcggcgtcgcggagcgggaggatcaggcgggccgggagcgtggcgctcggggactttctgcggcgggaggcgtcggcggagcgggccgcgttgggaggcggcgagcggccctcggtcgcggcggggcaggcctgccgggcgaagaagggcgaggacttcgcgctgctcaagcccgcctgcgagcgacgccccggcgcgccgtccacctccttctccgccttcgccctgttcgacgggcataacgggagcgccgcagcggtgtacgccgaggagcacctcctcgccaacgtgctcggctgcgtcccggccgatctgagcagggacgactggctcgccgcgctcccaagggcgctcgtcgccgggttcgtcaagaccgacaaggattttcaaactaaagctcattcctcggggacaaccgtgacacttgccataattgatggctccgttgtaactgttgcgtccgttggtgactcacgttgtgtccttgatgctgcgggatccatctactatttgtcggctgaccaccgctttgacgctaatgaagaggaggttggacgtgtaaccgaatgcggaggtgaagttggaaggctaaatgttgtcggtggtgctgagattggtccccttagatgttggccaggtggtctatgcctctcaagatcgattggtgatcaggacgtaggtgaatttatcattccggttccttatgtgaagcaaattaagctgtctaacgctggaggtcgtcttattatttcaagtgacggtgtttgggatgctttgactgcggaaatggcttttagatgtgcacgggggcttcctcctgaggctgcagccgagcaaattgttaaattgaatcaaaaggattgagagatgatacaacttgcattgtcattgacataataccaccagagaaacaaaaatgcactatagaatctccaaaaacgccaggaaaaggccttgtccttctaaaaaatttcttcttaaggaaaacggcatctggttcattgtctctcgctgacaaggataattatcccgagccagatttcgtggaggaggtctttgaggatggatgcccatccctttcgaggaggcttaattctgaatatcctgtccgagatatgttcaagctttttgcatgtgcaatttgtcaaattgacttggagtctggccaaggcatatccatacacgagggttcgtcaaagacagggaagctgcgtccctgggatggccctttcctttgtcacagttgccaggaaaagaaagaggcgatggaggggaagcgtcactcgcgagactcctcgtcaagaaatagcgggtcaagtgaatagtgactaaagccaggagtcatcttgaggcgaccacctagcggtgtgacgagctaactcttgttgcagttgtcattgtagcagcacttcctctatacatggattaccattggacatagacagatgttggaacttggatggtgccatgcgtacatatgttggacctaatgcggtaatggaccgtcggccaaattcaatcgcctctaggtaccacaccggcgacggcgtcttcggcaaggcttgtagcagtagctcatgcaggtagtgatgacaagggactgttagcgaagaatgtcgacagcggccaatggtcatgtaaattgttcatcgtatagaggtgcaagtgacaattagccacggttttgtaattctgagctaggattagctattgggaccctgtaattcgtctgggcagacctcaaactagaggtcaacaacgtagcctggcctattgtagaatgtatcttgccctacagtcttcatgatacaacgctgtaattaggctggtgccggtgtaccatcctctcgttcttctatgttagatctcgactccactctcctcgtcgtgtatagccctatagcagactatagacttagtccaaaaccacatcaactttgtttatttcaaaattaagtaagcacatagatttgtttc

SEQ ID NO: 20280 - DNA, 200 bp, Zea Mays
cgcgccactccagtacaagcagagcgcgggggcggcgatgaagaggagagcgccgcctctgaacgagagtgaatttccgcgggaggagccccggcctctcgggcggaagaaggtcctcgatgacgggtcggtcgcgccaatctgtggaggcagtagagcggagagagcgagagcgagacgaaaccctcgggtggaaatcc

SEQ ID NO: 20281 - DNA, 2096 bp, Zea Mays
gttttagctgaagtagcactatatcaggcgtcagaatggcaccacatcctccacgagggaggttactgttgcgggagtcttcagcaggtcactcgccacatgcgccttccagcagaccgacaatgaagcgttgcttgctcgctcctcgacgaccaaggagaccgaaaaaactgctagaaaaaggcatgtctcactaactgaaactatacttcttgcgtgaaatatggcaagcttcacatgtgaaaaactaccagttacacaatgaaaaactgtagatttcactgaacatgtgaagcttgaggtgctaaccacgactatgcttttatttatgttcttattttcactcaataaagtattttgttctcatgtccggtgctcttgtgtctactggttataaacaataaatgctatgatggagctaagggtgatctgtggtcatgtggagtgattttctttgtcctcatggcggggtacctcccatttaaagattcaaacctgatgtcgctttacaagaagatcttcaaagcggatttcagttgcccatcctggttctccacaagtgcaaagaagctcatcaagaagatacttgatcctaatgctaacactatgagttctgttgtttgtagccatcatttaactcattttgttcaacatctgcagagttaataactgtgtaccatcgttctgtggcctgtgtagataatagctattgcggagcacattaacaatgagtggttcaagaaggtttatcaacctcccagatttgaaacaacagatgttattatggacgcaactttgatcctgaatgcgcacaactttagttgttctgtctgtttttagaggattcatttttagataggttgaatattgtcaaaatttggttgttcgaaatggttatgattgttgagttgattcttgatagcattactaaacaataacctatgcgtgcacaagtgtccctcattgcaatgcacgagcatatacctatcttgtcactgagtttgattctttggtgccaggtgcttctaatatcaatgtcactgacagccagatcccactgactgtgccaaactctcacattggaagagatgttgttgttcacgctgctcctggtgatcttagaaagggccatcgaatctgtttcaagttccagcaatggagcagtgaagcacacattcatgaggattgacagatgaatcgacgagagccatggaagcagcctttgctcaagaaaggtgacatcgtggtcgtggagatctccaacctctatcaggtggctatgctggtcaacgatctgtgcaggtcgaagagcgtgaacgacctatcctccccatcatgccaaacccacaaggacgacgacgacaacaacctagaggacgaggatgagtggcaggacgggaaaaagtttaatgcggtggccaccttcaagatcctcggcgaggttgacattgctcaccttagttagactttagaaacccagtcatctgcttctgcgttggtggtgctgagttcgtgcatttcagagtgttcgctgctactgttagtgatactgctcccctttttggttgttgccacgagcttagatttcataagctaaccgccgtcgttagtgaaacagctcattatgatcctaattgttctgtaaattttcaagtttaaatagccatgcctattttactgattgaacagatgcaacacgttattgtgtaccatactttgtgtaagtcgtcgacttggttgacttgtacctatggtacgtagcatgctatctgtaatactttgtcaactggtgtgttctcatttatgtcggcgcttgttccgtgagtttcattcatgtgagtttttattttgtctaggctcccctcattgtcttatgtgattctgcatgtattcagatctcagatacccacatcatatcgaggataaagttctcaaatgaaattgtgttagtaatattgattctatatcacccccatgcgtgaaaatagcattacaaacttggaactaagatattctaaacaaccattgaaccttggtcatgttttccaattagcatctaaaaagtactttaacaactagctaagagtacttctata

SEQ ID NO: 20282 - DNA, 2209 bp, Zea Mays
atctgccaaaaaggaaaaaatgggtggtacctcgctagccaaaaaaaatatacggcactaaaaccgcggctcatgctaaccaccgatggaactaaatcctcggcacccaccacccatttagattgagtccagtagtttcctttttcattccacgacatcccctgcacatccttgccggtggcgacttcacctccacatcctgccagcggcgacttcaactccccatcctgccagcggcgactttacctcccatttcttgccggcagcaacttcacatccccttcagcactctgtcccaagatcaggatggctccagggaggatgggatcacgatgcaaaagggatgccctagcagaaactactcctactgaatatgagaaacagagggcagcacatgtgatgaggaacaaccaaatgttccaacggcttgggattaatcagctgcgcacaataatgactgctacaagagtaaggagcaaagatgattgttcagaggaatctgggtctttgtatgacggtgaggacagtgaaggctctgagcaagaggaggatttccaggttgcaaaaggtgtacgtagccacaactcaactcatgttgctgaaaaaactacgcaaggaacacgaggacataaaagggttgtggcccctggtgtaaatgaacaacaaattagaatcactaggcaaaggagtgctaccataaaccaacaatccttcctaaacctaactaccactacacatcctagttcaacagctaccacaaaccaagaatccacccaaaatattacttctgcaacacaatttacttcaagtgcagccgctgaacaaaattacacccaaggcctgactgctgctgcacaagctaattctcccatacaagctgacatcagcgaccacattgcagatgaagaattggtaccaaggcaaagaagtatgggcaaacaacttgaatccttgagcagagggttaggcactaagattccaatccaaatttatgatggaaagcgaaggccagaaccccctattcaggtcgcaaagtttgcatcagagggtgggatcatactcaggcaacatattccaatatttccacactggaaggagtacaagaagcaagagaacgagggtaaaattacagactatattggcaagcttgctggtcaattcaccatggatgtggacagtaaggcagtcaaagatgcatgtgttgatatgataaaaggagggcagcgccagatgaggtataggctgaaaaggaagtacttcaccggggttcctgcaaatcaagtgaggactacatcgcctgttccatgtatgactgatgaccaatggaaagatttggtacaaatgtggtctaccccaaaccacaagaacaattgtgtcaagaacaaacttaattgtgagaaggtgcaatttccacagtgcacaggatctcaatcctacattgcaaaatcctatgtagtggtaagaaattgttatgtgtggatgaactcgttgcttatcaaattcttggttaatgtatgaatgggtactgctactacctaccaacacggtcaccttaatatctctaatatttagactacatcattgcttttttaacgtatgtactacttcttcttggttgttttttattttcaacaaccattttgtgtatttacaattcctagctagagtacggtctttaaaatacatatgatgccttcaaatataattgtttttgctagcagatcttgtgctttgactgagttaattgcttatttagttgattatatagtcatgttaagcgcataaatgactcgatacagattaaatcatcaccaaattctagaataaaacatgtagagttgtaccacaatagctagaaatatgcagtctcaggttcccatctttgaactcctagtcagatagctgaaggtcatgtacataaaagaacgttgaggttggggagagttcgatttcaaaagatgtaactgcagtgaacctctgactaacctgtagtgattacagtgctcctacaagccttcagatgcttgtagcagcagctacatctgctgcaactagatgcttggaagctttttattgaaactattttggccgcatctaatttttttagattaagcttgctacacagtaattgctgatttaggtactgctaagcagctgagctacatctgctgtaaccagttgcttggaagctattcactctaattgtttt

SEQ ID NO: 20283 - DNA, 2126 bp, Zea Mays
caaaaaggaaaaaatgggtggtacctcgctagccaaaaaaaatatacggcactaaaaccgcggctcatgctaaccaccgatggaactaaatcctcggcacccaccacccatttagattgagtccagtagtttcctttttcattccacgacatcccctgcacatccttgccggtggcgacttcacctccacatcctgccagcggcgacttcaactccccatcctgccagcggcgactttacctcccatttcttgccggcagcaacttcacatccccttcagcactctgtcccaagatcaggatggctccagggaggatgggatcacgatgcaaaagggatgccctagcagaaactactcctactgaatatgagaaacagagggcagcacatgtgatgaggaacaaccaaatgttccaacggcttgggattaatcagctgcgcacaataatgactgctacaagagtaaggagcaaagatgattgttcagaggaatctgggtctttgtatgacggtgaggacagtgaaggctctgagcaagaggaggatttccaggttgcaaaaggtgtacgtagccacaactcaactcatgttgctgaaaaaactacgcaaggaacacgaggacataaaagggttgtggcccctggtgtaaatgaacaacaaattagaatcactaggcaaaggagtgctaccataaaccaacaatccttcctaaacctaactaccactacacatcctagttcaacagctaccacaaaccaagaatccacccaaaatattacttctgcaacacaatttacttcaagtgcagccgctgaacaaaattacacccaaggcctgactgctgctgcacaagctaattctcccatacaagctgacatcagcgaccacattgcagatgaagaattggtaccaaggcaaagaagtatgggcaaacaacttgaatccttgagcagagggttaggcactaagattccaatccaaatttatgatggaaagcgaaggccagaaccccctattcaggtcgcaaagtttgcatcagagggtgggatcatactcaggcaacatattccaatatttccacactggaaggagtacaagaagcaagagaacgagggtaaaattacagactatattggcaagcttgctggtcaattcaccatggatgtggacagtaaggcagtcaaagatgcatgtgttgatatgataaaaggagggcagcgccagatgaggtataggctgaaaaggaagtacttcaccggggttcctgcaaatcaagtgaggactacatcgcctgttccatgtatgactgatgaccaatggaaagatttggtacaaatgtggtctaccccaaaccacaagaggcaagaaaaatataaagatatggaacctagtgcaattgatcttttcaaggagatgcattgcagcaagaagaaaggatttagtgaggccgttcagaaagctataggtgatatggaagcaatggtggcaacaccagttgaagatggacagcatgtgctgtcttcgacagaagttgtttccaatgtgctatcgagttcaagtaaatttcttcacaatgctggccttttacctacctccaagagaagcaatacaaggactatctcgacaaggatgcaagagcttcagactcaattggacactgagaggcaagaaaaaaatggatttcgagaagaaatggaaaccttaaaggcccagtcacaagcatctgaggcaaccattgctaatcaaacgaccgagattgcagatttgaagaagtccttatcagaaaataacagtctccttcgacaaatattaagcatcaatcgtggccaaatgactcctccttaagtacacttgctagggtgttggtgtcaaccatcctgaagatcgatctcacaaaactttagacctcgttttatccttatgcttgctgtagaaattaataggaactacaacttgttctattgttcacttgttatagaggattatgaatcatgtttaatgttaaaagctatgtgttggatgcattatgcttgaaatatatgtggatattgttactttggatgtttgtaaaaaatatgtgcattatgtgtttgatggttgtgggcatcaagcattagtgacgaatc

SEQ ID NO: 20284 - DNA, 2142 bp, Zea Mays
tagccaaaaaaaatatacggcactaaaaccgcggctcatgctaaccaccgatggaactaaatcctcggcacccaccacccatttagattgagtccagtagtttcctttttcattccacgacatcccctgcacatccttgccggtggcgacttcacctccacatcctgccagcggcgacttcaactccccatcctgccagcggcgactttacctcccatttcttgccggcagcaacttcacatccccttcagcactctgtcccaagatcaggatggctccagggaggatgggatcacgatgcaaaagggatgccctagcagaaactactcctactgaatatgagaaacagagggcagcacatgtgatgaggaacaaccaaatgttccaacggcttgggattaatcagctgcgcacaataatgactgctacaagagtaaggagcaaagatgattgttcagaggaatctgggtctttgtatgacggtgaggacagtgaaggctctgagcaagaggaggatttccaggttgcaaaaggtgtacgtagccacaactcaactcatgttgctgaaaaaactacgcaaggaacacgaggacataaaagggttgtggcccctggtgtaaatgaacaacaaattagaatcactaggcaaaggagtgctaccataaaccaacaatccttcctaaacctaactaccactacacatcctagttcaacagctaccacaaaccaagaatccacccaaaatattacttctgcaacacaatttacttcaagtgcagccgctgaacaaaattacacccaaggcctgactgctgctgcacaagctaattctcccatacaagctgacatcagcgaccacattgcagatgaagaattggtaccaaggcaaagaagtatgggcaaacaacttgaatccttgagcagagggttaggcactaagattccaatccaaatttatgatggaaagcgaaggccagaaccccctattcaggtcgcaaagtttgcatcagagggtgggatcatactcaggcaacatattccaatatttccacactggaaggagtacaagaagcaagagaacgaggggtcaattcaccatggatgtggacagtaaggcagtcaaagatgcatgtgttgatatgataaaaggagggcagcgccagatgaggtataggctgaaaaggaagtacttcaccggggttcctgcaaatcaagtgaggactacatcgcctgttccatgtatgactgatgaccaatggaaagatttggtacaaatgtggtctaccccaaaccacaagaacaattgtgtcaagaacaaacttaattgtgagaaggtgcaatttccacagtgcacaggatctcaatcctacattgcaaaatcctatgtagtggtaagaaattgttatgtgtggatgaactcgttgcttatcaaattcttggttaatgtatgaatgggtactgctactacctaccaacacggtcaccttaatatctctaatatttagactacatcattgcttttttaacgtatgtactacttcttcttggttgttttttattttcaacaaccattttgtgtatttacaattcctagctagagtacggtctttaaaatacatatgatgccttcaaatataattgtttttgctagcagatcttgtgctttgactgagttaattgcttatttagttgattatatagtcatgttaagcgcataaatgactcgatacagattaaatcatcaccaaattctagaataaaacatgtagagttgtaccacaatagctagaaatatgcagtctcaggttcccatctttgaactcctagtcagatagctgaaggtcatgtacataaaagaacgttgaggttggggagagttcgatttcaaaagatgtaactgcagtgaacctctgactaacctgtagtgattacagtgctcctacaagccttcagatgcttgtagcagcagctacatctgctgcaactagatgcttggaagctttttattgaaactattttggccgcatctaatttttttagattaagcttgctacacagtaattgctgatttaggtactgctaagcagctgagctacatctgctgtaaccagttgcttggaagctattcactctaattgtttt

SEQ ID NO: 20285 - DNA, 1699 bp, Zea Mays
gttgatgttaccgtcccggcaacgaaaccaaacagcactagatgtcaccgtttccaacagccttattcaaatggtctacgaaatacacttttgtatgcagcaacactgatgcagtgtatgtgtggcgggtcattttccccctattcctctaaaatattaagttccgctggatcaacagccgtgaactcaccctcttgcgagaacaagctactagtctggacaaccttcctctgcgggatctggctgatcttgagccgctcctcgtcggtcagctcccagtcgaatatcccaaggttctgcctcagcctctccttgctgtaactcttgacgatgcatgtcactccctgctcatgtatccatcgcaacgccacctgagcaaaggaagacatgccaccattgaaacaggtgggtggcagggtgggttagtgctgaaacagggttgtcttgtgttgacactaaaataagttccaaataaggttgtttggtttaggatcaatagttaagacaagactatctaaatgttgttccaattatcccttaaaattgtagggataatggaggacgtcagggacgtcttgtcgtgtcccacaaccagaaacaggtgggtggcagggtgggttagtgctgaaacagggttgtcttgttgacgctaaactcgaatgaagtcatcgaaagttcagaagaagagattaaatatacaaaataatagtaataataataaataatgcccccacgtgccatatccttctagaaacaaccttgaaactacttttttgacatagcggcacggcaccaagagatcgagaccaacgcaaacacaaacacatgatcaaccaaacctcatcggccgggcaaacagcagcatacctgcgcgacggttttccccctcgccttggctatcgcggcgagcacctcggagtccagcacggcgctgccctgcccgtcccagttctgccctcccagcggcgagtaggccgcgacgtggatgcccctgtcggcgcagtacgccctgagcgtccgctgctgccacgccgggttcagctccacctggttcaccgcgggcgggaccgtggcgacggccaggaccccgtcgaggtgcctggtggtgaagttgctcacgccgatcgccttggcgaggcccagccgctggcactcctccatggcgcgccacacgcccgcgaggtccagcggcacggcgttctccttcctggtcgggagctcgggcggccccggtttcaggcacaccggccagtggatcagcggcgatagggacggactagcggcttacttgagtgtttcccggagggacggcagcacgaggtccgggtggttctgcgagcaccacagcttggacgtcacgaacagatcctcccgggaccgcagggtcccgcgccggagcgcctcggccacggcgtcgcccagcggcttctcggtgccgtacatggaggccgtgtcgaagtggcggaaccccacctcgatggcggagagcacgccgtccttgacggcctcgtgcaccagagggaacgacgccgtgcccatgccgaccatcggcatcgccgtcctcgcgttgcccgaccgcagggccacctcgggcaccaccgccgtcgtccccgcggatgccatgttggtagggtcagatgtggtgcgctgccgctgcagtacaacgtctagactagatgcgagagacagagagggggtg

SEQ ID NO: 20286 - DNA, 1721 bp, Zea Mays
ctgccatgtgccagcgcatgagtggagactggagaaagagccctactaccctagctaagccggcacagcggcggccggcgatacacgtgcgagcggcggcgtgaggaaaggcgggcggggtgagagatacctaaccactaagcggctgcggcagcgccgcagcataaccggcaccaggtcaaaaaacgacgactgggcagggcccttgccacaccagacaagcacagacaaacacgcgagcggcatgccatgtcatcaccggcagcaaggagcatcacttgctactccaaaattccagagttcttggtgggcactaatgggcagccaatgcccgcagtggggctcggcacagcatcacacccatttgtggcggaggatgtcaggacatccgtgctcactgcgctggagcttggctaccgccacatcgacactgcgggactctacgcctctgagcgagttgtcggcgaggccatggctgaggcagtgtcgtgcggccttgtggcgtccagggacgagctgtttgtgacatccaaggtgtggtgcactcaatgccatcctgagcttgtgcttccgtccctcaaggagagcttgaagttgaattgaatcccacttggcaacagaaaaaactaattgagttctgcaatgacaagggtattcatgtgacggcttattctcccctaggaggccaaagaatctctaaactgaatccagtacgacaatctgacatattggaagagattggaaaggctagagggaagtcagtggcccagatttcactgaggtggatatacgagcaaggtgcaagcatggtggcaaagagcttgaaaagggagaggcttaaggagaacattgaaatcttcgattgggaattgagtgacgaagatcggtttaagattggtcagatagcacagcgcaagttggtcacagtacagaatctcctgtgtcctgaaggtatctccagtgtggatatcttggatgttgatgttattgaaatatagctgtggtctccatctatttgcaatgggcaaaagaattggtgtacaacatgttggatacatcagaagcagtctttcacgtttctatgtactaatgttcatcttgctaaattcacatgtgcacctttctattgtcaccaatacttttgtaccattttctggattaatctactattaaaaatgcaaaaatatataacgatccaaaaacgtgataggttttttcgttagctagctttgttagtatgctggaaccaaatatttttaggaaactcactttaaatgatggcgtcaaagatatggttaactgctatacattgctattttgttgttgaacttagaacacctggacctcattctattgaaggcgagcatgtgctctaggatgctaacactatgtttaaggggcaataattagcatgctggaacattctatagttggtgcatgtgacaatgttcactgacaaagaaatataggatgcaccagaggccaaatatagagtttcttacgctggtaatgagttatatgtcatcaagtagtttcataactagaggccaaatatcgaatgcttgttttaaatctgtgaatcatgtgagccttgacagtgagataaatatttggcattcacgtttatatcatataaattttgattatataacatacttagttggtattaatgtaatcccaaaaattaatttggtcaaagattccaagttccatgtatgagt

SEQ ID NO: 20287 - DNA, 1772 bp, Zea Mays
ctgccatgtgccagcgcatgagtggagactggagaaagagccctactaccctagctaagccggcacagcggcggccggcgatacacgtgcgagcggcggcgtgaggaaaggcgggcggggtgagagatacctaaccactaagcggctgcggcagcgccgcagcataaccggcaccaggcaccgtatgcatatcctgaatttcagcaccgcatacactttctacagggcccttgccacaccagacaagcacagacaaacacgcgagcggcatgccatgtcatcaccggcagcaaggagcatcacttgctactccaaaattccagagttcttggtgggcactaatgggcagccaatgcccgcagtggggctcggcacagcatcacacccatttgtggcggaggatgtcaggacatccgtgctcactgcgctggagcttggctaccgccacatcgacactgcgggactctacgcctctgagcgagttgtcggcgaggccatggctgaggcagtgtcgtgcggccttgtggcgtccagggacgagctgtttgtgacatccaaggtgtggtgcactcaatgccatcctgagcttgtgcttccgtccctcaaggagagcttgaagttgaattgaatcccacttggcaacagaaaaaactaattgagttctgcaatgacaagggtattcatgtgacggcttattctcccctaggaggccaaagaatctctaaactgaatccagtacgacaatctgacatattggaagagattggaaaggctagagggaagtcagtggcccagatttcactgaggtggatatacgagcaaggtgcaagcatggtggcaaagagcttgaaaagggagaggcttaaggagaacattgaaatcttcgattgggaattgagtgacgaagatcggtttaagattggtcagatagcacagcgcaagttggtcacagtacagaatctcctgtgtcctgaagctcctgtcctctagtctcatgttcgggtgcaaaaacaagcaatgcgctctagcacttgcgtgcacaaattctaggactgttagaccaactccagcaaaggtggctccgtatccgtaaaatacgtaggcgcgatcaccattgcggagcctccaaccgcgggcgttccagcagatagactccgtatcacactcgcaaccgcgggcgttccagcagatagactccgtatcacactcgcacaccatatctgcatgcaagtgatactgacagatgacagatgggtcctacgagcgtagacttttattgctacgttgctcagatatgtgcgcagaggagaaataatacatgggaaaagggagcgcaaatacacggcgtacattttgtggagagggatacggagtcagttggactgatgaatagtgcacagtgcaaaaggagattgggagccacatacggaggctgctggagttggtcttagtgacaagactgctcacttctctttttttctagcgcttttatgatgatcgatatagaaacaaaactgcactacatcgatcgtgataactatattgactggcataatgtctgttgttgggtatatttgttctttcctttggtttaaatcacgtttctctatactacattcatgttcatcttgtcaaatttacacatacatctttctgttgtcactaactcttttagtattagacttggtcatttatgagttgtatgagtacatagacttgtatgttaatggagtctatagtgactacgaatagacttatttattgagactttt

SEQ ID NO: 20288 - DNA, 1849 bp, Zea Mays
ctgccatgtgccagcgcatgagtggagactggagaaagagccctactaccctagctaagccggcacagcggcggccggcgatacacgtgcgagcggcggcgtgaggaaaggcgggcggggtgagagatacctaaccactaagcggctgcggcagcgccgcagcataaccggcaccaggtcaaaaaacgacgactgggcagggcccttgccacaccagacaagcacagacaaacacgcgagcggcatgccatgtcatcaccggcagcaaggagcatcacttgctactccaaaattccagagttcttggtgggcactaatgggcagccaatgcccgcagtggggctcggcacagcatcacacccatttgtggcggaggatgtcaggacatccgtgctcactgcgctggagcttggctaccgccacatcgacactgcgggactctacgcctctgagcgagttgtcggcgaggccatggctgaggcagtgtcgtgcggccttgtggcgtccagggacgagctgtttgtgacatccaaggtgtggtgcactcaatgccatcctgagcttgtgcttccgtccctcaaggagagcttgaagttgaattgaatcccacttggcaacagaaaaaactaattgagttctgcaatgacaagggtattcatgtgacggcttattctcccctaggaggccaaagaatctctaaactgaatccagtacgacaatctgacatattggaagagattggaaaggctagagggaagtcagtggcccagatttcactgaggtggatatacgagcaaggtgcaagcatggtggcaaagagcttgaaaagggagaggcttaaggagaacattgaaatcttcgattgggaattgagtgacgaagatcggtttaagattggtcagatagcacagcgcaagttggtcacagtacagaatctcctgtgtcctgaaggtatctccagtgtggatatcttggatgttgatgttattgaaatatagctgtggtctccatctatttgcaatgggcaaaagaattggtgtacaacatgttggatacatcagaagcagtctcatgttcgggtgcaaaaacaagcaatgcgctctagcacttgcgtgcacaaattctaggactgttagaccaactccagcaaaggtggctccgtatccgtaaaatacgtaggcgcgatcaccattgcggagcctccaaccgcgggcgttccagcagatagactccgtatcacactcgcaaccgcgggcgttccagcagatagactccgtatcacactcgcacaccatatctgcatgcaagtgatactgacagatgacagatgggtcctacgagcgtagacttttattgctacgttgctcagatatgtgcgcagaggagaaataatacatgggaaaagggagcgcaaatacacggcgtacattttgtggagagggatacggagtcagttggactgatgaatagtgcacagtgcaaaaggagattgggagccacatacggaggctgctggagttggtcttagtgacaagactgctcacttctctttttttctagcgcttttatgatgatcgatatagaaacaaaactgcactacatcgatcgtgataactatattgactggcataatgtctgttgttgggtatatttgttctttcctttggtttaaatcacgtttctctatactacattcatgttcatcttgtcaaatttacacatacatctttctgttgtcactaactcttttagtattagacttggtcatttatgagttgtatgagtacatagacttgtatgttaatggagtctatagtgactacgaatagacttatttattgagactttt

SEQ ID NO: 20289 - DNA, 1897 bp, Zea Mays
ctgccatgtgccagcgcatgagtggagactggagaaagagccctactaccctagctaagccggcacagcggcggccggcgatacacgtgcgagcggcggcgtgaggaaaggcgggcggggtgagagatacctaaccactaagcggctgcggcagcgccgcagcataaccggcaccaggtcaaaaaacgacgactgggcaggcaccgtatgcatatcctgaatttcagcaccgcatacactttctacagggcccttgccacaccagacaagcacagacaaacacgcgagcggcatgccatgtcatcaccggcagcaaggagcatcacttgctactccaaaattccagagttcttggtgggcactaatgggcagccaatgcccgcagtggggctcggcacagcatcacacccatttgtggcggaggatgtcaggacatccgtgctcactgcgctggagcttggctaccgccacatcgacactgcgggactctacgcctctgagcgagttgtcggcgaggccatggctgaggcagtgtcgtgcggccttgtggcgtccagggacgagctgtttgtgacatccaaggtgtggtgcactcaatgccatcctgagcttgtgcttccgtccctcaaggagagcttgaagttgaattgaatcccacttggcaacagaaaaaactaattgagttctgcaatgacaagggtattcatgtgacggcttattctcccctaggaggccaaagaatctctaaactgaatccagtacgacaatctgacatattggaagagattggaaaggctagagggaagtcagtggcccagatttcactgaggtggatatacgagcaaggtgcaagcatggtggcaaagagcttgaaaagggagaggcttaaggagaacattgaaatcttcgattgggaattgagtgacgaagatcggtttaagattggtcagatagcacagcgcaagttggtcacagtacagaatctcctgtgtcctgaaggtatctccagtgtggatatcttggatgttgatgttattgaaatatagctgtggtctccatctatttgcaatgggcaaaagaattggtgtacaacatgttggatacatcagaagcagtctcatgttcgggtgcaaaaacaagcaatgcgctctagcacttgcgtgcacaaattctaggactgttagaccaactccagcaaaggtggctccgtatccgtaaaatacgtaggcgcgatcaccattgcggagcctccaaccgcgggcgttccagcagatagactccgtatcacactcgcaaccgcgggcgttccagcagatagactccgtatcacactcgcacaccatatctgcatgcaagtgatactgacagatgacagatgggtcctacgagcgtagacttttattgctacgttgctcagatatgtgcgcagaggagaaataatacatgggaaaagggagcgcaaatacacggcgtacattttgtggagagggatacggagtcagttggactgatgaatagtgcacagtgcaaaaggagattgggagccacatacggaggctgctggagttggtcttagtgacaagactgctcacttctctttttttctagcgcttttatgatgatcgatatagaaacaaaactgcactacatcgatcgtgataactatattgactggcataatgtctgttgttgggtatatttgttctttcctttggtttaaatcacgtttctctatactacattcatgttcatcttgtcaaatttacacatacatctttctgttgtcactaactcttttagtattagacttggtcatttatgagttgtatgagtacatagacttgtatgttaatggagtctatagtgactacgaatagacttatttattgagactttt

SEQ ID NO: 20290 - DNA, 1527 bp, Zea Mays
gacataaaagttactacaaaaacaatggaaccttcaaatggaatatgttgatttgtacctgattcattggcccatggctgtaaagcctagcaagcctcacttcccaatgaaaagggaggacattgtgccgatggaccttagtggtgtatggcaggcaatggaggaatgccatcgacttggccttgctaaaatgattggtgttagcaatttcacaacaaagaaattgcaggagctgcttgccattgcaaaaatttccccatttgtaaatcaggttgaattgaatcccacttggcaacagaaaaaactaattgagttctgcaatgacaagggtattcatgtgacggcttattctcccctaggaggccaaagaatctctaaactgaatccagtacgacaatctgacatattggaagagattggaaaggctagagggaagtcagtggcccagatttcactgaggtggatatacgagcaaggtgcaagcatggtggcaaagagcttgaaaagggagaggcttaaggagaacattgaaatcttcgattgggaattgagtgacgaagatcggtttaagattggtcagatagcacagcgcaagttggtcacagtacagaatctcctgtgtcctgaaggtatctccagtgtggatatcttggatgttgatgttattgaaatatagctgtggtctccatctatttgcaatgggcaaaagaattggtgtacaacatgttggatacatcagaagcagtctcatgttcgggtgcaaaaacaagcaatgcgctctagcacttgcgtgcacaaattctaggactgttagaccaactccagcaaaggtggctccgtatccgtaaaatacgtaggcgcgatcaccattgcggagcctccaaccgcgggcgttccagcagatagactccgtatcacactcgcaaccgcgggcgttccagcagatagactccgtatcacactcgcacaccatatctgcatgcaagtgatactgacagatgacagatgggtcctacgagcgtagacttttattgctacgttgctcagatatgtgcgcagaggagaaataatacatgggaaaagggagcgcaaatacacggcgtacattttgtggagagggatacggagtcagttggactgatgaatagtgcacagtgcaaaaggagattgggagccacatacggaggctgctggagttggtcttagtgacaagactgctcacttctctttttttctagcgcttttatgatgatcgatatagaaacaaaactgcactacatcgatcgtgataactatattgactggcataatgtctgttgttgggtatatttgttctttcctttggtttaaatcacgtttctctatactacattcatgttcatcttgtcaaatttacacatacatctttctgttgtcactaactcttttagtattagacttggtcatttatgagttgtatgagtacatagacttgtatgttaatggagtctatagtgactacgaatagacttatttattgagactttt

SEQ ID NO: 20291 - DNA, 1394 bp, Zea Mays
aaaagttactacaaaaacaatggaaccttcaaatggaatatgttgatttgtacctgattcattggcccatggctgtaaagcctagcaagcctcacttcccaatgaaaagggaggacattgtgccgatggaccttagtggtgtatggcaggcaatggaggaatgccatcgacttggccttgctaaaatgattggtgttagcaatttcacaacaaagaaattgcaggagctgcttgccattgcaaaaatttccccatttgtaaatcaggttgaattgaatcccacttggcaacagaaaaaactaattgagttctgcaatgacaagggtattcatgtgacggcttattctcccctaggaggccaaagaatctctaaactgaatccagtacgacaatctgacatattggaagagattggaaaggctagagggaagtcagtggcccagatttcactgaggtggatatacgagcaaggtgcaagcatggtggcaaagagcttgaaaagggagaggcttaaggagaacattgaaatcttcgattgggaattgagtgacgaagatcggtttaagattggtcagatagcacagcgcaagttggtcacagtacagaatctcctgtgtcctgaaggtatctccagtgtggatatcttggatgttgatgttattgaaatatagctgtggtctccatctatttgcaatgggcaaaagaattggtgtacaacatgttggatacatcagaagcagtctttcacgtttctatgtactaatgttcatcttgctaaattcacatgtgcacctttctattgtcaccaatacttttgtaccattttctggattaatctactattaaaaatgcaaaaatatataacgatccaaaaacgtgataggttttttcgttagctagctttgttagtatgctggaaccaaatatttttaggaaactcactttaaatgatggcgtcaaagatatggttaactgctatacattgctattttgttgttgaacttagaacacctggacctcattctattgaaggcgagcatgtgctctaggatgctaacactatgtttaaggggcaataattagcatgctggaacattctatagttggtgcatgtgacaatgttcactgacaaagaaatataggatgcaccagaggccaaatatagagtttcttacgctggtaatgagttatatgtcatcaagtagtttcataactagaggccaaatatcgaatgcttgttttaaatctgtgaatcatgtgagccttgacagtgagataaatatttggcattcacgtttatatcatataaattttgattatataacatacttagttggtattaatgtaatcccaaaaattaatttggtcaaagattccaagttccatgtatgagt

SEQ ID NO: 20292 - DNA, 2328 bp, Zea Mays
ctggtcgcgcgcgtgcctagctagcccgatcgcgctgcgcgcacaagtggactgactactgagcaagcaaccaagttccaaccatacatcgcgcgcgcgcgcggccgaatgcagtcgacggcggccatgcggagcggcggcggcggcaataagcgcagcctgctgctgctgctgtcggcgtggtggctactcctcggcagcctcgtcgcccagctcccggcggcccgcggcggcagcggccacgtcgtcacgcgcatgcccgggttcgacgggcccctcccgttccacctcgagacagggtacgtggaggtggacgagcagctcggcgtgcagctcttctactacttcgtgcggtcggagaaggacgaccccggcgaggacccgctgctgctgtggctgtccggcggccctggctgctccggcctctccggcctcgcctacgagatagggcccttccattttgatgctcgagggtacaggggcgggtttcctacccttctctaccgacccgagacgtggaccaaggtgagcaacatcatatttatggattctccggtggggactgggttctcgtacgccacgtcggatgaggggctcaagtccagtgacactcaggctgtcaggcagctagccatttttctcagaaaggtcagacgccagagagccctgatgtgctcgtgctcgtgctgtgctgtgctgtgctgcccgctctcagaagatttgtacagcgtgcacgtctcccagttgtgcatgttgatcgcaaactgaaattgtgtgagcgttaagcgagcgagcgcatgaccggcttcctgatcttcctgtgctcatgcagtggcttgaagagcatcccgagttcctgccgaacccgctctacatcggtggagattcatacggcggcatgattgttcctgctcttgcactacaaatacacacaagtagcgcaacaaccctcctccacatctctacggtgccactgttacaaacctacagcagttataattgttatgttctgtttacaacaatttacaggtacagaactcggtgaaaacccatccttcaacctcaagggctacgttactggcaacccggtgacggatagccagttcgacacggacggcgtggttccgttccttcacggcatgggactgataccatacgagttttatgagaacgctcgcgagatgtgtggtggaaagtacagtgatgcagccagtgttgcgtgcgcggaggtcacccgagctatagccaacatcacgtcggctgtcaaccgggaacacgtcctggagcctgcttgcccggacgacgacgacgacgagctgttcggccccaaaactaccatggcggagacagatggcggcacgagtcgtaggctgatgctgcagtcggcagactatttcctgccagctgggttcaaatgtagaagagcttcgtacgtcctatcccgcgtctgggcaaacgacgaaacggttcaggagagcctcggtgtccgcaaggggacaatcggagcgtggaaacgatgcaaccaggacatactttacaaccagaacgtccaaagtgtagtgccgtaccattcgaggctagccgcgaaagggtacagggcgctgatatacagcggcgatcacgatcgtatcgtacccttcgttggcacacaagcatggattaggtatctcaacttgaccgttgtagatgactggcgaccatggtatgttggtggccaagttgccgggaactcaggcaacctaatatatgcaactgtgaagggcgctgggcatactgcaccggagtacaagcccacggagtgccaaacgatgtttaggaaatgggtttcacgggatcctctctgatattacgtcgtctgagagaattacgtacgtgtcgctcctatgagtgtaggccggacgtacgtggtatgccctactgcaggccggagatcaaaataaaggagattttccattttcatgtagaaaaaatgagtgtccatggtgtctacttgttccctgtattaaaaataaatgcaatttttatactgcatgtagccactctgtcggagaagaaatctccccggccaggtggcggattgcacccgccctagatcctaaaaagaggaggggtctaaacgttttgtttgttacgagactggtggatcagcacacgggagcatgcaagggtttagagtggttcgagccgccggagcgtaataccctactccactgtgtgatgtattgctttgggagcttgtatgaacttgtgagtgtgtgcctaagattgtctgtcttataacgccgcatgcctcccattttatagccgaagggggcatgcacaaaggta

SEQ ID NO: 20293 - DNA, 2035 bp, Zea Mays
cccgatcgcgctgcgcgcacaagtggactgactactgagcaagcaaccaagttccaaccatacatcgcgcgcgcgcgcggccgaatgcagtcgacggcggccatgcggagcggcggcggcggcaataagcgcagcctgctgctgctgctgtcggcgtggtggctactcctcggcagcctcgtcgcccagctcccggcggcccgcggcggcagcggccacgtcgtcacgcgcatgcccgggttcgacgggcccctcccgttccacctcgagacagggtacgtggaggtggacgagcagctcggcgtgcagctcttctactacttcgtgcggtcggagaaggacgaccccggcgaggacccgctgctgctgtggctgtccggcggccctggctgctccggcctctccggcctcgcctacgagatagggcccttccattttgatgctcgagggtacaggggcgggtttcctacccttctctaccgacccgagacgtggaccaaggtgagcaacatcatatttatggattctccggtggggactgggttctcgtacgccacgtcggatgaggggctcaagtccagtgacactcaggctgtcaggcagctagccatttttctcagaaagtggcttgaagagcatcccgagttcctgccgaacccgctctacatcggtggagattcatacggcggcatgattgttcctgctcttgcactacaaatacacacaagtacagaactcggtgaaaacccatccttcaacctcaagggctacgttactggcaacccggtgacggatagccagttcgacacggacggcgtggttccgttccttcacggcatgggactgataccatacgagttttatgagaacgctcgcgagatgtgtggtggaaagtacagtgatgcagccagtgttgcgtgcgcggaggtcacccgagctatagccaacatcacgtcggctgtcaaccgggaacacgtcctggagcctgcttgcccggacgacgacgacgacgagctgttcggccccaaaactaccatggcggagacagatggcggcacgagtcgtaggctgatgctgcagtcggcagactatttcctgccagctgggttcaaatgtagaagagcttcgtacgtcctatcccgcgtctgggcaaacgacgaaacggttcaggagagcctcggtgtccgcaaggggacaatcggagcgtggaaacgatgcaaccaggacatactttacaaccagaacgtccaaagtgtagtgccgtaccattcgaggctagccgcgaaagggtacagggcgctgatatacagcggcgatcacgatcgtatcgtacccttcgttggcacacaagcatggattaggtatctcaacttgaccgttgtagatgactggcgaccatggtatgttggtggccaagttgccggattcacaaggaactcaggcaacctaatatatgcaactgtgaagggcgctgggcatactgcaccggagtacaagcccacggagtgccaaacgatgtttaggaaatgggtttcacgggatcctctctgatattacgtcgtctgagagaattacgtacgtgtcgctcctatgagtgtaggccggacgtacgtggtatgccctactgcaggccggagatcaaaataaaggagattttccattttcatgtagaaaaaatgagtgtccatggtgtctacttgttccctgtattaaaaataaatgcaatttttatactgcatgtagccactctgtcggagaagaaatctccccggccaggtggcggattgcacccgccctagatcctaaaaagaggaggggtctaaacgttttgtttgttacgagactggtggatcagcacacgggagcatgcaagggtttagagtggttcgagccgccggagcgtaataccctactccactgtgtgatgtattgctttgggagcttgtatgaacttgtgagtgtgtgcctaagattgtctgtcttataacgccgcatgcctcccattttatagccgaagggggcatgcacaaaggta

SEQ ID NO: 20294 - DNA, 2209 bp, Zea Mays
ggcggccatgcggagcggcggcggcggcaataagcgcagcctgctgctgctgctgtcggcgtggtggctactcctcggcagcctcgtcgcccagctcccggcggcccgcggcggcagcggccacgtcgtcacgcgcatgcccgggttcgacgggcccctcccgttccacctcgagacagggtacgtggaggtggacgagcagctcggcgtgcagctcttctactacttcgtgcggtcggagaaggacgaccccggcgaggacccgctgctgctgtggctgtccggcggccctggctgctccggcctctccggcctcgcctacgagatagggcccttccattttgatgctcgagggtacaggggcgggtttcctacccttctctaccgacccgagacgtggaccaaggtgagcaacatcatatttatggattctccggtggggactgggttctcgtacgccacgtcggatgaggggctcaagtccagtgacactcaggctgtcaggcagctagccatttttctcagaaagtggcttgaagagcatcccgagttcctgccgaacccgctctacatcggtggagattcatacggcggcatgattgttcctgctcttgcactacaaatacacacaagtacagaactcggtgaaaacccatccttcaacctcaagggctacgttactggcaacccggtgacggatagccagttcgacacggacggcgtggttccgttccttcacggcatgggactgataccatacgagttttatgagaacgctcgcgagatgtgtggtggaaagtacagtgatgcagccagtgttgcgtgcgcggaggtcacccgagctatagccaacatcacgtcggctgtcaaccgggaacacgtcctggagcctgcttgcccggacgacgacgacgacgagctgttcggccccaaaactaccatggcggagacagatggcggcacgagtcgtaggctgatgctgcagtcggcagactatttcctgccagctgggttcaaatgtagaagagcttcgtacgtcctatcccgcgtctgggcaaacgacgaaacggttcaggagagcctcggtgtccgcaaggtatagcagtcctacgtgctcgatcgtgcatgcacgcacagttttttttttctctctctctttttcttgaggaaacaaaagccaagattttcagtaaatttggtatcgaacacacactgaacatccctgcaacttttgttgttaagaggttgtttgtttaggactataatctgtctagattatataatccaacaaataatgtgttatttgctggattatataatctggacagattatattctcaaacaaacacccgctaattcttccaggggacaatcggagcgtggaaacgatgcaaccaggacatactttacaaccagaacgtccaaagtgtagtgccgtaccattcgaggctagccgcgaaagggtacagggcgctgatatacagcggcgatcacgatcgtatcgtacccttcgttggcacacaagcatggattaggtatctcaacttgaccgttgtagatgactggcgaccatggtatgttggtggccaagttgccggattcacaaggaactcaggcaacctaatatatgcaactgtgaagggcgctgggcatactgcaccggagtacaagcccacggagtgccaaacgatgtttaggaaatgggtttcacgggatcctctctgatattacgtcgtctgagagaattacgtacgtgtcgctcctatgagtgtaggccggacgtacgtggtatgccctactgcaggccggagatcaaaataaaggagattttccattttcatgtagaaaaaatgagtgtccatggtgtctacttgttccctgtattaaaaataaatgcaatttttatactgcatgtagccactctgtcggagaagaaatctccccggccaggtggcggattgcacccgccctagatcctaaaaagaggaggggtctaaacgttttgtttgttacgagactggtggatcagcacacgggagcatgcaagggtttagagtggttcgagccgccggagcgtaataccctactccactgtgtgatgtattgctttgggagcttgtatgaacttgtgagtgtgtgcctaagattgtctgtcttataacgccgcatgcctcccattttatagccgaagggggcatgcacaaaggta

SEQ ID NO: 20295 - DNA, 1522 bp, Zea Mays
ttggtgaaatatctccaaatgtattgggctacgttactggcaacccggtgacggatagccagttcgacacggacggcgtggttccgttccttcacggcatgggactgataccatacgagttttatgagaacgctcgcgagatgtgtggtggaaagtacagtgatgcagccagtgttgcgtgcgcggaggtcacccgagctatagccaacatcacgtcggctgtcaaccgggaacacgtcctggagcctgcttgcccggacgacgacgacgacgagctgttcggccccaaaactaccatggcggagacagatggcggcacgagtcgtaggctgatgctgcagtcggcagactatttcctgccagctgggttcaaatgtagaagagcttcgtacgtcctatcccgcgtctgggcaaacgacgaaacggttcaggagagcctcggtgtccgcaaggtatagcagtcctacgtgctcgatcgtgcatgcacgcacagttttttttttctctctctctttttcttgaggaaacaaaagccaagattttcagtaaatttggtatcgaacacacactgaacatccctgcaacttttgttgttaagaggttgtttgtttaggactataatctgtctagattatataatccaacaaataatgtgttatttgctggattatataatctggacagattatattctcaaacaaacacccgctaattcttccaggggacaatcggagcgtggaaacgatgcaaccaggacatactttacaaccagaacgtccaaagtgtagtgccgtaccattcgaggctagccgcgaaagggtacagggcgctgatatacagcggcgatcacgatcgtatcgtacccttcgttggcacacaagcatggattaggtatctcaacttgaccgttgtagatgactggcgaccatggtatgttggtggccaagttgccggggcgctgggcatactgcaccggagtacaagcccacggagtgccaaacgatgtttaggaaatgggtttcacgggatcctctctgatattacgtcgtctgagagaattacgtacgtgtcgctcctatgagtgtaggccggacgtacgtggtatgccctactgcaggccggagatcaaaataaaggagattttccattttcatgtagaaaaaatgagtgtccatggtgtctacttgttccctgtattaaaaataaatgcaatttttatactgcatgtagccactctgtcggagaagaaatctccccggccaggtggcggattgcacccgccctagatcctaaaaagaggaggggtctaaacgttttgtttgttacgagactggtggatcagcacacgggagcatgcaagggtttagagtggttcgagccgccggagcgtaataccctactccactgtgtgatgtattgctttgggagcttgtatgaacttgtgagtgtgtgcctaagattgtctgtcttataacgccgcatgcctcccattttatagccgaagggggcatgcacaaaggta

SEQ ID NO: 20296 - DNA, 777 bp, Zea Mays
cttctccgtgtacagatttctctttcgacccttatgttctctctttcttctcgtttcaatatttggagcttttgttctgcgttggacgatgatgatttgctcatatataccatcaaactctgaacaatcatacgctatgttgattgcacaaagcttcccgctgtacgttgccgagagtgattgggcgcagattctggcacgggacgtctctctgtatgtcttgtgcattctactcgcccttacagttatttgatccgcaagatccctcttctattctatcgttcaatacaaatatttcaagagacttgtgtttttttgcccttccgaacagtgtcttctgcactaaaagaaatatttgtgattttgatttgacccagatagtctacatattcaatgagtaaacgaaagtgaattaactcggcaataaattagagtctctgttgcgcttgtttcagtagcgtcttcagcgctgtacgttgcctagaacaattgggcaaagattctggcacttccatctattcttatggcttgtgcattcgacttcccgacagtttgtgaataaattaactagatcacctggcaagatcttggcacccatctgtcgatttccaggaatcttggttaattattgtttactcaaaattttgtaagtagaataaacgtctaaaatcttggcagtttggcactcaggttttaataaattatctttagttttgggagtaaatttcttcgtttcagggacaaactaaattcaattttgggaatcattaagagtac

SEQ ID NO: 20297 - DNA, 2306 bp, Zea Mays
gccggcttcaagccagccaccatgcgtgacacctccgacctcccaccgagcgcaccttaaaaaaaaccaggcagtgagaaaccgaaccacgcgtccagctccctctcggcctcgcaccagctcatcccagctccgccctcacccttcccttgccctcctcccaccgcctctcccccaatccctcccaccaccaccagattcgcctcgcctcctcgacgcccctccctcacccttgatgccacgcccccctcccatggcgccacgcccgcgcccctccccacccgcccgagccgcgacgctgaccctcctcctcccgctcctcctcctcgcctctccgtccctcccctccgccgccgctgccccctcgccgccgacggtgcccgccacgcagcggcaggccgcgtccgcgtccgacgccccgtcccctcctccccctccggcgcagcagcacccgcggaggcaccgccaccggcactggaagcaccggccgccgcccccgcacccgccgccgccgcccaggcggcgtcggctcaacttcggggagcggctcgggatcgccttcgccggcgtggctatcgcaatgcaggtcgtcctcggcgccttcctcgcgctgcgcgcgtggcagctgcggcggctcgacaaggccgaggtgtcctcctccacgcccctcacctgaccaccgtctccccgcccgaagctcgtcgtgtgcatcagtcaggtccgtggtttatttgtgatctgatctgatgctgctgtaaacgaatccatggtgtagtagctgcgcgtgtccgtgttcggcaccattctttccgttctgttgtactaccctgtacaatctgcttctgctccgtgcaggctctagttgagaggcttgtgtgtgttatgagagttgtgctgcttctttggttgttaacgtgcctcacctgatctagattagtagactgttagttctactgctgccttgctgttacatatttacagtgttcgcttctgtgggggttacaattgcttactcgcttactccgggtttggatgctaaatgggcttcaatgtacaaagccattatttcaattattgcactggtaccatataaactaaccacctgtcagttgcacttctcttattttcactgtcaagatcactccttgtggagtgattgagctataatatataaaaaaagcatacaggattttggtgtactcaagatcaagacccccaaccgcagcatatctgggactcattaccatagaggatagcttattgtaatttgaaaggcttttaattaccccccttcttccatcttaggctcattgccatctcctgggggatgtgcaggatattggtgcaatttttgaaaagctatatactgtctagttttcattagattttatagatttgaatgtttttactgtttcagaatcaaaagaaaatgtacatagtgcctaaatttcctttcttgaaccagaaatactcactttcctacttatgtaggagtacataattactcaatgtaatttttttggcagttctgcaatcacaactttttcatcttatgtcaggttagataattgccctgttttcacaaccagtgcaacccggcacttaagttgtcagattgtgtcttatggaatactctgaaccgagctgaattgctctgtctggttagtaatgcgaggaaccaaataatatgttttacgacctagcagtggcaaatgctggttcctttcacaatctgtgatagaatagaactaagcgtattttccagatcttctacatgttcctgctcaagaatgtgccaaacgcatttgctcataggtgttattttctccgcattactcatcagctattctcacggaaaaagaaaaaaaggataaactcaacagccgttcatgataaactgtattttgaatatatgtttatgataattgttggccatgcatgtgagacaagtcagagagtagttgtatgcttgtatgttctggcatgcatctgggacagctcgagtgaatctgatcttattttagtgctcagatccaaactccccaggtatcgatctcagaattcagaaatgtacactgacctcgaaagagcacttgtctggaatgccaaagcttggaatgttcttgatatttgagttcggtctactcgctgtatttctcgatgcgtagatgacacagttttgttcattgattgaaaatgcttattatgtagtaagtccactttgtacaagggtcagctgagagattattgctggtcaaattttcagtgttcgcgcaataagaatcccggtataaacagtagccaag

SEQ ID NO: 20298 - DNA, 548 bp, Zea Mays
aagaaatctatcagaactccaactggttctttcagcagcactggcctcactatttcttctaaattaccaagattctcggacatgtacactctcacaatagcaagtgcggatccacagtctatctctgcaaacaagccagttcatttcactaagagcgtaacaaagtggtttacaaaggaaggagttcttgtggagggcctgttctggaaggatgtcgagaagctgattgatgactacaacagtgagcgcaagagtaaatgaattggtagctcgtgtctctggccatctggggagacatcgctgtctagagaaatccgtcaaagtttagcttaatctgaacaggcatttttgctatactgtaccggttgaccagtgaatgaatgatgttctagacattaactttggttccaagctttctgtcgtgtccatggataactatccgtccgaatcctagaaacgtggtccgtgcttgtaacctgtttgttctggtgcttccatacgccggagcagattttgaagagaaatgaaacaaatcgttaaatcacatt

SEQ ID NO: 20299 - DNA, 821 bp, Zea Mays
aaacaagtgactgctgtactgctgtcctaaaaatctgcatgtgctcaattgattgttagttcaccctttttggctaaaaatggttggttagcactaaattcatatatgaataaccatggttaagctagagatgatatgtgtgtcttgttttatatgtttcttctttagttgattgtgatatagaatttccatagccattgatgcctatgtcatcggttaaactggtgttggatgcttttgtgtgataaatagaagaactaatgaaaagccgtagcaaattaaataaacgcttgtacttatggggtcgtatttgtgttgcgtaagtgtacaaaatgtttgtcgtcttttagtggtgttaacgttgtgcgctcgatgataggtagttagctaacgctagtgtgtgtggttgcttgggatgtctcgctacttggtgtttaattcactagcaggtacttgaaatatcttgtgctattccattatattcatacatatgcatcttgcacctcatataggaccgagagatgatggtcgagccagtgatgtggtgccaaccacaagacgcagttggtggacggcctgaagaatggacttaaccagtggatgctcgccaagcgagtatcctcccccaacaaacactatctaagtgttaaattaaaggcaagccccggttttatgcataaccgttatatatgctattttactgcacttaatgattgtaggttttgtgctgtgcacttaagtgtaggagttgtttgaaaccctagttgcatgatctcaggaatcctatttgagatggatactagtatgctaggtcgagtagc

SEQ ID NO: 20300 - DNA, 611 bp, Zea Mays
gtcagtgaggcattgtacgccaaggcggtgagccctgatctgctgacggggaatcgatggggacggttgatgtgtgtggggacggagtgcccctacatgtcgtgtgtttaggtttaccttgcaaggataaaaactcgattcgaatcgtctgcttctcgcagctaatgagactgcttgatccatgctgctacattgagtaataagtgggaaatgaggtgactggcaaaatgatgttgatttataaaatgtttgatatcatgtatgaatagctaggtacacatctagttaaaaggatcatactaaaacttgaaaagctaaaacttgattttagactcagctagtgcttttggcaaaccaaacccctcagccaaacagctgcatgtctagaggtagaggagtagactcctcacaccgggtaagtctagctgagtattagtatactcagccttgcttgtggcataatttttgcaggtacctccttgttttggttgatggtgtgacttggccttcgtccctgccaccgggacagacggtcgagtgggttactgcttccgcaggagaggatcaggaggagtagcgtggccaggcttcgccatgttactcggttcttc

SEQ ID NO: 20301 - DNA, 2637 bp, Zea Mays
cctccctgcatcccgactccatgaccgccgccgccccctcctccactcacacgctccgacacgccttcctccgcattccccgatgttcccctgccacgatacgctccgcctccgcatacctcctcatcacccactacttcgcctcctccactacgccttcagccccgaggcccacccgccgccgcaacacccggccccggcagcatcgcacgccgccgagctctggatcgctaaggcactcgcatcagctgccctcttccgtccgcactgcctcccggccttccgcggcctcacgccctcccatcttgctgccgtggccgcagttaggctcgcgccgtgcgctgggtctgccctccgcatcttctccgccctgcactccccgccgctctctgtacccccttctgagcagtcctacatccacgttatcgcgtttctatgccggtccggtcgccacagggacgcactcaagctgttcgaccaaatgatggatcagtcggggtacttacccgaagcagggttcttctcgttcgtggctggatcctgcaccaatgccggccttcttgatgccgcatcgactttgctcacaaagggctcacggcttggttgctgcattgagccgtatgcatataattacctcttgaactcgttaattgcccatggccgtgcgcaggatgctgttgctttgtttgagagctggattcaggacgggctatattctcccgatgtctggagttttaatgttgttattaagggcgtgtgtcggatggggaatttccagaaggcacttgagttagttgaaaggatgactgagtttgggtgttctccggataccatcacacacaatattcttgttgatgggctatgcagggcgaagcaggtgaacaagggccatgaggtattgagaaggctccagagggatggtgtttgcatgcccaatgctgtgacatacacctcagtaatatcaggttattgcaaggctggcaagatggaggatgcaatgtcagtatataatgacatgcttgaatctggaacaagacccaacacggtcacatacaatgtgcttattaatggatatggaaaggctttggacatggaatctgcagtgagaatgtatcggcagctgattctccgtcactgccctcccgatgttgtgacatttagttctttgattgatggatattgtcggtgtggacagcttgatgatgccaagaggatttggaaggagatgggtctgcatcatattcaaccaaatgtgtacaccttctccatcataatacactcactttgtaagcagaacagatcagcagaagctcttgatattctaagggaactgaatatgcgaacagacattgctccacagacatttatatataacccagtcattgatatactgtgcaagggaggaaaagtggatgaagcaaacttgattgtaacagacatgaaagagaaagggtgtcatcctgacaagtatacatatactattctaataattgggcactgtatgaagggtaggataccagaggcaatcacccttttccacaaaatggtggaagctgggtgtcgccctgacaatattacagttaattcttttgttagttgtgttttgaaggctgggatgcctaatgaggtagatcaaatcatgcttattgcttcaggtcatggtttagctagtcagaaagtttcttctcaacagagccgtagactagatatttcagttgctgtatagttgaattgtgctacaataaagaatgtagagaagagacctgagctgtctcagatagtcagatgcttattgcagcatagaactggtcaggggcggaactagaggcttttattggtgtcatttgacactgatagattttggaaaaccaatgaagaaacagtataatttactgatttacggtgtagatgatactatcctgtaatggtgatgacaccggcagctttattggctggcttcgcccctggaactgggacttctctagatgaggaaaggcgtggaattcatctaagtaaactcaggtgtgaattttgagatattggttgcaccaaggctacctaactatcaaaaagtagtcaaaccaagttgatgctgtgtaaaaatgacaaaggtaagctatttgttgcactgcacattcagtgaagtggctcgcttagtcccacgaagaggagtcaaacaagtgtccatagtgctgctctgccgctgtggtgctacaaaacttgcacacaagaatgctggacacactcctgttatgtaaacattatatccaagcatacgttctgtcagtctccttgaccttttgccaagattcaagagcagctacatttgggagattgttaactggataatattgaattagcatatgcagacccattgcttgaagaattgggttgaagtaaatttactctctagtagtggttctgcagttgtattctttctttagaagcctcggtgcttgaaggattcgatggaagtaatttactttctagcagagttctgtggccagcaggtgagtacttatattggagcaatggatgattgtttcaaacaagacagtctcccaagctaagaagcaacgaggagagttcagtaggttggtgtggttcaagagtctgcaatggaaagtcactgcaaga

SEQ ID NO: 20302 - DNA, 444 bp, Zea Mays
ctccaggaagcccaagcacacacgtgaggagagacaagtcggtatcacatacttcgtcctgaattcatctaagtaaactcaggtgtgaattttgagatattggttgcaccaaggctacctaactatcaaaaagtagtcaaaccaagttgatgctgtgtaaaaatgacaaaggtaagctatttgttgcactgcacattcagtgaagtggctcgcttagtcccacgaagaggagtcaaacaagtgtccatagtgctgctctgccgctgtggtgctacaaaacttgcacacaagaatgctggacacactcctgttatgtaaacattatatccaagcatacgttctgtcagtctccttgaccttttgccaagattcaagagcagctacatttgggagattgttaactggataatattgaattagcatatgcagacccattgcttgaag

SEQ ID NO: 20303 - DNA, 1740 bp, Zea Mays
aaatgagcagagggtgccaagaagtttccgtccatctcttagcaggacaataagtttctctgagatcagatacaaaataaattagtactattggttactgatgaaaattttttgagatgaagcaggccatgcatgcggaaatcttaggtacaagtattctcatttttattaaatatataaaagaaatgttcattaacatgactcatggtaatacaatgtcatgggcatcatagggagcgagacgcaaaagccaggttgggataaggctagagaataagattgagatgagctgggataaggctagagaataggattgggatgagagaatcgtggagagttggttagcatcagataagtccaagaaagtaggagttagttgagagtttataggagaagttggttagccatagggctatttataagtcgcatggcaacagggaataaatcaagcaagatcaataccaaaccaatctctctctctctcttgcaatgaccctctcaagcgcctagggctgctaccctagaaccaagcctgcggcagaggggtataacctcgccggagaagacagctatccccatggaccgaaggtccatgacacctggtatcagctccaggttatcctcaccaccaccagccgcccatccctcaccaccaccagccgccgcgccatctgccgccgcaacgccctcccacccgccctctccaactctagatgcattcactcggctcgaagagaagtgggatcaattcgttgtgatgttccaccgctacaaggagaagacagagaaggaactccaagcagcggtgcggattcaggcggcagcgcgagggttcctggcacgccgccaggtacagtcccttcgtggggagaagcaccttgttgtggcctccagggccaccccatggccatcatcacatgagcaggccgtggtgcgcctgcaagccgcagtgcgtggcttccttgttaggcgggcggtgcagaagctgcacttgctgatcagctcatcgctgcaccaactcgcagcctgtgcgtccaaccaccaagtctcgtctatactttttgaaccccatgcagaagtcaagatttgggtatgcaatccccctgcacggccaaagagggtcgtctccttcattcgggcaactgccttggtgctggacagacccaacataagaacgggctggttcctccttcacctttcatccaatgtgaagtccgcagttcagctctttccttgagatccaggaggacatagctacagttcaaatttatattttagttccataattattttatattttcgtcttaaataataaaggtaagccgagatgtaaaaggcttaaccttaagtcgtgtcaggtaagtctatggcagctcgaggacgagctggtcctcaagggagggggagatgtcatgggcatcatagggagcgagacgcaacagccaggctgggataaggctagagaataagattgagatgagctgggataaggctagagaataggattgggatgagagaatcgtggagagttggttagcatcagataagtccaagaaagtaggagttagttgagagtttgtaggagaagttggttagccatagggctatttataagtcgcatggcaacagggaataaatcaagcaagatcaataccaaaccaatctatctcccttgcaatgaccctctcaagcgcctagggctgctaccctagaaccaagcctgcggcagaggggtataac

SEQ ID NO: 20304 - DNA, 498 bp, Zea Mays
ggaccccgcacgccagacccatcccaacagaagccccgacatctttgcgtgtcgacccctccaacccctcccctacgctcgggatctccagctaacttagatgtgtgccatctttgccgataaaagggacggcaccccctcgaccacgcgcaccagcacctcaaattgggatattcaccaccgagagagagaacatggagccgccggaagcctccactgtcgtccggcgtgcactgcactaattggtgccctatgcgcgatcgggagaatctgtccaagctctaggatcatgttgaaggtggtggctaggagggagtgcgacctgggcgccgccaatttgacgtcgtggccgcaaatacggggtgcgccgtgggcagggaaaggcactgcgtgatcactgtttgagggctccatggccatgggaagggatcctcgctgctgccatgggagaagagaagagagggatggctccacagcagcgcaccaaggagagcccga

SEQ ID NO: 20305 - DNA, 380 bp, Zea Mays
caacttaataaagtctcattacaagtcatgtttttaagcaggctatgcgttctttctccgagaaaggtaatccttcttttatcaatttgaagaaaaccatttgtattatgatttttctatcctaattcctggaaactgaattctgaattttctatttcttgtaatgttcatttcagatattctttctctaattgctaaacttgtactaaggggtgttgaacaaaaagatttttgtcggaggcgttgcttgggagacaactgaagggctcagggtgccttggaagtacgctagcttgttgtcatgaagaagtcattcaagttccttccagggagttattagttcatatgtatatttctgtttatatcttatcttgtttatg

SEQ ID NO: 20306 - DNA, 1164 bp, Zea Mays
cctcctccatcatgtcctggccgagctctggaacatctgtctccccatccctttgcttaaatactgctgctgtaatccctgctgttctcaagttttagttgcttcacttggtgtcttagcggttcgtgtttgtaagtctaagctcctcttccgagccaccaactcgatctgccctagtcttcccatctcctacttaagtcaaggtccagtaggccgtgcagtcctagagctcgagtgatctccttggctcttgtagcctatgtttccccggagttaatcccctcccaatatcttagtccatctgcccagagcttggtgtaccagtccctaggtggtgaccatcgttgacagttagtccacctcgccgtgaccagaattcccagaagaagaagatgaaattcaagaagtggtttctgaagaggagtctgcttcagtgcctgctcatcaagtgatgggagccatctaactggggtttaatagagggatttagacctctgtctctgcaacaaaggcaagccccggtgcatttgccaccttccttgtattataaaattttatcacttatatgctgcattaggtgataggagttgaatgattaaacacttaatgcattaccatccttgaaagattgattatcataccttgttacctgttttataaaaactagtaatgcttagtcatgcttatagattaagaaaactatttttgatctatgactcatgatttttttttaaaaaaaaggcttgggatgatggaggcatcctccgcggggatgaattcatcattcaagcaaggtacctctgccaggtatcaaactttgagaatttgtttaaaatgagaccagacgttgagctggacaggtcgcccgtctgtgtcgatcaaggaccgtaccgattgtaggcctgttgatctaggaccttttaattggccacatacctcgtcatgggtaagcctgaacccggctactccatatgtgaaaagacaatcgcgcactgggagtggagagatggcgggagtggcgtgtacccacctggcatgtggctggatggtggagtaccgtactctcgggtggcgcggaccggttcacgtagtggaggacccgtgggaatggtagacatatgcaagggttaagtgctacatatgtcgtgtggttggtgatcccca

SEQ ID NO: 20307 - DNA, 1934 bp, Zea Mays
ctttcctgcagcaagactccgggaacgcgccagattcaatgaatccatctccatcctttcataacacacctgcaatcataaagagaggtgcaacgtcttctccgtgcttaccactcgccattcctaagtcctaactacctccacccccgcacgcacaactggccgcgccaaggcaaagctagaagaagacaacgcaaagggagaggacagaggaggagcagaggacgatgggcagcggcggcgctaacactgcccccctcctcaccccctacaagatgggaaaattcgatgtttcccacagggtagtcctcgcaccactgacgagacagcggtcctacggcaatgttcctcagcctcatgccatactgtactatcagcagagggcgactaaaggaggtcttctgatcgctgaggccacgggggtttcagacactgctcaagggtacaaggacactcctggcatttggacccatgagcaagtcgaagcatggaagccgatcgtagacggggttcaccagaaaggagggatatttttctgtcagatttggcacgtagggagagtctccaattccagtatgtttaccacctctaacgcagatcggttctcaaagctataaatttaacggcagtctagtcagcttgcaagagaaaattggattcagagttatccatgaagacttcatggcaacattagctgtgtttgtcatagaccaagatgtttatgaaagcgctcatactatttctactacagttttttttgtaataaaagtgccattataccaacgactgttaaatgttccaatgcagcttttcagcctaatgggcaggctccaatttcaagcaccgataagccactaaagcctcaagtgagagccaatggtatagacgtggctactttcgcagttcctagacgcttagagactgatgaaatccctttggtcgtcaatgatttcagggtagctgctcgaaatgcgattgaagctggatttgatggtgtcgaaatccatggagctcacggttacctgattgatcagtttctaaaggacggggtcaacgaccgcacagacaaatacggtggcagtctggagaaccgctgccggtttgcactggaagtaactcaagccgtggtcgacgaaattggagctgacaaggtcgggataaggctgtcaccattcgctagctactcggaggcgccggactcagacccggaagctctgggcatgtacatggcgaacgcgctgaacgagttcgggattctctactgccacatggtggagccgcggatggtgaaactcggtgaaaagttcgaaaccccctacagccttcgcccgataagggacgctttcaggggaacgttcatcgttgccggcggctacggcagggaggatgggaatcgcgcgatctccactgggtatgctgatttggtcgcgttcgggcgcgtgttcttggctaatcctgacctgcctcggaggttcgaagtagacgctccccttaacaagtacaacagagacacgttttacatccctgatccggttattggatacctgactacccatttctttcgtcagatgtataaatgttctcttttcagcaatctgctttttagattgtgtagtaactggttggtgtaccagtaaaatattagacgaataaaccattggtctgaatgcctcattctcatatatatggacaaaagcaatatgatcgttgtaattgtgcctcaaatcttatagttatagttgtaaaaaaatattgtgaagaagatcagtcagttgtcaagttgtataaaaagtcagcctggttcacagaatcacaggcaactactatgcccctgttggaatcacatggcgttttcacagcctgagcctggctcattcttgttgcattccgactttagcatcttggaagtgctagagttccctgtgttaatttcg

SEQ ID NO: 20308 - DNA, 1571 bp, Zea Mays
gaatccatctccatcctttcataacacacctgcaatcataaagagaggtgcaacgtcttctccgtgcttaccactcgccattcctaagtcctaactacctccacccccgcacgcacaactggccgcgccaaggcaaagctagaagaagacaacgcaaagggagaggacagaggaggagcagaggacgatgggcagcggcggcgctaacactgcccccctcctcaccccctacaagatgggaaaattcgatgtttcccacagggtagtcctcgcaccactgacgagacagcggtcctacggcaatgttcctcagcctcatgccatactgtactatcagcagagggcgactaaaggaggtcttctgatcgctgaggccacgggggtttcagacactgctcaagggtacaaggacactcctggcatttggacccatgagcaagtcgaagcatggaagccgatcgtagacggggttcaccagaaaggagggatatttttctgtcagatttggcacgtagggagagtctccaattccacttttcagcctaatgggcaggctccaatttcaagcaccgataagccactaaagcctcaaggtagctgctcgaaatgcgattgaagctggatttgatggtgtcgaaatccatggagctcacggttacctgattgatcagtttctaaaggacggggtcaacgaccgcacagacaaatacggtggcagtctggagaaccgctgccggtttgcactggaagtaactcaagccgtggtcgacgaaattggagctgacaaggtcgggataaggctgtcaccattcgctagctactcggaggcgccggactcagacccggaagctctgggcatgtacatggcgaacgcgctgaacgagttcgggattctctactgccacatggtggagccgcggatggtgaaactcggtgaaaagttcgaaaccccctacagccttcgcccgataagggacgctttcaggggaacgttcatcgttgccggcggctacggcagggaggatgggaatcgcgcgatctccactgggtatgctgatttggtcgcgttcgggcgcgtgttcttggctaatcctgacctgcctcggaggttcgaagtagacgctccccttaacaagtacaacagagacacgttttacatccctgatccggttattggatacctgactacccatttctttcgtcagatgtataaatgttctcttttcagcaatctgctttttagattgtgtagtaactggttggtgtaccagtaaaatattagacgaataaaccattggtctgaatgcctcattctcatatatatggacaaaagcaatatgatcgttgtaattgtgcctcaaatcttatagttatagttgtaaaaaaatattgtgaagaagatcagtcagttgtcaagttgtataaaaagtcagcctggttcacagaatcacaggcaactactatgcccctgttggaatcacatggcgttttcacagcctgagcctggctcattcttgttgcattccgactttagcatcttggaagtgctagagttccctgtgttaatttcg

SEQ ID NO: 20309 - DNA, 962 bp, Zea Mays
ctttactttacctttccttttctttttctttcagggctcccttttttttaccttaaatttctgtgcctcaaacagagcaggccatcgacatggtgctcacggactactgcatgccagagatgaccggctacgacctgctcaaggccatcaaggcgctgaacccgctgaagccgatccctgtcatcgtcatgtcgtcagaagacgagccccagaggatcagccgatgcctgaacgccggcgccgaggacttcatcgtgaagcccctgcagagcaaggacgtgcagcgcctccggaactgctccacggtcgggaggcccagcaacaagggcggcgccacgttgccgtgcgaggagaacgccgtggccaagtggagtaacaacaagctgccgccctccgccggcgccggcgccggcgccagcgccacgtcgccgtcggggcggcgggcgaacctcgccggagtcgccatgcgccaggtgctgcactcgtcgagagtggagatctcgcagtacctgccgctcctgctcaagctcgtcgtgctggcgtacgccgcgctgtgcctgggcgagctcctgcacagatggtcgtcgggtggcagctgctcgctctccccgtggtgcgcctgatcaggaaggagcaagcagcgcaaaaggccagcaacggtgcaagagcccccctgggcaccgacgacaggagactgctgatgcaccaagcattatttcagaggctccaatagccctagtcttttaatttaggtagatgagattgtctgctctgagatcctaaccggggtttcgaccgatgatgagtccccccgtggcttttgttcgttgatttgaggggccggggccgtagacgtaggaaggagaggaacggaacgaaccccttgtatcctctgctctgtatagaatgaatgaatgaacgaatgaatcagaatgcaacgcgtcatccgagcacacgaacgt

SEQ ID NO: 20310 - DNA, 2669 bp, Zea Mays
caaagcacaaagccaatcggcaacgggccaaccgctggcagcacaaacagaacagggagtcaattacggaacaactgacgcccttatctgtaaaatcagatgtaaagtaacgcaaaaccgcccccggttaaaaattccgaacgcatcacgcaatcgagaaaaacacaaaccgaaaaacctcctctacagtcccatctaggcgcccctcctcggctccgatccagtttcgccggcggccatgtcgcagccggcggcgacggtggccgcggcggcgcagccgcagggtcgcggccccgcggggcgccagggcggcctggggcagagcatcgcaggcatcgtgcggatggcggtgttctggtactttgcgtccaagttcttcgggcccaagcgcccacccgcggaccccgggatgctcatgtccaacctcttccagaagggcgagccaatggatatgtggatgtatttgtcagagaacgagaagttcaacgattttgctaatgaggatgcacttatttggcacgaggcaaacataccatatgcagtctggggacctaccagtactagaacacggtcattaacgtactatccgtcagaggctctcaagcataatggctctttgtatgctcatgtttacttcgccccgttcggggttatcctgtggaccctacagatccagaatatgagcagaaatcttcgtttgggaggacccatcgtatctgttgtggcattcttgccaaaatcaaaagctggtaaaaagaagagcttgcttggagattcagaagagcctgaagagaaagcaccgcgcaataaggagaataaagaatctgaggataaagatgagggtccgactgaatatatatcttattggaaaccaaatgtaacaataaatcttgttgaagatttcacacggtatcccaacaataatgtacctcccattgttgctccatatctgaatgtggatccagttacgggcgattattatcctacagtattcttcaatgagttttggctattgaaggataaattaatagcgctcaacgagactgtggaggaattgcccttaaaccttgaagttggtcctattagcatgaccaagtggcaattatttttacagattgagcagtccttccaggttcatcgtagttatggaagtatgcttgaaggcgaggctgatgaactcaagagggtttttcttgaaggaaatccttatcttcttggattgactatggtcgtttctctattacactccctgtttgattttctggccttcaaaaatgatatccagttctggaacaagaacaagtccatggaaggtctatcggcaaaatctgtggttctgaattttgtgtgtcaactagttgttttcctgtaccttcttgacaatgacacttcatggatgatccttgctagctctggagttggtgtgtgcattgaattttggaagattggaaaggcaatgcatattgaggttgatagaagtggaaaaattcccatgttgaggttccgagaccgtgaatcatatgcacagaataagactaaagagtacgatgccattgcaatgaagtaccttacctatgtacttttcctccttgtggtcggtttctctatctattcacttaagtatgaaaagcacaagagctggtactcatggatactttcttctatgacaagctgtgtgtacatgtttggtttcattatgatgtgcccccaattgtttatcaactacaagctgaagtctgttgctcatatgccatggagacaaatgacctacaagttcctcaacactataatcgatgacctttttgcatttgtcatcaaaatgccaatgcttcatcgtctctcagttttcagagatgatgttatcttcttgatatacctctatcagaggtggaagtatccggtcgacaagaagcgtgttaacgagtttggcttcgggggcgaggacgaaccggcagcccaggaggctgtggaaggaagtgattcagctgcagcaccccagctaacggaggccgggtccgagacgagtacggaggacaagaaaaccaagtgatctccaatcttttgatcatccaaatacaagcatacatctctgcaacatctgccttcccagcgggcgtgaaatttctttgctgaaactggatgctggactcttgcggtcttgtcttaccgagacgtgctgaccataagataaggcgtgtaacaagggacacgatagtcttttgtctagagcagcgggcgaacaggcacacactgtcacaattacgtttccagttcgtcttttagcagccattactagttgatatgcttgtttgattggtttgtgtacaaattttgtgcatttttcttaaaacacacaattggcggctcgtagtttcatcgtgatgtgttttccctaatattagtgttgcaacgagtgtccactagtgagtgcacacaacggtgcggttctaaactgttcctcacaagaaacaattgaatccctgccaagagaagtagagaagcatgttggtaaccaaattattagatctataggccatatttggttgcaaggatgggttctgattcttgctaggggatggaagcgggttctgttgttagtctccggtgaatcattttatgtgaagcggttgttttgaattagagaaagaaaagagagagatcatttccca

SEQ ID NO: 20311 - DNA, 2534 bp, Zea Mays
aaaaccgcccccggttaaaaattccgaacgcatcacgcaatcgagaaaaacacaaaccgaaaaacctcctctacagtcccatctaggcgcccctcctcggctccgatccagtttcgccggcggccatgtcgcagccggcggcgacggtggccgcggcggcgcagccgcagggtcgcggccccgcggggcgccagggcggcctggggcagagcatcgcaggcatcgtgcggatggcggtgttctggtactttgcgtccaagttcttcgggcccaagcgcccacccgcggaccccgggatgctcatgtccaacctcttccagaagggcgagccaatggatatgtggatgtatttgtcagagaacgagaagttcaacgattttgctaatgaggatgcacttatttggcacgaggcaaacataccatatgcagtctggggacctaccagtactagaacacggtcattaacgtactatccgtcagaggctctcaagcataatggctctttgtatgctcatgtttacttcgccccgttcggggttatcctgtggaccctacagatccagaatatgagcagaaatcttcgtttgggaggacccatcctgttgtggcattcttgccaaaatcaaaagctggtaaaaagaagagcttgcttggagattcagaagagcctgaagagaaagcaccgcgcaataaggagaataaagaatctgaggataaagatgagggtccgactgaatatatatcttattggaaaccaaatgtaacaataaatcttgttgaagatttcacacggtatcccaacaataatgtacctcccattgttgctccatttacgggcgattattatcctacagtattcttcaatgagttttggctattgaaggataaattaatagcgctcaacgagactgtggaggaattgcccttaaaccttgaagttggtcctattagcatgaccaagtggcaattatttttacagattgagcagtccttccaggttcatcgtagttatggaagtatgcttgaaggcgaggctgatgaactcaagagggtttttcttgaaggaaatccttatcttcttggattgactatggtcgtttctctattacactccctgtttgattttctggccttcaaaaatgatatccagttctggaacaagaacaagtccatggaaggtctatcggcaaaatctgtggttctgaattttgtgtgtcaactagttgttttcctgtaccttcttgacaatgacacttcatggatgatccttgctagctctggagttggtgtgtgcattgaattttggaagattggaaaggcaatgcatattgaggttgatagaagtggaaaaattcccatgttgaggttccgagaccgtgaatcatatgcacagaataagactaaagagtacgatgccattgcaatgaagtaccttacctatgtacttttcctccttgtggtcggtttctctatctattcacttaagtatgaaaagcacaagagctggtactcatggatactttcttctatgacaagctgtgtgtacatgtttggtttcattatgatgtgcccccaattgtttatcaactacaagctgaagtctgttgctcatatgccatggagacaaatgacctacaagttcctcaacactataatcgatgacctttttgcatttgtcatcaaaatgccaatgcttcatcgtctctcagttttcagagatgatgttatcttcttgatatacctctatcagaggtggaagtatccggtcgacaagaagcgtgttaacgagtttggcttcgggggcgaggacgaaccggcagcccaggaggctgtggaaggaagtgattcagctgcagcaccccagctaacggaggccgggtccgagacgagtacggaggacaagaaaaccaagtgatctccaatcttttgatcatccaaatacaagcatacatctctgcaacatctgccttcccagcgggcgtgaaatttctttgctgaaactggatgctggactcttgcggtcttgtcttaccgagacgtgctgaccataagataaggcgtgtaacaagggacacgatagtcttttgtctagagcagcgggcgaacaggcacacactgtcacaattacgtttccagttcgtcttttagcagccattactagttgatatgcttgtttgattggtttgtgtacaaattttgtgcatttttcttaaaacacacaattggcggctcgtagtttcatcgtgatgtgttttccctaatattagtgttgcaacgagtgtccactagtgagtgcacacaacggtgcggttctaaactgttcctcacaagaaacaattgaatccctgccaagagaagtagagaagcatgttggtaaccaaattattagatctataggccatatttggttgcaaggatgggttctgattcttgctaggggatggaagcgggttctgttgttagtctccggtgaatcattttatgtgaagcggttgttttgaattagagaaagaaaagagagagatcatttccca

SEQ ID NO: 20312 - DNA, 2552 bp, Zea Mays
aaaaccgcccccggttaaaaattccgaacgcatcacgcaatcgagaaaaacacaaaccgaaaaacctcctctacagtcccatctaggcgcccctcctcggctccgatccagtttcgccggcggccatgtcgcagccggcggcgacggtggccgcggcggcgcagccgcagggtcgcggccccgcggggcgccagggcggcctggggcagagcatcgcaggcatcgtgcggatggcggtgttctggtactttgcgtccaagttcttcgggcccaagcgcccacccgcggaccccgggatgctcatgtccaacctcttccagaagggcgagccaatggatatgtggatgtatttgtcagagaacgagaagttcaacgattttgctaatgaggatgcacttatttggcacgaggcaaacataccatatgcagtctggggacctaccagtactagaacacggtcattaacgtactatccgtcagaggctctcaagcataatggctctttgtatgctcatgtttacttcgccccgttcggggttatcctgtggaccctacagatccagaatatgagcagaaatcttcgtttgggaggacccatcctgttgtggcattcttgccaaaatcaaaagctggtaaaaagaagagcttgcttggagattcagaagagcctgaagagaaagcaccgcgcaataaggagaataaagaatctgaggataaagatgagggtccgactgaatatatatcttattggaaaccaaatgtaacaataaatcttgttgaagatttcacacggtatcccaacaataatgtacctcccattgttgctccatatctgaatgtggatccagttacgggcgattattatcctacagtattcttcaatgagttttggctattgaaggataaattaatagcgctcaacgagactgtggaggaattgcccttaaaccttgaagttggtcctattagcatgaccaagtggcaattatttttacagattgagcagtccttccaggttcatcgtagttatggaagtatgcttgaaggcgaggctgatgaactcaagagggtttttcttgaaggaaatccttatcttcttggattgactatggtcgtttctctattacactccctgtttgattttctggccttcaaaaatgatatccagttctggaacaagaacaagtccatggaaggtctatcggcaaaatctgtggttctgaattttgtgtgtcaactagttgttttcctgtaccttcttgacaatgacacttcatggatgatccttgctagctctggagttggtgtgtgcattgaattttggaagattggaaaggcaatgcatattgaggttgatagaagtggaaaaattcccatgttgaggttccgagaccgtgaatcatatgcacagaataagactaaagagtacgatgccattgcaatgaagtaccttacctatgtacttttcctccttgtggtcggtttctctatctattcacttaagtatgaaaagcacaagagctggtactcatggatactttcttctatgacaagctgtgtgtacatgtttggtttcattatgatgtgcccccaattgtttatcaactacaagctgaagtctgttgctcatatgccatggagacaaatgacctacaagttcctcaacactataatcgatgacctttttgcatttgtcatcaaaatgccaatgcttcatcgtctctcagttttcagagatgatgttatcttcttgatatacctctatcagaggtggaagtatccggtcgacaagaagcgtgttaacgagtttggcttcgggggcgaggacgaaccggcagcccaggaggctgtggaaggaagtgattcagctgcagcaccccagctaacggaggccgggtccgagacgagtacggaggacaagaaaaccaagtgatctccaatcttttgatcatccaaatacaagcatacatctctgcaacatctgccttcccagcgggcgtgaaatttctttgctgaaactggatgctggactcttgcggtcttgtcttaccgagacgtgctgaccataagataaggcgtgtaacaagggacacgatagtcttttgtctagagcagcgggcgaacaggcacacactgtcacaattacgtttccagttcgtcttttagcagccattactagttgatatgcttgtttgattggtttgtgtacaaattttgtgcatttttcttaaaacacacaattggcggctcgtagtttcatcgtgatgtgttttccctaatattagtgttgcaacgagtgtccactagtgagtgcacacaacggtgcggttctaaactgttcctcacaagaaacaattgaatccctgccaagagaagtagagaagcatgttggtaaccaaattattagatctataggccatatttggttgcaaggatgggttctgattcttgctaggggatggaagcgggttctgttgttagtctccggtgaatcattttatgtgaagcggttgttttgaattagagaaagaaaagagagagatcatttccca

SEQ ID NO: 20313 - DNA, 2181 bp, Zea Mays
caacttgccattgcctgcgcagcggagcgagctaccactacctaccacaccacgcgatcgaccaggccacacggccgggttgccttgactagttgacttgtgtcggaagcagggagggagggagagaagagagcgcgcgcgcgagctgagggaatggatgtggagatgagctgcgcggcgccggaggcggcggccgtccccgtcgactggcgcggccgcccgtgccggccgcggcggcacggcggcatgcgcgccgccgtcttcgtcctaggcgtccaggcgttcgagatcatggcgatagcggcggtggggaacaacctcatcacctacgtgttcggggagatgcacttcccgctgtcgcaggcggccaacgtggtgaccaacttcgtcggcaccatcttcctcctcgccctcctcggcggcttcctctccgactcctacctcggctgcttctggaccatgctcatcttcggcttcgtcgagctctcgggcttcatactgctgtccctgcaagcgcacctgccgcagctgaagcccgcgccgtgcgacatgtcgtccacggacggcggctgcgagaaggcgagcggcttcaagtcgaccgtgttcttcctggcgctgtacctggtggcgctgggcagcggctgcctcaagcccaacatgatcgcgcacggcgcggaccagttcgacgccgccaccccgggcggcgccaacagcctgcccacctacttcaactcggcctacttcagcttctgcgcgggcgagctggtcgccctcacggcgctggtctgggtgcagacgcactccggcatggacgtcggcttcggcgtctccgcggtcgccatggcggcgggcctcgccagcctcgtcgccggcgccgccttctaccgcaataagcccccgcagggcagcatcttcgcgcccgttgcaagggtgagttttcgtcgctgccttcaccaaaaggaagcaagtctgcccttccagctccaattctgtcaacgccggggcttgcgagccggcgcgcctcgccggcaacttccgccacaacaacaaattcaggttcctggacaaggcatgcgtcccggcagcgccgcaggggccgaacacgaagcccggagaagcgcgtggcggctgtgcacggtggccgaggtgcagcaggcaaagacgctcctcgccgtgacgcccatcttcgcgtgcaccatcgtcttcaacaccgtgctcgcgcagctgcagacgttctcggtgcagcagggcagcgccatggacacggcgctcccgccgggctcgggctcgttccgcatcccgcccgcgtcgctgcaggccatcccgtacgccctgctgctggcgctcgtcccggcctacgagctcctcctcgtcccgctcatgaagcgcctcacgggcacccggtccgggatcaccccgctccagcgcatcggcgtcggcctcgccaccctcgcgttctcgatggtcgcggcggccgacgtcgagcgcaggcgccgggacgccgccgcggagggccgccagatgtccgtcctgtggatcgtgccgcagttcctcgtcttcggcgtgtcggagatgttcaccgccgtggggctcatcgagttcttctacaagcaggcgtgcgccggcatgcaggccttcctcacggcgctcacgtactgttcctacgcgttcgggttctacctcagctcggtgctcgtctcgctggtcaacagggtcacggcgaggcacggtggcgctgggtggctcggagacaacaacctcaacaaggataggctggacctcttctactggatgctcgccgtgctcagcgtgctcaacttctgctgctacctgctctgtgccaggtggtacaatgctggcgcacagggttccgatgcagctgcctctggtctggtggcatctgaggttgatgatcgcaaggagatcatctgaacaactcaggaagagattgaaactgtatatgtctaattccatctatagactatagctgtatgtatacatgcatgcatgagaaatagtgaccagaaaatgagcactaggataaaattaagacctctcatttggatcaataggatgtatagtgttttaggcaacttttttaacggagaaaacctctttctattacgaattaagtagaggttcaacataatctccacgtcgattctcacgtcacgagacgag

SEQ ID NO: 20314 - DNA, 498 bp, Zea Mays
tgcctgcgcagcggagcgagctaccactacctaccacaccacgcgatcgaccaggccacacggccgggttgccttgactagttgacttgtgtcggaagcagggagggagggagagaagagagcgcgcgcgcgagctgagggaatggatgtggagatgagctgcgcggcgccggaggcggcggccgtccccgtcgactggcgcggccgcccgtgccggccgcggcggcacggcggcatgcgcgccgccgtcttcgtcctaggcgtccaggcgttcgagatcatggcgatagcggcggtggggaacaacctcatcacctacgtgttcggggagatgcacttcccgctgtcgcaggcggccaacgtggtgaccaacttcgtcggcaccatcttcctcctcgccctcctcggcggcttcctctccgactcctacctcggctgcttctggaccatgctcatcttcggcttcgtcgagctctcgttctagctcgtagctcgtca

SEQ ID NO: 20315 - DNA, 1712 bp, Zea Mays
gtgaatcctcctctttccccctcccatcgctcgggaaggcgaagggtcaaggcgtctggcacttcagcttgtcccttttgcagcttgctcctggagtcctggttgctccgtcttatccggtcgggctcttgtccgacgaacgtgtggttgtggcactcgaggaagtacactgagcagggcattccatggagctcgaggcgatcggaaagcgactccgtataagcagcggcagcagcagcttggccggcgacaggctgacctccctgccggattgtctcatccaccacatcatgtccttcttgaaggcccgtcaggtggtgcagacctgcgtgctgtccaccaggtggaggcacctctggcgctctgtgccatgccttgacattgaccaggacgagttcaaggccgccggctcgaaccgcatcacagagaaggaacaggaagacttcgaggactttaccgaccacctgcttatacctaataatatttccattgcgctcctggatacacttcgtctgcatgttagcgatgatgaatattatcatcgtggagcatcagttagatggatccgtcatggcataaagtacagtgcccagaatcctggcattatgcacaaggaatcgaacttagccttttggcgcctcaaaaaactacacctctccggtgtatatctggatggcagtttcatgaagcatgtcagttcagggtgcccgtatttggaggttctcgagctcaaagattgcccgtgcacatttgaagaggtcacatcccacacactgaagaacttgattctggaaaattgcggatgcaatgagctttctgggattacatcacccacgctgaagagtttaacaattattgctagtggatattaccacataaataggctggttttgaaggcccctgctgttgcttatctgctcctggatgtgaatgcttattttgttaaacgcgatgtttcatttgatgagatgtcatctcttgccaaggcttcaatttatctaagggacagtgtaggaagtggactcagcaaggaccaattcaagcttctttgtagtgtgtctaatgtgacaactttggtgttgtcaggtttccagacaatgcattcacctgatttggagaagctcactttgggccgttgcaagttctcaaaagatcccaagaaaaagaaaggaaaagccagattgagcaaggggtgtctgaaccagtttaacgtccggtgcaagaacctcaagcttactgaaattatctatgaagacgacgatgcgaaaaaggtggtggaacttttgtggagcatgtcaggggacctgcccaagaattacataaaactcaccaaggttgacccggatcatccttagtccaggtcatctggcacttggtcacacagtggcttctatgaactttgcttgcatgcctcccctgtgtttagacgtccttagttgaactgctgggcgtgttcttttggactcatttctagataatttagttctacgagctatggtacttgttttgtgtggtctgcagctcgagactctagtccttatggtgtaagcttgcatgcttcaaagggaacagaaaattgcatgtttgcttcgtttccttgtatatccggtttcaagtttggtggatgcaggctgtttcgaaatgaatcttcgagttcatttcgtatttttgttgagcttgcatgcgttcactaatctacaaagctaattccc

SEQ ID NO: 20316 - DNA, 1347 bp, Zea Mays
atttggcaggttttacatgaacatggcataatcattgtaaagacccttcgtacatcaaaagcaatgtatgacagtaatttggcaccacatctaactcagggtagtcactggctttcagagccttgtgtttctggaagaatgactgttgatgaaatgaatcacaaggctggtaactttccctgtgcacacactgtacatacagaaaaacaggcttattctgtaattactccttggatatctccagatataccgttatatgtttctagacctgaagaaagttagttgcgcaactccaactgcaaatagttccataaaaaaggatacaagtcttcctgtgatgccacattctgtgtcacaagggcaagataactccaagtatttgtctaacagaacaggcagggtagctgggctaccatatcagtttttatccctttcagggcaaaaggaagaggcacaaaatagtcaaggtcatgatgataagcaaatgaataccaaggatgctaatttagttggataccctcagagtgatgaagaggaacatcttgatttcacatccctttcatcctttgaaaaagtagaaggtcatcttaattttgttcccctggccagctactgcaatttacttgaaccagggaaggtgattggattcaccaactctaatgcagggatctcttatttgccagcaggacgctttgctccagttggatgtttaagggaagttccagtgagtaaacaagtgaaatctgtgaaggtccatgatggtggctggaacatttctaacatactaaacaaagagaatccagataacttcgctccagtaaagagagggggatcgaagggcacgaaggatacattagagtacttgaggatatacaacagtttcttaattgatggaaggttgaaggactgcgtggatttgttagaaagcatggaacaaaatggactgcttgatatgaggaaggtgagagcgacaacgcacgacaaaacgagaagcagggtggctcgaatgtcttgttaagcgtgtcccgtcaaaacgggaagctgggtggctcgaatgtcttgttaagcgtgtctcgtacacagactgaacatgggtattttgcatgtagagggtccattgggcctctgccagctgcacacagtatttcggtcccaagactcggagaccttcaccctgaagccttcaaagttgtccgtctcctgatgcgataccgagggggagcagttacccgtcgccccgcccaagaccattccttggcctggatcgactgttccagggcaaacgggcggacaagagcgaagtcctacaggcctttggcccctcctacccggggcctccgttgtgag

SEQ ID NO: 20317 - DNA, 1504 bp, Zea Mays
atttggcaggttttacatgaacatggcataatcattgtaaagacccttcgtacatcaaaagcaatgtatgacagtaatttggcaccacatctaactcagggtagtcactggctttcagagccttgtgtttctggaagaatgactgttgatgaaatgaatcacaaggctggtaactttccctgtgcacacactgtacatacagaaaaacaggcttattctgtaattactccttggatatctccagatataccgttatatgtttctagacctgaagaaagttagttgcgcaactccaactgcaaatagttccataaaaaaggatacaagtcttcctgtgatgccacattctgtgtcacaagggcaagataactccaagtatttgtctaacagaacaggcagggtagctgggctaccatatcagtttttatccctttcagggcaaaaggaagaggcacaaaatagtcaaggtcatgatgataagcaaatgaataccaaggatgctaatttagttggataccctcagagtgatgaagaggaacatcttgatttcacatccctttcatcctttgaaaaagtagaaggtcatcttaattttgttcccctggccagctactgcaatttacttgaaccagggaaggtgattggattcaccaactctaatgcagggatctcttatttgccagcagcatactctatattcaggacgctttgctccagttggatgtttaagggaagttccagtgagtaaacaagtgaaatctgtgaaggtccatgatggtggctggaacatttctaacatactaaacaaagagaatccagataacttcgctccagtaaagagagggggatcgaagggcacgaaggatacattagagtacttgaggatatacaacagtttcttaattgatggaaggttgaaggactgcgtggatttgttagaaagcatggaacaaaatggactgcttgatatgaggaaggtaaattaccttttctgagtgtttgacatttttatatttttttgtgggcatgactacatgagttttacaataggccttttataacagattaagtatatatttgttgggtcctgactcgtgggcccaatcactcgggagcaggtgagagcgacaacgcacgacaaaacgagaagcagggtggctcgaatgtcttgttaagcgtgtcccgtcaaaacgggaagctgggtggctcgaatgtcttgttaagcgtgtctcgtacacagactgaacatgggtattttgcatgtagagggtccattgggcctctgccagctgcacacagtatttcggtcccaagactcggagaccttcaccctgaagccttcaaagttgtccgtctcctgatgcgataccgagggggagcagttacccgtcgccccgcccaagaccattccttggcctggatcgactgttccagggcaaacgggcggacaagagcgaagtcctacaggcctttggcccctcctacccggggcctccgttgtgag

SEQ ID NO: 20318 - DNA, 243 bp, Zea Mays
ttgttttcttgttttttctctgtactctggtcttctttagaccattgatgtttcttctatcttaatatatctaatgcacagttctcctgcgcgttttagaaaaaaaaagggtcatggactcgtgttgacgtagagcagcgtcgagggcaggaggatcccaaccgacggcgggagaagcatcagtggagtcctcctcgccacagtgtggctccgcgatcgtgtgcagcggttgagggcatcacg

SEQ ID NO: 20319 - DNA, 2639 bp, Zea Mays
aaaaaactcaacccaaacccccaacctattcgagcgacgaaactggaaaaaagcacgcgacgacgcgacggtgaaggggaagtgtgaagggaagcagaagcgagacaaatccccacccggctccaaaccctagccacctcccccgtcccccccttttcgtcccccagatctcgctggcgtctgctccgcctcgcttcgatgtgaccccaccctagggtttgagacggtgttgcggtgtgtgcgtgtgtcgcggcgattcgcgacgcgagtaggattcgaggtgtcggcggcggtgcgagcgcaaatgaaggacccggcgcaccgcacgaaggtggtgctccggcggctgccgccggcgatcgcgcagcaggccgtcgtggaccaggtcgatgcgcgcttcgctgggcggtacgactgggcctgcttccgtcccggcaatgccagccaaaagaatcataggtattctcgactttacctaaatttcaagcacccagaggatgttgttgagtttgctgaggtcttcaatggacacatatttgtgaatgaaaagggtgctcaatttaaagctttcgtggaatatgcaccatcacaacaggttcccaagtcaaatgtcaagaaggatggccgtgaagggactgttacgaaagatcctgagtacttggagtttcttgagtttatttcaaagcctactgagcatctacctagtgctgaaattcagcttgaaaggaaagaagccgaaagggcagctgctggaaaggaggcacctgttgtgacacctcttatgatgtatgtccgccagcaaagggcagctaagagtatggctcagagacctggaagtaggcttagcagaaaagttgcaggtgttgtaactagcagttccagtcctaaaaggtcttttgagaagcgcagatcctccacgtatgttgtacgagacagtattaaggagaaaccgacctatatcatggtgccaaagagagaggagcatacacaaagggaaaaaattgtttctggaaattcaggtgatgccacaagtgggggggcatctggatctggtcagtcttctgacaaaattgtcattttgaaaggaagaggaagggttgattcgaacacacctgatggagcagctcaacagtcatcaacccctgtgaagaatataccaccatcgagttctagactagacaagcgatctgaagctaatggaagaattattaaaactgttctttcaaacaaggaagttcgcagttcaaatccatctcaacatgagcaggaaggtcaaatgtttaatactgagaaggataagcgtccaccacgggctctcaaccctcggactattgtgaaagatcaggtagttgaaaatgctgagagaagccattttgatgagaagaataattatctccacagctctgctccaattggtgagaaggttgaaaggcatgccagaaacagagatagacctgatcgcagtgtatgggcacctcgccgctatgacaaatctccgcctgggggtgtttcacatgccttgtcgtcagatttttctcaaatgcagtcacattctggagataatgtctcacaactaacagatggtcatggagacagaaagacagacacaaggggtcatggaggtagccgtggtgttcctgttgaaaatggacataggcatgccaaccgtcgtggtaccccatgtgatccaaaggaaaccaaaatatctgctagcgtgcctgatggaaagaattcaaagaggggctctgctagctatggtgctcatgagagacaagtatgggttcagaagtcaagttcaggctcgtgagtttgtccattgatggtattgaagtcgtggagaagtcttggattctgcagcgcattcttctttgttagctgttgatcctgtgaagtatggtaacgaaatgtccaatggtcaaatgctaccatgaagtgcaatctcagatctgtcagtcgaagtctcagctgaaaagagggctcggctgatttgattcacagaaatagtgaagtaacataacccggcatgtaggtagctctccgacaactttgggcaagatttgatttatgcccaatgttgatctttctggagcattggatggagattaggttggcatcactacctcattacctcgtgatagtggtcacatatttccaagacccctggaggttacacgcaccctcggcaattcgtcagagatggatgtaaatatctctagagaaagaagaggtctggttccgattgctgtttacaggttagaggtgcaacgtatttacaaagagagataagagttatcacttatcagattacctggtttgttaaataaaggtgaatttagctactagattatgagaccccgtgttttgacttctgcaatcgtggttcacgacagcagaaaggttacctaggagtgtaaaagtgacatctcattttgatgctatggttctgactcaatgggatgtgactttgtgatgtggttttgtcgcctggtgtgtgttttgctgccatgttcctccaaatgacccgggtgttctgtcgtgttagggatgatatgcttggtgtacagcatcaaaggtgcttaatgttttaaatcttaaaagtgatgttgcctggctttaatggttgatgatgtccgttctcc

SEQ ID NO: 20320 - DNA, 3396 bp, Zea Mays
ctcaacccaaacccccaacctattcgagcgacgaaactggaaaaaagcacgcgacgacgcgacggtgaaggggaagtgtgaagggaagcagaagcgagacaaatccccacccggctccaaaccctagccacctcccccgtcccccccttttcgtcccccagatctcgctggcgtctgctccgcctcgcttcgatgtgaccccaccctagggtttgagacggtgttgcggtgtgtgcgtgtgtcgcggcgattcgcgacgcgagtaggattcgaggtgtcggcggcggtgcgagcgcaaatgaaggacccggcgcaccgcacgaaggtggtgctccggcggctgccgccggcgatcgcgcagcaggccgtcgtggaccaggtcgatgcgcgcttcgctgggcggtacgactgggcctgcttccgtcccggcaatgccagccaaaagaatcataggtattctcgactttacctaaatttcaagcacccagaggatgttgttgagtttgctgaggtcttcaatggacacatatttgtgaatgaaaagggtgctcaatttaaagctttcgtggaatatgcaccatcacaacaggttcccaagtcaaatgtcaagaaggatggccgtgaagggactgttacgaaagatcctgagtacttggagtttcttgagtttatttcaaagcctactgagcatctacctagtgctgaaattcagcttgaaaggaaagaagccgaaagggcagctgctggaaaggaggcacctgttgtgacacctcttatgatgtatgtccgccagcaaagggcagctaagagtatggctcagagacctggaagtaggcttagcagaaaagttgcaggtgttgtaactagcagttccagtcctaaaaggtcttttgagaagcgcagatcctccacgtatgttgtacgagacagtattaaggagaaaccgacctatatcatggtgccaaagagagaggagcatacacaaagggaaaaaattgtttctggaaattcaggtgatgccacaagtgggggggcatctggatctggtcagtcttctgacaaaattgtcattttgaaaggaagaggaagggttgattcgaacacacctgatggagcagctcaacagtcatcaacccctgtgaagaatataccaccatcgagttctagactagacaagcgatctgaagctaatggaagaattattaaaactgttctttcaaacaaggaagttcgcagttcaaatccatctcaacatgagcaggaaggtcaaatgtttaatactgagaaggataagcgtccaccacgggctctcaaccctcggactattgtgaaagatcaggtagttgaaaatgctgagagaagccattttgatgagaagaataattatctccacagctctgctccaattggtgagaaggttgaaaggcatgccagaaacagagatagacctgatcgcagtgtatgggcacctcgccgctatgacaaatctccgcctgggggtgtttcacatgccttgtcgtcagatttttctcaaatgcagtcacattctggagataatgtctcacaactaacagatggtcatggagacagaaagacagacacaaggggtcatggaggtagccgtggtgttcctgttgaaaatggacataggcatgccaaccgtcgtggtaccccatgtgatccaaaggaaaccaaaatatctgctagcgtgcctgatggaaagaattcaaagaggggctctgctagctatggtgctcatgagagacaagtatgggttcagaagtcaagttcaggctcgtgagtttgtccattgatggtatgatgtgctactctagtttattcattcattgtcttcaagcccttctacaaatagctataacactacagtgatccttgtcagcgccataagttgtacattctgctgcttataatattttttgtggaacattgctggtggaatagttgaatccatccctgaagtctcttctcaaaggtctatttgcagcaagtttcattgttggctcaataggatggtctctgcgtacatgctatgagtcttttctaccacatagttaaatgattcctgttagatgacacaacttactaagttgctcttgttccatgcattataccaggtatgtggtaactaggtgacatacctacttatttgtacatatttgtttttttagatggtacaactcgctaaattgctcttgcatactgaattaccagtctaaatctattcttttagacttcgcatcattcccagatatggggcaaatgagagatttcacacatattgacacctaggccacttactgctgactaggtgcatacatggtgctccacattagctaggtgacctgattgagccaaagacaactttgtgggacttggtttaaccatttagaaccttagggaagaaagtgaatctgtagtggaacttcagggaagaattcaccattctttcaacattgttaatgaatgccatttttccgaaagtggtcttgaattatctggaatctccaccagtttcccgctaaattgttaactcttgcagatactcccataaaaaacaggtattgaagtcgtggagaagtcttggattctgcagcgcattcttctttgttagctgttgatcctgtgaagtatggtaacgaaatgtccaatggtcaaatgctaccatgaagtgcaatctcagatctgtcagtcgaagtctcagctgaaaagagggctcggctgatttgattcacagaaatagtgaagtaacataacccggcatgtaggtagctctccgacaactttgggcaagatttgatttatgcccaatgttgatctttctggagcattggatggagattaggttggcatcactacctcattacctcgtgatagtggtcacatatttccaagacccctggaggttacacgcaccctcggcaattcgtcagagatggatgtaaatatctctagagaaagaagaggtctggttccgattgctgtttacaggttagaggtgcaacgtatttacaaagagagataagagttatcacttatcagattacctggtttgttaaataaaggtgaatttagctactagattatgagaccccgtgttttgacttctgcaatcgtggttcacgacagcagaaaggttacctaggagtgtaaaagtgacatctcattttgatgctatggttctgactcaatgggatgtgactttgtgatgtggttttgtcgcctggtgtgtgttttgctgccatgttcctccaaatgacccgggtgttctgtcgtgttagggatgatatgcttggtgtacagcatcaaaggtgcttaatgttttaaatcttaaaagtgatgttgcctggctttaatggttgatgatgtccgttctcc

SEQ ID NO: 20321 - DNA, 2630 bp, Zea Mays
ctcaacccaaacccccaacctattcgagcgacgaaactggaaaaaagcacgcgacgacgcgacggtgaaggggaagtgtgaagggaagcagaagcgagacaaatccccacccggctccaaaccctagccacctcccccgtcccccccttttcgtcccccagatctcgctggcgtctgctccgcctcgcttcgatgtgaccccaccctagggtttgagacggtgttgcggtgtgtgcgtgtgtcgcggcgattcgcgacgcgagtaggattcgaggtgtcggcggcggtgcgagcgcaaatgaaggacccggcgcaccgcacgaaggtggtgctccggcggctgccgccggcgatcgcgcagcaggccgtcgtggaccaggtcgatgcgcgcttcgctgggcggtacgactgggcctgcttccgtcccggcaatgccagccaaaagaatcataggtattctcgactttacctaaatttcaagcacccagaggatgttgttgagtttgctgaggtcttcaatggacacatatttgtgaatgaaaagggtgctcaatttaaagctttcgtggaatatgcaccatcacaacaggttcccaagtcaaatgtcaagaaggatggccgtgaagggactgttacgaaagatcctgagtacttggagtttcttgagtttatttcaaagcctactgagcatctacctagtgctgaaattcagcttgaaaggaaagaagccgaaagggcagctgctggaaaggaggcacctgttgtgacacctcttatgatgtatgtccgccagcaaagggcagctaagagtatggctcagagacctggaagtaggcttagcagaaaagttgcaggtgttgtaactagcagttccagtcctaaaaggtcttttgagaagcgcagatcctccacgtatgttgtacgagacagtattaaggagaaaccgacctatatcatggtgccaaagagagaggagcatacacaaagggaaaaaattgtttctggaaattcagatgccacaagtgggggggcatctggatctggtcagtcttctgacaaaattgtcattttgaaaggaagaggaagggttgattcgaacacacctgatggagcagctcaacagtcatcaacccctgtgaagaatataccaccatcgagttctagactagacaagcgatctgaagctaatggaagaattattaaaactgttctttcaaacaaggaagttcgcagttcaaatccatctcaacatgagcaggaaggtcaaatgtttaatactgagaaggataagcgtccaccacgggctctcaaccctcggactattgtgaaagatcaggtagttgaaaatgctgagagaagccattttgatgagaagaataattatctccacagctctgctccaattggtgagaaggttgaaaggcatgccagaaacagagatagacctgatcgcagtgtatgggcacctcgccgctatgacaaatctccgcctgggggtgtttcacatgccttgtcgtcagatttttctcaaatgcagtcacattctggagataatgtctcacaactaacagatggtcatggagacagaaagacagacacaaggggtcatggaggtagccgtggtgttcctgttgaaaatggacataggcatgccaaccgtcgtggtaccccatgtgatccaaaggaaaccaaaatatctgctagcgtgcctgatggaaagaattcaaagaggggctctgctagctatggtgctcatgagagacaagtatgggttcagaagtcaagttcaggctcgtgagtttgtccattgatggtattgaagtcgtggagaagtcttggattctgcagcgcattcttctttgttagctgttgatcctgtgaagtatggtaacgaaatgtccaatggtcaaatgctaccatgaagtgcaatctcagatctgtcagtcgaagtctcagctgaaaagagggctcggctgatttgattcacagaaatagtgaagtaacataacccggcatgtaggtagctctccgacaactttgggcaagatttgatttatgcccaatgttgatctttctggagcattggatggagattaggttggcatcactacctcattacctcgtgatagtggtcacatatttccaagacccctggaggttacacgcaccctcggcaattcgtcagagatggatgtaaatatctctagagaaagaagaggtctggttccgattgctgtttacaggttagaggtgcaacgtatttacaaagagagataagagttatcacttatcagattacctggtttgttaaataaaggtgaatttagctactagattatgagaccccgtgttttgacttctgcaatcgtggttcacgacagcagaaaggttacctaggagtgtaaaagtgacatctcattttgatgctatggttctgactcaatgggatgtgactttgtgatgtggttttgtcgcctggtgtgtgttttgctgccatgttcctccaaatgacccgggtgttctgtcgtgttagggatgatatgcttggtgtacagcatcaaaggtgcttaatgttttaaatcttaaaagtgatgttgcctggctttaatggttgatgatgtccgttctcc

SEQ ID NO: 20322 - DNA, 2646 bp, Zea Mays
ccaaacccccaacctattcgagcgacgaaactggaaaaaagcacgcgacgacgcgacggtgaaggggaagtgtgaagggaagcagaagcgagacaaatccccacccggctccaaaccctagccacctcccccgtcccccccttttcgtcccccagatctcgctggcgtctgctccgcctcgcttcgatgtgaccccaccctagggtttgagacggtgttgcggtgtgtgcgtgtgtcgcggcgattcgcgacgcgagtaggattcgaggtgtcggcggcggtgcgagcgcaaatgaaggacccggcgcaccgcacgaaggtggtgctccggcggctgccgccggcgatcgcgcagcaggccgtcgtggaccaggtcgatgcgcgcttcgctgggcggtacgactgggcctgcttccgtcccggcaatgccagccaaaagaatcataggtattctcgactttacctaaatttcaagcacccagaggatgttgttgagtttgctgaggtcttcaatggacacatatttgtgaatgaaaagggtgctcaatttaaagctttcgtggaatatgcaccatcacaacaggttcccaagtcaaatgtcaagaaggatggccgtgaagggactgttacgaaagatcctgagtacttggagtttcttgagtttatttcaaagcctactgagcatctacctagtgctgaaattcagcttgaaaggaaagaagccgaaagggcagctgctggaaaggaggcacctgttgtgacacctcttatgatgtatgtccgccagcaaagggcagctaagagtatggctcagagacctggaagtaggcttagcagaaaagttgcaggtgttgtaactagcagttccagtcctaaaaggtcttttgagaagcgcagatcctccacgtatgttgtacgagacagtattaaggagaaaccgacctatatcatggtgccaaagagagaggagcatacacaaagggaaaaaattgtttctggaaattcaggtgatgccacaagtgggggggcatctggatctggtcagtcttctgacaaaattgtcattttgaaaggaagaggaagggttgattcgaacacacctgatggagcagctcaacagtcatcaacccctgtgaagaatataccaccatcgagttctagactagacaagcgatctgaagctaatggaagaattattaaaactgttctttcaaacaaggaagttcgcagttcaaatccatctcaacatgagcaggaaggtcaaatgtttaatactgagaaggataagcgtccaccacgggctctcaaccctcggactattgtgaaagatcaggtagttgaaaatgctgagagaagccattttgatgagaagaataattatctccacagctctgctccaattggtgagaaggttgaaaggcatgccagaaacagagatagacctgatcgcagtgtatgggcacctcgccgctatgacaaatctccgcctgggggtgtttcacatgccttgtcgtcagatttttctcaaatgcagtcacattctggagataatgtctcacaactaacagatggtcatggagacagaaagacagacacaaggggtcatggaggtagccgtggtgttcctgttgaaaatggacataggcatgccaaccgtcgtggtaccccatgtgatccaaaggaaaccaaaatatctgctagcgtgcctgatggaaagaattcaaagaggggctctgctagctatggtgctcatgagagacaagtatgggttcagaagtcaagttcaggctcgtgagtttgtccattgatgatactcccataaaaaacaggtattgaagtcgtggagaagtcttggattctgcagcgcattcttctttgttagctgttgatcctgtgaagtatggtaacgaaatgtccaatggtcaaatgctaccatgaagtgcaatctcagatctgtcagtcgaagtctcagctgaaaagagggctcggctgatttgattcacagaaatagtgaagtaacataacccggcatgtaggtagctctccgacaactttgggcaagatttgatttatgcccaatgttgatctttctggagcattggatggagattaggttggcatcactacctcattacctcgtgatagtggtcacatatttccaagacccctggaggttacacgcaccctcggcaattcgtcagagatggatgtaaatatctctagagaaagaagaggtctggttccgattgctgtttacaggttagaggtgcaacgtatttacaaagagagataagagttatcacttatcagattacctggtttgttaaataaaggtgaatttagctactagattatgagaccccgtgttttgacttctgcaatcgtggttcacgacagcagaaaggttacctaggagtgtaaaagtgacatctcattttgatgctatggttctgactcaatgggatgtgactttgtgatgtggttttgtcgcctggtgtgtgttttgctgccatgttcctccaaatgacccgggtgttctgtcgtgttagggatgatatgcttggtgtacagcatcaaaggtgcttaatgttttaaatcttaaaagtgatgttgcctggctttaatggttgatgatgtccgttctcc

SEQ ID NO: 20323 - DNA, 2597 bp, Zea Mays
ccaaacccccaacctattcgagcgacgaaactggaaaaaagcacgcgacgacgcgacggtgaaggggaagtgtgaagggaagcagaagcgagacaaatccccacccggctccaaaccctagccacctcccccgtcccccccttttcgtcccccagatctcgctggcgtctgctccgcctcgcttcgatgtgaccccaccctagggtttgagacggtgttgcggtgtgtgcgtgtgtcgcggcgattcgcgacgcgagtaggattcgaggtgtcggcggcggtgcgagcgcaaatgaaggacccggcgcaccgcacgaaggtggtgctccggcggctgccgccggcgatcgcgcagcaggccgtcgtggaccaggtcgatgcgcgcttcgctgggcggtacgactgggcctgcttccgtcccggcaatgccagccaaaagaatcataggtattctcgactttacctaaatttcaagcacccagaggatgttgttgagtttgctgaggtcttcaatggacacatatttgtgaatgaaaagggtgctcaatttaaagctttcgtggaatatgcaccatcacaacaggttcccaagtcaaatgtcaagaaggatggccgtgaagggactgttacgaaagatcctgagtacttggagtttcttgagtttatttcaaagcctactgagcatctacctagtgctgaaattcagcttgaaaggaaagaagccgaaagggcagctgctggaaaggaggcacctgttgtgacacctcttatgatgtatgtccgccagcaaagggcagctaagagtatggctcagagacctggaagtaggcttagcagaaaagttgcaggtgttgtaactagcagttccagtcctaaaaggtcttttgagaagcgcagatcctccacgtatgttgtacgagacagtattaaggagaaaccgacctatatcatggtgccaaagagagaggagcatacacaaagggaaaaaattgtttctggaaattcagatgccacaagtgggggggcatctggatctggtcagtcttctgacaaaattgtcattttgaaaggaagaggaagggttgattcgaacacacctgatggagcagctcaacagtcatcaacccctgtgaagaatataccaccatcgagttctagactagacaagcgatctgaagctaatggaagaattattaaaactgttctttcaaacaaggaagttcgcagttcaaatccatctcaacatgagcaggaaggtcaaatgtttaatactgagaaggataagcgtccaccacgggctctcaaccctcggactattgtgaaagatcaggtagttgaaaatgctgagagaagccattttgatgagaagaataattatctccacagctctgctccaattggtgagaaggttgaaaggcatgccagaaacagagatagacctgatcgcagtgtatgggcacctcgccgctatgacaaatctccgcctgggggtgtttcacatgccttgtcgtcagatttttctcaaatgcagtcacattctggagataatgtctcacaactaacagatggtcatggagacagaaagacagacacaaggggtcatggaggacataggcatgccaaccgtcgtggtaccccatgtgatccaaaggaaaccaaaatatctgctagcgtgcctgatggaaagaattcaaagaggggctctgctagctatggtgctcatgagagacaagtatgggttcagaagtcaagttcaggctcgtgagtttgtccattgatggtattgaagtcgtggagaagtcttggattctgcagcgcattcttctttgttagctgttgatcctgtgaagtatggtaacgaaatgtccaatggtcaaatgctaccatgaagtgcaatctcagatctgtcagtcgaagtctcagctgaaaagagggctcggctgatttgattcacagaaatagtgaagtaacataacccggcatgtaggtagctctccgacaactttgggcaagatttgatttatgcccaatgttgatctttctggagcattggatggagattaggttggcatcactacctcattacctcgtgatagtggtcacatatttccaagacccctggaggttacacgcaccctcggcaattcgtcagagatggatgtaaatatctctagagaaagaagaggtctggttccgattgctgtttacaggttagaggtgcaacgtatttacaaagagagataagagttatcacttatcagattacctggtttgttaaataaaggtgaatttagctactagattatgagaccccgtgttttgacttctgcaatcgtggttcacgacagcagaaaggttacctaggagtgtaaaagtgacatctcattttgatgctatggttctgactcaatgggatgtgactttgtgatgtggttttgtcgcctggtgtgtgttttgctgccatgttcctccaaatgacccgggtgttctgtcgtgttagggatgatatgcttggtgtacagcatcaaaggtgcttaatgttttaaatcttaaaagtgatgttgcctggctttaatggttgatgatgtccgttctcc

SEQ ID NO: 20324 - DNA, 2643 bp, Zea Mays
ccaaacccccaacctattcgagcgacgaaactggaaaaaagcacgcgacgacgcgacggtgaaggggaagtgtgaagggaagcagaagcgagacaaatccccacccggctccaaaccctagccacctcccccgtcccccccttttcgtcccccagatctcgctggcgtctgctccgcctcgcttcgatgtgaccccaccctagggtttgagacggtgttgcggtgtgtgcgtgtgtcgcggcgattcgcgacgcgagtaggattcgaggtgtcggcggcggtgcgagcgcaaatgaaggacccggcgcaccgcacgaaggtggtgctccggcggctgccgccggcgatcgcgcagcaggccgtcgtggaccaggtcgatgcgcgcttcgctgggcggtacgactgggcctgcttccgtcccggcaatgccagccaaaagaatcataggtattctcgactttacctaaatttcaagcacccagaggatgttgttgagtttgctgaggtcttcaatggacacatatttgtgaatgaaaagggtgctcaatttaaagctttcgtggaatatgcaccatcacaacaggttcccaagtcaaatgtcaagaaggatggccgtgaagggactgttacgaaagatcctgagtacttggagtttcttgagtttatttcaaagcctactgagcatctacctagtgctgaaattcagcttgaaaggaaagaagccgaaagggcagctgctggaaaggaggcacctgttgtgacacctcttatgatgtatgtccgccagcaaagggcagctaagagtatggctcagagacctggaagtaggcttagcagaaaagttgcaggtgttgtaactagcagttccagtcctaaaaggtcttttgagaagcgcagatcctccacgtatgttgtacgagacagtattaaggagaaaccgacctatatcatggtgccaaagagagaggagcatacacaaagggaaaaaattgtttctggaaattcagatgccacaagtgggggggcatctggatctggtcagtcttctgacaaaattgtcattttgaaaggaagaggaagggttgattcgaacacacctgatggagcagctcaacagtcatcaacccctgtgaagaatataccaccatcgagttctagactagacaagcgatctgaagctaatggaagaattattaaaactgttctttcaaacaaggaagttcgcagttcaaatccatctcaacatgagcaggaaggtcaaatgtttaatactgagaaggataagcgtccaccacgggctctcaaccctcggactattgtgaaagatcaggtagttgaaaatgctgagagaagccattttgatgagaagaataattatctccacagctctgctccaattggtgagaaggttgaaaggcatgccagaaacagagatagacctgatcgcagtgtatgggcacctcgccgctatgacaaatctccgcctgggggtgtttcacatgccttgtcgtcagatttttctcaaatgcagtcacattctggagataatgtctcacaactaacagatggtcatggagacagaaagacagacacaaggggtcatggaggtagccgtggtgttcctgttgaaaatggacataggcatgccaaccgtcgtggtaccccatgtgatccaaaggaaaccaaaatatctgctagcgtgcctgatggaaagaattcaaagaggggctctgctagctatggtgctcatgagagacaagtatgggttcagaagtcaagttcaggctcgtgagtttgtccattgatgatactcccataaaaaacaggtattgaagtcgtggagaagtcttggattctgcagcgcattcttctttgttagctgttgatcctgtgaagtatggtaacgaaatgtccaatggtcaaatgctaccatgaagtgcaatctcagatctgtcagtcgaagtctcagctgaaaagagggctcggctgatttgattcacagaaatagtgaagtaacataacccggcatgtaggtagctctccgacaactttgggcaagatttgatttatgcccaatgttgatctttctggagcattggatggagattaggttggcatcactacctcattacctcgtgatagtggtcacatatttccaagacccctggaggttacacgcaccctcggcaattcgtcagagatggatgtaaatatctctagagaaagaagaggtctggttccgattgctgtttacaggttagaggtgcaacgtatttacaaagagagataagagttatcacttatcagattacctggtttgttaaataaaggtgaatttagctactagattatgagaccccgtgttttgacttctgcaatcgtggttcacgacagcagaaaggttacctaggagtgtaaaagtgacatctcattttgatgctatggttctgactcaatgggatgtgactttgtgatgtggttttgtcgcctggtgtgtgttttgctgccatgttcctccaaatgacccgggtgttctgtcgtgttagggatgatatgcttggtgtacagcatcaaaggtgcttaatgttttaaatcttaaaagtgatgttgcctggctttaatggttgatgatgtccgttctcc

SEQ ID NO: 20325 - DNA, 3387 bp, Zea Mays
ccaaacccccaacctattcgagcgacgaaactggaaaaaagcacgcgacgacgcgacggtgaaggggaagtgtgaagggaagcagaagcgagacaaatccccacccggctccaaaccctagccacctcccccgtcccccccttttcgtcccccagatctcgctggcgtctgctccgcctcgcttcgatgtgaccccaccctagggtttgagacggtgttgcggtgtgtgcgtgtgtcgcggcgattcgcgacgcgagtaggattcgaggtgtcggcggcggtgcgagcgcaaatgaaggacccggcgcaccgcacgaaggtggtgctccggcggctgccgccggcgatcgcgcagcaggccgtcgtggaccaggtcgatgcgcgcttcgctgggcggtacgactgggcctgcttccgtcccggcaatgccagccaaaagaatcataggtattctcgactttacctaaatttcaagcacccagaggatgttgttgagtttgctgaggtcttcaatggacacatatttgtgaatgaaaagggtgctcaatttaaagctttcgtggaatatgcaccatcacaacaggttcccaagtcaaatgtcaagaaggatggccgtgaagggactgttacgaaagatcctgagtacttggagtttcttgagtttatttcaaagcctactgagcatctacctagtgctgaaattcagcttgaaaggaaagaagccgaaagggcagctgctggaaaggaggcacctgttgtgacacctcttatgatgtatgtccgccagcaaagggcagctaagagtatggctcagagacctggaagtaggcttagcagaaaagttgcaggtgttgtaactagcagttccagtcctaaaaggtcttttgagaagcgcagatcctccacgtatgttgtacgagacagtattaaggagaaaccgacctatatcatggtgccaaagagagaggagcatacacaaagggaaaaaattgtttctggaaattcagatgccacaagtgggggggcatctggatctggtcagtcttctgacaaaattgtcattttgaaaggaagaggaagggttgattcgaacacacctgatggagcagctcaacagtcatcaacccctgtgaagaatataccaccatcgagttctagactagacaagcgatctgaagctaatggaagaattattaaaactgttctttcaaacaaggaagttcgcagttcaaatccatctcaacatgagcaggaaggtcaaatgtttaatactgagaaggataagcgtccaccacgggctctcaaccctcggactattgtgaaagatcaggtagttgaaaatgctgagagaagccattttgatgagaagaataattatctccacagctctgctccaattggtgagaaggttgaaaggcatgccagaaacagagatagacctgatcgcagtgtatgggcacctcgccgctatgacaaatctccgcctgggggtgtttcacatgccttgtcgtcagatttttctcaaatgcagtcacattctggagataatgtctcacaactaacagatggtcatggagacagaaagacagacacaaggggtcatggaggtagccgtggtgttcctgttgaaaatggacataggcatgccaaccgtcgtggtaccccatgtgatccaaaggaaaccaaaatatctgctagcgtgcctgatggaaagaattcaaagaggggctctgctagctatggtgctcatgagagacaagtatgggttcagaagtcaagttcaggctcgtgagtttgtccattgatggtatgatgtgctactctagtttattcattcattgtcttcaagcccttctacaaatagctataacactacagtgatccttgtcagcgccataagttgtacattctgctgcttataatattttttgtggaacattgctggtggaatagttgaatccatccctgaagtctcttctcaaaggtctatttgcagcaagtttcattgttggctcaataggatggtctctgcgtacatgctatgagtcttttctaccacatagttaaatgattcctgttagatgacacaacttactaagttgctcttgttccatgcattataccaggtatgtggtaactaggtgacatacctacttatttgtacatatttgtttttttagatggtacaactcgctaaattgctcttgcatactgaattaccagtctaaatctattcttttagacttcgcatcattcccagatatggggcaaatgagagatttcacacatattgacacctaggccacttactgctgactaggtgcatacatggtgctccacattagctaggtgacctgattgagccaaagacaactttgtgggacttggtttaaccatttagaaccttagggaagaaagtgaatctgtagtggaacttcagggaagaattcaccattctttcaacattgttaatgaatgccatttttccgaaagtggtcttgaattatctggaatctccaccagtttcccgctaaattgttaactcttgcagatactcccataaaaaacaggtattgaagtcgtggagaagtcttggattctgcagcgcattcttctttgttagctgttgatcctgtgaagtatggtaacgaaatgtccaatggtcaaatgctaccatgaagtgcaatctcagatctgtcagtcgaagtctcagctgaaaagagggctcggctgatttgattcacagaaatagtgaagtaacataacccggcatgtaggtagctctccgacaactttgggcaagatttgatttatgcccaatgttgatctttctggagcattggatggagattaggttggcatcactacctcattacctcgtgatagtggtcacatatttccaagacccctggaggttacacgcaccctcggcaattcgtcagagatggatgtaaatatctctagagaaagaagaggtctggttccgattgctgtttacaggttagaggtgcaacgtatttacaaagagagataagagttatcacttatcagattacctggtttgttaaataaaggtgaatttagctactagattatgagaccccgtgttttgacttctgcaatcgtggttcacgacagcagaaaggttacctaggagtgtaaaagtgacatctcattttgatgctatggttctgactcaatgggatgtgactttgtgatgtggttttgtcgcctggtgtgtgttttgctgccatgttcctccaaatgacccgggtgttctgtcgtgttagggatgatatgcttggtgtacagcatcaaaggtgcttaatgttttaaatcttaaaagtgatgttgcctggctttaatggttgatgatgtccgttctcc

SEQ ID NO: 20326 - DNA, 2000 bp, Zea Mays
gggactgttacgaaagatcctgagtacttggagtttcttgagtttatttcaaagcctactgagcatctacctagtgctgaaattcagcttgaaaggaaagaagccgaaagggcagctgctggaaaggaggcacctgttgtgacacctcttatgatgtatgtccgccagcaaagggcagctaagagtatggctcagagacctggaagtaggcttagcagaaaagttgcaggtgttgtaactagcagttccagtcctaaaaggtcttttgagaagcgcagatcctccacgtatgttgtacgagacagtattaaggagaaaccgacctatatcatggtgccaaagagagaggagcatacacaaagggaaaaaattgtttctggaaattcaggtgatgccacaagtgggggggcatctggatctggtcagtcttctgacaaaattgtcattttgaaaggaagaggaagggttgattcgaacacacctgatggagcagctcaacagtcatcaacccctgtgaagaatataccaccatcgagttctagactagacaagcgatctgaagctaatggaagaattattaaaactgttctttcaaacaaggaagttcgcagttcaaatccatctcaacatgagcaggaaggtcaaatgtttaatactgagaaggataagcgtccaccacgggctctcaaccctcggactattgtgaaagatcaggtagttgaaaatgctgagagaagccattttgatgagaagaataattatctccacagctctgctccaattggtgagaaggttgaaaggcatgccagaaacagagatagacctgatcgcagtgtatgggcacctcgccgctatgacaaatctccgcctgggggtgtttcacatgccttgtcgtcagatttttctcaaatgcagtcacattctggagataatgtctcacaactaacagatggtcatggagacagaaagacagacacaaggggtcatggaggacataggcatgccaaccgtcgtggtaccccatgtgatccaaaggaaaccaaaatatctgctagcgtgcctgatggaaagaattcaaagaggggctctgctagctatggtgctcatgagagacaagtatgggttcagaagtcaagttcaggctcgtgagtttgtccattgatgatactcccataaaaaacaggtattgaagtcgtggagaagtcttggattctgcagcgcattcttctttgttagctgttgatcctgtgaagtatggtaacgaaatgtccaatggtcaaatgctaccatgaagtgcaatctcagatctgtcagtcgaagtctcagctgaaaagagggctcggctgatttgattcacagaaatagtgaagtaacataacccggcatgtaggtagctctccgacaactttgggcaagatttgatttatgcccaatgttgatctttctggagcattggatggagattaggttggcatcactacctcattacctcgtgatagtggtcacatatttccaagacccctggaggttacacgcaccctcggcaattcgtcagagatggatgtaaatatctctagagaaagaagaggtctggttccgattgctgtttacaggttagaggtgcaacgtatttacaaagagagataagagttatcacttatcagattacctggtttgttaaataaaggtgaatttagctactagattatgagaccccgtgttttgacttctgcaatcgtggttcacgacagcagaaaggttacctaggagtgtaaaagtgacatctcattttgatgctatggttctgactcaatgggatgtgactttgtgatgtggttttgtcgcctggtgtgtgttttgctgccatgttcctccaaatgacccgggtgttctgtcgtgttagggatgatatgcttggtgtacagcatcaaaggtgcttaatgttttaaatcttaaaagtgatgttgcctggctttaatggttgatgatgtccgttctcc

SEQ ID NO: 20327 - DNA, 2234 bp, Zea Mays
cagcgagggccgagcgcccgcccgagtcccgagagggctttggtttcgtcgtcaatcgtcatccattcccaacccaaacactctccgtccgtccctcctctcctgttccctccccgagtcgatatctcaccgtcgtgcgagtaaaacaaagcctcgccgccacggcgccacgcgagcaaagacctagcgcgagcaagcaagggaggcagagaccttagtgcgtcgcgcaacgcggctcggcccgacggcatggagagcctcgtcctcgcctcctcctgctccccgtccccacggctgccgctactctccccctccgcccgcttccgccggctgcccggctccatgccacaggcgccggcgtccaccagcggtgccacgcggaaaggtctcaggaggcacatgctcttcgtcgccgccgccaccgcgactccttccggatccaggaacgttttcaaggaattgagagcaaaaggctttgcaagcatgtcatcttcgactgccaatgagaatatgtctactgaaactggcaccctgcctcccatgcctcccccatcatcatacattggttcgcctgttttctggattggagttggtgtagcattgtctgtggcgtttaccacggtttcttccatgctaaagaaatatgccatggaacaagcatttaagtcaatgatgacccaagcaccaccaaactcatttggctccaactcgcctttcccatttggcatgccaccacaggcatctcctactgcaccaagcagtttttcgtacttggaaccaaggaaaggtacctccccacaggtgtcaactgttgatgtctcagctaccgaagtggatgccgctggaacatcgaaagaggtggatgtgactgagacaccaaaaccttctaagaattttgcatttgttgatgtttctcccgaagatttgcagcaaaaggacctccaatcttcactggagatggtagatgtaaaacatgatagtacagaaagtgaaagtaaggaggatactgaggaaaaggctcccagaaatggagcgacttttaagctgaatgaagatgctgctcgtgggccaactgaatccagtcaatcaggacctatgctatctgttgagacaattgagaagatgatggaagatccagctgtgcagaagatggtttatccgtcacaactcacaaggcaaaaaggaacaagagcaggcggccaacccaatgccaacgcggtccagccaagtccaacccaccccaccacacccaccacgtcgtcgacgccgacgcgtcgccaacggaaacttctcaaagcgccgacggggttccacggcccgtaatttcaaccgtccccaccgccgcgggctcctcctgacggaccccgaagctacttgcctgaagagatgaggaacccagattcgttcaagtggatgctgcagaatccaatgtaccggcaacaactacaggatatgctaaagaacatgggtggatctcctgatcaatgggataaccgtatgcttgatcacctgaagaactttgaccttagcagtccagaagtgcggcagcagtttgcgcaagttggcatgactcccgaggaagtggtatcgaaaataatggcaaacccagatgtagctgtcgcattccagaacccaaaaatacagacagccatcatggactgctcgcagaaccctcttaacattgtaaagtaccaaaacgacaaggaggtcatggatgttttcatgaagatatcacagatctttccccaaatcaacggctagctggtcttcactgcgggattgcagtcttgattttttttgtcggcctatcatcccctgtgtctggagggcctgctgcggtaaccatctttgaaggaaaagggaacacctgttgctgttgggccgtgacgctctggatacaccctccctgtgtcgagctttttgagtttcatatgtagtagtacatcgtgtgatgtagcggccttggtctagctatgagtatgattgacccaccctcttcccgcttcataaagtcaggctagtgagcgtagcaggggcaaatatttgttatttacattgcatgggcagccagccggtctgcgctctgacgttgcatggtttatctcgtaggatgtgaaaggcgcagcagacagacatggttcgtatcagatcaattttgatatatactaattgctattgttagtgtgtaatacgtcagtgacacaatggcaatgcaagtaatctgtttcgagact

SEQ ID NO: 20328 - DNA, 1585 bp, Zea Mays
ccaaagtgtcatttatgacccaagggactattattttagtaatttgtagcatactccagtatgtagtcctgtgagatgggtgtttgtagtttcaaaagctaagtttctgcatctcgtatatctttaacttccatactaccactattaccacaactcctaccaaaattgtaagctgtacaccccacttcatatgtcactagaaatatgccatggaacaagcatttaagtcaatgatgacccaagcaccaccaaactcatttggctccaactcgcctttcccatttggcatgccaccacaggcatctcctactgcaccaagcagtttttcgtacttggaaccaaggaaaggtacctccccacaggtgtcaactgttgatgtctcagctaccgaagtggatgccgctggaacatcgaaagaggtggatgtgactgagacaccaaaaccttctaagaattttgcatttgttgatgtttctcccgaagatttgcagcaaaaggacctccaatcttcactggagatggtagatgtaaaacatgatagtacagaaagtgaaagtaaggaggatactgaggaaaaggctcccagaaatggagcgacttttaagctgaatgaagatgctgctcgtgggccaactgaatccagtcaatcaggacctatgctatctgttgagacaattgagaagatgatggaagatccagctgtgcagaagatggtttatccctacttgcctgaagagatgaggaacccagattcgttcaagtggatgctgcagaatccaatgtaccggcaacaactacaggatatgctaaagaacatgggtggatctcctgatcaatgggataaccgtatgcttgatcacctgaagaactttgaccttagcagtccagaagtgcggcagcagtttgcgcaagttggcatgactcccgaggaagtggtatcgaaaataatggcaaacccagatgtagctgtcgcattccagaacccaaaaatacagacagccatcatggactgctcgcagaaccctcttaacattgtaaagtaccaaaacgacaaggaggtcatggatgttttcatgaagatatcacagatctttccccaaatcaacggctagctggtcttcactgcgggattgcagtcttgattttttttgtcggcctatcatcccctgtgtctggagggcctgctgcggtaaccatctttgaaggaaaagggaacacctgttgctgttgggccgtgacgctctggatacaccctccctgtgtcgagctttttgagtttcatatgtagtagtacatcgtgtgatgtagcggccttggtctagctatgagtatgattgacccaccctcttcccgcttcataaagtcaggctagtgagcgtagcaggggcaaatatttgttatttacattgcatgggcagccagccggtctgcgctctgacgttgcatggtttatctcgtaggatgtgaaaggcgcagcagacagacatggttcgtatcagatcaattttgatatatactaattgctattgttagtgtgtaatacgtcagtgacacaatggcaatgcaagtaatctgtttcgagact

SEQ ID NO: 20329 - DNA, 957 bp, Zea Mays
cgctccgccaccgccaatgctctctacagttccgaggcccaggcctaacacatgacttccttcattcttgcctcagaaatattaatatttatgctacttgcctgaagagatgaggaacccagattcgttcaagtggatgctgcagaatccaatgtaccggcaacaactacaggatatgctaaagaacatgggtggatctcctgatcaatgggataaccgtatgcttgatcacctgaagaactttgaccttagcagtccagaagtgcggcagcagtttgcgcaagttggcatgactcccgaggaagtggtatcgaaaataatggcaaacccagatgtagctgtcgcattccagaacccaaaaatacagacagccatcatggactgctcgcagaaccctcttaacattgtaaagtaccaaaacgacaaggaggtcatggatgttttcatgaagatatcacagatctttccccaaatcaacggctagctggtcttcactgcgggattgcagtcttgattttttttgtcggcctatcatcccctgtgtctggagggcctgctgcggtaaccatctttgaaggaaaagggaacacctgttgctgttgggccgtgacgctctggatacaccctccctgtgtcgagctttttgagtttcatatgtagtagtacatcgtgtgatgtagcggccttggtctagctatgagtatgattgacccaccctcttcccgcttcataaagtcaggctagtgagcgtagcaggggcaaatatttgttatttacattgcatgggcagccagccggtctgcgctctgacgttgcatggtttatctcgtaggatgtgaaaggcgcagcagacagacatggttcgtatcagatcaattttgatatatactaattgctattgttagtgtgtaatacgtcagtgacacaatggcaatgcaagtaatctgtttcgagact

SEQ ID NO: 20330 - DNA, 898 bp, Zea Mays
aaagaggaaagtagcagcagctcaaccaaggaagctacttgcctgaagagatgaggaacccagattcgttcaagtggatgctgcagaatccaatgtaccggcaacaactacaggatatgctaaagaacatgggtggatctcctgatcaatgggataaccgtatgcttgatcacctgaagaactttgaccttagcagtccagaagtgcggcagcagtttgcgcaagttggcatgactcccgaggaagtggtatcgaaaataatggcaaacccagatgtagctgtcgcattccagaacccaaaaatacagacagccatcatggactgctcgcagaaccctcttaacattgtaaagtaccaaaacgacaaggaggtcatggatgttttcatgaagatatcacagatctttccccaaatcaacggctagctggtcttcactgcgggattgcagtcttgattttttttgtcggcctatcatcccctgtgtctggagggcctgctgcggtaaccatctttgaaggaaaagggaacacctgttgctgttgggccgtgacgctctggatacaccctccctgtgtcgagctttttgagtttcatatgtagtagtacatcgtgtgatgtagcggccttggtctagctatgagtatgattgacccaccctcttcccgcttcataaagtcaggctagtgagcgtagcaggggcaaatatttgttatttacattgcatgggcagccagccggtctgcgctctgacgttgcatggtttatctcgtaggatgtgaaaggcgcagcagacagacatggttcgtatcagatcaattttgatatatactaattgctattgttagtgtgtaatacgtcagtgacacaatggcaatgcaagtaatctgtttcgagact

SEQ ID NO: 20331 - DNA, 902 bp, Zea Mays
ctgtgataaggcctcccatgtaatggacagcctgcaaactacttgcctgaagagatgaggaacccagattcgttcaagtggatgctgcagaatccaatgtaccggcaacaactacaggatatgctaaagaacatgggtggatctcctgatcaatgggataaccgtatgcttgatcacctgaagaactttgaccttagcagtccagaagtgcggcagcagtttgcgcaagttggcatgactcccgaggaagtggtatcgaaaataatggcaaacccagatgtagctgtcgcattccagaacccaaaaatacagacagccatcatggactgctcgcagaaccctcttaacattgtaaagtaccaaaacgacaaggaggtcatggatgttttcatgaagatatcacagatctttccccaaatcaacggctagctggtcttcactgcgggattgcagtcttgattttttttgtcggcctatcatcccctgtgtctggagggcctgctgcggtaaccatctttgaaggaaaagggaacacctgttgctgttgggccgtgacgctctggatacaccctccctgtgtcgagctttttgagtttcatatgtagtagtacatcgtgtgatgtagcggccttggtctagctatgagtatgattgacccaccctcttcccgcttcataaagtcaggctagtgagcgtagcaggggcaaatatttgttatttacattgcatgggcagccagccggtctgcgctctgacgttgcatggtttatctcgtaggatgtgaaaggcgcagcagacagacatggttcgtatcagatcaattttgatatatactaattgctattgttagtgtgtaatacgtcagtgacacaatggcaatgcaagtaatctgtttcgagact

SEQ ID NO: 20332 - DNA, 411 bp, Zea Mays
ttctccttccattcttttggagccaggtcatgcaacgaatccctcacttcctttactaggttgatcaattgactataatcaggtctttctcccctcatggagttggtgaccatatcccagaaagctttctccatggtttctctcactttgttctggaactcctcctcagcagtactagcactatcagacctgccagcaaaagcactggcatcctcatgaagcatttcattgaccattttttcattctctgtcggctgcttttctggtgatgaactgactgatgacgaagaagcactgaacaaagaacggactacagagcttgtcccaacaacatttgtcctggaactttcaggaacctcagaaagtggtgctttcccagacgaattgatgctcaaaggggtagacacattt

SEQ ID NO: 20333 - DNA, 1126 bp, Zea Mays
ccttcgtgctccgaagaactacaggagattccattgacatggctaatttttcaaaaggcatatttttcacagacttctcattaatccccaaggcatcataagcttgagccaaagcaaatgttgtcttcctggacttcacaaatattctccagtgtctgaagtacaaaaaaatgacaaaaatagtgatgataattcccctcatcagacaagaacaagaaaaatatatcaaaatatgcacttgttggaagccatattagtaccttgctagttttcttgaaagggcatatgcatgctttaagtaatcagcatgggttgaaccacgaggacttcctctttgtttcaaatactcagccctctgcctcttcgcctgttccagtaagataatctctggatgttagaaacagaacacaaggataaaaaaatgtttaacagaacactatgagagttgagaatacataccctttgaagtttgttgtccagctgttctttcagttttctcctctctgattctctccggctgcatacagtcatggcagctttttggatgcgtaaaagcctagcttgagccttggtcttttcagcttccagcaacctcagtcgtttcttctcagcagcagcgcgcttcagagaaattgcagagcgcacctgctccatgtatttgctctctgattttgccttctgcaccagggacctcgctgtcctctccttcagtgcggcccgcttctgcatatcggcatgcagaaggcgcatgcggttctcctctgcctgtcggacacgagactcaactctggtctcgagtcttccctttccttctcaaacctcatatccacatcattcttagcagcttgtctgagttcatccaacttggtcgagtcggttatgtgccttcgccaagaaggattagccttttatgctcagcagccagaagcttcgcttcaaggcgctgcccatggtcttcttcttgagaggaccacgacgggctccgtggcttcttccttgctttgcaggccaaccattcacggaattgctgaaaaacaacattcgaaaagtcaacaagttatcctatactgcaatcagtccaattcgactccaatagttgtttcctatgacactttactcccaaaat

SEQ ID NO: 20334 - DNA, 665 bp, Zea Mays
aacaaattcgcacatgaaaagagtaaaacaggttttgtctcgccaaaaggaactccaatttggaattaatggccaatgaaatcgcaggagaaatccagaaaaaaaaaaagaacagcttcagaaacgggcggagaacaactaccctggcctcgcctcaccgcaccagtaaaaagcgatcaagtaattatcgtgaccgctacgaattatttcgacttcacagttcacgccgaagcaacccaactggcaactacgagcaagcaagaagcaacgtaaaccaaactagcacgcggcgggaagaaggaaacaggacgaaagggacacgtacctgcctccggagctcggcctccctaagcctggcctcgatctcctccacgctcgccggcgccccaccgccgcgcgccccctccaccagcctcctcctaatccgccgcggcggcgccctcgccgccgctggcccttcctccgctggtatctccatggccaccggctcccgcgcccccgtcatcaaaccctccgatcaacccaactcgcgggcggagagaccgagtcgagcgggtttccgcaagcaaccgcgtgttccctcgccgcccttgcctttcctccgctgcggctgcggcgcgctactttactctccctcttctacctccttcccgttgcctcgcaag

SEQ ID NO: 20335 - DNA, 3487 bp, Zea Mays
atatatagtaaataacgtaaaaggcattctaccatattctatagagaaaacaattttaatctttactatatgcaaggaacagtttaattaaaaaacagaattattactaaaaaataggtacatatatagtaagaaaacaaaacacgaaccacatcagtttggattttctaacaggaaccacatgtgtctcgagatccttggaataatggatgaatgtatttaccgttccagaaaattttcactatcgtgctgttaggctatctccagcagattcactatcacatcctctatcacattccttatttcaaactcctctcagtgtcatatatagttccgtatctcctattctgcatagtttactagagacagtcttaaggtgccaataagtcactgatccaagaacaacaatttacactgtagttagtacgcaatccattgatggccctgaatgaagttctccgttgaaaagtgtttgacatactgttctggtgtctgactgctccactcaacccttgctgtgtggtttgcaccagggcctcgactgtcaaactctccataatacagtgtactgagagcaaaatcacctcgccatggaagccatccctccggcctgacaactgtccccaagtaacagctgacatacaatgtcctggcatactccttccatggccggcccaaatacagtctgtatgaatctggctttctccgaaacaattccacaaaccctttgttcccatccacagtgcaattcacaaatacaaaccctgtcgtctgccccggatcaatcctcccactagccgccaccacgtttcgtgcgcgcttctgagctccctcggcccgtggtacagtcttaatcacacattcctcaaacactgctgctgcattcccaaatataaaatccactgtccctacaatatggcacctgcggtagaactgccgcattgtgtgagcatacagcgtatcctgatgtccacggaactccacattctccagcactgaccgatcgctgtcagaacggaacgctacagcctgatgagctccagcaccagcgctgttctcaaatgttatatccctcgcacggaacccgtcaccgatcacatccaccgtcgcagtttcataagttcccagcccatcgatccccacgctccgggacgcagtgataacagtagctcccataccctcccccatcagcaaaatgttggccttctcatacggaatcacgacattttccttgtacgtacctgcaccaactgcgatggcgaagtgcccagcgccagcggtgtggttcggcgctgcgtccaccgcggcctgcacggtcgagtagccacacggcttcacaccggaattcggtttgcacaccgtggcgtcggggcggatcctcgcagggaatgcggcggcaggggcggaagagggaggaggtttcagggcggcatttagggtttgtggggcaagggaattgaggaagcgggacgtgagggggtgggagcggaaggccgggagcgagaggaggtgggagcagtcgtactggcactggagcgagccggaggcgaggtggagcgcggcggggacgtcgccggactccagggacgacaacgaggcgcggaggcggtgcagcgagagggcgaggtggtcggcgcagggccgcgcgtaggaattcggcgacgggtgcgcagcgatggccgcgtggaggagcgaggcgggcgcggtggtgtgctcccagggcggcgcggccgggaggaggacgagcagcgtaaggagcaggagcccggacgccgccgcggcgaactggaggaggcgaccgcggcgtgggagcgggtgggggtggccgcgcggcatttggcggacatgcgcgtcggagcggaggcggcgtggcgacactagttcgcgttgtgttcttcgatgtgtacagtactcgttcgtttcgtctccattggtaaccgggaaggaccgaaggagggtgaggacgtgtcagttatggcggactttcagaaagacgtttccgcatcctgttggcgtacgccgttaccagcttaaaaggataagctggcctcgtcaccacgctccatggtggctctgaagtcatctgttaaccgatggatttggtcgtcgaaagcgtcgttcatgggcgcttacccgtcaggccatcaagcggtggtgccatttgccaagaagaagaggaatgaatatatcgaagatccgccagatgaggaggtcgcagatgatttcaccgacgagatggaggaggacttcgacgacgccaaagaagacgaaggcgatgtaatggatgatgacgaagagtatgaggacgactatgactttgaagatgattttgagagtgatgatgaacaggatctttatgctggagatggaggtgctggtggcggtatatcccttgctggtgcatggtgggacaaggaagcgttagctttggcagaacaggtctcagcatcattcaacgacgacttgaaaatatatgctttcaagacagctgcaaatttgactattagagtacgcattgagaagatgtccaccaggtatggttctccaacgatagatgacattgaagcatacacaattgcatatcgtgcaaagttggacgaagcagagtcagcaggaaagataccgaaaaacatatcgttggaggtgtcatcccctggtgtggagagagttatccgtatccctgaagagctcgaacgattcaaagaaagggcaatgtatgtcagatacactacagcaagcgatgaggcaaccacacctcaggaaggtgacggcgtgctaacgctaatttcctatgacatggacctgcgagagtgcacctggggcatagctgatgtgaagataaaccggcagcagtctggcaagggcaggcccctgagcaagaagcagagggaatggaggctgcagacaccgttcgagtcgctgaagttggtcaggttgtactctgaatgttgagatgccagtttttgagtaaattttgagtttccatttgttgcactccttcggcagtttatccagtctcgctgaactctgatatgccactggatgcgcagctcatactaggtagaatgatgttgtactaatgtactatctgtcacaatcaattagttttttttcattgctaacagataacaacagaggtttagccacgcaaagcagaatgttctttgcttcacctttacagtttacaggcacttgatttattgtttgtattctcctagatgtttgtataatctgttagtgcattgtatatttttttagagttttattagggccaggccccagttgtatcattaagaagaccttgttgcttgctctatacgggcctgtttgttagggatccgctgttgctatgtgaacgagccttaccaaacggtttagcagagaaaattgtttagaacgactagctagttgcccgtgctttgctacgtttgttatataacatataaataagtattgagatatttatttaaatataattactgtttat

SEQ ID NO: 20336 - DNA, 2231 bp, Zea Mays
cacgtattaggctatctgtgtccctccccgcgttcggctatccacgtctaggctccaggatcccggcgtcctcccctcgtcgtcccgcgccgtcatcctcccctcgtcgtcccacgccgtcgtcctcccctcgtcccgcgccgtccctccccgagtcccgcgccgtcgtcctccctcgtctcgcccctgcgtccctccccgagtcccgcatcgtcgtcctccctcatctcgcacctgcgtccctcgccgagtcccgcgcccgcgcgtgtaccaccgcccctgcgtccctccccgagtcccacgcccgcgcgcgtaccgccggtgcgagatctaggcggcccgcgtcctcccctcgtcccgcgcccgcgaaccgccgttgcgagctccaggcgcccctgcgtccctgccatctcctgcgtccgacgcccatcgccgaggctgagaggcaagattcgtcgtcttcagtgcccccagcgcggcgcccagaactcccaggaacaaatgagctctgagtcatcttctgatacatctgggtcatcaacttcaaaaacctctgggtccacaagtagctcatcttccactagcttgcattcagaggacattgtcgaaaaaggttcttgtacttctgccaggcatagaacgaaacgaggtcacgccaaatgcaagaagctagaaaaaggaggtcctcgtcgtcttacgtttgataaaaatgggattgcccagtcaccggtaaaacatgtcaatgaattctcaagctattgtggttatatagcacgcatgcgtgttgatattaggataaaggattggcgaaaagtgtctacagtggtaaaatcaaacctatgggaggatgtgtcaaagaaatttgtcatgccaagggatgaaacccataccctcagtgtgaagaaggtcgctttgaaatctatgagccatgcatggaaggatttcaagtggaaactaaatataaattatgtcaagaaggacaaaactccatttgaggactatccagaactcaagaaagagtggtggccagactttgtggagtgggttacctcttatgagtatattgctctaggagaaaagggaaagaaaagccaaaacatgaataagttccatcaaaaactaggacggcgaagctatactgtacaaaagagaaaatgggcaaaggaagatgcacaagcattaactgagggtaaatctattccatttcaagacatgccagatggtcgtcataaggattgggcaagggcgaggaatccttctggcgatgtgaacataacagagttgcatccaatcataaagaaaattgtagatctaaatgaaaagtcagtagctggtacctttacaccattggataatatggacatacttgcaacagcaatagggaggatgggtcttgctcaaggtgatggccctcgtaaaaagaaacgtagaacaatgaaagaatatgtcaagaggattgtggatgagtacgaggccaagtttgagaaactgacagccctgtgtcagagtatggagcgtcgattaaacaattctgagagttgctcatcttcaaaatttgtttatacaccagaccatgcaacacatcattcagttgactcattacaagtaacttcatctacttgcagcacatatgacttatcagataacaaaatcaatgtgccactaatattctgcattttcccttaattcttcctatgtttaacattttaggaggtgatgaaatgcaagttggtggtgcagataggtccgcaatctgttgtggtcgctagagggtaggcttaccctccaaaggatgttgtaaccgtccatgggattgagcagcgagatgaccacacaaaagtgcaggttgattttgtgtttgacaacttcttggaatttccactccttatacctatcgctagtggtgatatgttcactcttggcgaagccaaaaattcatttgtgttatggcctatgtcagtcatacaactagcagaggtacactttgctaacttcaacctgatgaacttattattgttattcaaaacttggttaatgccatgtacttgtttctgaattttacataggaaacaacagttcatgcaaagcctcaacaagtcccacacacatcgcctcaggtactccatcacacacctgaaaaggataaaatgccaacaccaacaatgggtaccgaggatatagatgtcacacatagtgcctccaatgtcagcaagaagaggaaacataagcat

SEQ ID NO: 20337 - DNA, 2854 bp, Zea Mays
aaataacgagaaagggtcagagaagataagagaatattcttgcaagattctgattctctcattctctaaccctgtacatattggtcggctaaaataagcagacaaacggtctatatatttcggacaagacaacgccgttgacttcttcacaccaatcgtccaaatcacccctggatcgccggtgatggagatcctgagtccgtcgccgccacccagccactgcccactcctacgctgcggcggtcactgggagcagcaccacggcgagacgtgggtccacgtggctgtcgggaggtcgccggagaagacgctttcgctgctacgatgggccctgcgccgcttcggttgcagccggatcgtcctgctccacgtccaccacccgtcgccgctcatcccaaccctcttaggaaagatccccgcggtccaagccacagaggaggtggtgctctcccatcgcaagtccgagaaggaggagatgaacaagatcctcctcacctacctcgccttctgccacagagccaaggtccaggccaggcttcttgtcacggagaacggccaaatccacgacggcatcctcagtctggtcgaccatcacaggatcaccaagctcgtaatgggttctacacccgataattgcttcaagttaaaatatggcaaagaatctttaatggccagcagtgctcctgcgttttgtcaaatctggttcgtgtggagaggaaggcacatctggaccagagaagcgagtgcagccaccgacaatgctaccccagttcagtaccaatatgatgtgatgactacaaaaagaattaggttcagttcatatactgacaacactggagccatacttgatgaaggatatcctgcgcatgaggcattaacaacagttgatctaaatcaaggtgttgtttcagattgtggtcaatctaatgattatgaagcttttggggaacatgaggtcaaccatttacgcggtatgagcatttcagattggcaagatgatacagaaccagaactcaactcaacattttggtctcgttcttcaatacatgctgatacattacagttagatcctaaggaggtattggctaatgtcaaacaactaatgatggaagctgacagatcaaggaaagaagcgttttctgagttgatgaagcgtaaagaaacggagtcaaaagctgcgagtgcttttgccaagacaaaagattctgattctgccaaaaaacatgaaatagaaatgagggaggaacttgaagttgtattggtagacacaagaaagcagcatgaagaccttataaagaataaagagagagcagtatcagtactggactcttctacgaggagatcagctattctagatgcccatgctgaaaaaataaagcttcagatagatgagttctcggcagagcttgaagtgatccaatcttccatagaaactcttcgccagaagaaactaaaaatgcaaaggctagaaagcaaacatattgacctggataaggggtgcacatacagccatgccacactgtcaaattgcgcctcaaatgcttttggagatgatttatacggcttcagagaatttacagtgttggatatgcaatctgctacgtgtaaattctcagagagcttcaggatgtggtcgcaaggtcgtgggtgtgtttacaaaggagaaattatgaacagaactgtgatgatctataagctgcactgccatagcattgagagcgtgaggcagttccagcaagaggtttatatcctcagcaatgtgaggcaccctcatctagtgacactggttggggcgtgcccggaagcgctgtgcctcgtttatgaatacctgccaaacgggagccttcacgaccgcctcttcagcagacgcagcagccgtcacttgccgtggagaattcgtgcacgcatcgtcgccgagatctcagacgcgctgctgttcttgcattcctgtaagcctcagacgatcgtacacggcaacttgaaactcgagaacatccttctagataccgaatgccattgcaagatagccgatttcggtatctctcggctattcacaggcgacgtgaaggattacccgtcggggggttctgagcctccggaagggtcttttccctacgcagatccggagtacatgagaagcaaagtgttgacacccaagtctgacgtatactgcttcggaaccgtgatactccagctactgaccggaagacaggagcctgcacggcggcttgctggtgaagtaaggtgtgccatggcttgtggcaagctatcgtcaattctcgaccctgctgctgggcattggcctatggaggtggccggaaggctagcggaactgggcctgaggtgcagtgaggacagaagccgggatcgcccagacctgactgctgagaccgtacgagagctggaacagctacacttgacgagggaggaggaacaagcaccctcctctttcctgtgcccgattatgcaggtgtgcgctgctgatggggtgacctacgaagggcgggcgatccgtgagcggatggagttggagactgggcaggggacagcgcctctgaacaacctgaaactggagcatctcagtctcacacctaaccacgcccttcggttcgctatccaggattggcttcgtcgctctcgccgatgaaactttttgcctggcgtttcttttgggttttcgacctgtacagatttcacgtgtaaaggggtatagcatatctgcatatgaataatttgaatagctgttctaaggttttgtctgtacttcatgaaatgtatcaggatgcatgtacgcggcaatgcagcttcaggatcgatcgcataaatcttaaaataatactgtctatgccatgtc

SEQ ID NO: 20338 - DNA, 2838 bp, Zea Mays
tatatttcggacaagacaacgccgttgacttcttcacaccaatcgtccaaatcacccctggatcgccggtgatggagatcctgagtccgtcgccgccacccagccactgcccactcctacgctgcggcggtcactgggagcagcaccacggcgagacgtgggtccacgtggctgtcgggaggtcgccggagaagacgctttcgctgctacgatgggccctgcgccgcttcggttgcagccggatcgtcctgctccacgtccaccacccgtcgccgctcatcccaaccctcttaggaaagatccccgcggtccaagccacagaggaggtggtgctctcccatcgcaagtccgagaaggaggagatgaacaagatcctcctcacctacctcgccttctgccacagagccaaggtccaggccaggcttcttgtcacggagaacggccaaatccacgacggcatcctcagtctggtcgaccatcacaggatcaccaagctcgtaatgggttctacacccgataattgcttcaagttaaaatatggcaaagaatctttaatggccagcagtgctcctgcgttttgtcaaatctggttcgtgtggagaggaaggcacatctggaccagagaagcgagtgcagccaccgacaatgctaccccagttcagtaccaatatgatgtgatgactacaaaaagaattaggttcagttcatatactgacaacactggagccatacttgatgaaggatatcctgcgcatgaggcattaacaacagttgatctaaatcaaggtgttgtttcagattgtggtcaatctaatgattatgaagcttttggggaacatgaggtcaaccatttacgcggtatgagcatttcagattggcaagatgatacagaaccagaactcaactcaacattttggtctcgttcttcaatacatgctgatacattacagttagatcctaagtatttcaggaggtattggctaatgtcaaacaactaatgatggaagctgacagatcaaggaaagaagcgttttctgagttgatgaagcgtaaagaaacggagtcaaaagctgcgagtgcttttgccaagacaaaagattctgattctgccaaaaaacatgaaatagaaatgagggaggaacttgaagttgtattggtagacacaagaaagcagcatgaagaccttataaagaataaagagagagcagtatcagtactggactcttctacgaggagatcagctattctagatgcccatgctgaaaaaataaagcttcagatagatgagttctcggcagagcttgaagtgatccaatcttccatagaaactcttcgccagaagaaactaaaaatgcaaaggctagaaagcaaacatattgacctggataaggggtgcacatacagccatgccacactgtcaaattgcgcctcaaatgcttttggagatgatttatacggcttcagagaatttacagtgttggatatgcaatctgctacgtgtaaattctcagagagcttcaggatgtggtcgcaaggtcgtgggtgtgtttacaaaggagaaattatgaacagaactgtgatgatctataagctgcactgccatagcattgagagcgtgaggcagttccagcaagaggtttatatcctcagcaatgtgaggcaccctcatctagtgacactggttggggcgtgcccggaagcgctgtgcctcgtttatgaatacctgccaaacgggagccttcacgaccgcctcttcagcagacgcagcagccgtcacttgccgtggagaattcgtgcacgcatcgtcgccgagatctcagacgcgctgctgttcttgcattcctgtaagcctcagacgatcgtacacggcaacttgaaactcgagaacatccttctagataccgaatgccattgcaagatagccgatttcggtatctctcggctattcacaggcgacgtgaaggattacccgtcggggggttctgagcctccggaagggtcttttccctacgcagatccggagtacatgagaagcaaagtgttgacacccaagtctgacgtatactgcttcggaaccgtgatactccagctactgaccggaagacaggagcctgcacggcggcttgctggtgaagtaaggtgtgccatggcttgtggcaagctatcgtcaattctcgaccctgctgctgggcattggcctatggaggtggccggaaggctagcggaactgggcctgaggtgcagtgaggacagaagccgggatcgcccagacctgactgctgagaccgtacgagagctggaacagctacacttgacgagggaggaggaacaagcaccctcctctttcctgtgcccgattatgcaggcaagtaccatcgtcttgcaccattgttaactagggaaacgggtatgggggttggatcgatgtgaattgtgatgatgacaagaaactcggtgtgcgctgctgatggggtgacctacgaagggcgggcgatccgtgagcggatggagttggagactgggcaggggacagcgcctctgaacaacctgaaactggagcatctcagtctcacacctaaccacgcccttcggttcgctatccaggattggcttcgtcgctctcgccgatgaaactttttgcctggcgtttcttttgggttttcgacctgtacagatttcacgtgtaaaggggtatagcatatctgcatatgaataatttgaatagctgttctaaggttttgtctgtacttcatgaaatgtatcaggatgcatgtacgcggcaatgcagcttcaggatcgatcgcataaatcttaaaataatactgtctatgccatgtc

SEQ ID NO: 20339 - DNA, 2718 bp, Zea Mays
tatatttcggacaagacaacgccgttgacttcttcacaccaatcgtccaaatcacccctggatcgccggtgatggagatcctgagtccgtcgccgccacccagccactgcccactcctacgctgcggcggtcactgggagcagcaccacggcgagacgtgggtccacgtggctgtcgggaggtcgccggagaagacgctttcgctgctacgatgggccctgcgccgcttcggttgcagccggatcgtcctgctccacgtccaccacccgtcgccgctcatcccaaccctcttaggaaagatccccgcggtccaagccacagaggaggtggtgctctcccatcgcaagtccgagaaggaggagatgaacaagatcctcctcacctacctcgccttctgccacagagccaaggtccaggccaggcttcttgtcacggagaacggccaaatccacgacggcatcctcagtctggtcgaccatcacaggatcaccaagctcgtaatgggttctacacccgataattgcttcaagttaaaatatggcaaagaatctttaatggccagcagtgctcctgcgttttgtcaaatctggttcgtgtggagaggaaggcacatctggaccagagaagcgagtgcagccaccgacaatgctaccccagttcagtaccaatatgatgtgatgactacaaaaagaattaggttcagttcatatactgacaacactggagccatacttgatgaaggatatcctgcgcatgaggcattaacaacagttgatctaaatcaaggtgttgtttcagattgtggtcaatctaatgattatgaagcttttggggaacatgaggtcaaccatttacgcggtatgagcatttcagattggcaagatgatacagaaccagaactcaactcaacattttggtctcgttcttcaatacatgctgatacattacagttagatcctaagatcaaggaaagaagcgttttctgagttgatgaagcgtaaagaaacggagtcaaaagctgcgagtgcttttgccaagacaaaagattctgattctgccaaaaaacatgaaatagaaatgagggaggaacttgaagttgtattggtagacacaagaaagcagcatgaagaccttataaagaataaagagagagcagtatcagtactggactcttctacgaggagatcagctattctagatgcccatgctgaaaaaataaagcttcagatagatgagttctcggcagagcttgaagtgatccaatcttccatagaaactcttcgccagaagaaactaaaaatgcaaaggctagaaagcaaacatattgacctggataaggggtgcacatacagccatgccacactgtcaaattgcgcctcaaatgcttttggagatgatttatacggcttcagagaatttacagtgttggatatgcaatctgctacgtgtaaattctcagagagcttcaggatgtggtcgcaaggtcgtgggtgtgtttacaaaggagaaattatgaacagaactgtgatgatctataagctgcactgccatagcattgagagcgtgaggcagttccagcaagaggtttatatcctcagcaatgtgaggcaccctcatctagtgacactggttggggcgtgcccggaagcgctgtgcctcgtttatgaatacctgccaaacgggagccttcacgaccgcctcttcagcagacgcagcagccgtcacttgccgtggagaattcgtgcacgcatcgtcgccgagatctcagacgcgctgctgttcttgcattcctgtaagcctcagacgatcgtacacggcaacttgaaactcgagaacatccttctagataccgaatgccattgcaagatagccgatttcggtatctctcggctattcacaggcgacgtgaaggattacccgtcggggggttctgagcctccggaagggtcttttccctacgcagatccggagtacatgagaagcaaagtgttgacacccaagtctgacgtatactgcttcggaaccgtgatactccagctactgaccggaagacaggagcctgcacggcggcttgctggtgaagtaaggtgtgccatggcttgtggcaagctatcgtcaattctcgaccctgctgctgggcattggcctatggaggtggccggaaggctagcggaactgggcctgaggtgcagtgaggacagaagccgggatcgcccagacctgactgctgagaccgtacgagagctggaacagctacacttgacgagggaggaggaacaagcaccctcctctttcctgtgcccgattatgcaggagataatgcatgatcctcaggtgtgcgctgctgatggggtgacctacgaagggcgggcgatccgtgagcggatggagttggagactgggcaggggacagcgcctctgaacaacctgaaactggagcatctcagtctcacacctaaccacgcccttcggttcgctatccaggattggcttcgtcgctctcgccgatgaaactttttgcctggcgtttcttttgggttttcgacctgtacagatttcacgtgtaaaggggtatagcatatctgcatatgaataatttgaatagctgttctaaggttttgtctgtacttcatgaaatgtatcaggatgcatgtacgcggcaatgcagcttcaggatcgatcgcataaatcttaaaataatactgtctatgccatgtc

SEQ ID NO: 20340 - DNA, 2567 bp, Zea Mays
tatatttcggacaagacaacgccgttgacttcttcacaccaatcgtccaaatcacccctggatcgccggtgatggagatcctgagtccgtcgccgccacccagccactgcccactcctacgctgcggcggtcactgggagcagcaccacggcgagacgtgggtccacgtggctgtcgggaggtcgccggagaagacgctttcgctgctacgatgggccctgcgccgcttcggttgcagccggatcgtcctgctccacgtccaccacccgtcgccgctcatcccaaccctcttaggaaagatccccgcggtccaagccacagaggaggtggtgctctcccatcgcaagtccgagaaggaggagatgaacaagatcctcctcacctacctcgccttctgccacagagccaaggtccaggccaggcttcttgtcacggagaacggccaaatccacgacggcatcctcagtctggtcgaccatcacaggatcaccaagctcgtaatgggttctacacccgataattgcttcaagttaaaatatggcaaagaatctttaatggccagcagtgctcctgcgttttgtcaaatctggttcgtgtggagaggaaggcacatctggaccagagaagcgagtgcagccaccgacaatgctaccccagttcagtaccaatatgatgtgatgactacaaaaagaattaggttcagttcatatactgacaacactggagccatacttgatgaaggatatcctgcgcatgaggcattaacaacagttgatctaaatcaagattggcaagatgatacagaaccagaactcaactcaacattttggtctcgttcttcaatacatgctgatacattacagttagatcctaaggaggtattggctaatgtcaaacaactaatgatggaagctgacagatcaaggaaagaagcgttttctgagttgatgaagcgtaaagaaacggagtcaaaagctgcgagtgcttttgccaagacaaaagattctgattctgccaaaaaacatgaaatagaaatgagggaggaacttgaagttgtattggtagacacaagaaagcagcatgaagaccttataaagaataaagagagagcagtatcagtactggactcttctacgaggagatcagctattctagatgcccatgctgaaaaaataaagcttcagatagatgagttctcggcagagcttgaagtgatccaatcttccatagaaactcttcgccagaagaaactaaaaatgcaaaggctagaaagcaaacatattgacctggataaggggtgcacatacagccatgccacactgtcaaattgcgcctcaaatgcttttggagatgatttatacggcttcagagaatttacagtgttggatatgcaatctgctacgtgtaaattctcagagagcttcaggatgtggtcgcaaggtcgtgggtgtgtttacaaaggagaaattatgaacagaactgtgatgatctataagctgcactgccatagcattgagagcgtgaggcagttccagcaagaggtttatatcctcagcaatgtgaggcaccctcatctagtgacactggttggggcgtgcccggaagcgctgtgcctcgtttatgaatacctgccaaacgggagccttcacgaccgcctcttcagcagacgcagcagccgtcacttgccgtggagaattcgtgcacgcatcgtcgccgagatctcagacgcgctgctgttcttgcattcctgcgacgtgaaggattacccgtcggggggttctgagcctccggaagggtcttttccctacgcagatccggagtacatgagaagcaaagtgttgacacccaagtctgacgtatactgcttcggaaccgtgatactccagctactgaccggaagacaggagcctgcacggcggcttgctggtgaagtaaggtgtgccatggcttgtggcaagctatcgtcaattctcgaccctgctgctgggcattggcctatggaggtggccggaaggctagcggaactgggcctgaggtgcagtgaggacagaagccgggatcgcccagacctgactgctgagaccgtacgagagctggaacagctacacttgacgagggaggaggaacaagcaccctcctctttcctgtgcccgattatgcaggagataatgcatgatcctcaggtgtgcgctgctgatggggtgacctacgaagggcgggcgatccgtgagcggatggagttggagactgggcaggggacagcgcctctgaacaacctgaaactggagcatctcagtctcacacctaaccacgcccttcggttcgctatccaggattggcttcgtcgctctcgccgatgaaactttttgcctggcgtttcttttgggttttcgacctgtacagatttcacgtgtaaaggggtatagcatatctgcatatgaataatttgaatagctgttctaaggttttgtctgtacttcatgaaatgtatcaggatgcatgtacgcggcaatgcagcttcaggatcgatcgcataaatcttaaaataatactgtctatgccatgtc

SEQ ID NO: 20341 - DNA, 2683 bp, Zea Mays
tatatttcggacaagacaacgccgttgacttcttcacaccaatcgtccaaatcacccctggatcgccggtgatggagatcctgagtccgtcgccgccacccagccactgcccactcctacgctgcggcggtcactgggagcagcaccacggcgagacgtgggtccacgtggctgtcgggaggtcgccggagaagacgctttcgctgctacgatgggccctgcgccgcttcggttgcagccggatcgtcctgctccacgtccaccacccgtcgccgctcatcccaaccctcttaggaaagatccccgcggtccaagccacagaggaggtggtgctctcccatcgcaagtccgagaaggaggagatgaacaagatcctcctcacctacctcgccttctgccacagagccaaggtccaggccaggcttcttgtcacggagaacggccaaatccacgacggcatcctcagtctggtcgaccatcacaggatcaccaagctcgtaatgggttctacacccgataattgcttcaagttaaaatatggcaaagaatctttaatggccagcagtgctcctgcgttttgtcaaatctggttcgtgtggagaggaaggcacatctggaccagagaagcgagtgcagccaccgacaatgctaccccagttcagtaccaatatgatgtgatgactacaaaaagaattaggttcagttcatatactgacaacactggagccatacttgatgaaggatatcctgcgcatgaggcattaacaacagttgatctaaatcaagattggcaagatgatacagaaccagaactcaactcaacattttggtctcgttcttcaatacatgctgatacattacagttagatcctaagtatttcaggaggtattggctaatgtcaaacaactaatgatggaagctgacagatcaaggaaagaagcgttttctgagttgatgaagcgtaaagaaacggagtcaaaagctgcgagtgcttttgccaagacaaaagattctgattctgccaaaaaacatgaaatagaaatgagggaggaacttgaagttgtattggtagacacaagaaagcagcatgaagaccttataaagaataaagagagagcagtatcagtactggactcttctacgaggagatcagctattctagatgcccatgctgaaaaaataaagcttcagatagatgagttctcggcagagcttgaagtgatccaatcttccatagaaactcttcgccagaagaaactaaaaatgcaaaggctagaaagcaaacatattgacctggataaggggtgcacatacagccatgccacactgtcaaattgcgcctcaaatgcttttggagatgatttatacggcttcagagaatttacagtgttggatatgcaatctgctacgtgtaaattctcagagagcttcaggatgtggtcgcaaggtcgtgggtgtgtttacaaaggagaaattatgaacagaactgtgatgatctataagctgcactgccatagcattgagagcgtgaggcagttccagcaagaggtttatatcctcagcaatgtgaggcaccctcatctagtgacactggttggggcgtgcccggaagcgctgtgcctcgtttatgaatacctgccaaacgggagccttcacgaccgcctcttcagcagacgcagcagccgtcacttgccgtggagaattcgtgcacgcatcgtcgccgagatctcagacgcgctgctgttcttgcattcctgtaagcctcagacgatcgtacacggcaacttgaaactcgagaacatccttctagataccgaatgccattgcaagatagccgatttcggtatctctcggctattcacaggcgacgtgaaggattacccgtcggggggttctgagcctccggaagggtcttttccctacgcagatccggagtacatgagaagcaaagtgttgacacccaagtctgacgtatactgcttcggaaccgtgatactccagctactgaccggaagacaggagcctgcacggcggcttgctggtgaagtaaggtgtgccatggcttgtggcaagctatcgtcaattctcgaccctgctgctgggcattggcctatggaggtggccggaaggctagcggaactgggcctgaggtgcagtgaggacagaagccgggatcgcccagacctgactgctgagaccgtacgagagctggaacagctacacttgacgagggaggaggaacaagcaccctcctctttcctgtgcccgattatgcaggagataatgcatgatcctcaggtgtgcgctgctgatggggtgacctacgaagggcgggcgatccgtgagcggatggagttggagactgggcaggggacagcgcctctgaacaacctgaaactggagcatctcagtctcacacctaaccacgcccttcggttcgctatccaggattggcttcgtcgctctcgccgatgaaactttttgcctggcgtttcttttgggttttcgacctgtacagatttcacgtgtaaaggggtatagcatatctgcatatgaataatttgaatagctgttctaaggttttgtctgtacttcatgaaatgtatcaggatgcatgtacgcggcaatgcagcttcaggatcgatcgcataaatcttaaaataatactgtctatgccatgtc

SEQ ID NO: 20342 - DNA, 4410 bp, Zea Mays
ccaatttcttcgaccgaacgaaaacacagccgtcgtcgccgtcccgcccgcccacggccgccgccgccgccagctgccgtttcccaaaagcgagcgaacggcaaaccaaataaaaactcctcgaactaccggcttctactaaaaccctcgacgtcggcagcgcggcgtcggcgagatgaagaacctgcgccttgtgacgaggctcccgcagcagctccagctccagatagacggcgaaaccctcgtcgcctccgccatcgacgcagagagccgccgcgctttcttcgcttcctccgccaacttcatctacaccgtctcactgccctcgtcctccacccaggaacagcaactactgcaatggagcaaaactgctactcaacactctgacatggaggaggttgttcttgatcctggagatcgcattgttgccatggattatcttatggagagggagtctctactccttgggtcgtcagatggttgtcttctcttatataacgtggaggagaaaacaactgaagttgtcggaagactggaaggtggtgtcaacaccattgcctctagccccgatggggcccttctctctgtcaccactggactcggccaactgcttgtcatcacacaggactgggaagtgctgtttgagacttcacttgaccctcaagacgagaccattgacaacacagacagtaccggtggtcagagtcgaagtgcaatttcttggcgaggggatgggaagtatttcgctacacttgtagcccctgagagcttttctagccctacaaaacttaatgtctgggaacgtgaatcgggaaaactgcattcttcttcagatgccaaaacttttatgggagcatcgctagattggatgcctagtggagcgaaggttgctacagcccttgataggaggacagagggaaagtgtcctcttattattttctatgagaagaatggcttagagaggagtcacttttctattgatgagccaggagaggttgccattcaagctttaaagtggaactgcaattctgagatccttgctgctctggtttcttctggtcagcatgatgttatcaagatatggacctgcaggaacaatcactggtacttgaaacatgaactgcggtacacaaaggaagagggggtgaagttcttttgggatccaacgaaaccaatgcatctgatttgctggacactgagtggccaggtcattattcacaagtttgcttggactacggcagtcagtgagagttcaattgcacttgtgattgatggttctcatgttcttgttactcctcttattttgggcctcatgccacctcccatgtctctgttccaccttgcatttccttgtgcagtgaatgaggtttcttttgtgaccaataactcgaagagccatttggctgcttatctctcaaatggcagcctgtctgttgtggaacttccagcacctgatacctgggaagaatttgaaggcaatgggataagtgttgatccttgctgttctgacttcactttgaataactgtatgcacctcacttggatagatacacgcaccttgatcggtatctgttgctatagtgaacacctctcttcaacaaaaatcaggtccagtgaagccagtaaccttgtagataaacatgattcgctgtttttcatccatgagattgaacttaaatgttcagagagttctgtgccaggttcagtgtgttcatctggttggcatgctagagtatcaaagaaagtgcagttggagagttcagtcattggagtctctccaaacccagcaaaaagaggttcagccttcattcaagttagtggtggaaagattattgagtactgctcaagtttaaatctgttgaatatgtgtccaccagcacaattcagtggcattggttctgacctttgttttccagcatcatgtccttggatgactgcagttctgtgctatgaaaatggtatgacagaaccgcttctctttggacttgatgaaagcggcaagctttatatgggcaaaaggttattgagcaacaactgcagcagcttcacattatactccagtgtttatggagccactgagccagttatgagccacttgcttgtgactactaagcaagatcttctattcattgtggatgtcaatgaggtcttacttaaagacatcgaggtcacaattgatggccttgtcagtagtcctgctcgcggtaagcaaaacaaagagtacatcactgtgtgggaaaagggagcgaagttggttggtgttctccatggtgatgaagcagctgtcataatgcaaacaacacgtggtaacttagagtgtacctaccccaggaagctagtccttgtttcaattgttcaggcactggttcagaagcgtttcaaagatgcaataggcatggtgaggaggcatcggatagattttaatatcattgttgactattgtggtttgaatgcttttatggattcagctgcagacttcgttaaacaagttaataaccttacccatgtcactgaatttgtttgctcaatgaagaatagcaatgtcagcagcaaattgtatgaagcctatatatcatttcctgatcagtgtgcaatcccaatggcggataatgaaagttcacctggtttatttttgggtaacaaagtcacttctgtacttatggccattcgaaaagcccttgaggaacaaatagaagagagctcatcaagagaactttgtatattgaccactttggcccgtagtgaacctccattgttggagcaggcactgaatagaataaagctccttcgagaatcagaacttcttgggcttgacgatgccaagcgaaagctctacccttctgctgaagagtcactgaagcatttgctttggttaacggacactgaagctgtttttagtgctgccttgggattgtatgatctgaatcttgctgctattgttgctttgaattcccaaaaagatccaaaagagttccttcctttccttaagagtcttgaatgccttcctcctgctatcatgaggtatacgattgatttaagacttggaagatacgagagtgctctcagaaacattgtttctgctggcgacgcgtaccatgaggattgcatgaaactcctcaatgataatcctcagctgttcccactgggcctccagttatttaatgaaccagataaaaggaatcaaattcttgaggcatggggtgaccatctctctggagagaaatgctttgaagacgccgctttgacttatcagtgctgttcatcatatcagaagtcactgagagcttaccgtgcctgtggagactggagaggtgtttttaccgttgcaggtcttctggagttaaaaagggaagaaatcgttcaactcgcacacgagttatgtgatgagttccaggcacttggcaagccaggagatgctgctagagtagcactggagtactgttcagatgctgaaagaggtgtaagctactatatcatggcaagggaatgggaagaggctcttagagtcgcttacatgcttagcacgcatgatctggttgaagctgtcagagacgcagcttcagaatgcgccgcatcactgatagccgagtaccaggaaggactgttgaagatcggtaaatatgcagcacgctatttggccgtacggcagaggagattgtcgctcgctgccaaactccggtcggaagatcggtttatggatgttgaagatgacagcgtttcagaaacgagcactagcttcagtgaaatgagcgcatataccacaagggagtcgagcgcttcggtcatgtccagcaacgccagcaaatcacgggcggcaaggcggcaaaagaagggcggcaaaatacgagctggaagccccggggaggaaatggccctcgtggagcatctcagggggatggcgttgacaggcggtgcccaaaacgagctgaagagcctgctcgtggctctaatacagctggggaaagcggagacggcccgtcgggtgcaggaggctgcagacagcttcgaagtgtcccagagggccgcagtgaagctggccgaggacacggtgtccagcgaccgcgtagaggagagagcgcacaccctcgagcgttacgtgaggatgctgagggatcgggagtctggccatggcgaggctggtggtacgtggcggatcaatgcgttgtctccccccgtgacagggtgagagggttttttttttactggttagcagtttagcattgtttaaatcgggacgaagagtgctgtgttctttcttgtgggtggcatcgtggcgtgcgtcaggctttgaccttgtcgattaactgctgtagcatcagttggaattcttggtgcctggtggggctgttgtattggatctatgtttgccaataccagatttgtccggttttttttctgacaggaacaaac

SEQ ID NO: 20343 - DNA, 819 bp, Zea Mays
atcattttcaggtttaccttccatcccatgctatcccatcccatgcctccatgttcagtttgaaagagggagacctcagaaacatgttcgtacatatggcagtaaaacatttaccaccatacattatgagtcgatatctgtgtgacggcgatgcctacactgccctttttgcctttccaaatcttttggcaaatacacaaccgccttgctaagtaagcggcaggccaatggctaagcgacacacaacgacgtttgcacggacaagggcatttaccactgacagcgaggatgtcgtcgttggcgctaaactattggtgcagctctgtgtcgtcatagagaccactgaaaagatgaggagctgagaagatcgatgacagacgatcattcagtcgcttgattcatggcgcccaattagcccatgcacaatgatgatgccctgccccccccctctctctctctgggatgaatatgcatccgtgtcgcttttcggctggacatgcatgcaggattaggctatgtaggtctacatgctgtcatgctgatactggctggggcagcacagcactgctgctgccggtggctgcagagctacacgtgtggcgacctaacacttccaggggcccagcaggtgacatatgacatattgatgacgcagctcttcttctgtttgtgagaccaggtggcttgagacttgtatccgcatatgtctccaaccatatcctctatatccctttctttacaaacccctctaaaagattgcatcatatagcgttcactagtagaaaagagctcaaagcctgcggcacccataaattatca

SEQ ID NO: 20344 - DNA, 1368 bp, Zea Mays
cctgatttgacatttttttttcttttatgtttgttttggcatgccttagtagatgcatagtttacggtgttggctttgtttcctggaatgttttaagttcaaaattttggcatgtttggtcacagataaattaaaggtagcttagttagattgccaacagttcaagtttcagattccactagcacaatcatacaattgcttaactattgactgttctgaatatgaacacatatcatgcctacagggctacatctatcagctagcatatatggagtaagaaactaactagcacttcctcgaacttaacagcatgagacacagaaatgctgtttgacagaacataaaaagggcatgcattttcagccaacttatctttgacgaagtactgcaaaaggaagtacagagacaaggatgatgaaacatatataagaatataagatatgaacattgtacatctgactccatagcaggaacaaactcagcaacttccctacaagatttgaaccaaatgagctacactgaaatcacacaagcatggggcatagcaattcagaagggcaggcggtcaataagtttgcaagaagaaaatatgggagctagaacatttatgactaattgcatcctgtttgcactgcctaaacatatgcaattacgtctgtggcaaatgatttctcatcgcgtgagttcgtggtgatatggctatactctgggtctaagcaggtgtgcgcaatctcatagggctccagcaaagtgagtggcggattcagaaacaatgcaagaggagggctaaatagcagaaggctaaaatttctatggtaaatcagtgtcggatactcggatgagactgaacgtctagatggcatgcatttggcactagattttttttcctgctattaccaatgactgcacaaagaaaatgtagatgtatacacaacaagaacattccatctgacttggtagaccatcaatggcacacataataataatttgcaataccgtccgtccaaaaaaataatttgcaatactgcaaaatttgaatataacaatctataaagattgtacgtgccagtgccggtcctgacattttagaggcccaggacaagacttataatagaggccctttaataatattaattattacacataattatagtgcatatatatattgttaataaatatttatgtatatttgaaaacgttgtttatatctctactacttattaaggctctaagggtagcctgccgttctgccgttctgcgatctcagccgtccattctatcgtgtaatctcactcgtctgatctcgccatccgatcccacgcaccgcagcccatgacatacggcaaatggaaaaccctaatctttagc

SEQ ID NO: 20345 - DNA, 1636 bp, Zea Mays
aaaatcatgattcctttcgccacgagcagaatttggttcagtggaccgagaaaaaacggccatgtgttgaagcccttttcatcgttgttgttcaatgtatctctatctattgaaatttcaaatcatcaccccaatatgccttagttgatgttctgtatgcaagcaacaatggatttatgagataccaaatatcatttatctccatgatgtaacgaatatttggcacatccctttgttgcttagagatcagaaggccaatgaagctattttggaagtgttagaccttcgatggtatgccattggaccaaagtattaattatatatgcaacgtttgtgtcatctgttccactaataccagcagtgtgctattgttgtttgttctggcctgctacttgcaactgttagccgattaacataagaatttaacaactttttaaacctaaggtgtctatgttggtgatccttctaagctcagtatgaaggctgcatttaggaaggtttggtggttgaaagaagctggtggtagtattattggtggaaccatcaagagaaattcaggagatgagcaagaatccaaaaccacccaaggatgcgtaagagacagatgcattttctttttgttccactaattggctgttcccggatatatatgcaacgctcgtgtcatctgttccaatacttgaagaagcagcacgctacgagttgagatatgggcacagaaatagagctacaagaagtctattttcttcttatccttttgattaatcatgtgtttatatgattcaatcatggaaacaactgtcagttttgatagtgtgcaggatgtggatattttggcatattacacgttgagtggtgaattcaagtatcagtttgggtctagaaggtgaagctgatcagttgctgctggatgagacctatcacttcatgctccccttgacaaattcatggaaaataaaccaaaagggagccacatagctaaaggaagatggcacgatggatcacaaatgccccagctaaaaagcttaacctgaatcatcatattattggaggagagcttctagaattgtcaaaaaatgaagtgcctcctgaagatattgttttccaccgtttatatttgaacaagactggcccagttaatcagtatttttgtaggttgcagattcctaaggaatcaaatgtcatgaatcagatacttaaatccaactacattgtcagaatgaggtcctataatgaagctgaatgtggtagagccacaacaggcaatggttatgggttcacctttagaggatgcaagacatttggcccagagtcaaaggttgttgagatcttggtcaaggaccttaaggtctttgcatccttcaatgagttgttgtttaaggagatcacacagtttctgaccttggacaactttagggaaaataagcagctttctaagtatggtgatacaaaatatgcacgagtaataatgcttgttgaggtgcagaagctgattgaagcttacctctgtactgtgacaagctacaatttcccagactgaagaattctaggtcctagacacttattaaccagaggtagtcctgtgtaaaataatcaattatctatgtgctcttgagtctcagacattttagcgttt

SEQ ID NO: 20346 - DNA, 1987 bp, Zea Mays
atttggttcagtggaccgagaaaaaacggccatgtgttgaagcccttttcatcgttgttgttcaatgtatctctatctattgaaatttcaaatcatcaccccaatatgccttagttgatgttctgtatgcaagcaacaatggatttatgaggtatgttttctctaatctctactactatgaagaatgtaagggggtagggtgcctctctctggttctgccgttctgccacccatcgatctagacggtccatatcgcacccacgcttccgcccacctccccccgcacccaatccctaacctcccttgcctcccccgacttcgctcccgaatggctcgccccgcatccaccgcgcgcaaaccgtcctcgctctcgttcagtccgtctccccctctctccatccaaagcatgtgcgacgccgccgccactctccttcatggccttcgtgtgtccctccttccctgcccgctgcccctgcctacggccgcgtcctgcccggcgcttgtccacgccagacgcccacaccagagaccaccgccggtcagccacacgctcgagaataggcggcggcgcaggtcctcctccatctctatcatggatcagaaggccaatgaagctattttggaagtgttagaccttcgatggtatgccattggaccaaagtattaattatatatgcaacgtttgtgtcatctgttccactaataccagcagtgtgctattgttgtttgttctggcctgctacttgcaactgttagccgattaacataagaatttaacaactttttaaacctaaggtgtctatgttggtgatccttctaagctcagtatgaaggctgcatttaggaaggtttggtggttgaaagaagctggtggtagtattattggtggaaccatcaagagaaattcaggagatgagcaagaatccaaaaccacccaaggatgcgtaagagacagatgcattttctttttgttccactaattggctgttcccggatatatatgcaacgctcgtgtcatctgttccaatacttgaagaagcagcacgctacgagttgagatatgggcacagaaatagagctacaagaagtctattttcttcttatccttttgattaatcatgtgtttatatgattcaatcatggaaacaactgtcagttttgatagtgtgcaggatgtggatattttggcatattacacgttgagtggtgaattcaagtatcagtttgggtctagaaggtgaagctgatcagttgctgctggatgagacctatcacttcatgctccccttgacaaattcatggaaaataaaccaaaagggagccacatagctaaaggaagatggcacgatggatcacaaatgccccagctaaaaagcttaacctgaatcatcatattattggaggagagcttctagaattgtcaaaaaatgaagtgcctcctgaagatattgttttccaccgtttatatttgaacaagactggcccagttaatcagtatttttgtaggttgcagattcctaaggaatcaaatgtcatgaatcagatacttaaatccaactacattgtcagaatgaggtcctataatgaagctgaatgtggtagagccacaacaggcaatggttatgggttcacctttagaggatgcaagacatttggcccagagtcaaaggttgttgagatcttggtcaaggaccttaaggtctttgcatccttcaatgagttgttgtttaaggagatcacacagtttctgaccttggacaactttagggaaaataagcagctttctaagtatggtgatacaaaatatgcacgagtaataatgcttgttgaggtgcagaagctgattgaagcttacctctgtactgtgacaagctacaatttcccagactgaagaattctaggtcctagacacttattaaccagaggtagtcctgtgtaaaataatcaattatctatgtgctcttgagtctcagacattttagcgttt

SEQ ID NO: 20347 - DNA, 1811 bp, Zea Mays
atatgccttagttgatgttctgtatgcaagcaacaatggatttatgagataccaaatatcatttatctccatgatgtaacgaatatttggcacatccctttgttgcttagagatcagaaggccaatgaagctattttggaagtgttagaccttcgatggtatgccattggaccaaagtattaattatatatgcaacgtttgtgtcatctgttccactaataccagcagtgtgctattgttgtttgttctggcctgctacttgcaactgttagccgattaacataagaatttaacaactttttaaacctaaggtgtctatgttggtgatccttctaagctcagtatgaaggctgcatttaggaaggtttggtggttgaaagaagctggtggtagtattattggtggaaccatcaagagaaattcaggagatgagcaagaatccaaaaccacccaaggatgcgtaagagacagatgcattttctttttgttccactaattggctgttcccggatatatatgcaacgctcgtgtcatctgttccaatacttgaagaagcagcacgctacgagttgagatatgggcacagaaatagagctacaagaagtctattttcttcttatccttttgattaatcatgtgtttatatgattcaatcatggaaacaactgtcagttttgatagtgtgcaggatgtggatattttggcatattacacgttgagtggtgaattcaagtatcagtttgggtctagaaggtgaagctgatcagttgctgctggatgagacctatcacttcatgctccccttgacaaattcatggaaaataaaccaaaagggagccacatagctaaaggaagatggcacgatggatcacaaatgccccagctaaaaagcttaacctgaatcatcatattattggaggagagcttctagaattgtcaaaaaatgaagtgcctcctgaagatattgttttccaccgtttatatttgaacaagactggcccagttaatcgtaaggcaaagcggaaggactcagttcttgatgaaggaaaagtgtgaggagcttgagtatttttgtaggttgcagattcctaaggaatcaaatgtcatgaatcagatacttaaatccaactacattgtcagaatgaggtcctataatgaagctgaatttgttaatatattgacaattaagtcgtaattgtctctacataaatatagaaattaggaaaattgttttagaggaggactagaccaggcgaatggcttgccatggaaacagtagcagttgcagatgaggatatactatcaaggctatgaaaatggctactgctaggaatctagatggacagattgacatggtgaaggtgcttgtcttaaagaacaagacaaacttgccctcaccaactcttcagtaaacctttggtggtagagccacaacaggcaatggttatgggttcacctttagaggatgcaagacatttggcccagagtcaaaggttgttgagatcttggtcaaggaccttaaggtctttgcatccttcaatgagttgttgtttaaggagatcacacagtttctgaccttggacaactttagggaaaataagcagctttctaagtatggtgatacaaaatatgcacgagtaataatgcttgttgaggtgcagaagctgattgaagcttacctctgtactgtgacaagctacaatttcccagactgaagaattctaggtcctagacacttattaaccagaggtagtcctgtgtaaaataatcaattatctatgtgctcttgagtctcagacattttagcgttt

SEQ ID NO: 20348 - DNA, 1556 bp, Zea Mays
atatgccttagttgatgttctgtatgcaagcaacaatggatttatgagataccaaatatcatttatctccatgatgtaacgaatatttggcacatccctttgttgcttagagatcagaaggccaatgaagctattttggaagtgttagaccttcgatggtgtctatgttggtgatccttctaagctcagtatgaaggctgcatttaggaaggtttggtggttgaaagaagctggtggtagtattattggtggaaccatcaagagaaattcaggagatgagcaagaatccaaaaccacccaaggatgcgtaagagacagatgcattttctttttgttccactaattggctgttcccggatatatatgcaacgctcgtgtcatctgttccaatacttgaagaagcagcacgctacgagttgagatatgggcacagaaatagagctacaagaagtctattttcttcttatccttttgattaatcatgtgtttatatgattcaatcatggaaacaactgtcagttttgatagtgtgcaggatgtggatattttggcatattacacgttgagtggtgaattcaagtatcagtttgggtctagaaggtgaagctgatcagttgctgctggatgagacctatcacttcatgctccccttgacaaattcatggaaaataaaccaaaagggagccacatagctaaaggaagatggcacgatggatcacaaatgccccagctaaaaagcttaacctgaatcatcatattattggaggagagcttctagaattgtcaaaaaatgaagtgcctcctgaagatattgttttccaccgtttatatttgaacaagactggcccagttaatcgtaaggcaaagcggaaggactcagttcttgatgaaggaaaagtgtgaggagcttgttgttaatatattgacaattaagtcgtaattgtctctacataaatatagaaattaggaaaattgttttagaggaggactagaccaggcgaatggcttgccatggaaacagtagcagttgcagatgaggatatactatcaaggctatgaaaatggctactgctaggaatctagatggacagattgacatggtgaaggtgcttgtcttaaagaacaagacaaacttgccctcaccaactcttcagtaaacctttggtggtagagccacaacaggcaatggttatgggttcacctttagaggatgcaagacatttggcccagagtcaaaggttgttgagatcttggtcaaggaccttaaggtctttgcatccttcaatgagttgttgtttaaggagatcacacagtttctgaccttggacaactttagggaaaataagcagctttctaagtatggtgatacaaaatatgcacgagtaataatgcttgttgaggtgcagaagctgattgaagcttacctctgtactgtgacaagctacaatttcccagactgaagaattctaggtcctagacacttattaaccagaggtagtcctgtgtaaaataatcaattatctatgtgctcttgagtctcagacattttagcgttt

SEQ ID NO: 20349 - DNA, 746 bp, Zea Mays
atgtgcgacgccgccgccactctccttcatggccttcgtgtgtccctccttccctgcccgctgcccctgcctacggccgcgtcctgcccggcgcttgtccacgccagacgcccacaccagagaccaccgccggtcagccacacgctcgagaataggcggcggcgcaggtcctcctccatctctatcatggatcagaaggccaatgaagctattttggaagtgttagaccttcgatgtttgggtctagaaggtgaagctgatcagttgctgctggatgagcttaacctgaatcatcatattattggaggagagcttctagaattgtcaaaaaatgaagtgcctcctgaagatattgttttccaccgtttatatttgaacaagactggcccagttaatcagtatttttgtaggttgcagattcctaaggaatcaaatgtcatgaatcagatacttaaatccaactacattgtcagaatgaggtcctataatgaagctgaatgtggtagagccacaacaggcaatggttatgggttcacctttagaggatgcaagacatttggcccagagctacaatgggacgtgctgcgatcaagatgtaggtatcaaagtacttgagcctgagcgggttagtgttgatatgctacgtgagtttgcacaggaagtttatataatgaagtgagtgatgagctttacttatgcttggactaagaaaattgtgtaacagtcacttcatgatacaacatttt

SEQ ID NO: 20350 - DNA, 2042 bp, Zea Mays
atgtgcgacgccgccgccactctccttcatggccttcgtgtgtccctccttccctgcccgctgcccctgcctacggccgcgtcctgcccggcgcttgtccacgccagacgcccacaccagagaccaccgccggtcagccacacgctcgagaataggcggcggcgcaggtcctcctccatctctatcatggatcagaaggccaatgaagctattttggaagtgttagaccttcgatggtatgccattggaccaaagtattaattatatatgcaacgtttgtgtcatctgttccactaataccagcagtgtgctattgttgtttgttctggcctgctacttgcaactgttagccgattaacataagaatttaacaactttttaaacctaaggtgtctatgttggtgatccttctaagctcagtatgaaggctgcatttaggaaggtttggtggttgaaagaagctggtggtagtattattggtggaaccatcaagagaaattcaggagatgagcaagaatccaaaaccacccaaggatgcgtaagagacagatgcattttctttttgttccactaattggctgttcccggatatatatgcaacgctcgtgtcatctgttccaatacttgaagaagcagcacgctacgagttgagatatgggcacagaaatagagctacaagaagtctattttcttcttatccttttgattaatcatgtgtttatatgattcaatcatggaaacaactgtcagttttgatagtgtgcaggatgtggatattttggcatattacacgttgagtggtgaattcaagtatcagtttgggtctagaaggtgaagctgatcagttgctgctggatgaggttagtaaatattacattgtcacaaatacgcccttttcatgctctgttcagttcaagcccgtctgtttgtatgggtacttctatgtagagcaccaaagttgttgtttacttaatagtttttgccatcattttttagaaacggaccagtcattgattatggtggttaacatatatatgaattgcttgtgagactctttacttgtgatcatatccagtgtttctttccatttgtttatggtggtgatccactgacagacctatcacttcatgctccccttgacaaattcatggaaaataaaccaaaagggagccacatagctaaaggaagatggcacgatggatcacaaatgccccagctaaaaagcttaacctgaatcatcatattattggaggagagcttctagaattgtcaaaaaatgaagtgcctcctgaagatattgttttccaccgtttatatttgaacaagactggcccagttaatcgtaaggcaaagcggaaggactcagttcttgatgaaggaaaagtgtgaggagcttgttgttaatatattgacaattaagtcgtaattgtctctacataaatatagaaattaggaaaattgttttagaggaggactagaccaggcgaatggcttgccatggaaacagtagcagttgcagatgaggatatactatcaaggctatgaaaatggctactgctaggaatctagatggacagattgacatggtgaaggtgcttgtcttaaagaacaagacaaacttgccctcaccaactcttcagtaaacctttggtggtagagccacaacaggcaatggttatgggttcacctttagaggatgcaagacatttggcccagagtcaaaggttgttgagatcttggtcaaggaccttaaggtctttgcatccttcaatgagttgttgtttaaggagatcacacagtttctgaccttggacaactttagggaaaataagcagctttctaagtatggtgatacaaaatatgcacgagtaataatgcttgttgaggtgcagaagctgattgaagcttacctctgtactgtgacaagctacaatttcccagactgaagaattctaggtcctagacacttattaaccagaggtagtcctgtgtaaaataatcaattatctatgtgctcttgagtctcagacattttagcgttt

SEQ ID NO: 20351 - DNA, 946 bp, Zea Mays
atgtgcgacgccgccgccactctccttcatggccttcgtgtgtccctccttccctgcccgctgcccctgcctacggccgcgtcctgcccggcgcttgtccacgccagacgcccacaccagagaccaccgccggtcagccacacgctcgagaataggcggcggcgcaggtcctcctccatctctatcatggatcagaaggccaatgaagctattttggaagtgttagaccttcgatgtttgggtctagaaggtgaagctgatcagttgctgctggatgagcttaacctgaatcatcatattattggaggagagcttctagaattgtcaaaaaatgaagtgcctcctgaagatattgttttccaccgtttatatttgaacaagactggcccagttaatcgtaaggcaaagcggaaggactcagttcttgatgaaggaaaagtgtgaggagcttgagtatttttgtaggttgcagattcctaaggaatcaaatgtcatgaatcagatacttaaatccaactacattgtcagaatgaggtcctataatgaagctgaatgtggtagagccacaacaggcaatggttatgggttcacctttagaggatgcaagacatttggcccagagtcaaaggttgttgagatcttggtcaaggaccttaaggtctttgcatccttcaatgagttgttgtttaaggagatcacacagtttctgaccttggacaactttagggaaaataagcagctttctaagtatggtgatacaaaatatgcacgagtaataatgcttgttgaggtgcagaagctgattgaagcttacctctgtactgtgacaagctacaatttcccagactgaagaattctaggtcctagacacttattaaccagaggtagtcctgtgtaaaataatcaattatctatgtgctcttgagtctcagacattttagcgttt

SEQ ID NO: 20352 - DNA, 1278 bp, Zea Mays
atgtgcgacgccgccgccactctccttcatggccttcgtgtgtccctccttccctgcccgctgcccctgcctacggccgcgtcctgcccggcgcttgtccacgccagacgcccacaccagagaccaccgccggtcagccacacgctcgagaataggcggcggcgcaggtcctcctccatctctatcatggatcagaaggccaatgaagctattttggaagtgttagaccttcgatgtttgggtctagaaggtgaagctgatcagttgctgctggatgagcttaacctgaatcatcatattattggaggagagcttctagaattgtcaaaaaatgaagtgcctcctgaagatattgttttccaccgtttatatttgaacaagactggcccagttaatcgtaaggcaaagcggaaggactcagttcttgatgaaggaaaagtgtgaggagcttgttgttaatatattgacaattaagtcgtaattgtctctacataaatatagaaattaggaaaattgttttagaggaggactagaccaggcgaatggcttgccatggaaacagtagcagttgcagatgaggatatactatcaaggctatgaaaatggctactgctaggaatctagatggacagattgacatggtgaaggtgcttgtcttaaagaacaagacaaacttgccctcaccaactcttcagtaaacctttggtggtagagccacaacaggcaatggttatgggttcacctttagaggatgcaagacatttggcccagagctacaatgggacgtgctgcgatcaagatgtaggtatcaaagtacttgagcctgagcgggttagtgttgatatgctacgtgagtttgcacaggaagtttatataatgaaagtcgatgttgaggctggagctcggtggggacacggacaggtctgcgaagctgacggagcggccatgcgaggtggactgtgcttactacatccacacaggctcctgcgaccgtgatcgtgctgcaccggtgagcgctcccttcatgtcgtttcatccctctgttctgtgctgctctgttttgttctgtgctaagcactcctgttgtcctggcacctaacaatgactgacgagttggattatagcttgttggtgaatgacgagtgtgttgttgcttaaagtagaagatttttagcgagtgatgattgttgttaagggcatggaagtgaaagttatgaaatattggtgagtgatgattgttgttaagggcatggaagtgaaagttatgaaatattggtg

SEQ ID NO: 20353 - DNA, 1325 bp, Zea Mays
atgtgcgacgccgccgccactctccttcatggccttcgtgtgtccctccttccctgcccgctgcccctgcctacggccgcgtcctgcccggcgcttgtccacgccagacgcccacaccagagaccaccgccggtcagccacacgctcgagaataggcggcggcgcaggtcctcctccatctctatcatggatcagaaggccaatgaagctattttggaagtgttagaccttcgatgtttgggtctagaaggtgaagctgatcagttgctgctggatgagcttaacctgaatcatcatattattggaggagagcttctagaattgtcaaaaaatgaagtgcctcctgaagatattgttttccaccgtttatatttgaacaagactggcccagttaatcagtatttttgtaggttgcagattcctaaggaatcaaatgtcatgaatcagatacttaaatccaactacattgtcagaatgaggtcctataatgaagctgaatttgttaatatattgacaattaagtcgtaattgtctctacataaatatagaaattaggaaaattgttttagaggaggactagaccaggcgaatggcttgccatggaaacagtagcagttgcagatgaggatatactatcaaggctatgaaaatggctactgctaggaatctagatggacagattgacatggtgaaggtgcttgtcttaaagaacaagacaaacttgccctcaccaactcttcagtaaacctttggtggtagagccacaacaggcaatggttatgggttcacctttagaggatgcaagacatttggcccagagctacaatgggacgtgctgcgatcaagatgtaggtatcaaagtacttgagcctgagcgggttagtgttgatatgctacgtgagtttgcacaggaagtttatataatgaaagtcgatgttgaggctggagctcggtggggacacggacaggtctgcgaagctgacggagcggccatgcgaggtggactgtgcttactacatccacacaggctcctgcgaccgtgatcgtgctgcaccggtgagcgctcccttcatgtcgtttcatccctctgttctgtgctgctctgttttgttctgtgctaagcactcctgttgtcctggcacctaacaatgactgacgagttggattatagcttgttggtgaatgacgagtgtgttgttgcttaaagtagaagatttttagcgagtgatgattgttgttaagggcatggaagtgaaagttatgaaatattggtgagtgatgattgttgttaagggcatggaagtgaaagttatgaaatattggtg

SEQ ID NO: 20354 - DNA, 1068 bp, Zea Mays
atgtgcgacgccgccgccactctccttcatggccttcgtgtgtccctccttccctgcccgctgcccctgcctacggccgcgtcctgcccggcgcttgtccacgccagacgcccacaccagagaccaccgccggtcagccacacgctcgagaataggcggcggcgcaggtcctcctccatctctatcatggatcagaaggccaatgaagctattttggaagtgttagaccttcgatgtttgggtctagaaggtgaagctgatcagttgctgctggatgagcttaacctgaatcatcatattattggaggagagcttctagaattgtcaaaaaatgaagtgcctcctgaagatattgttttccaccgtttatatttgaacaagactggcccagttaatcagtatttttgtaggttgcagattcctaaggaatcaaatgtcatgaatcagatacttaaatccaactacattgtcagaatgaggtcctataatgaagctgaatgtggtagagccacaacaggcaatggttatgggttcacctttagaggatgcaagacatttggcccagagtcaaaggttgttgagatcttggtcaaggaccttaaggtctttgcatccttcaatgagttgttgtttaaggagatcacacagtttctgaccttggacaactttagagtcgatgttgaggctggagctcggtggggacacggacaggtctgcgaagctgacggagcggccatgcgaggtggactgtgcttactacatccacacaggctcctgcgaccgtgatcgtgctgcaccggtgagcgctcccttcatgtcgtttcatccctctgttctgtgctgctctgttttgttctgtgctaagcactcctgttgtcctggcacctaacaatgactgacgagttggattatagcttgttggtgaatgacgagtgtgttgttgcttaaagtagaagatttttagcgagtgatgattgttgttaagggcatggaagtgaaagttatgaaatattggtgagtgatgattgttgttaagggcatggaagtgaaagttatgaaatattggtg

SEQ ID NO: 20355 - DNA, 1669 bp, Zea Mays
ccatgatgtaacgaatatttggcacatccctttgttgcttagagatcagaaggccaatgaagctattttggaagtgttagaccttcgatggtgtctatgttggtgatccttctaagctcagtatgaaggctgcatttaggaaggtttggtggttgaaagaagctggtggtagtattattggtggaaccatcaagagaaattcaggagatgagcaagaatccaaaaccacccaaggatgcgtaagagacagatgcattttctttttgttccactaattggctgttcccggatatatatgcaacgctcgtgtcatctgttccaatacttgaagaagcagcacgctacgagttgagatatgggcacagaaatagagctacaagaagtctattttcttcttatccttttgattaatcatgtgtttatatgattcaatcatggaaacaactgtcagttttgatagtgtgcaggatgtggatattttggcatattacacgttgagtggtgaattcaagtatcagtttgggtctagaaggtgaagctgatcagttgctgctggatgagacctatcacttcatgctccccttgacaaattcatggaaaataaaccaaaagggagccacatagctaaaggaagatggcacgatggatcacaaatgccccagctaaaaagcttaacctgaatcatcatattattggaggagagcttctagaattgtcaaaaaatgaagtgcctcctgaagatattgttttccaccgtttatatttgaacaagactggcccagttaatcgtaaggcaaagcggaaggactcagttcttgatgaaggaaaagtgtgaggagcttgttgttaatatattgacaattaagtcgtaattgtctctacataaatatagaaattaggaaaattgttttagaggaggactagaccaggcgaatggcttgccatggaaacagtagcagttgcagatgaggatatactatcaaggctatgaaaatggctactgctaggaatctagatggacagattgacatggtgaaggtgcttgtcttaaagaacaagacaaacttgccctcaccaactcttcagtaaacctttggtggtagagccacaacaggcaatggttatgggttcacctttagaggatgcaagacatttggcccagagctacaatgggacgtgctgcgatcaagatgtaggtatcaaagtacttgagcctgagcgggttagtgttgatatgctacgtgagtttgcacaggaagtttatataatgaaagtcgatgttgaggctggagctcggtggggacacggacaggtctgcgaagctgacggagcggccatgcgaggtggactgtgcttactacatccacacaggctcctgcgaccgtgatcgtgctgcaccggtgagcgctcccttcatgtcgtttcatccctctgttctgtgctgctctgttttgttctgtgctaagcactcctgttgtcctggcacctaacaatgactgacgagttggattatagcttgttggtgaatgacgagtgtgttgttgcttaaagtagaagatttttagcgagtgatgattgttgttaagggcatggaagtgaaagttatgaaatattggtgagtgatgattgttgttaagggcatggaagtgaaagttatgaaatattggtg

SEQ ID NO: 20356 - DNA, 291 bp, Zea Mays
gaggaggtcccgctgccgacaccgccggagccgagcggcgggatcggaatggggatatactggaacgcgtcggcctcgacgacgacattgccgcgccgcggcggtggagacggggagcacagccggacttggggcggggtactagggttttggggaaggaagcaagcacgagctcgtgggggaggagggagggaagctcgtgtgcttgctttggagggtcgtcgtcgtcttcctcctaggcgcccgggtgccgcctttttggtgtttttttggtccgaagctctgaagttt

SEQ ID NO: 20357 - DNA, 4940 bp, Zea Mays
gcatggggcgacggtccgacggacacgcagatccgtttgccgcccctgtcctgtccgcctgcactgcccgattctgccgcctgtccacgaggcgaggggcggtaaaaggctgggtgtgtgcctgtgtggggtgtgggtaggggaggcagagattgctgcgcgcgccccggagcagagcgagtgcttgccagttgccattactgttcggtgcggtgaggtagtagagggataaagaaagaagggactggaaggaaggaaggagtgagggagatgccggcttcgcctcgtatggggaggggataagggaaggccgatggcaatgccgccgtttctccctcttcgcgaatagctagtacgcgttcaaagcaactgattggctgttgatcagcaagatggatgggaaaggattgtttgcggagatagggatgaaggaggaggacattgccacaatgctgtctgggaagaaagtttccgagctggcagaggatgcgtttgatggttccaaggaagaaagacagatctttgagggtgtcttctgcctaacaaacgttgatggtggattgaatgatcattatcatggaggcattggacatactgttcatgcagggaaagtggtgacaagttctagaaaaccatcaagctctgccgacaattacaaggcagcacactgtcgcatagtagagtccttcactgctggcaacttatcaagctatcgtgtctcctgtcttggtgccgatgagcaggctcatggagcaatgcattctcctgatgctgtccgtttcaagcttgcagtgcagtggacgcctcctcgccctgatcgggtgtacactcgtagggtggtgactcgcaggagcgagagggcaagaatttgcagtgcgatggatttggagagcatcgacatttgcaatttcagtcgtcagagggatggtcgtggccatggacagctttggaaccatcttcggatgcatgcacatcttctgatggtggatgccgggtggaagattgaggccaaggaaagagacaacaggagtaaagttgatcatgtttatgtggcgccagacaatgtgacacgcctgtattctcttcccagagcatggaaatgctttggccagtggttgcttatgacaacaccctgcgtcaatggaaatgagtcaattgactacggaaaggagtggtcgaacatgcatgaatttctgtatgatctgaagaacacactgctatgcctacagtatgaggtccaacgtacgaagccagcactatctttcctctaccagtggcagctccttgatcctttcatggctgttgtttgcatcgataagaaggttgcagctcttaaagatggagtggcactgaaagctgttaacagcaccgtgacttgcctcaatcgcagtgagtgtaagatgttggatgccaagaattcaaataggtcacttggggtcaactccacaagtaaatatatgaatccatatctcagctcctgcaaaaaaagtcttctgccgcttctctctgaatctgattatcagcctgataaggaagggaatactatgcctaatgaagaagcttctctattttgtacaaacaagactagcgaagatgaagctgatcggcggtcattgtgtatgtcagaaatgaatgaaataggcataagaagcacagctcatcacatagttatgggtttacatgatgcaacagcttttcatggctcaagccaaacttgttcggggaggaaaagaaaatttccgtgcatcaagtctaaagaggataatcaaactgaagacaagtctgacccattattctttccacccagctattcatccacattaagtcatctggttgaaaatgttcaaataaatgatgttagccctcatggctatgaaaccacggagattccaaacatgggcaatcgtacagatattcttgataagatgtacctaggagagaatttattgtttgcccccgaaactggtaatatgctacttgaaactacagatgatatcaacaatgaacagcatgatgatgcagctgtctctgagccccaatcggcagataatgatggaagtggaccttctggtgcatcatcactaccaccagagaaagatgcatacatgggatctaaagaggattctattaacgactatcatgatccttcagttgtctctgagttccaaattgctaataatgatgcaaaatgtgaaccttctattgcattcttgccagaaaaggataaagatttggaagctaataaaacgagcttggaaggtccagcaaaaacaggccaattgtcatctgaagctagtggcagcactttgatgatctcagagccacaagtattgtttgtgtccccacaagatgggactctgtctttcatgaacaataatacgaacaaccaagagatgtggaggttcctgaatgtttcccctgataccatggataccgaaatgcagatggactctaattcattggtttacgaggcaagcttgattcagggtttcttgtaccttgacaatgagggttctccaatttgttggacagtgatgaacccggaacctcctaggcgcttgatatgtgctactgctctggaaccaaactcaaagctgtcgaaacagtatgttgaaatgaggttggagaatgatgcatcaacgtctgaacacaagaagggaggaaaattgtctgataaggctgcagatatccaagacaatgttcctgttcctttgaatctagtgcttgagaacaaaaatgacaaggaccaaggtgagcaaagcagtgaaacttcagaacaacttatgtccaaagaaccacaaaaaagggacatcaaaaggcaaaagagaacatggtctcatacatgcaagtttgatgatgatgaccttctgatgacagctgtaatatataagctgacagcacgttacaggaactcttttcatcggaagctcagaaataaattcggtttcaggcgtcttccaacataccactgggagaatgaagataaaggtgacaggaagaagtttcctggagaagcaaggacggtgttgaacaagttacttgaaatgggcattgttgctagagtggatattcttcaatgtcatggtccaggaggcaaaaatgtgttgaaggatgggaacataactgcgagtggcattcaatgccagtgctgtggcaaatcttacagtctttgtcagcttcaagcatggtctatagagcagaaggtgaggaaagagcatgcaaaggatacaatgtcccttcaagcagaccaaaacgatgatacctgtggatcatgtggcgatggtggtgaactgatatgctgtgacaattgtcctgctagttaccatcaagcctgcttgtcttgccaggatattccagatggcaactggtactgctctagctgcctttgcgacatttgtggtgaagtaatcgattcaaaggagcttgtaacttcccttcctgctttagattgctcacagtgcgaacgccaataccatgtaaaatgtgtatctgccaaagttccgtgcaatgaggatggatctggtacctggttttgtggaagaaaatgtcacgagatctatatgaccttccgttctcgtgttggagtgcctgatcacatggacgatgatctgtgtttcaccgttcttcgtaacaacggtgataagaaggttcgcacggcagaggagattgctctcatggctgaatgcaacatgaaactcatgatcgccacgagtatcatggaagagtgtttcctgcctattctagatcccaggacagggatagacattattccctccatattgtataactggaggtctgatttacatttcaattacaaggggttctatacagtagtcttggaaagtgatgatagcatggtatctgttgcctccataaggttgcatggtgcaattttagcagagatgcctctggtagcaacttctaaagagaatcgtcagcaggggatgtgcaggcgcctcatggattacattgaggagatgctgaaatccctgaaggtggagatgctgctcctatcagcaatcccgcacctggcggagacatggacatcgacatttgggttcagagagatagatgagtcggacaagaagaggctgagtaaggtgaggctggccgcagttccggggaccgtcctactgaagaaggacctgctgtgtgaatgttcaggcgcggacgccggtgagccgccgagccctaagcccttccaagtttactcgcgcgtgccgagaggccgcaccggtttggatgcagtgtgccaataaagatgacgcagtggatcgaatgcgccgcggtcagtcgtcgtcgtcggtgacagggggcagctggtggtcgtcacggggcctcgtctccggttgctgaagccgaggccgagcacatcagcacgcgccggtttgtgtggtggaaatggaaagcctcgttgctctggtaggagctctgaagatcgctgtcgtctgcttgtagtctgtaaatagcttctccgtcggcgagaagcccagggtccacggccattgtagaaccgaacctgtatgataaaactagaccgtgttggcgccccaccagcgtttagtagtttccgttgccctttgaactcaaagtttcaggctagtccattgtgttcgtttcagaagcctgcggttttcagggggaggggaggtgccagaaagggaggacataacgcacgtgcagaccgagtattatgtggtggtgtcgtagacacgcacgagttgacgaagctataggagcagctcgtgatgagcaatggttggtgcagatgatgatgtcaatgagctcctcccgcagggaccggacctgtggacacggatggagctgaacttgtttgaaggatgcgtagtactaataatatatgcagtcaagccagcctgaacttatttgaatgaggtgtagtactaataatatatgcagccaagccagcctgacacttt

SEQ ID NO: 20358 - DNA, 4686 bp, Zea Mays
ccgcccctgtcctgtccgcctgcactgcccgattctgccgcctgtccacgaggcgaggggcggtaaaaggctgggtgtgtgcctgtgtggggtgtgggtaggggaggcagagattgctgcgcgcgccccggagcagagcgagtgcttgccagttgccattactgttcggtgcggtgaggtagtagagggataaagaaagaagggactggaaggaaggaaggagtgagggagatgccggcttcgcctcgtatggggaggggataagggaaggccgatggcaatgccgccgtttctccctcttcgcgaatagctagtacgcgttcaaagcaactgattggctgttgatcagcaagatggatgggaaaggattgtttgcggagatagggatgaaggaggaggacattgccacaatgctgtctgggaagaaagtttccgagctggcagaggatgcgtttgatggttccaaggaagaaagacagatctttgagggtgtcttctgcctaacaaacgttgatggtggattgaatgatcattatcatggaggcattggacatactgttcatgcagggaaagtggtgacaagttctagaaaaccatcaagctctgccgacaattacaaggcagcacactgtcgcatagtagagtccttcactgctggcaacttatcaagctatcgtgtctcctgtcttggtgccgatgagcaggctcatggagcaatgcattctcctgatgctgtccgtttcaagcttgcagtgcagtggacgcctcctcgccctgatcgggtgtacactcgtagggtggtgactcgcaggagcgagagggcaagaatttgcagtgcgatggatttggagagcatcgacatttgcaatttcagtcgtcagagggatggtcgtggccatggacagctttggaaccatcttcggatgcatgcacatcttctgatggtggatgccgggtggaagattgaggccaaggaaagagacaacaggagtaaagttgatcatgtttatgtggcgccagacaatgtgacacgcctgtattctcttcccagagcatggaaatgctttggccagtggttgcttatgacaacaccctgcgtcaatggaaatgagtcaattgactacggaaaggagtggtcgaacatgcatgaatttctgtatgatctgaagaacacactgctatgcctacagtatgaggtccaacgtacgaagccagcactatctttcctctaccagtggcagctccttgatcctttcatggctgttgtttgcatcgataagaaggttgcagctcttaaagatggagtggcactgaaagctgttaacagcaccgtgacttgcctcaatcgcagtgagtgtaagatgttggatgccaagaattcaaataggtcacttggggtcaactccacaagtaaatatatgaatccatatctcagctcctgcaaaaaaagtcttctgccgcttctctctgaatctgattatcagcctgataaggaagggaatactatgcctaatgaagaagcttctctattttgtacaaacaagactagcgaagatgaagctgatcggcggtcattgtgtatgtcagaaatgaatgaaataggcataagaagcacagctcatcacatagttatgggtttacatgatgcaacagcttttcatggctcaagccaaacttgttcggggaggaaaagaaaatttccgtgcatcaagtctaaagaggataatcaaactgaagacaagtctgacccattattctttccacccagctattcatccacattaagtcatctggttgaaaatgttcaaataaatgatgttagccctcatggctatgaaaccacggagattccaaacatgggcaatcgtacagatattcttgataagatgtacctaggagagaatttattgtttgcccccgaaactggtaatatgctacttgaaactacagatgatatcaacaatgaacagcatgatgatgcagctgtctctgagccccaatcggcagataatgatggaagtggaccttctggtgcatcatcactaccaccagagaaagatgcatacatgggatctaaagaggattctattaacgactatcatgatccttcagttgtctctgagttccaaattgctaataatgatgcaaaatgtgaaccttctattgcattcttgccagaaaaggataaagatttggaagctaataaaacgagcttggaaggtccagcaaaaacaggccaattgtcatctgaagctagtggcagcactttgatgatctcagagccacaagtattgtttgtgtccccacaagatgggactctgtctttcatgaacaataatacgaacaaccaagagatgtggaggttcctgaatgtttcccctgataccatggataccgaaatgcagatggactctaattcattggtttacgaggcaagcttgattcagggtttcttgtaccttgacaatgagggttctccaatttgttggacagtgatgaacccggaacctcctaggcgcttgatatgtgctactgctctggaaccaaactcaaagctgtcgaaacagtatgttgaaatgaggttggagaatgatgcatcaacgtctgaacacaagaagggaggaaaattgtctgataaggctgcagatatccaagacaatgtcagtagaaaaaaacagaaagcaaacattgcttctttaaataattgcgtaagtatggacaatttaactgtcaatcctattgatcctgtagttctcaatgagggagagcagacaggtacagcaatcactgagcaggttcctgttcctttgaatctagtgcttgagaacaaaaatgacaaggaccaaggtgagcaaagcagtgaaacttcagaacaacttatgtccaaagaaccacaaaaaagggacatcaaaaggcaaaagagaacatggtctcatacatgcaagtttgatgatgatgaccttctgatgacagctgtaatatataagctgacagcacgttacaggaactcttttcatcggaagctcagaaataaattcggtttcaggcgtcttccaacataccactgggagaatgaagataaaggtgacaggaagaagtttcctggagaagcaaggacggtgttgaacaagttacttgaaatgggcattgttgctagagtggatattcttcaatgtcatggtccaggaggcaaaaatgtgttgaaggatgggaacataactgcgagtggcattcaatgccagtgctgtggtaccacattcacaatgtccaagtttaagtgtcatgcaggtctcaggcaagaagtcccatctctgaatcttttcttggatacaggcaaatcttacagtctttgtcagcttcaagcatggtctatagagcagaaggtgaggaaagagcatgcaaaggatacaatgtcccttcaagcagaccaaaacgatgaaactcatgatcgccacgagtatcatggaagagtgtttcctgcctattctagatcccaggacagggatagacattattccctccatattgtataactggaggtctgatttacatttcaattacaaggggttctatacagtagtcttggaaagtgatgatagcatggtatctgttgcctccataaggttgcatggtgcaattttagcagagatgcctctggtagcaacttctaaagagaatcgtcagcaggggatgtgcaggcgcctcatggattacattgaggagatgctgaaatccctgaaggtggagatgctgctcctatcagcaatcccgcacctggcggagacatggacatcgacatttgggttcagagagatagatgagtcggacaagaagaggctgagtaaggtgaggctggccgcagttccggggaccgtcctactgaagaaggacctgctgtgtgaatgttcaggcgcggacgccggtgagccgccgagccctaagcccttccaagtttactcgcgcgtgccgagaggccgcaccggtttggatgcagtgtgccaataaagatgacgcagtggatcgaatgcgccgcggtcagtcgtcgtcgtcggtgacagggggcagctggtggtcgtcacggggcctcgtctccggttgctgaagccgaggccgagcacatcagcacgcgccggtttgtgtggtggaaatggaaagcctcgttgctctggtaggagctctgaagatcgctgtcgtctgcttgtagtctgtaaatagcttctccgtcggcgagaagcccagggtccacggccattgtagaaccgaacctgtatgataaaactagaccgtgttggcgccccaccagcgtttagtagtttccgttgccctttgaactcaaagtttcaggctagtccattgtgttcgtttcagaagcctgcggttttcagggggaggggaggtgccagaaagggaggacataacgcacgtgcagaccgagtattatgtggtggtgtcgtagacacgcacgagttgacgaagctataggagcagctcgtgatgagcaatggttggtgcagatgatgatgtcaatgagctcctcccgcagggaccggacctgtggacacggatggagctgaacttgtttgaaggatgcgtagtactaataatatatgcagtcaagccagcctgaacttatttgaatgaggtgtagtactaataatatatgcagccaagccagcctgacacttt

SEQ ID NO: 20359 - DNA, 5068 bp, Zea Mays
cgcccctgtcctgtccgcctgcactgcccgattctgccgcctgtccacgaggcgaggggcggtaaaaggctgggtgtgtgcctgtgtggggtgtgggtaggggaggcagagattgctgcgcgcgccccggagcagagcgagtgcttgccagttgccattactgttcggtgcggtgaggtagtagagggataaagaaagaagggactggaaggaaggaaggagtgagggagatgccggcttcgcctcgtatggggaggggataagggaaggccgatggcaatgccgccgtttctccctcttcgcgaatagctagtacgcgttcaaagcaactgattggctgttgatcagcaagatggatgggaaaggattgtttgcggagatagggatgaaggaggaggacattgccacaatgctgtctgggaagaaagtttccgagctggcagaggatgcgtttgatggttccaaggaagaaagacagatctttgagggtgtcttctgcctaacaaacgttgatggtggattgaatgatcattatcatggaggcattggacatactgttcatgcagggaaagtggtgacaagttctagaaaaccatcaagctctgccgacaattacaaggcagcacactgtcgcatagtagagtccttcactgctggcaacttatcaagctatcgtgtctcctgtcttggtgccgatgagcaggctcatggagcaatgcattctcctgatgctgtccgtttcaagcttgcagtgcagtggacgcctcctcgccctgatcgggtgtacactcgtagggtggtgactcgcaggagcgagagggcaagaatttgcagtgcgatggatttggagagcatcgacatttgcaatttcagtcgtcagagggatggtcgtggccatggacagctttggaaccatcttcggatgcatgcacatcttctgatggtggatgccgggtggaagattgaggccaaggaaagagacaacaggagtaaagttgatcatgtttatgtggcgccagacaatgtgacacgcctgtattctcttcccagagcatggaaatgctttggccagtggttgcttatgacaacaccctgcgtcaatggaaatgagtcaattgactacggaaaggagtggtcgaacatgcatgaatttctgtatgatctgaagaacacactgctatgcctacagtatgaggtccaacgtacgaagccagcactatctttcctctaccagtggcagctccttgatcctttcatggctgttgtttgcatcgataagaaggttgcagctcttaaagatggagtggcactgaaagctgttaacagcaccgtgacttgcctcaatcgcagtgagtgtaagatgttggatgccaagaattcaaataggtcacttggggtcaactccacaagtaaatatatgaatccatatctcagctcctgcaaaaaaagtcttctgccgcttctctctgaatctgattatcagcctgataaggaagggaatactatgcctaatgaagaagcttctctattttgtacaaacaagactagcgaagatgaagctgatcggcggtcattgtgtatgtcagaaatgaatgaaataggcataagaagcacagctcatcacatagttatgggtttacatgatgcaacagcttttcatggctcaagccaaacttgttcggggaggaaaagaaaatttccgtgcatcaagtctaaagaggataatcaaactgaagacaagtctgacccattattctttccacccagctattcatccacattaagtcatctggttgaaaatgttcaaataaatgatgttagccctcatggctatgaaaccacggagattccaaacatgggcaatcgtacagatattcttgataagatgtacctaggagagaatttattgtttgcccccgaaactggtaatatgctacttgaaactacagatgatatcaacaatgaacagcatgatgatgcagctgtctctgagccccaatcggcagataatgatggaagtggaccttctggtgcatcatcactaccaccagagaaagatgcatacatgggatctaaagaggattctattaacgactatcatgatccttcagttgtctctgagttccaaattgctaataatgatgcaaaatgtgaaccttctattgcattcttgccagaaaaggataaagatttggaagctaataaaacgagcttggaaggtccagcaaaaacaggccaattgtcatctgaagctagtggcagcactttgatgatctcagagccacaagtattgtttgtgtccccacaagatgggactctgtctttcatgaacaataatacgaacaaccaagagatgtggaggttcctgaatgtttcccctgataccatggataccgaaatgcagatggactctaattcattggtttacgaggcaagcttgattcagggtttcttgtaccttgacaatgagggttctccaatttgttggacagtgatgaacccggaacctcctaggcgcttgatatgtgctactgctctggaaccaaactcaaagctgtcgaaacagtatgttgaaatgaggttggagaatgatgcatcaacgtctgaacacaagaagggaggaaaattgtctgataaggctgcagatatccaagacaatgttcctgttcctttgaatctagtgcttgagaacaaaaatgacaaggaccaaggtgagcaaagcagtgaaacttcagaacaacttatgtccaaagaaccacaaaaaagggacatcaaaaggcaaaagagaacatggtctcatacatgcaagtttgatgatgatgaccttctgatgacagctgtaatatataagctgacagcacgttacaggaactcttttcatcggaagctcagaaataaattcggtttcaggcgtcttccaacataccactgggagaatgaagataaaggtgacaggaagaagtttcctggagaagcaaggacggtgttgaacaagttacttgaaatgggcattgttgctagagtggatattcttcaatgtcatggtccaggaggcaaaaatgtgttgaaggatgggaacataactgcgagtggcattcaatgccagtgctgtggtaccacattcacaatgtccaagtttaagtgtcatgcaggtctcaggcaagaagtcccatctctgaatcttttcttggatacaggcaaatcttacagtctttgtcagcttcaagcatggtctatagagcagaaggtgaggaaagagcatgcaaaggatacaatgtcccttcaagcagaccaaaacgatgatacctgtggatcatgtggcgatggtggtgaactgatatgctgtgacaattgtcctgctagttaccatcaagcctgcttgtcttgccaggatattccagatggcaactggtactgctctagctgcctttgcgacatttgtggtgaagtaatcgattcaaaggagcttgtaacttcccttcctgctttagattgctcacagtgcgaacgccaatatcatcaacacacacacacacgggcagggcagactgctttttaaccaagcctagatcaagatttgaatgacctaaaactttttgaccatgtaaaatgtgtatctgccaaagttccgtgcaatgaggatggatctggtacctggttttgtggaagaaaatgtcacgagatctatatgaccttccgttctcgtgttggagtgcctgatcacatggacgatgatctgtgtttcaccgttcttcgtaacaacggtgataagaaggttcgcacggcagaggagattgctctcatggctgaatgcaacatgaaactcatgatcgccacgagtatcatggaagagtgtttcctgcctattctagatcccaggacagggatagacattattccctccatattgtataactggaggtctgatttacatttcaattacaaggggttctatacagtagtcttggaaagtgatgatagcatggtatctgttgcctccataaggttgcatggtgcaattttagcagagatgcctctggtagcaacttctaaagagaatcgtcagcaggggatgtgcaggcgcctcatggattacattgaggagatgctgaaatccctgaaggtggagatgctgctcctatcagcaatcccgcacctggcggagacatggacatcgacatttgggttcagagagatagatgagtcggacaagaagaggctgagtaaggtgaggctggccgcagttccggggaccgtcctactgaagaaggacctgctgtgtgaatgttcaggcgcggacgccggtgagccgccgagccctaagcccttccaagtttactcgcgcgtgccgagaggccgcaccggtttggatgcagtgtgccaataaagatgacgcagtggatcgaatgcgccgcggtcagtcgtcgtcgtcggtgacagggggcagctggtggtcgtcacggggcctcgtctccggttgctgaagccgaggccgagcacatcagcacgcgccggtttgtgtggtggaaatggaaagcctcgttgctctggtaggagctctgaagatcgctgtcgtctgcttgtagtctgtaaatagcttctccgtcggcgagaagcccagggtccacggccattgtagaaccgaacctgtatgataaaactagaccgtgttggcgccccaccagcgtttagtagtttccgttgccctttgaactcaaagtttcaggctagtccattgtgttcgtttcagaagcctgcggttttcagggggaggggaggtgccagaaagggaggacataacgcacgtgcagaccgagtattatgtggtggtgtcgtagacacgcacgagttgacgaagctataggagcagctcgtgatgagcaatggttggtgcagatgatgatgtcaatgagctcctcccgcagggaccggacctgtggacacggatggagctgaacttgtttgaaggatgcgtagtactaataatatatgcagtcaagccagcctgaacttatttgaatgaggtgtagtactaataatatatgcagccaagccagcctgacacttt

SEQ ID NO: 20360 - DNA, 5184 bp, Zea Mays
cactgcccgattctgccgcctgtccacgaggcgaggggcggtaaaaggctgggtgtgtgcctgtgtggggtgtgggtaggggaggcagagattgctgcgcgcgccccggagcagagcgagtgcttgccagttgccattactgttcggtgcggtgaggtagtagagggataaagaaagaagggactggaaggaaggaaggagtgagggagatgccggcttcgcctcgtatggggaggggataagggaaggccgatggcaatgccgccgtttctccctcttcgcgaatagctagtacgcgttcaaagcaactgattggctgttgatcagcaagatggatgggaaaggattgtttgcggagatagggatgaaggaggaggacattgccacaatgctgtctgggaagaaagtttccgagctggcagaggatgcgtttgatggttccaaggaagaaagacagatctttgagggtgtcttctgcctaacaaacgttgatggtggattgaatgatcattatcatggaggcattggacatactgttcatgcagggaaagtggtgacaagttctagaaaaccatcaagctctgccgacaattacaaggcagcacactgtcgcatagtagagtccttcactgctggcaacttatcaagctatcgtgtctcctgtcttggtgccgatgagcaggctcatggagcaatgcattctcctgatgctgtccgtttcaagcttgcagtgcagtggacgcctcctcgccctgatcgggtgtacactcgtagggtggtgactcgcaggagcgagagggcaagaatttgcagtgcgatggatttggagagcatcgacatttgcaatttcagtcgtcagagggatggtcgtggccatggacagctttggaaccatcttcggatgcatgcacatcttctgatggtggatgccgggtggaagattgaggccaaggaaagagacaacaggagtaaagttgatcatgtttatgtggcgccagacaatgtgacacgcctgtattctcttcccagagcatggaaatgctttggccagtggttgcttatgacaacaccctgcgtcaatggaaatgagtcaattgactacggaaaggagtggtcgaacatgcatgaatttctgtatgatctgaagaacacactgctatgcctacagtatgaggtccaacgtacgaagccagcactatctttcctctaccagtggcagctccttgatcctttcatggctgttgtttgcatcgataagaaggttgcagctcttaaagatggagtggcactgaaagctgttaacagcaccgtgacttgcctcaatcgcagtgagtgtaagatgttggatgccaagaattcaaataggtcacttggggtcaactccacaagtaaatatatgaatccatatctcagctcctgcaaaaaaagtcttctgccgcttctctctgaatctgattatcagcctgataaggaagggaatactatgcctaatgaagaagcttctctattttgtacaaacaagactagcgaagatgaagctgatcggcggtcattgtgtatgtcagaaatgaatgaaataggcataagaagcacagctcatcacatagttatgggtttacatgatgcaacagcttttcatggctcaagccaaacttgttcggggaggaaaagaaaatttccgtgcatcaagtctaaagaggataatcaaactgaagacaagtctgacccattattctttccacccagctattcatccacattaagtcatctggttgaaaatgttcaaataaatgatgttagccctcatggctatgaaaccacggagattccaaacatgggcaatcgtacagatattcttgataagatgtacctaggagagaatttattgtttgcccccgaaactggtaatatgctacttgaaactacagatgatatcaacaatgaacagcatgatgatgcagctgtctctgagccccaatcggcagataatgatggaagtggaccttctggtgcatcatcactaccaccagagaaagatgcatacatgggatctaaagaggattctattaacgactatcatgatccttcagttgtctctgagttccaaattgctaataatgatgcaaaatgtgaaccttctattgcattcttgccagaaaaggataaagatttggaagctaataaaacgagcttggaaggtccagcaaaaacaggccaattgtcatctgaagctagtggcagcactttgatgatctcagagccacaagtattgtttgtgtccccacaagatgggactctgtctttcatgaacaataatacgaacaaccaagagatgtggaggttcctgaatgtttcccctgataccatggataccgaaatgcagatggactctaattcattggtttacgaggcaagcttgattcagggtttcttgtaccttgacaatgagggttctccaatttgttggacagtgatgaacccggaacctcctaggcgcttgatatgtgctactgctctggaaccaaactcaaagctgtcgaaacagtatgttgaaatgaggttggagaatgatgcatcaacgtctgaacacaagaagggaggaaaattgtctgataaggctgcagatatccaagacaatgtcagtagaaaaaaacagaaagcaaacattgcttctttaaataattgcgtaagtatggacaatttaactgtcaatcctattgatcctgtagttctcaatgagggagagcagacaggtacagcaatcactgagcaggttcctgttcctttgaatctagtgcttgagaacaaaaatgacaaggaccaaggtgagcaaagcagtgaaacttcagaacaacttatgtccaaagaaccacaaaaaagggacatcaaaaggcaaaagagaacatggtctcatacatgcaagtttgatgatgatgaccttctgatgacagctgtaatatataagctgacagcacgttacaggaactcttttcatcggaagctcagaaataaattcggtttcaggcgtcttccaacataccactgggagaatgaagataaaggtgacaggaagaagtttcctggagaagcaaggacggtgttgaacaagttacttgaaatgggcattgttgctagagtggatattcttcaatgtcatggtccaggaggcaaaaatgtgttgaaggatgggaacataactgcgagtggcattcaatgccagtgctgtggtaccacattcacaatgtccaagtttaagtgtcatgcaggtctcaggcaagaagtcccatctctgaatcttttcttggatacaggcaaatcttacagtctttgtcagcttcaagcatggtctatagagcagaaggtgaggaaagagcatgcaaaggatacaatgtcccttcaagcagaccaaaacgatgatacctgtggatcatgtggcgatggtggtgaactgatatgctgtgacaattgtcctgctagttaccatcaagcctgcttgtcttgccagtttgcgcaaagaaagagggactccaagaatgccggtgctgctgcccgcccaccccctcgtggatcgagctttttaaacttcccatggatattccagatggcaactggtactgctctagctgcctttgcgacatttgtggtgaagtaatcgattcaaaggagcttgtaacttcccttcctgctttagattgctcacagtgcgaacgccaataccatgtaaaatgtgtatctgccaaagttccgtgcaatgaggatggatctggtacctggttttgtggaagaaaatgtcacgagatctatatgaccttccgttctcgtgttggagtgcctgatcacatggacgatgatctgtgtttcaccgttcttcgtaacaacggtgataagaaggttcgcacggcagaggagattgctctcatggctgaatgcaacatgaaactcatgatcgccacgagtatcatggaagagtgtttcctgcctattctagatcccaggacagggatagacattattccctccatattgtataactggaggtctgatttacatttcaattacaaggggttctatacagtagtcttggaaagtgatgatagcatggtatctgttgcctccataaggttgcatggtgcaattttagcagagatgcctctggtagcaacttctaaagagaatcgtcagcaggggatgtgcaggcgcctcatggattacattgaggagatgctgaaatccctgaaggtggagatgctgctcctatcagcaatcccgcacctggcggagacatggacatcgacatttgggttcagagagatagatgagtcggacaagaagaggctgagtaaggtgaggctggccgcagttccggggaccgtcctactgaagaaggacctgctgtgtgaatgttcaggcgcggacgccggtgagccgccgagccctaagcccttccaagtttactcgcgcgtgccgagaggccgcaccggtttggatgcagtgtgccaataaagatgacgcagtggatcgaatgcgccgcggtcagtcgtcgtcgtcggtgacagggggcagctggtggtcgtcacggggcctcgtctccggttgctgaagccgaggccgagcacatcagcacgcgccggtttgtgtggtggaaatggaaagcctcgttgctctggtaggagctctgaagatcgctgtcgtctgcttgtagtctgtaaatagcttctccgtcggcgagaagcccagggtccacggccattgtagaaccgaacctgtatgataaaactagaccgtgttggcgccccaccagcgtttagtagtttccgttgccctttgaactcaaagtttcaggctagtccattgtgttcgtttcagaagcctgcggttttcagggggaggggaggtgccagaaagggaggacataacgcacgtgcagaccgagtattatgtggtggtgtcgtagacacgcacgagttgacgaagctataggagcagctcgtgatgagcaatggttggtgcagatgatgatgtcaatgagctcctcccgcagggaccggacctgtggacacggatggagctgaacttgtttgaaggatgcgtagtactaataatatatgcagtcaagccagcctgaacttatttgaatgaggtgtagtactaataatatatgcagccaagccagcctgacacttt

SEQ ID NO: 20361 - DNA, 4921 bp, Zea Mays
tgtgtgcctgtgtggggtgtgggtaggggaggcagagattgctgcgcgcgccccggagcagagcgagtgcttgccagttgccattactgttcggtgcggtgaggtagtagagggataaagaaagaagggactggaaggaaggaaggagtgagggagatgccggcttcgcctcgtatggggaggggataagggaaggccgatggcaatgccgccgtttctccctcttcgcgaatagctagtacgcgttcaaagcaactgattggctgttgatcagcaagatggatgggaaaggattgtttgcggagatagggatgaaggaggaggacattgccacaatgctgtctgggaagaaagtttccgagctggcagaggatgcgtttgatggttccaaggaagaaagacagatctttgagggtgtcttctgcctaacaaacgttgatggtggattgaatgatcattatcatggaggcattggacatactgttcatgcagggaaagtggtgacaagttctagaaaaccatcaagctctgccgacaattacaaggcagcacactgtcgcatagtagagtccttcactgctggcaacttatcaagctatcgtgtctcctgtcttggtgccgatgagcaggctcatggagcaatgcattctcctgatgctgtccgtttcaagcttgcagtgcagtggacgcctcctcgccctgatcgggtgtacactcgtagggtggtgactcgcaggagcgagagggcaagaatttgcagtgcgatggatttggagagcatcgacatttgcaatttcagtcgtcagagggatggtcgtggccatggacagctttggaaccatcttcggatgcatgcacatcttctgatggtggatgccgggtggaagattgaggccaaggaaagagacaacaggagtaaagttgatcatgtttatgtggcgccagacaatgtgacacgcctgtattctcttcccagagcatggaaatgctttggccagtggttgcttatgacaacaccctgcgtcaatggaaatgagtcaattgactacggaaaggagtggtcgaacatgcatgaatttctgtatgatctgaagaacacactgctatgcctacagtatgaggtccaacgtacgaagccagcactatctttcctctaccagtggcagctccttgatcctttcatggctgttgtttgcatcgataagaaggttgcagctcttaaagatggagtggcactgaaagctgttaacagcaccgtgacttgcctcaatcgcagtgagtgtaagatgttggatgccaagaattcaaataggtcacttggggtcaactccacaagtaaatatatgaatccatatctcagctcctgcaaaaaaagtcttctgccgcttctctctgaatctgattatcagcctgataaggaagggaatactatgcctaatgaagaagcttctctattttgtacaaacaagactagcgaagatgaagctgatcggcggtcattgtgtatgtcagaaatgaatgaaataggcataagaagcacagctcatcacatagttatgggtttacatgatgcaacagcttttcatggctcaagccaaacttgttcggggaggaaaagaaaatttccgtgcatcaagtctaaagaggataatcaaactgaagacaagtctgacccattattctttccacccagctattcatccacattaagtcatctggttgaaaatgttcaaataaatgatgttagccctcatggctatgaaaccacggagattccaaacatgggcaatcgtacagatattcttgataagatgtacctaggagagaatttattgtttgcccccgaaactggtaatatgctacttgaaactacagatgatatcaacaatgaacagcatgatgatgcagctgtctctgagccccaatcggcagataatgatggaagtggaccttctggtgcatcatcactaccaccagagaaagatgcatacatgggatctaaagaggattctattaacgactatcatgatccttcagttgtctctgagttccaaattgctaataatgatgcaaaatgtgaaccttctattgcattcttgccagaaaaggataaagatttggaagctaataaaacgagcttggaaggtccagcaaaaacaggccaattgtcatctgaagctagtggcagcactttgatgatctcagagccacaagtattgtttgtgtccccacaagatgggactctgtctttcatgaacaataatacgaacaaccaagagatgtggaggttcctgaatgtttcccctgataccatggataccgaaatgcagatggactctaattcattggtttacgaggcaagcttgattcagggtttcttgtaccttgacaatgagggttctccaatttgttggacagtgatgaacccggaacctcctaggcgcttgatatgtgctactgctctggaaccaaactcaaagctgtcgaaacagtatgttgaaatgaggttggagaatgatgcatcaacgtctgaacacaagaagggaggaaaattgtctgataaggctgcagatatccaagacaatgtcagtagaaaaaaacagaaagcaaacattgcttctttaaataattgcgtaagtatggacaatttaactgtcaatcctattgatcctgtagttctcaatgagggagagcagacaggtacagcaatcactgagcaggttcctgttcctttgaatctagtgcttgagaacaaaaatgacaaggaccaaggtgagcaaagcagtgaaacttcagaacaacttatgtccaaagaaccacaaaaaagggacatcaaaaggcaaaagagaacatggtctcatacatgcaagtttgatgatgatgaccttctgatgacagctgtaatatataagctgacagcacgttacaggaactcttttcatcggaagctcagaaataaattcggtttcaggcgtcttccaacataccactgggagaatgaagataaaggtgacaggaagaagtttcctggagaagcaaggacggtgttgaacaagttacttgaaatgggcattgttgctagagtggatattcttcaatgtcatggtccaggaggcaaaaatgtgttgaaggatgggaacataactgcgagtggcattcaatgccagtgctgtggtaccacattcacaatgtccaagtttaagtgtcatgcaggtctcaggcaagaagtcccatctctgaatcttttcttggatacaggcaaatcttacagtctttgtcagcttcaagcatggtctatagagcagaaggtgaggaaagagcatgcaaaggatacaatgtcccttcaagcagaccaaaacgatgatacctgtggatcatgtggcgatggtggtgaactgatatgctgtgacaattgtcctgctagttaccatcaagcctgcttgtcttgccagaccatgtaaaatgtgtatctgccaaagttccgtgcaatgaggatggatctggtacctggttttgtggaagaaaatgtcacgagatctatatgaccttccgttctcgtgttggagtgcctgatcacatggacgatgatctgtgtttcaccgttcttcgtaacaacggtgataagaaggttcgcacggcagaggagattgctctcatggctgaatgcaacatgaaactcatgatcgccacgagtatcatggaagagtgtttcctgcctattctagatcccaggacagggatagacattattccctccatattgtataactggaggtctgatttacatttcaattacaaggggttctatacagtagtcttggaaagtgatgatagcatggtatctgttgcctccataaggttgcatggtgcaattttagcagagatgcctctggtagcaacttctaaagagaatcgtcagcaggggatgtgcaggcgcctcatggattacattgaggagatgctgaaatccctgaaggtggagatgctgctcctatcagcaatcccgcacctggcggagacatggacatcgacatttgggttcagagagatagatgagtcggacaagaagaggctgagtaaggtgaggctggccgcagttccggggaccgtcctactgaagaaggacctgctgtgtgaatgttcaggcgcggacgccggtgagccgccgagccctaagcccttccaagtttactcgcgcgtgccgagaggccgcaccggtttggatgcagtgtgccaataaagatgacgcagtggatcgaatgcgccgcggtcagtcgtcgtcgtcggtgacagggggcagctggtggtcgtcacggggcctcgtctccggttgctgaagccgaggccgagcacatcagcacgcgccggtttgtgtggtggaaatggaaagcctcgttgctctggtaggagctctgaagatcgctgtcgtctgcttgtagtctgtaaatagcttctccgtcggcgagaagcccagggtccacggccattgtagaaccgaacctgtatgataaaactagaccgtgttggcgccccaccagcgtttagtagtttccgttgccctttgaactcaaagtttcaggctagtccattgtgttcgtttcagaagcctgcggttttcagggggaggggaggtgccagaaagggaggacataacgcacgtgcagaccgagtattatgtggtggtgtcgtagacacgcacgagttgacgaagctataggagcagctcgtgatgagcaatggttggtgcagatgatgatgtcaatgagctcctcccgcagggaccggacctgtggacacggatggagctgaacttgtttgaaggatgcgtagtactaataatatatgcagtcaagccagcctgaacttatttgaatgaggtgtagtactaataatatatgcagccaagccagcctgacacttt

SEQ ID NO: 20362 - DNA, 3899 bp, Zea Mays
ggcagagattgctgcgcgcgccccggagcagagcgagtgcttgccagttgccattactgttcggtgcggtgaggtagtagagggataaagaaagaagggactggaaggaaggaaggagtgagggagatgccggcttcgcctcgtatggggaggggataagggaaggccgatggcaatgccgccgtttctccctcttcgcgaatagctagtacgcgttcaaagcaactgattggctgttgatcagcaagatggatgggaaaggattgtttgcggagatagggatgaaggaggaggacattgccacaatgctgtctgggaagaaagtttccgagctggcagaggatgcgtttgatggttccaaggaagaaagacagatctttgagggtgtcttctgcctaacaaacgttgatggtggattgaatgatcattatcatggaggcattggacatactgttcatgcagggaaagtggtgacaagttctagaaaaccatcaagctctgccgacaattacaaggcagcacactgtcgcatagtagagtccttcactgctggcaacttatcaagctatcgtgtctcctgtcttggtgccgatgagcaggctcatggagcaatgcattctcctgatgctgtccgtttcaagcttgcagtgcagtggacgcctcctcgccctgatcgggtgtacactcgtagggtggtgactcgcaggagcgagagggcaagaatttgcagtgcgatggatttggagagcatcgacatttgcaatttcagtcgtcagagggatggtcgtggccatggacagctttggaaccatcttcggatgcatgcacatcttctgatggtggatgccgggtggaagattgaggccaaggaaagagacaacaggagtaaagttgatcatgtttatgtggcgccagacaatgtgacacgcctgtattctcttcccagagcatggaaatgctttggccagtggttgcttatgacaacaccctgcgtcaatggaaatgagtcaattgactacggaaaggagtggtcgaacatgcatgaatttctgtatgatctgaagaacacactgctatgcctacagtatgaggtccaacgtacgaagccagcactatctttcctctaccagtggcagctccttgatcctttcatggctgttgtttgcatcgataagaaggttgcagctcttaaagatggagtggcactgaaagctgttaacagcaccgtgacttgcctcaatcgcagtgagtgtaagatgttggatgccaagaattcaaataggtcacttggggtcaactccacaagtaaatatatgaatccatatctcagctcctgcaaaaaaagtcttctgccgcttctctctgaatctgattatcagcctgataaggaagggaatactatgcctaatgaagaagcttctctattttgtacaaacaagactagcgaagatgaagctgatcggcggtcattgtgtatgtcagaaatgaatgaaataggcataagaagcacagctcatcacatagttatgggtttacatgatgcaacagcttttcatggctcaagccaaacttgttcggggaggaaaagaaaatttccgtgcatcaagtctaaagaggataatcaaactgaagacaagtctgacccattattctttccacccagctattcatccacattaagtcatctggttgaaaatgttcaaataaatgatgttagccctcatggctatgaaaccacggagattccaaacatgggcaatcgtacagatattcttgataagatgtacctaggagagaatttattgtttgcccccgaaactggtaatatgctacttgaaactacagatgatatcaacaatgaacagcatgatgatgcagctgtctctgagccccaatcggcagataatgatggaagtggaccttctggtgcatcatcactaccaccagagaaagatgcatacatgggatctaaagaggattctattaacgactatcatgatccttcagttgtctctgagttccaaattgctaataatgatgcaaaatgtgaaccttctattgcattcttgccagaaaaggataaagatttggaagctaataaaacgagcttggaaggtccagcaaaaacaggccaattgtcatctgaagctagtggcagcactttgatgatctcagagccacaagtattgtttgtgtccccacaagatgggactctgtctttcatgaacaataatacgaacaaccaagagatgtggaggttcctgaatgtttcccctgataccatggataccgaaatgcagatggactctaattcattggtttacgaggcaagcttgattcagggtttcttgtaccttgacaatgagggttctccaatttgttggacagtgatgaacccggaacctcctaggcgcttgatatgtgctactgctctggaaccaaactcaaagctgtcgaaacagtatgttgaaatgaggttggagaatgatgcatcaacgtctgaacacaagaagggaggaaaattgtctgataaggctgcagatatccaagacaatgtcagtagaaaaaaacagaaagcaaacattgcttctttaaataattgcgtaagtatggacaatttaactgtcaatcctattgatcctgtagttctcaatgagggagagcagacaggtacagcaatcactgagcaggttcctgttcctttgaatctagtgcttgagaacaaaaatgacaaggaccaaggtgagcaaagcagtgaaacttcagaacaacttatgtccaaagaaccacaaaaaagggacatcaaaaggcaaaagagaacatggtctcatacatgcaagtttgatgatgatgaccttctgatgacagctgtaatatataagctgacagcacgttacaggaactcttttcatcggaagctcagaaataaattcggtttcaggcgtcttccaacataccactgggagaatgaagataaaggtgacaggaagaagtttcctggagaagcaaggacggtgttgaacaagttacttgaaatgggcattgttgctagagtggatattcttcaatgtcatggtccaggaggcaaaaatgtgttgaaggatgggaacataactgcgagtggcattcaatgccagtgctgtggtaccacattcacaatgtccaagtttaagtgtcatgcaggtctcaggcaagaagtcccatctctgaatcttttcttggatacaggcaaatcttacagtctttgtcagcttcaagcatggtctatagagcagaaggtgaggaaagagcatgcaaaggatacaatgtcccttcaagcagaccaaaacgatgatacctgtggatcatgtggcgatggtggtgaactgatatgctgtgacaattgtcctgctagttaccatcaagcctgcttgtcttgccaggatattccagatggcaactggtactgctctagctgcctttgcgacatttgtggtgaagtaatcgattcaaaggagcttgtaacttcccttcctgctttagattgctcacagtgcgaacgccaataccatgtaaaatgtgtatctgccaaagttccgtgcaatgaggatggatctggtacctggttttgtggaagaaaatgtcacgagatctatatgaccttccgttctcgtgttggagtgcctgatcacatggacgatgatctgtgtttcaccgttcttcgtaacaacggtgataagaaggttcgcacggcagaggagattgctctcatggctgaatgcaacatgaaactcatgatcgccacgagtatcatggaagagtgtttcctgcctattctagatcccaggacagggatagacattattccctccatattgtataactggaggttggttttcttttgtcgttttggccattcg

SEQ ID NO: 20363 - DNA, 5089 bp, Zea Mays
ggcagagattgctgcgcgcgccccggagcagagcgagtgcttgccagttgccattactgttcggtgcggtgaggtagtagagggataaagaaagaagggactggaaggaaggaaggagtgagggagatgccggcttcgcctcgtatggggaggggataagggaaggccgatggcaatgccgccgtttctccctcttcgcgaatagctagtacgcgttcaaagcaactgattggctgttgatcagcaagatggatgggaaaggattgtttgcggagatagggatgaaggaggaggacattgccacaatgctgtctgggaagaaagtttccgagctggcagaggatgcgtttgatggttccaaggaagaaagacagatctttgagggtgtcttctgcctaacaaacgttgatggtggattgaatgatcattatcatggaggcattggacatactgttcatgcagggaaagtggtgacaagttctagaaaaccatcaagctctgccgacaattacaaggcagcacactgtcgcatagtagagtccttcactgctggcaacttatcaagctatcgtgtctcctgtcttggtgccgatgagcaggctcatggagcaatgcattctcctgatgctgtccgtttcaagcttgcagtgcagtggacgcctcctcgccctgatcgggtgtacactcgtagggtggtgactcgcaggagcgagagggcaagaatttgcagtgcgatggatttggagagcatcgacatttgcaatttcagtcgtcagagggatggtcgtggccatggacagctttggaaccatcttcggatgcatgcacatcttctgatggtggatgccgggtggaagattgaggccaaggaaagagacaacaggagtaaagttgatcatgtttatgtggcgccagacaatgtgacacgcctgtattctcttcccagagcatggaaatgctttggccagtggttgcttatgacaacaccctgcgtcaatggaaatgagtcaattgactacggaaaggagtggtcgaacatgcatgaatttctgtatgatctgaagaacacactgctatgcctacagtatgaggtccaacgtacgaagccagcactatctttcctctaccagtggcagctccttgatcctttcatggctgttgtttgcatcgataagaaggttgcagctcttaaagatggagtggcactgaaagctgttaacagcaccgtgacttgcctcaatcgcagtgagtgtaagatgttggatgccaagaattcaaataggtcacttggggtcaactccacaagtaaatatatgaatccatatctcagctcctgcaaaaaaagtcttctgccgcttctctctgaatctgattatcagcctgataaggaagggaatactatgcctaatgaagaagcttctctattttgtacaaacaagactagcgaagatgaagctgatcggcggtcattgtgtatgtcagaaatgaatgaaataggcataagaagcacagctcatcacatagttatgggtttacatgatgcaacagcttttcatggctcaagccaaacttgttcggggaggaaaagaaaatttccgtgcatcaagtctaaagaggataatcaaactgaagacaagtctgacccattattctttccacccagctattcatccacattaagtcatctggttgaaaatgttcaaataaatgatgttagccctcatggctatgaaaccacggagattccaaacatgggcaatcgtacagatattcttgataagatgtacctaggagagaatttattgtttgcccccgaaactggtaatatgctacttgaaactacagatgatatcaacaatgaacagcatgatgatgcagctgtctctgagccccaatcggcagataatgatggaagtggaccttctggtgcatcatcactaccaccagagaaagatgcatacatgggatctaaagaggattctattaacgactatcatgatccttcagttgtctctgagttccaaattgctaataatgatgcaaaatgtgaaccttctattgcattcttgccagaaaaggataaagatttggaagctaataaaacgagcttggaaggtccagcaaaaacaggccaattgtcatctgaagctagtggcagcactttgatgatctcagagccacaagtattgtttgtgtccccacaagatgggactctgtctttcatgaacaataatacgaacaaccaagagatgtggaggttcctgaatgtttcccctgataccatggataccgaaatgcagatggactctaattcattggtttacgaggcaagcttgattcagggtttcttgtaccttgacaatgagggttctccaatttgttggacagtgatgaacccggaacctcctaggcgcttgatatgtgctactgctctggaaccaaactcaaagctgtcgaaacagtatgttgaaatgaggttggagaatgatgcatcaacgtctgaacacaagaagggaggaaaattgtctgataaggctgcagatatccaagacaatgtcagtagaaaaaaacagaaagcaaacattgcttctttaaataattgcgtaagtatggacaatttaactgtcaatcctattgatcctgtagttctcaatgagggagagcagacaggtacagcaatcactgagcaggttcctgttcctttgaatctagtgcttgagaacaaaaatgacaaggaccaaggtgagcaaagcagtgaaacttcagaacaacttatgtccaaagaaccacaaaaaagggacatcaaaaggcaaaagagaacatggtctcatacatgcaagtttgatgatgatgaccttctgatgacagctgtaatatataagctgacagcacgttacaggaactcttttcatcggaagctcagaaataaattcggtttcaggcgtcttccaacataccactgggagaatgaagataaaggtgacaggaagaagtttcctggagaagcaaggacggtgttgaacaagttacttgaaatgggcattgttgctagagtggatattcttcaatgtcatggtccaggaggcaaaaatgtgttgaaggatgggaacataactgcgagtggcattcaatgccagtgctgtggtaccacattcacaatgtccaagtttaagtgtcatgcaggtctcaggcaagaagtcccatctctgaatcttttcttggatacaggcaaatcttacagtctttgtcagcttcaagcatggtctatagagcagaaggtgaggaaagagcatgcaaaggatacaatgtcccttcaagcagaccaaaacgatgatacctgtggatcatgtggcgatggtggtgaactgatatgctgtgacaattgtcctgctagttaccatcaagcctgcttgtcttgccagatggcaactggtactgctctagctgcctttgcgacatttgtggtgaagtaatcgattcaaaggagcttgtaacttcccttcctgctttagattgctcacagtgcgaacgccaatatcatcaacacacacacacacgggcagggcagactgctttttaaccaagcctagatcaagatttgaatgacctaaaactttttgaccatgtaaaatgtgtatctgccaaagttccgtgcaatgaggatggatctggtacctggttttgtggaagaaaatgtcacgagatctatatgaccttccgttctcgtgttggagtgcctgatcacatggacgatgatctgtgtttcaccgttcttcgtaacaacggtgataagaaggttcgcacggcagaggagattgctctcatggctgaatgcaacatgaaactcatgatcgccacgagtatcatggaagagtgtttcctgcctattctagatcccaggacagggatagacattattccctccatattgtataactggaggtctgatttacatttcaattacaaggggttctatacagtagtcttggaaagtgatgatagcatggtatctgttgcctccataaggttgcatggtgcaattttagcagagatgcctctggtagcaacttctaaagagaatcgtcagcaggggatgtgcaggcgcctcatggattacattgaggagatgctgaaatccctgaaggtggagatgctgctcctatcagcaatcccgcacctggcggagacatggacatcgacatttgggttcagagagatagatgagtcggacaagaagaggctgagtaaggtgaggctggccgcagttccggggaccgtcctactgaagaaggacctgctgtgtgaatgttcaggcgcggacgccggtgagccgccgagccctaagcccttccaagtttactcgcgcgtgccgagaggccgcaccggtttggatgcagtgtgccaataaagatgacgcagtggatcgaatgcgccgcggtcagtcgtcgtcgtcggtgacagggggcagctggtggtcgtcacggggcctcgtctccggttgctgaagccgaggccgagcacatcagcacgcgccggtttgtgtggtggaaatggaaagcctcgttgctctggtaggagctctgaagatcgctgtcgtctgcttgtagtctgtaaatagcttctccgtcggcgagaagcccagggtccacggccattgtagaaccgaacctgtatgataaaactagaccgtgttggcgccccaccagcgtttagtagtttccgttgccctttgaactcaaagtttcaggctagtccattgtgttcgtttcagaagcctgcggttttcagggggaggggaggtgccagaaagggaggacataacgcacgtgcagaccgagtattatgtggtggtgtcgtagacacgcacgagttgacgaagctataggagcagctcgtgatgagcaatggttggtgcagatgatgatgtcaatgagctcctcccgcagggaccggacctgtggacacggatggagctgaacttgtttgaaggatgcgtagtactaataatatatgcagtcaagccagcctgaacttatttgaatgaggtgtagtactaataatatatgcagccaagccagcctgacacttt

SEQ ID NO: 20364 - DNA, 5005 bp, Zea Mays
ggcagagattgctgcgcgcgccccggagcagagcgagtgcttgccagttgccattactgttcggtgcggtgaggtagtagagggataaagaaagaagggactggaaggaaggaaggagtgagggagatgccggcttcgcctcgtatggggaggggataagggaaggccgatggcaatgccgccgtttctccctcttcgcgaatagctagtacgcgttcaaagcaactgattggctgttgatcagcaagatggatgggaaaggattgtttgcggagatagggatgaaggaggaggacattgccacaatgctgtctgggaagaaagtttccgagctggcagaggatgcgtttgatggttccaaggaagaaagacagatctttgagggtgtcttctgcctaacaaacgttgatggtggattgaatgatcattatcatggaggcattggacatactgttcatgcagggaaagtggtgacaagttctagaaaaccatcaagctctgccgacaattacaaggcagcacactgtcgcatagtagagtccttcactgctggcaacttatcaagctatcgtgtctcctgtcttggtgccgatgagcaggctcatggagcaatgcattctcctgatgctgtccgtttcaagcttgcagtgcagtggacgcctcctcgccctgatcgggtgtacactcgtagggtggtgactcgcaggagcgagagggcaagaatttgcagtgcgatggatttggagagcatcgacatttgcaatttcagtcgtcagagggatggtcgtggccatggacagctttggaaccatcttcggatgcatgcacatcttctgatggtggatgccgggtggaagattgaggccaaggaaagagacaacaggagtaaagttgatcatgtttatgtggcgccagacaatgtgacacgcctgtattctcttcccagagcatggaaatgctttggccagtggttgcttatgacaacaccctgcgtcaatggaaatgagtcaattgactacggaaaggagtggtcgaacatgcatgaatttctgtatgatctgaagaacacactgctatgcctacagtatgaggtccaacgtacgaagccagcactatctttcctctaccagtggcagctccttgatcctttcatggctgttgtttgcatcgataagaaggttgcagctcttaaagatggagtggcactgaaagctgttaacagcaccgtgacttgcctcaatcgcagtgagtgtaagatgttggatgccaagaattcaaataggtcacttggggtcaactccacaagtaaatatatgaatccatatctcagctcctgcaaaaaaagtcttctgccgcttctctctgaatctgattatcagcctgataaggaagggaatactatgcctaatgaagaagcttctctattttgtacaaacaagactagcgaagatgaagctgatcggcggtcattgtgtatgtcagaaatgaatgaaataggcataagaagcacagctcatcacatagttatgggtttacatgatgcaacagcttttcatggctcaagccaaacttgttcggggaggaaaagaaaatttccgtgcatcaagtctaaagaggataatcaaactgaagacaagtctgacccattattctttccacccagctattcatccacattaagtcatctggttgaaaatgttcaaataaatgatgttagccctcatggctatgaaaccacggagattccaaacatgggcaatcgtacagatattcttgataagatgtacctaggagagaatttattgtttgcccccgaaactggtaatatgctacttgaaactacagatgatatcaacaatgaacagcatgatgatgcagctgtctctgagccccaatcggcagataatgatggaagtggaccttctggtgcatcatcactaccaccagagaaagatgcatacatgggatctaaagaggattctattaacgactatcatgatccttcagttgtctctgagttccaaattgctaataatgatgcaaaatgtgaaccttctattgcattcttgccagaaaaggataaagatttggaagctaataaaacgagcttggaaggtccagcaaaaacaggccaattgtcatctgaagctagtggcagcactttgatgatctcagagccacaagtattgtttgtgtccccacaagatgggactctgtctttcatgaacaataatacgaacaaccaagagatgtggaggttcctgaatgtttcccctgataccatggataccgaaatgcagatggactctaattcattggtttacgaggcaagcttgattcagggtttcttgtaccttgacaatgagggttctccaatttgttggacagtgatgaacccggaacctcctaggcgcttgatatgtgctactgctctggaaccaaactcaaagctgtcgaaacagtatgttgaaatgaggttggagaatgatgcatcaacgtctgaacacaagaagggaggaaaattgtctgataaggctgcagatatccaagacaatgtcagtagaaaaaaacagaaagcaaacattgcttctttaaataattgcgtaagtatggacaatttaactgtcaatcctattgatcctgtagttctcaatgagggagagcagacaggtacagcaatcactgagcaggttcctgttcctttgaatctagtgcttgagaacaaaaatgacaaggaccaaggtgagcaaagcagtgaaacttcagaacaacttatgtccaaagaaccacaaaaaagggacatcaaaaggcaaaagagaacatggtctcatacatgcaagtttgatgatgatgaccttctgatgacagctgtaatatataagctgacagcacgttacaggaactcttttcatcggaagctcagaaataaattcggtttcaggcgtcttccaacataccactgggagaatgaagataaaggtgacaggaagaagtttcctggagaagcaaggacggtgttgaacaagttacttgaaatgggcattgttgctagagtggatattcttcaatgtcatggtccaggaggcaaaaatgtgttgaaggatgggaacataactgcgagtggcattcaatgccagtgctgtggtaccacattcacaatgtccaagtttaagtgtcatgcaggtctcaggcaagaagtcccatctctgaatcttttcttggatacaggcaaatcttacagtctttgtcagcttcaagcatggtctatagagcagaaggtgaggaaagagcatgcaaaggatacaatgtcccttcaagcagaccaaaacgatgatacctgtggatcatgtggcgatggtggtgaactgatatgctgtgacaattgtcctgctagttaccatcaagcctgcttgtcttgccagatggcaactggtactgctctagctgcctttgcgacatttgtggtgaagtaatcgattcaaaggagcttgtaacttcccttcctgctttagattgctcacagtgcgaacgccaataccatgtaaaatgtgtatctgccaaagttccgtgcaatgaggatggatctggtacctggttttgtggaagaaaatgtcacgagatctatatgaccttccgttctcgtgttggagtgcctgatcacatggacgatgatctgtgtttcaccgttcttcgtaacaacggtgataagaaggttcgcacggcagaggagattgctctcatggctgaatgcaacatgaaactcatgatcgccacgagtatcatggaagagtgtttcctgcctattctagatcccaggacagggatagacattattccctccatattgtataactggaggtctgatttacatttcaattacaaggggttctatacagtagtcttggaaagtgatgatagcatggtatctgttgcctccataaggttgcatggtgcaattttagcagagatgcctctggtagcaacttctaaagagaatcgtcagcaggggatgtgcaggcgcctcatggattacattgaggagatgctgaaatccctgaaggtggagatgctgctcctatcagcaatcccgcacctggcggagacatggacatcgacatttgggttcagagagatagatgagtcggacaagaagaggctgagtaaggtgaggctggccgcagttccggggaccgtcctactgaagaaggacctgctgtgtgaatgttcaggcgcggacgccggtgagccgccgagccctaagcccttccaagtttactcgcgcgtgccgagaggccgcaccggtttggatgcagtgtgccaataaagatgacgcagtggatcgaatgcgccgcggtcagtcgtcgtcgtcggtgacagggggcagctggtggtcgtcacggggcctcgtctccggttgctgaagccgaggccgagcacatcagcacgcgccggtttgtgtggtggaaatggaaagcctcgttgctctggtaggagctctgaagatcgctgtcgtctgcttgtagtctgtaaatagcttctccgtcggcgagaagcccagggtccacggccattgtagaaccgaacctgtatgataaaactagaccgtgttggcgccccaccagcgtttagtagtttccgttgccctttgaactcaaagtttcaggctagtccattgtgttcgtttcagaagcctgcggttttcagggggaggggaggtgccagaaagggaggacataacgcacgtgcagaccgagtattatgtggtggtgtcgtagacacgcacgagttgacgaagctataggagcagctcgtgatgagcaatggttggtgcagatgatgatgtcaatgagctcctcccgcagggaccggacctgtggacacggatggagctgaacttgtttgaaggatgcgtagtactaataatatatgcagtcaagccagcctgaacttatttgaatgaggtgtagtactaataatatatgcagccaagccagcctgacacttt

SEQ ID NO: 20365 - DNA, 5015 bp, Zea Mays
cagagattgctgcgcgcgccccggagcagagcgagtgcttgccagttgccattactgttcggtgcggtgaggtagtagagggataaagaaagaagggactggaaggaaggaaggagtgagggagatgccggcttcgcctcgtatggggaggggataagggaaggccgatggcaatgccgccgtttctccctcttcgcgagaatagctagtacgcgttcaaagcaactgattggctgttgatcagcaagatggatgggaaaggattgtttgcggagatagggatgaaggaggaggacattgccacaatgctgtctgggaagaaagtttccgagctggcagaggatgcgtttgatggttccaaggaagaaagacagatctttgagggtgtcttctgcctaacaaacgttgatggtggattgaatgatcattatcatggaggcattggacatactgttcatgcagggaaagtggtgacaagttctagaaaaccatcaagctctgccgacaattacaaggcagcacactgtcgcatagtagagtccttcactgctggcaacttatcaagctatcgtgtctcctgtcttggtgccgatgagcaggctcatggagcaatgcattctcctgatgctgtccgtttcaagcttgcagtgcagtggacgcctcctcgccctgatcgggtgtacactcgtagggtggtgactcgcaggagcgagagggcaagaatttgcagtgcgatggatttggagagcatcgacatttgcaatttcagtcgtcagagggatggtcgtggccatggacagctttggaaccatcttcggatgcatgcacatcttctgatggtggatgccgggtggaagattgaggccaaggaaagagacaacaggagtaaagttgatcatgtttatgtggcgccagacaatgtgacacgcctgtattctcttcccagagcatggaaatgctttggccagtggttgcttatgacaacaccctgcgtcaatggaaatgagtcaattgactacggaaaggagtggtcgaacatgcatgaatttctgtatgatctgaagaacacactgctatgcctacagtatgaggtccaacgtacgaagccagcactatctttcctctaccagtggcagctccttgatcctttcatggctgttgtttgcatcgataagaaggttgcagctcttaaagatggagtggcactgaaagctgttaacagcaccgtgacttgcctcaatcgcagtgagtgtaagatgttggatgccaagaattcaaataggtcacttggggtcaactccacaagtaaatatatgaatccatatctcagctcctgcaaaaaaagtcttctgccgcttctctctgaatctgattatcagcctgataaggaagggaatactatgcctaatgaagaagcttctctattttgtacaaacaagactagcgaagatgaagctgatcggcggtcattgtgtatgtcagaaatgaatgaaataggcataagaagcacagctcatcacatagttatgggtttacatgatgcaacagcttttcatggctcaagccaaacttgttcggggaggaaaagaaaatttccgtgcatcaagtctaaagaggataatcaaactgaagacaagtctgacccattattctttccacccagctattcatccacattaagtcatctggttgaaaatgttcaaataaatgatgttagccctcatggctatgaaaccacggagattccaaacatgggcaatcgtacagatattcttgataagatgtacctaggagagaatttattgtttgcccccgaaactggtaatatgctacttgaaactacagatgatatcaacaatgaacagcatgatgatgcagctgtctctgagccccaatcggcagataatgatggaagtggaccttctggtgcatcatcactaccaccagagaaagatgcatacatgggatctaaagaggattctattaacgactatcatgatccttcagttgtctctgagttccaaattgctaataatgatgcaaaatgtgaaccttctattgcattcttgccagaaaaggataaagatttggaagctaataaaacgagcttggaaggtccagcaaaaacaggccaattgtcatctgaagctagtggcagcactttgatgatctcagagccacaagtattgtttgtgtccccacaagatgggactctgtctttcatgaacaataatacgaacaaccaagagatgtggaggttcctgaatgtttcccctgataccatggataccgaaatgcagatggactctaattcattggtttacgaggcaagcttgattcagggtttcttgtaccttgacaatgagggttctccaatttgttggacagtgatgaacccggaacctcctaggcgcttgatatgtgctactgctctggaaccaaactcaaagctgtcgaaacagtatgttgaaatgaggttggagaatgatgcatcaacgtctgaacacaagaagggaggaaaattgtctgataaggctgcagatatccaagacaatgtcagtagaaaaaaacagaaagcaaacattgcttctttaaataattgcgtaagtatggacaatttaactgtcaatcctattgatcctgtagttctcaatgagggagagcagacaggtacagcaatcactgagcaggttcctgttcctttgaatctagtgcttgagaacaaaaatgacaaggaccaaggtgagcaaagcagtgaaacttcagaacaacttatgtccaaagaaccacaaaaaagggacatcaaaaggcaaaagagaacatggtctcatacatgcaagtttgatgatgatgaccttctgatgacagctgtaatatataagctgacagcacgttacaggaactcttttcatcggaagctcagaaataaattcggtttcaggcgtcttccaacataccactgggagaatgaagataaaggtgacaggaagaagtttcctggagaagcaaggacggtgttgaacaagttacttgaaatgggcattgttgctagagtggatattcttcaatgtcatggtccaggaggcaaaaatgtgttgaaggatgggaacataactgcgagtggcattcaatgccagtgctgtggtaccacattcacaatgtccaagtttaagtgtcatgcaggtctcaggcaagaagtcccatctctgaatcttttcttggatacaggcaaatcttacagtctttgtcagcttcaagcatggtctatagagcagaaggtgaggaaagagcatgcaaaggatacaatgtcccttcaagcagaccaaaacgatgatacctgtggatcatgtggcgatggtggtgaactgatatgctgtgacaattgtcctgctagttaccatcaagcctgcttgtcttgccaggatattccagatggcaactggtactgctctagctgcctttgcgacatttgtggtgaagtaatcgattcaaaggagcttgtaacttcccttcctgctttagattgctcacagtgcgaacgccaataccatgtaaaatgtgtatctgccaaagttccgtgcaatgaggatggatctggtacctggttttgtggaagaaaatgtcacgagatctatatgaccttccgttctcgtgttggagtgcctgatcacatggacgatgatctgtgtttcaccgttcttcgtaacaacggtgataagaaggttcgcacggcagaggagattgctctcatggctgaatgcaacatgaaactcatgatcgccacgagtatcatggaagagtgtttcctgcctattctagatcccaggacagggatagacattattccctccatattgtataactggaggtctgatttacatttcaattacaaggggttctatacagtagtcttggaaagtgatgatagcatggtatctgttgcctccataaggttgcatggtgcaattttagcagagatgcctctggtagcaacttctaaagagaatcgtcagcaggggatgtgcaggcgcctcatggattacattgaggagatgctgaaatccctgaaggtggagatgctgctcctatcagcaatcccgcacctggcggagacatggacatcgacatttgggttcagagagatagatgagtcggacaagaagaggctgagtaaggtgaggctggccgcagttccggggaccgtcctactgaagaaggacctgctgtgtgaatgttcaggcgcggacgccggtgagccgccgagccctaagcccttccaagtttactcgcgcgtgccgagaggccgcaccggtttggatgcagtgtgccaataaagatgacgcagtggatcgaatgcgccgcggtcagtcgtcgtcgtcggtgacagggggcagctggtggtcgtcacggggcctcgtctccggttgctgaagccgaggccgagcacatcagcacgcgccggtttgtgtggtggaaatggaaagcctcgttgctctggtaggagctctgaagatcgctgtcgtctgcttgtagtctgtaaatagcttctccgtcggcgagaagcccagggtccacggccattgtagaaccgaacctgtatgataaaactagaccgtgttggcgccccaccagcgtttagtagtttccgttgccctttgaactcaaagtttcaggctagtccattgtgttcgtttcagaagcctgcggttttcagggggaggggaggtgccagaaagggaggacataacgcacgtgcagaccgagtattatgtggtggtgtcgtagacacgcacgagttgacgaagctataggagcagctcgtgatgagcaatggttggtgcagatgatgatgtcaatgagctcctcccgcagggaccggacctgtggacacggatggagctgaacttgtttgaaggatgcgtagtactaataatatatgcagtcaagccagcctgaacttatttgaatgaggtgtagtactaataatatatgcagccaagccagcctgacacttt

SEQ ID NO: 20366 - DNA, 3343 bp, Zea Mays
ctcatctatccctgaaccatgcatgttttcgccgtgtccctttgatctccttggtgtatggtgggcttcttgatgggggaaatgcagctgctgccttctgcggtctaatcgatcagttcgtcagatggaggattgatccgttggcgcccctacggatagcggggtggtcaaagaatagctagtacgcgttcaaagcaactgattggctgttgatcagcaagatggatgggaaaggattgtttgcggagatagggatgaaggaggaggacattgccacaatgctgtctgggaagaaagtttccgagctggcagaggatgcgtttgatggttccaaggaagaaagacagatctttgagggtgtcttctgcctaacaaacgttgatggtggattgaatgatcattatcatggaggcattggacatactgttcatgcagggaaagtggtgacaagttctagaaaaccatcaagctctgccgacaattacaaggcagcacactgtcgcatagtagagtccttcactgctggcaacttatcaagctatcgtgtctcctgtcttggtgccgatgagcaggctcatggagcaatgcattctcctgatgctgtccgtttcaagcttgcagtgcagtggacgcctcctcgccctgatcgggtgtacactcgtagggtggtgactcgcaggagcgagagggcaagaatttgcagtgcgatggatttggagagcatcgacatttgcaatttcagtcgtcagagggatggtcgtggccatggacagctttggaaccatcttcggatgcatgcacatcttctgatggtggatgccgggtggaagattgaggccaaggaaagagacaacaggagtaaagttgatcatgtttatgtggcgccagacaatgtgacacgcctgtattctcttcccagagcatggaaatgctttggccagtggttgcttatgacaacaccctgcgtcaatggaaatgagtcaattgactacggaaaggagtggtcgaacatgcatgaatttctgtatgatctgaagaacacactgctatgcctacagtatgaggtccaacgtacgaagccagcactatctttcctctaccagtggcagctccttgatcctttcatggctgttgtttgcatcgataagaaggttgcagctcttaaagatggagtggcactgaaagctgttaacagcaccgtgacttgcctcaatcgcagtgagtgtaagatgttggatgccaagaattcaaataggtcacttggggtcaactccacaagtaaatatatgaatccatatctcagctcctgcaaaaaaagtcttctgccgcttctctctgaatctgattatcagcctgataaggaagggaatactatgcctaatgaagaagcttctctattttgtacaaacaagactagcgaagatgaagctgatcggcggtcattgtgtatgtcagaaatgaatgaaataggcataagaagcacagctcatcacatagttatgggtttacatgatgcaacagcttttcatggctcaagccaaacttgttcggggaggaaaagaaaatttccgtgcatcaagtctaaagaggataatcaaactgaagacaagtctgacccattattctttccacccagctattcatccacattaagtcatctggttgaaaatgttcaaataaatgatgttagccctcatggctatgaaaccacggagattccaaacatgggcaatcgtacagatattcttgataagatgtacctaggagagaatttattgtttgcccccgaaactggtaatatgctacttgaaactacagatgatatcaacaatgaacagcatgatgatgcagctgtctctgagccccaatcggcagataatgatggaagtggaccttctggtgcatcatcactaccaccagagaaagatgcatacatgggatctaaagaggattctattaacgactatcatgatccttcagttgtctctgagttccaaattgctaataatgatgcaaaatgtgaaccttctattgcattcttgccagaaaaggataaagatttggaagctaataaaacgagcttggaaggtccagcaaaaacaggccaattgtcatctgaagctagtggcagcactttgatgatctcagagccacaagtattgtttgtgtccccacaagatgggactctgtctttcatgaacaataatacgaacaaccaagagatgtggaggttcctgaatgtttcccctgataccatggataccgaaatgcagatggactctaattcattggtttacgaggcaagcttgattcagggtttcttgtaccttgacaatgagggttctccaatttgttggacagtgatgaacccggaacctcctaggcgcttgatatgtgctactgctctggaaccaaactcaaagctgtcgaaacagtatgttgaaatgaggttggagaatgatgcatcaacgtctgaacacaagaagggaggaaaattgtctgataaggctgcagatatccaagacaatgttcctgttcctttgaatctagtgcttgagaacaaaaatgacaaggaccaaggtgagcaaagcagtgaaacttcagaacaacttatgtccaaagaaccacaaaaaagggacatcaaaaggcaaaagagaacatggtctcatacatgcaagtttgatgatgatgaccttctgatgacagctgtaatatataagctgacagcacgttacaggaactcttttcatcggaagctcagaaataaattcggtttcaggcgtcttccaacataccactgggagaatgaagataaaggtgacaggaagaagtttcctggagaagcaaggacggtgttgaacaagttacttgaaatgggcattgttgctagagtggatattcttcaatgtcatggtccaggaggcaaaaatgtgttgaaggatgggaacataactgcgagtggcattcaatgccagtgctgtggtaccacattcacaatgtccaagtttaagtgtcatgcaggtctcaggcaagaagtcccatctctgaatcttttcttggatacaggcaaatcttacagtctttgtcagcttcaagcatggtctatagagcagaaggtgaggaaagagcatgcaaaggatacaatgtcccttcaagcagaccaaaacgatgatacctgtggatcatgtggcgatggtggtgaactgatatgctgtgacaattgtcctgctagttaccatcaagcctgcttgtcttgccagtttgcgcaaagaaagagggactccaagaatgccggtgctgctgcccgcccaccccctcgtggatcgagctttttaaacttccc

SEQ ID NO: 20367 - DNA, 4712 bp, Zea Mays
tggcgcccctacggatagcggggtggtcaaagaatagctagtacgcgttcaaagcaactgattggctgttgatcagcaagatggatgggaaaggattgtttgcggagatagggatgaaggaggaggacattgccacaatgctgtctgggaagaaagtttccgagctggcagaggatgcgtttgatggttccaaggaagaaagacagatctttgagggtgtcttctgcctaacaaacgttgatggtggattgaatgatcattatcatggaggcattggacatactgttcatgcagggaaagtggtgacaagttctagaaaaccatcaagctctgccgacaattacaaggcagcacactgtcgcatagtagagtccttcactgctggcaacttatcaagctatcgtgtctcctgtcttggtgccgatgagcaggctcatggagcaatgcattctcctgatgctgtccgtttcaagcttgcagtgcagtggacgcctcctcgccctgatcgggtgtacactcgtagggtggtgactcgcaggagcgagagggcaagaatttgcagtgcgatggatttggagagcatcgacatttgcaatttcagtcgtcagagggatggtcgtggccatggacagctttggaaccatcttcggatgcatgcacatcttctgatggtggatgccgggtggaagattgaggccaaggaaagagacaacaggagtaaagttgatcatgtttatgtggcgccagacaatgtgacacgcctgtattctcttcccagagcatggaaatgctttggccagtggttgcttatgacaacaccctgcgtcaatggaaatgagtcaattgactacggaaaggagtggtcgaacatgcatgaatttctgtatgatctgaagaacacactgctatgcctacagtatgaggtccaacgtacgaagccagcactatctttcctctaccagtggcagctccttgatcctttcatggctgttgtttgcatcgataagaaggttgcagctcttaaagatggagtggcactgaaagctgttaacagcaccgtgacttgcctcaatcgcagtgagtgtaagatgttggatgccaagaattcaaataggtcacttggggtcaactccacaagtaaatatatgaatccatatctcagctcctgcaaaaaaagtcttctgccgcttctctctgaatctgattatcagcctgataaggaagggaatactatgcctaatgaagaagcttctctattttgtacaaacaagactagcgaagatgaagctgatcggcggtcattgtgtatgtcagaaatgaatgaaataggcataagaagcacagctcatcacatagttatgggtttacatgatgcaacagcttttcatggctcaagccaaacttgttcggggaggaaaagaaaatttccgtgcatcaagtctaaagaggataatcaaactgaagacaagtctgacccattattctttccacccagctattcatccacattaagtcatctggttgaaaatgttcaaataaatgatgttagccctcatggctatgaaaccacggagattccaaacatgggcaatcgtacagatattcttgataagatgtacctaggagagaatttattgtttgcccccgaaactggtaatatgctacttgaaactacagatgatatcaacaatgaacagcatgatgatgcagctgtctctgagccccaatcggcagataatgatggaagtggaccttctggtgcatcatcactaccaccagagaaagatgcatacatgggatctaaagaggattctattaacgactatcatgatccttcagttgtctctgagttccaaattgctaataatgatgcaaaatgtgaaccttctattgcattcttgccagaaaaggataaagatttggaagctaataaaacgagcttggaaggtccagcaaaaacaggccaattgtcatctgaagctagtggcagcactttgatgatctcagagccacaagtattgtttgtgtccccacaagatgggactctgtctttcatgaacaataatacgaacaaccaagagatgtggaggttcctgaatgtttcccctgataccatggataccgaaatgcagatggactctaattcattggtttacgaggcaagcttgattcagggtttcttgtaccttgacaatgagggttctccaatttgttggacagtgatgaacccggaacctcctaggcgcttgatatgtgctactgctctggaaccaaactcaaagctgtcgaaacagtatgttgaaatgaggttggagaatgatgcatcaacgtctgaacacaagaagggaggaaaattgtctgataaggctgcagatatccaagacaatgttcctgttcctttgaatctagtgcttgagaacaaaaatgacaaggaccaaggtgagcaaagcagtgaaacttcagaacaacttatgtccaaagaaccacaaaaaagggacatcaaaaggcaaaagagaacatggtctcatacatgcaagtttgatgatgatgaccttctgatgacagctgtaatatataagctgacagcacgttacaggaactcttttcatcggaagctcagaaataaattcggtttcaggcgtcttccaacataccactgggagaatgaagataaaggtgacaggaagaagtttcctggagaagcaaggacggtgttgaacaagttacttgaaatgggcattgttgctagagtggatattcttcaatgtcatggtccaggaggcaaaaatgtgttgaaggatgggaacataactgcgagtggcattcaatgccagtgctgtggtaccacattcacaatgtccaagtttaagtgtcatgcaggtctcaggcaagaagtcccatctctgaatcttttcttggatacaggcaaatcttacagtctttgtcagcttcaagcatggtctatagagcagaaggtgaggaaagagcatgcaaaggatacaatgtcccttcaagcagaccaaaacgatgatacctgtggatcatgtggcgatggtggtgaactgatatgctgtgacaattgtcctgctagttaccatcaagcctgcttgtcttgccaggatattccagatggcaactggtactgctctagctgcctttgcgacatttgtggtgaagtaatcgattcaaaggagcttgtaacttcccttcctgctttagattgctcacagtgcgaacgccaataccatgtaaaatgtgtatctgccaaagttccgtgcaatgaggatggatctggtacctggttttgtggaagaaaatgtcacgagatctatatgaccttccgttctcgtgttggagtgcctgatcacatggacgatgatctgtgtttcaccgttcttcgtaacaacggtgataagaaggttcgcacggcagaggagattgctctcatggctgaatgcaacatgaaactcatgatcgccacgagtatcatggaagagtgtttcctgcctattctagatcccaggacagggatagacattattccctccatattgtataactggaggtctgatttacatttcaattacaaggggttctatacagtagtcttggaaagtgatgatagcatggtatctgttgcctccataaggttgcatggtgcaattttagcagagatgcctctggtagcaacttctaaagagaatcgtcagcaggggatgtgcaggcgcctcatggattacattgaggagatgctgaaatccctgaaggtggagatgctgctcctatcagcaatcccgcacctggcggagacatggacatcgacatttgggttcagagagatagatgagtcggacaagaagaggctgagtaaggtgaggctggccgcagttccggggaccgtcctactgaagaaggacctgctgtgtgaatgttcaggcgcggacgccggtgagccgccgagccctaagcccttccaagtttactcgcgcgtgccgagaggccgcaccggtttggatgcagtgtgccaataaagatgacgcagtggatcgaatgcgccgcggtcagtcgtcgtcgtcggtgacagggggcagctggtggtcgtcacggggcctcgtctccggttgctgaagccgaggccgagcacatcagcacgcgccggtttgtgtggtggaaatggaaagcctcgttgctctggtaggagctctgaagatcgctgtcgtctgcttgtagtctgtaaatagcttctccgtcggcgagaagcccagggtccacggccattgtagaaccgaacctgtatgataaaactagaccgtgttggcgccccaccagcgtttagtagtttccgttgccctttgaactcaaagtttcaggctagtccattgtgttcgtttcagaagcctgcggttttcagggggaggggaggtgccagaaagggaggacataacgcacgtgcagaccgagtattatgtggtggtgtcgtagacacgcacgagttgacgaagctataggagcagctcgtgatgagcaatggttggtgcagatgatgatgtcaatgagctcctcccgcagggaccggacctgtggacacggatggagctgaacttgtttgaaggatgcgtagtactaataatatatgcagtcaagccagcctgaacttatttgaatgaggtgtagtactaataatatatgcagccaagccagcctgacacttt

SEQ ID NO: 20368 - DNA, 4906 bp, Zea Mays
caattattttagggaacttgttccctgcgtttgtcgactgataagttggataccggatggctactcctgttggcacagagccatggaatgtgaatagctagtacgcgttcaaagcaactgattggctgttgatcagcaagatggatgggaaaggattgtttgcggagatagggatgaaggaggaggacattgccacaatgctgtctgggaagaaagtttccgagctggcagaggatgcgtttgatggttccaaggaagaaagacagatctttgagggtgtcttctgcctaacaaacgttgatggtggattgaatgatcattatcatggaggcattggacatactgttcatgcagggaaagtggtgacaagttctagaaaaccatcaagctctgccgacaattacaaggcagcacactgtcgcatagtagagtccttcactgctggcaacttatcaagctatcgtgtctcctgtcttggtgccgatgagcaggctcatggagcaatgcattctcctgatgctgtccgtttcaagcttgcagtgcagtggacgcctcctcgccctgatcgggtgtacactcgtagggtggtgactcgcaggagcgagagggcaagaatttgcagtgcgatggatttggagagcatcgacatttgcaatttcagtcgtcagagggatggtcgtggccatggacagctttggaaccatcttcggatgcatgcacatcttctgatggtggatgccgggtggaagattgaggccaaggaaagagacaacaggagtaaagttgatcatgtttatgtggcgccagacaatgtgacacgcctgtattctcttcccagagcatggaaatgctttggccagtggttgcttatgacaacaccctgcgtcaatggaaatgagtcaattgactacggaaaggagtggtcgaacatgcatgaatttctgtatgatctgaagaacacactgctatgcctacagtatgaggtccaacgtacgaagccagcactatctttcctctaccagtggcagctccttgatcctttcatggctgttgtttgcatcgataagaaggttgcagctcttaaagatggagtggcactgaaagctgttaacagcaccgtgacttgcctcaatcgcagtgagtgtaagatgttggatgccaagaattcaaataggtcacttggggtcaactccacaagtaaatatatgaatccatatctcagctcctgcaaaaaaagtcttctgccgcttctctctgaatctgattatcagcctgataaggaagggaatactatgcctaatgaagaagcttctctattttgtacaaacaagactagcgaagatgaagctgatcggcggtcattgtgtatgtcagaaatgaatgaaataggcataagaagcacagctcatcacatagttatgggtttacatgatgcaacagcttttcatggctcaagccaaacttgttcggggaggaaaagaaaatttccgtgcatcaagtctaaagaggataatcaaactgaagacaagtctgacccattattctttccacccagctattcatccacattaagtcatctggttgaaaatgttcaaataaatgatgttagccctcatggctatgaaaccacggagattccaaacatgggcaatcgtacagatattcttgataagatgtacctaggagagaatttattgtttgcccccgaaactggtaatatgctacttgaaactacagatgatatcaacaatgaacagcatgatgatgcagctgtctctgagccccaatcggcagataatgatggaagtggaccttctggtgcatcatcactaccaccagagaaagatgcatacatgggatctaaagaggattctattaacgactatcatgatccttcagttgtctctgagttccaaattgctaataatgatgcaaaatgtgaaccttctattgcattcttgccagaaaaggataaagatttggaagctaataaaacgagcttggaaggtccagcaaaaacaggccaattgtcatctgaagctagtggcagcactttgatgatctcagagccacaagtattgtttgtgtccccacaagatgggactctgtctttcatgaacaataatacgaacaaccaagagatgtggaggttcctgaatgtttcccctgataccatggataccgaaatgcagatggactctaattcattggtttacgaggcaagcttgattcagggtttcttgtaccttgacaatgagggttctccaatttgttggacagtgatgaacccggaacctcctaggcgcttgatatgtgctactgctctggaaccaaactcaaagctgtcgaaacagtatgttgaaatgaggttggagaatgatgcatcaacgtctgaacacaagaagggaggaaaattgtctgataaggctgcagatatccaagacaatgtcagtagaaaaaaacagaaagcaaacattgcttctttaaataattgcgtaagtatggacaatttaactgtcaatcctattgatcctgtagttctcaatgagggagagcagacaggtacagcaatcactgagcaggttcctgttcctttgaatctagtgcttgagaacaaaaatgacaaggaccaaggtgagcaaagcagtgaaacttcagaacaacttatgtccaaagaaccacaaaaaagggacatcaaaaggcaaaagagaacatggtctcatacatgcaagtttgatgatgatgaccttctgatgacagctgtaatatataagctgacagcacgttacaggaactcttttcatcggaagctcagaaataaattcggtttcaggcgtcttccaacataccactgggagaatgaagataaaggtgacaggaagaagtttcctggagaagcaaggacggtgttgaacaagttacttgaaatgggcattgttgctagagtggatattcttcaatgtcatggtccaggaggcaaaaatgtgttgaaggatgggaacataactgcgagtggcattcaatgccagtgctgtggtaccacattcacaatgtccaagtttaagtgtcatgcaggtctcaggcaagaagtcccatctctgaatcttttcttggatacaggcaaatcttacagtctttgtcagcttcaagcatggtctatagagcagaaggtgaggaaagagcatgcaaaggatacaatgtcccttcaagcagaccaaaacgatgatacctgtggatcatgtggcgatggtggtgaactgatatgctgtgacaattgtcctgctagttaccatcaagcctgcttgtcttgccaggatattccagatggcaactggtactgctctagctgcctttgcgacatttgtggtgaagtaatcgattcaaaggagcttgtaacttcccttcctgctttagattgctcacagtgcgaacgccaatccatgtaaaatgtgtatctgccaaagttccgtgcaatgaggatggatctggtacctggttttgtggaagaaaatgtcacgagatctatatgaccttccgttctcgtgttggagtgcctgatcacatggacgatgatctgtgtttcaccgttcttcgtaacaacggtgataagaaggttcgcacggcagaggagattgctctcatggctgaatgcaacatgaaactcatgatcgccacgagtatcatggaagagtgtttcctgcctattctagatcccaggacagggatagacattattccctccatattgtataactggaggtctgatttacatttcaattacaaggggttctatacagtagtcttggaaagtgatgatagcatggtatctgttgcctccataaggttgcatggtgcaattttagcagagatgcctctggtagcaacttctaaagagaatcgtcagcaggggatgtgcaggcgcctcatggattacattgaggagatgctgaaatccctgaaggtggagatgctgctcctatcagcaatcccgcacctggcggagacatggacatcgacatttgggttcagagagatagatgagtcggacaagaagaggctgagtaaggtgaggctggccgcagttccggggaccgtcctactgaagaaggacctgctgtgtgaatgttcaggcgcggacgccggtgagccgccgagccctaagcccttccaagtttactcgcgcgtgccgagaggccgcaccggtttggatgcagtgtgccaataaagatgacgcagtggatcgaatgcgccgcggtcagtcgtcgtcgtcggtgacagggggcagctggtggtcgtcacggggcctcgtctccggttgctgaagccgaggccgagcacatcagcacgcgccggtttgtgtggtggaaatggaaagcctcgttgctctggtaggagctctgaagatcgctgtcgtctgcttgtagtctgtaaatagcttctccgtcggcgagaagcccagggtccacggccattgtagaaccgaacctgtatgataaaactagaccgtgttggcgccccaccagcgtttagtagtttccgttgccctttgaactcaaagtttcaggctagtccattgtgttcgtttcagaagcctgcggttttcagggggaggggaggtgccagaaagggaggacataacgcacgtgcagaccgagtattatgtggtggtgtcgtagacacgcacgagttgacgaagctataggagcagctcgtgatgagcaatggttggtgcagatgatgatgtcaatgagctcctcccgcagggaccggacctgtggacacggatggagctgaacttgtttgaaggatgcgtagtactaataatatatgcagtcaagccagcctgaacttatttgaatgaggtgtagtactaataatatatgcagccaagccagcctgacacttt

SEQ ID NO: 20369 - DNA, 2698 bp, Zea Mays
accagatccatcctcctcacatgccggccgagtccggagtccagcggcgccggcgacccagcgcggatggcgtttccaattccaaacgagcgaccgcccacgcgcgcccggccgtaaaaaaaccggggtcagcgcgtggactcggccgctgggaggatgtatcgcaaattcgcaatcgaatcggcggccacccggcaccctgcctgcctgtcgagtgtcgacactgtcgtgtccggttggcgccccagcgaaaagcaaaagaaataccggaagaaactgcctcgtgcctcctcctctcctcgcttctccctgtagagaacaggccgaggcgggcgagtgctccagtacacctcgagctacataccccagctcgcacggtccagctctgagctccctcctctccacctccacgcccgatcgtgaatcgtcacttgctctgcagcgggcattccgtcgagcaccttccgttcggcgccgggtggcgtggggagcgagtcctgccgggttgcgtggtccgttgcgtgaacgggcgacagttgctgctttcccgggggcgctccttgatgccgctgttgtggcaggcgctgggttctagcggatggaatgcaacagctcctacgcgctgaagtcaagaaggttcgttgccgtagctgatgcgggatttgaggatgctgtagacggcgccagcgattttggagatacgatgagtctcgcacacaagcagaaggttgtcggggaaaccgtggagacggaggaggagcaggaatttgtttggaaatctagcctgctctcctacaaggatgatggtgattccgttcttccagcacgcatcaacatcaggagagacacctctgcctggcaaaatgaacccgaggattgacaggtctggaagcaatgaaacaagcaaggtccctagactgggttccattgttgggacagccagcatggctggatttggcaaggcagtggagattctagacacattaggctgcttgatgacgaccttgagctcagatggtggctttgtttccaggaccaagaccaaagggtgcaaaatatcaattcttgcttttgaggttgccaacacaatacttaaaggtgctagtattatgcaatcactctcagaagacactgtcacatacttcaaacaagttgtgcttccttccgaaggtgtacagaatttggtgtccagtgagatgagtgaattgatgcgaattgcagctaacgacaaaagagaggagctgaaaatattttctcaagagattgttaggttcgggaaccgctgtaaagatccccagtggcataacctggatcgctactttgtgaagttagaatcagaaaatgcgccccagaagcagttgaaagaaacgtcaatagcagagatgcaaaagttaatgagtcttgttcaacgtacaactgatttgtatcatgagctgcatgcattagacagatttgagcaagagtacttctctaggataaacggaaagggtcacacagatagaattgaaaaaggaggcaatattcaaattgtgaaactggagttgaagacccaaagtagttatgtaaagagcttgaagaaaagatctctttggtccaagacgttggaagaagtagttgagaagtttgtagacattatgcactacttacatgttgagatcaacaatgatttcggatcttctgatggaggtgtgatgaatgccgaatcaactgagagctgtcaaaggctaggacctgctggacttgcattacattatgcaaacattatcattcagatatacagtattgtttctcgatcagggtatgtgccatcaaattcaagagatgcactgtaccagggattgccaccaaggatcaagtcagcactaccaaataaattgagaacgacctcggtgcctcaggagctcactattgatcaaataagggctaggatggagaaaactctgaaatggcttattcccatggccgtcaataccacctgcgctcgaggtttcttgaggtttagcgaatgggcgaaatcagggactgagagggttggtaggcgaccgggtgtagcagatcggattgagacgctataccatgctgacaaggcaaggactgaggactgcattctagagttgctcgtctggctccatcacctcgtcagccagagtaaccggttggcaatgcaaaaagtcactgaccaatgtatctaaccaaaagtcaggaattgtcatatgggccatcacatgctagcatcgcacggcgacttctatccagaaaaaaagaggctgggtttgtcgagtggtccaaggtatccaaaattatatggaaaagaggggacatcaaaattttctgatccagcttgctggttgttttcgtctttgttattaggttgtagatggaatctagagttgttcttgccatggaggtcgtgtgtttttcttctttccatggaggacgtgcggtttttcttgtccggatacagtcgggcatgcagcatgcttatatgtgctccgtacattagctgagtaggtgtagtataagaagagccctttttttttcttctctttgatctgcttgttatttgtaagtgtagttgtgacaatcacattatacaaagaaaacgcacgtcatgtcagtgcagtgaaaaacaaacaaacatgaatctcttttcatatacatatatctgccgtcgtgaaaatcacaatcggtgaccata

SEQ ID NO: 20370 - DNA, 2738 bp, Zea Mays
accagatccatcctcctcacatgccggccgagtccggagtccagcggcgccggcgacccagcgcggatggcgtttccaattccaaacgagcgaccgcccacgcgcgcccggccgtaaaaaaaccggggtcagcgcgtggactcggccgctgggaggatgtatcgcaaattcgcaatcgaatcggcggccacccggcaccctgcctgcctgtcgagtgtcgacactgtcgtgtccggttggcgccccagcgaaaagcaaaagaaataccggaagaaactgcctcgtgcctcctcctctcctcgcttctccctgtagagaacaggccgaggcgggcgagtgctccagtacacctcgagctacataccccagctcgcacggtccagctctgagctccctcctctccacctccacgcccgatcgtgaatcgtcacttgctctgcaacggcgagagcgccatctttgctgctacccattaactcaggcgggcattccgtcgagcaccttccgttcggcgccgggtggcgtggggagcgagtcctgccgggttgcgtggtccgttgcgtgaacgggcgacagttgctgctttcccgggggcgctccttgatgccgctgttgtggcaggcgctgggttctagcggatggaatgcaacagctcctacgcgctgaagtcaagaaggttcgttgccgtagctgatgcgggatttgaggatgctgtagacggcgccagcgattttggagatacgatgagtctcgcacacaagcagaaggttgtcggggaaaccgtggagacggaggaggagcaggaatttgtttggaaatctagcctgctctcctacaaggatgatggtgattccgttcttccagcacgcatcaacatcaggagagacacctctgcctggcaaaatgaacccgaggattgacaggtctggaagcaatgaaacaagcaaggtccctagactgggttccattgttgggacagccagcatggctggatttggcaaggcagtggagattctagacacattaggctgcttgatgacgaccttgagctcagatggtggctttgtttccaggaccaagaccaaagggtgcaaaatatcaattcttgcttttgaggttgccaacacaatacttaaaggtgctagtattatgcaatcactctcagaagacactgtcacatacttcaaacaagttgtgcttccttccgaaggtgtacagaatttggtgtccagtgagatgagtgaattgatgcgaattgcagctaacgacaaaagagaggagctgaaaatattttctcaagagattgttaggttcgggaaccgctgtaaagatccccagtggcataacctggatcgctactttgtgaagttagaatcagaaaatgcgccccagaagcagttgaaagaaacgtcaatagcagagatgcaaaagttaatgagtcttgttcaacgtacaactgatttgtatcatgagctgcatgcattagacagatttgagcaagagtacttctctaggataaacggaaagggtcacacagatagaattgaaaaaggaggcaatattcaaattgtgaaactggagttgaagacccaaagtagttatgtaaagagcttgaagaaaagatctctttggtccaagacgttggaagaagtagttgagaagtttgtagacattatgcactacttacatgttgagatcaacaatgatttcggatcttctgatggaggtgtgatgaatgccgaatcaactgagagctgtcaaaggctaggacctgctggacttgcattacattatgcaaacattatcattcagatatacagtattgtttctcgatcagggtatgtgccatcaaattcaagagatgcactgtaccagggattgccaccaaggatcaagtcagcactaccaaataaattgagaacgacctcggtgcctcaggagctcactattgatcaaataagggctaggatggagaaaactctgaaatggcttattcccatggccgtcaataccacctgcgctcgaggtttcttgaggtttagcgaatgggcgaaatcagggactgagagggttggtaggcgaccgggtgtagcagatcggattgagacgctataccatgctgacaaggcaaggactgaggactgcattctagagttgctcgtctggctccatcacctcgtcagccagagtaaccggttggcaatgcaaaaagtcactgaccaatgtatctaaccaaaagtcaggaattgtcatatgggccatcacatgctagcatcgcacggcgacttctatccagaaaaaaagaggctgggtttgtcgagtggtccaaggtatccaaaattatatggaaaagaggggacatcaaaattttctgatccagcttgctggttgttttcgtctttgttattaggttgtagatggaatctagagttgttcttgccatggaggtcgtgtgtttttcttctttccatggaggacgtgcggtttttcttgtccggatacagtcgggcatgcagcatgcttatatgtgctccgtacattagctgagtaggtgtagtataagaagagccctttttttttcttctctttgatctgcttgttatttgtaagtgtagttgtgacaatcacattatacaaagaaaacgcacgtcatgtcagtgcagtgaaaaacaaacaaacatgaatctcttttcatatacatatatctgccgtcgtgaaaatcacaatcggtgaccata

SEQ ID NO: 20371 - DNA, 2594 bp, Zea Mays
ccggagtccagcggcgccggcgacccagcgcggatggcgtttccaattccaaacgagcgaccgcccacgcgcgcccggccgtaaaaaaaccggggtcagcgcgtggactcggccgctgggaggatgtatcgcaaattcgcaatcgaatcggcggccacccggcaccctgcctgcctgtcgagtgtcgacactgtcgtgtccggttggcgccccagcgaaaagcaaaagaaataccggaagaaactgcctcgtgcctcctcctctcctcgcttctccctgtagagaacaggccgaggcgggcgagtgctccagtacacctcgagctacataccccagctcgcacggtccagctctgagctccctcctctccacctccacgcccgatcgtgaatcgtcacttgctctgcaacggcgagagcgccatctttgctgctacccattaactcaggcgggcattccgtcgagcaccttccgttcggcgccgggtggcgtggggagcgagtcctgccgggttgcgtggtccgttgcgtgaacgggcgacagttgctgctttcccgggggcgctccttgatgccgctgttgtggcaggcgctgggttctagcggatggaatgcaacagctcctacgcgctgaagtcaagaaggttcgttgccgtagctgatgcgggatttgaggatgctgtagacggcgccagcgattttggagatacgatgagtctcgcacacaagcagaaggttgtcggggaaaccgtggagacggaggaggagcaggaatttgtttggaaatctagcctgctctcctacaaggatgatggtgattccgttcttccagcacgcatcaacatcaggagagacacctctgcctggcaaaatgaacccgaggattgacaggtctggaagcaatgaaacaagcaaggtccctagactgggttccattgttgggacagccagcatggctggatttggcaaggcagtggagattctagacacattaggctgcttgatgacgaccttgagctcagatggtggctttgtttccaggaccaagaccaaagggtgcaaaatatcaattcttgcttttgaggttgccaacacaatacttaaaggtgctagtattatgcaatcactctcagaagacactgtcacatacttcaaacaagttgtgcttccttccgaaggtgtacagaatttggtgtccagtgagatgagtgaattgatgcgaattgcagctaacgacaaaagagaggagctgaaaatattttctcaagagattgttaggttcgggaaccgctgtaaagatccccagtggcataacctggatcgctactttgtgaagttagaatcagaaaatgcgccccagaagcagttgaaagaaacgtcaatagcagagatgcaaaagttaatgagtcttgttcaacgtacaactgatttgtatcatgagctgcatgcattagacagatttgagcaagagtacttctctaggataaacggaaagggtcacacagatagaattgaaaaaggaggcaatattcaaattgtgaaactggagttgaagacccaaagtagttatgtaaagagcttgaagaaaagatctctttggtccaagacgttggaagaagtagttgagaagtttgtagacattatgcactacttacatgttgagatcaacaatgatttcggatcttctgatggagggtatgtgccatcaaattcaagagatgcactgtaccagggattgccaccaaggatcaagtcagcactaccaaataaattgagaacgacctcggtgcctcaggagctcactattgatcaaataagggctaggatggagaaaactctgaaatggcttattcccatggccgtcaataccacctgcgctcgaggtttcttgaggtttagcgaatgggcgaaatcagggactgagagggttggtaggcgaccgggtgtagcagatcggattgagacgctataccatgctgacaaggcaaggactgaggactgcattctagagttgctcgtctggctccatcacctcgtcagccagagtaaccggttggcaatgcaaaaagtcactgaccaatgtatctaaccaaaagtcaggaattgtcatatgggccatcacatgctagcatcgcacggcgacttctatccagaaaaaaagaggctgggtttgtcgagtggtccaaggtatccaaaattatatggaaaagaggggacatcaaaattttctgatccagcttgctggttgttttcgtctttgttattaggttgtagatggaatctagagttgttcttgccatggaggtcgtgtgtttttcttctttccatggaggacgtgcggtttttcttgtccggatacagtcgggcatgcagcatgcttatatgtgctccgtacattagctgagtaggtgtagtataagaagagccctttttttttcttctctttgatctgcttgttatttgtaagtgtagttgtgacaatcacattatacaaagaaaacgcacgtcatgtcagtgcagtgaaaaacaaacaaacatgaatctcttttcatatacatatatctgccgtcgtgaaaatcacaatcggtgaccata

SEQ ID NO: 20372 - DNA, 2756 bp, Zea Mays
cgcgtggactcggccgctgggaggatgtatcgcaaattcgcaatcgaatcggcggccacccggcaccctgcctgcctgtcgagtgtcgacactgtcgtgtccggttggcgccccagcgaaaagcaaaagaaataccggaagaaactgcctcgtgcctcctcctctcctcgcttctccctgtagagaacaggccgaggcgggcgagtgctccagtacacctcgagctacataccccagctcgcacggtccagctctgagctccctcctctccacctccacgcccgatcgtgaatcgtcacttgctctgcagtaagcttgtattctttttttttcttctgtattttttttttttgctccccatccttttcctggcgcgatttctgttggctggtcattttcccgcaacttctctttggttcttgcgctagacggcgagagcgccatctttgctgctacccattaactcaggcgggcattccgtcgagcaccttccgttcggcgccgggtggcgtggggagcgagtcctgccgggttgcgtggtccgttgcgtgaacgggcgacagttgctgctttcccgggggcgctccttgatgccgctgttgtggcaggcgctgggttctagcggatggaatgcaacagctcctacgcgctgaagtcaagaaggttcgttgccgtagctgatgcgggatttgaggatgctgtagacggcgccagcgattttggagatacgatgagtctcgcacacaagcagaaggttgtcggggaaaccgtggagacggaggaggagcaggaatttgtttggaaatctagcctgctctcctacaaggatgatggtgattccgttcttccagcacgcatcaacatcaggagagacacctctgcctggcaaaatgaacccgaggattgacaggtctggaagcaatgaaacaagcaagtccttacctttcatagcaggtccctagactgggttccattgttgggacagccagcatggctggatttggcaaggcagtggagattctagacacattaggctgcttgatgacgaccttgagctcagatggtggctttgtttccaggaccaagaccaaagggtgcaaaatatcaattcttgcttttgaggttgccaacacaatacttaaaggtgctagtattatgcaatcactctcagaagacactgtcacatacttcaaacaagttgtgcttccttccgaaggtgtacagaatttggtgtccagtgagatgagtgaattgatgcgaattgcagctaacgacaaaagagaggagctgaaaatattttctcaagagattgttaggttcgggaaccgctgtaaagatccccagtggcataacctggatcgctactttgtgaagttagaatcagaaaatgcgccccagaagcagttgaaagaaacgtcaatagcagagatgcaaaagttaatgagtcttgttcaacgtacaactgatttgtatcatgagctgcatgcattagacagatttgagcaagagtacttctctaggataaacggaaagggtcacacagatagaattgaaaaaggttactttgcaggaggcaatattcaaattgtgaaactggagttgaagacccaaagtagttatgtaaagagcttgaagaaaagatctctttggtccaagacgttggaagaagtagttgagaagtttgtagacattatgcactacttacatgttgagatcaacaatgatttcggatcttctgatggaggtgtgatgaatgccgaatcaactgagagctgtcaaaggctaggacctgctggacttgcattacattatgcaaacattatcattcagatatacagtattgtttctcgatcagggtatgtgccatcaaattcaagagatgcactgtaccagggattgccaccaaggatcaagtcagcactaccaaataaattgagaacgacctcggtgcctcaggagctcactattgatcaaataagggctaggatggagaaaactctgaaatggcttattcccatggccgtcaataccacctgcgctcgaggtttcttgaggtttagcgaatgggcgaaatcagggactgagagggttggtaggcgaccgggtgtagcagatcggattgagacgctataccatgctgacaaggcaaggactgaggactgcattctagagttgctcgtctggctccatcacctcgtcagccagagtaaccggttggcaatgcaaaaagtcactgaccaatgtatctaaccaaaagtcaggaattgtcatatgggccatcacatgctagcatcgcacggcgacttctatccagaaaaaaagaggctgggtttgtcgagtggtccaaggtatccaaaattatatggaaaagaggggacatcaaaattttctgatccagcttgctggttgttttcgtctttgttattaggttgtagatggaatctagagttgttcttgccatggaggtcgtgtgtttttcttctttccatggaggacgtgcggtttttcttgtccggatacagtcgggcatgcagcatgcttatatgtgctccgtacattagctgagtaggtgtagtataagaagagccctttttttttcttctctttgatctgcttgttatttgtaagtgtagttgtgacaatcacattatacaaagaaaacgcacgtcatgtcagtgcagtgaaaaacaaacaaacatgaatctcttttcatatacatatatctgccgtcgtgaaaatcacaatcggtgaccata

SEQ ID NO: 20373 - DNA, 3060 bp, Zea Mays
cgcgtggactcggccgctgggaggatgtatcgcaaattcgcaatcgaatcggcggccacccggcaccctgcctgcctgtcgagtgtcgacactgtcgtgtccggttggcgccccagcgaaaagcaaaagaaataccggaagaaactgcctcgtgcctcctcctctcctcgcttctccctgtagagaacaggccgaggcgggcgagtgctccagtacacctcgagctacataccccagctcgcacggtccagctctgagctccctcctctccacctccacgcccgatcgtgaatcgtcacttgctctgcagtaagcttgtattctttttttttcttctgtattttttttttttgctccccatccttttcctggcgcgatttctgttggctggtcattttcccgcaacttctctttggttcttgcgctagacggcgagagcgccatctttgctgctacccattaactcaggcgggcattccgtcgagcaccttccgttcggcgccgggtggcgtggggagcgagtcctgccgggttgcgtggtccgttgcgtgaacgggcgacagttgctgctttcccgggggcgctccttgatgccgctgttgtggcaggcgctgggttctagcggatggaatgcaacagctcctacgcgctgaagtcaagaaggttcgttgccgtagctgatgcgggatttgaggatgctgtagacggcgccagcgattttggagatacgatgagtctcgcacacaagcagaaggttgtcggggaaaccgtggagacggaggaggagcaggaatttgtttggaaatctagcctgctctcctacaaggatgatggtgattccgttcttccagcacgcatcaacatcaggagagacacctctgcctggcaaaatgaacccgaggattgacaggtctggaagcaatgaaacaagcaaggtccctagactgggttccattgttgggacagccagcatggctggatttggcaaggcagtggagattctagacacattaggctgcttgatgacgaccttgagctcagatggtggctttgtttccaggaccaagaccaaagggtgcaaaatatcaattcttgcttttgaggttgccaacacaatacttaaaggtgctagtattatgcaatcactctcagaagacactgtcacatacttcaaacaagttgtgcttccttccgaaggtgtacagaatttggtgtccagtgagatgagtgaattgatgcgaattgcagctaacgacaaaagagaggagctgaaaatattttctcaagagattgttaggttcgggaaccgctgtaaagatccccagtggcataacctggatcgctactttgtgaagttagaatcagaaaatgcgccccagaagcagttgaaagaaacgtcaatagcagagatgcaaaagttaatgagtcttgttcaacgtacaactgatttgtatcatgagctgcatgcattagacagatttgagcaagagtacttctctaggataaacggaaagggtcacacagatagaattgaaaaaggttactttgcaggaggcaatattcaaattgtgaaactggagttgaagacccaaagtagttatgtaaagagcttgaagaaaagatctctttggtccaagacgttggaagaagtagttgagaagtttgtagacattatgcactacttacatgttgagatcaacaatgatttcggatcttctgatggaggtgtgatgaatgccgaatcaactgagagctgtcaaaggctaggacctgctggacttgcattacattatgcaaacattatcattcagatatacagtattgtaattttctccttgtttttactaagacagatcaagatcttgagtaatttgctttcttttacaataataaattatgtatcatcttaaagcagaaagatactatgctgtagcattgccttcctctttattttatgttttattttcagaacttctagttagataacgtagttgtagcttccatgattggatgttatccaaaaacgaagataattaaccaaacataagcatgactgacaagaattgtgtaaatgtctttgagctgcgttcacaactcacaaggtactattttaaggcgtaggaactaacaaaacttgcttttataggtttctcgatcagggtatgtgccatcaaattcaagagatgcactgtaccagggattgccaccaaggatcaagtcagcactaccaaataaattgagaacgacctcggtgcctcaggagctcactattgatcaaataagggctaggatggagaaaactctgaaatggcttattcccatggccgtcaataccacctgcgctcgaggtttcttgaggtttagcgaatgggcgaaatcagggactgagagggttggtaggcgaccgggtgtagcagatcggattgagacgctataccatgctgacaaggcaaggactgaggactgcattctagagttgctcgtctggctccatcacctcgtcagccagagtaaccggttggcaatgcaaaaagtcactgaccaatgtatctaaccaaaagtcaggaattgtcatatgggccatcacatgctagcatcgcacggcgacttctatccagaaaaaaagaggctgggtttgtcgagtggtccaaggtatccaaaattatatggaaaagaggggacatcaaaattttctgatccagcttgctggttgttttcgtctttgttattaggttgtagatggaatctagagttgttcttgccatggaggtcgtgtgtttttcttctttccatggaggacgtgcggtttttcttgtccggatacagtcgggcatgcagcatgcttatatgtgctccgtacattagctgagtaggtgtagtataagaagagccctttttttttcttctctttgatctgcttgttatttgtaagtgtagttgtgacaatcacattatacaaagaaaacgcacgtcatgtcagtgcagtgaaaaacaaacaaacatgaatctcttttcatatacatatatctgccgtcgtgaaaatcacaatcggtgaccata

SEQ ID NO: 20374 - DNA, 2514 bp, Zea Mays
cgcgtggactcggccgctgggaggatgtatcgcaaattcgcaatcgaatcggcggccacccggcaccctgcctgcctgtcgagtgtcgacactgtcgtgtccggttggcgccccagcgaaaagcaaaagaaataccggaagaaactgcctcgtgcctcctcctctcctcgcttctccctgtagagaacaggccgaggcgggcgagtgctccagtacacctcgagctacataccccagctcgcacggtccagctctgagctccctcctctccacctccacgcccgatcgtgaatcgtcacttgctctgcagtaagcttgtattctttttttttcttctgtattttttttttttgctccccatccttttcctggcgcgatttctgttggctggtcattttcccgcaacttctctttggttcttgcgctagacggcgagagcgccatctttgctgctacccattaactcaggcgggcattccgtcgagcaccttccgttcggcgccgggtggcgtggggagcgagtcctgccgggttgcgtggtccgttgcgtgaacgggcgacagttgctgctttcccgggggcgctccttgatgccgctgttgtggcaggcgctgggttctagcggatggaatgcaacagctcctacgcgctgaagtcaagaaggttcgttgccgtagctgatgcgggatttgaggatgctgtagacggcgccagcgattttggagatacgatgagtctcgcacacaagcagaaggttgtcggggaaaccgtggagacggaggaggagcaggaatttgtttggaaatctagcctgctctcctacaaggatgatggtgattccgttcttccagcacgcatcaacatcaggagagacacctctgcctggcaaaatgaacccgaggattgacaggtctggaagcaatgaaacaagcaaggtccctagactgggttccattgttgggacagccagcatggctggatttggcaaggcagtggagattctagacacattaggctgcttgatgacgaccttgagctcagatggtggctttgtttccaggaccaagaccaaagggtgcaaaatatcaattcttgcttttgaggttgccaacacaatacttaaaggtgctagtattatgcaatcactctcagaagacactgtcacatacttcaaacaagttgtgcttccttccgaaggtgtacagaatttggtgtccagtgagatgagtgaattgatgcgaattgcagctaacgacaaaagagaggagctgaaaatattttctcaagagattgttaggttcgggaaccgctgtaaagatccccagtggcataacctggatcgctactttgtgaagttagaatcagaaaatgcgccccagaagcagttgaaagaaacgtcaatagcagagatgcaaaagttaatgagtcttgttcaacgtacaactgatttgtatcatgagctgcatgcattagacagatttgagcaagagtacttctctaggataaacggaaagggtcacacagatagaattgaaaaaggttactttgcaggaggcaatattcaaattgtgaaactggagttgaagacccaaagtagttatgtaaagagcttgaagaaaagatctctttggtccaagacgttggaagaagtagttgagaagtttgtagacattatgcactacttacatgttgagatcaacaatgatttcggatcttctgatggagggtatgtgccatcaaattcaagagatgcactgtaccagggattgccaccaaggatcaagtcagcactaccaaataaattgagaacgacctcggtgcctcaggagctcactattgatcaaataagggctaggatggagaaaactctgaaatggcttattcccatggccgtcaataccacctgcgctcgaggtttcttgaggtttagcgaatgggcgaaatcagggactgagagggttggtaggcgaccgggtgtagcagatcggattgagacgctataccatgctgacaagtcaggaattgtcatatgggccatcacatgctagcatcgcacggcgacttctatccagaaaaaaagaggctgggtttgtcgagtggtccaaggtatccaaaattatatggaaaagaggggacatcaaaattttctgatccagcttgctggttgttttcgtctttgttattaggttgtagatggaatctagagttgttcttgccatggaggtcgtgtgtttttcttctttccatggaggacgtgcggtttttcttgtccggatacagtcgggcatgcagcatgcttatatgtgctccgtacattagctgagtaggtgtagtataagaagagccctttttttttcttctctttgatctgcttgttatttgtaagtgtagttgtgacaatcacattatacaaagaaaacgcacgtcatgtcagtgcagtgaaaaacaaacaaacatgaatctcttttcatatacatatatctgccgtcgtgaaaatcacaatcggtgaccata

SEQ ID NO: 20375 - DNA, 2578 bp, Zea Mays
cgcgtggactcggccgctgggaggatgtatcgcaaattcgcaatcgaatcggcggccacccggcaccctgcctgcctgtcgagtgtcgacactgtcgtgtccggttggcgccccagcgaaaagcaaaagaaataccggaagaaactgcctcgtgcctcctcctctcctcgcttctccctgtagagaacaggccgaggcgggcgagtgctccagtacacctcgagctacataccccagctcgcacggtccagctctgagctccctcctctccacctccacgcccgatcgtgaatcgtcacttgctctgcagcgggcattccgtcgagcaccttccgttcggcgccgggtggcgtggggagcgagtcctgccgggttgcgtggtccgttgcgtgaacgggcgacagttgctgctttcccgggggcgctccttgatgccgctgttgtggcaggcgctgggttctagcggatggaatgcaacagctcctacgcgctgaagtcaagaaggttcgttgccgtagctgatgcgggatttgaggatgctgtagacggcgccagcgattttggagatacgatgagtctcgcacacaagcagaaggttgtcggggaaaccgtggagacggaggaggagcaggaatttgtttggaaatctagcctgctctcctacaaggatgatggtgattccgttcttccagcacgcatcaacatcaggagagacacctctgcctggcaaaatgaacccgaggattgacaggtctggaagcaatgaaacaagcaaggtccctagactgggttccattgttgggacagccagcatggctggatttggcaaggcagtggagattctagacacattaggctgcttgatgacgaccttgagctcagatggtggctttgtttccaggaccaagaccaaagggtgcaaaatatcaattcttgcttttgaggttgccaacacaatacttaaaggtgctagtattatgcaatcactctcagaagacactgtcacatacttcaaacaagttgtgcttccttccgaaggtgtacagaatttggtgtccagtgagatgagtgaattgatgcgaattgcagctaacgacaaaagagaggagctgaaaatattttctcaagagattgttaggttcgggaaccgctgtaaagatccccagtggcataacctggatcgctactttgtgaagttagaatcagaaaatgcgccccagaagcagttgaaagaaacgtcaatagcagagatgcaaaagttaatgagtcttgttcaacgtacaactgatttgtatcatgagctgcatgcattagacagatttgagcaagagtacttctctaggataaacggaaagggtcacacagatagaattgaaaaaggttactttgcaggaggcaatattcaaattgtgaaactggagttgaagacccaaagtagttatgtaaagagcttgaagaaaagatctctttggtccaagacgttggaagaagtagttgagaagtttgtagacattatgcactacttacatgttgagatcaacaatgatttcggatcttctgatggaggtgtgatgaatgccgaatcaactgagagctgtcaaaggctaggacctgctggacttgcattacattatgcaaacattatcattcagatatacagtattgtttctcgatcagggtatgtgccatcaaattcaagagatgcactgtaccagggattgccaccaaggatcaagtcagcactaccaaataaattgagaacgacctcggtgcctcaggagctcactattgatcaaataagggctaggatggagaaaactctgaaatggcttattcccatggccgtcaataccacctgcgctcgaggtttcttgaggtttagcgaatgggcgaaatcagggactgagagggttggtaggcgaccgggtgtagcagatcggattgagacgctataccatgctgacaaggcaaggactgaggactgcattctagagttgctcgtctggctccatcacctcgtcagccagagtaaccggttggcaatgcaaaaagtcactgaccaatgtatctaaccaaaagtcaggaattgtcatatgggccatcacatgctagcatcgcacggcgacttctatccagaaaaaaagaggctgggtttgtcgagtggtccaaggtatccaaaattatatggaaaagaggggacatcaaaattttctgatccagcttgctggttgttttcgtctttgttattaggttgtagatggaatctagagttgttcttgccatggaggtcgtgtgtttttcttctttccatggaggacgtgcggtttttcttgtccggatacagtcgggcatgcagcatgcttatatgtgctccgtacattagctgagtaggtgtagtataagaagagccctttttttttcttctctttgatctgcttgttatttgtaagtgtagttgtgacaatcacattatacaaagaaaacgcacgtcatgtcagtgcagtgaaaaacaaacaaacatgaatctcttttcatatacatatatctgccgtcgtgaaaatcacaatcggtgaccata

SEQ ID NO: 20376 - DNA, 2545 bp, Zea Mays
cgcgtggactcggccgctgggaggatgtatcgcaaattcgcaatcgaatcggcggccacccggcaccctgcctgcctgtcgagtgtcgacactgtcgtgtccggttggcgccccagcgaaaagcaaaagaaataccggaagaaactgcctcgtgcctcctcctctcctcgcttctccctgtagagaacaggccgaggcgggcgagtgctccagtacacctcgagctacataccccagctcgcacggtccagctctgagctccctcctctccacctccacgcccgatcgtgaatcgtcacttgctctgcaacggcgagagcgccatctttgctgctacccattaactcaggcgggcattccgtcgagcaccttccgttcggcgccgggtggcgtggggagcgagtcctgccgggttgcgtggtccgttgcgtgaacgggcgacagttgctgctttcccgggggcgctccttgatgccgctgttgtggcaggcgctgggttctagcggatggaatgcaacagctcctacgcgctgaagtcaagaaggttcgttgccgtagctgatgcgggatttgaggatgctgtagacggcgccagcgattttggagatacgatgagtctcgcacacaagcagaaggttgtcggggaaaccgtggagacggaggaggagcaggaatttgtttggaaatctagcctgctctcctacaaggatgatggtgattccgttcttccagcacgcatcaacatcaggagagacacctctgcctggcaaaatgaacccgaggattgacaggtctggaagcaatgaaacaagcaaggtccctagactgggttccattgttgggacagccagcatggctggatttggcaaggcagtggagattctagacacattaggctgcttgatgacgaccttgagctcagatggtggctttgtttccaggaccaagaccaaagggtgcaaaatatcaattcttgcttttgaggttgccaacacaatacttaaaggtgctagtattatgcaatcactctcagaagacactgtcacatacttcaaacaagttgtgcttccttccgaaggtgtacagaatttggtgtccagtgagatgagtgaattgatgcgaattgcagctaacgacaaaagagaggagctgaaaatattttctcaagagattgttaggttcgggaaccgctgtaaagatccccagtggcataacctggatcgctactttgtgaagttagaatcagaaaatgcgccccagaagcagttgaaagaaacgtcaatagcagagatgcaaaagttaatgagtcttgttcaacgtacaactgatttgtatcatgagctgcatgcattagacagatttgagcaagagtacttctctaggataaacggaaagggtcacacagatagaattgaaaaaggaggcaatattcaaattgtgaaactggagttgaagacccaaagtagttatgtaaagagcttgaagaaaagatctctttggtccaagacgttggaagaagtagttgagaagtttgtagacattatgcactacttacatgttgagatcaacaatgatttcggatcttctgatggaggtgtgatgaatgccgaatcaactgagagctgtcaaaggtttctcgatcagggtatgtgccatcaaattcaagagatgcactgtaccagggattgccaccaaggatcaagtcagcactaccaaataaattgagaacgacctcggtgcctcaggagctcactattgatcaaataagggctaggatggagaaaactctgaaatggcttattcccatggccgtcaataccacctgcgctcgaggtttcttgaggtttagcgaatgggcgaaatcagggactgagagggttggtaggcgaccgggtgtagcagatcggattgagacgctataccatgctgacaaggcaaggactgaggactgcattctagagttgctcgtctggctccatcacctcgtcagccagagtaaccggttggcaatgcaaaaagtcactgaccaatgtatctaaccaaaagtcaggaattgtcatatgggccatcacatgctagcatcgcacggcgacttctatccagaaaaaaagaggctgggtttgtcgagtggtccaaggtatccaaaattatatggaaaagaggggacatcaaaattttctgatccagcttgctggttgttttcgtctttgttattaggttgtagatggaatctagagttgttcttgccatggaggtcgtgtgtttttcttctttccatggaggacgtgcggtttttcttgtccggatacagtcgggcatgcagcatgcttatatgtgctccgtacattagctgagtaggtgtagtataagaagagccctttttttttcttctctttgatctgcttgttatttgtaagtgtagttgtgacaatcacattatacaaagaaaacgcacgtcatgtcagtgcagtgaaaaacaaacaaacatgaatctcttttcatatacatatatctgccgtcgtgaaaatcacaatcggtgaccata

SEQ ID NO: 20377 - DNA, 2601 bp, Zea Mays
cgcgtggactcggccgctgggaggatgtatcgcaaattcgcaatcgaatcggcggccacccggcaccctgcctgcctgtcgagtgtcgacactgtcgtgtccggttggcgccccagcgaaaagcaaaagaaataccggaagaaactgcctcgtgcctcctcctctcctcgcttctccctgtagagaacaggccgaggcgggcgagtgctccagtacacctcgagctacataccccagctcgcacggtccagctctgagctccctcctctccacctccacgcccgatcgtgaatcgtcacttgctctgcaacggcgagagcgccatctttgctgctacccattaactcaggcgggcattccgtcgagcaccttccgttcggcgccgggtggcgtggggagcgagtcctgccgggttgcgtggtccgttgcgtgaacgggcgacagttgctgctttcccgggggcgctccttgatgccgctgttgtggcaggcgctgggttctagcggatggaatgcaacagctcctacgcgctgaagtcaagaaggttcgttgccgtagctgatgcgggatttgaggatgctgtagacggcgccagcgattttggagatacgatgagtctcgcacacaagcagaaggttgtcggggaaaccgtggagacggaggaggagcaggaatttgtttggaaatctagcctgctctcctacaaggatgatggtgattccgttcttccagcacgcatcaacatcaggagagacacctctgcctggcaaaatgaacccgaggattgacaggtctggaagcaatgaaacaagcaaggtccctagactgggttccattgttgggacagccagcatggctggatttggcaaggcagtggagattctagacacattaggctgcttgatgacgaccttgagctcagatggtggctttgtttccaggaccaagaccaaagggtgcaaaatatcaattcttgcttttgaggttgccaacacaatacttaaaggtgctagtattatgcaatcactctcagaagacactgtcacatacttcaaacaagttgtgcttccttccgaaggtgtacagaatttggtgtccagtgagatgagtgaattgatgcgaattgcagctaacgacaaaagagaggagctgaaaatattttctcaagagattgttaggttcgggaaccgctgtaaagatccccagtggcataacctggatcgctactttgtgaagttagaatcagaaaatgcgccccagaagcagttgaaagaaacgtcaatagcagagatgcaaaagttaatgagtcttgttcaacgtacaactgatttgtatcatgagctgcatgcattagacagatttgagcaagagtacttctctaggataaacggaaagggtcacacagatagaattgaaaaaggaggcaatattcaaattgtgaaactggagttgaagacccaaagtagttatgtaaagagcttgaagaaaagatctctttggtccaagacgttggaagaagtagttgagaagtttgtagacattatgcactacttacatgttgagatcaacaatgatttcggatcttctgatggaggtgtgatgaatgccgaatcaactgagagctgtcaaaggctaggacctgctggacttgcattacattatgcaaacattatcattcagatatacagtttctcgatcagggtatgtgccatcaaattcaagagatgcactgtaccagggattgccaccaaggatcaagtcagcactaccaaataaattgagaacgacctcggtgcctcaggagctcactattgatcaaataagggctaggatggagaaaactctgaaatggcttattcccatggccgtcaataccacctgcgctcgaggtttcttgaggtttagcgaatgggcgaaatcagggactgagagggttggtaggcgaccgggtgtagcagatcggattgagacgctataccatgctgacaaggcaaggactgaggactgcattctagagttgctcgtctggctccatcacctcgtcagccagagtaaccggttggcaatgcaaaaagtcactgaccaatgtatctaaccaaaagtcaggaattgtcatatgggccatcacatgctagcatcgcacggcgacttctatccagaaaaaaagaggctgggtttgtcgagtggtccaaggtatccaaaattatatggaaaagaggggacatcaaaattttctgatccagcttgctggttgttttcgtctttgttattaggttgtagatggaatctagagttgttcttgccatggaggtcgtgtgtttttcttctttccatggaggacgtgcggtttttcttgtccggatacagtcgggcatgcagcatgcttatatgtgctccgtacattagctgagtaggtgtagtataagaagagccctttttttttcttctctttgatctgcttgttatttgtaagtgtagttgtgacaatcacattatacaaagaaaacgcacgtcatgtcagtgcagtgaaaaacaaacaaacatgaatctcttttcatatacatatatctgccgtcgtgaaaatcacaatcggtgaccata

SEQ ID NO: 20378 - DNA, 2517 bp, Zea Mays
cgcgtggactcggccgctgggaggatgtatcgcaaattcgcaatcgaatcggcggccacccggcaccctgcctgcctgtcgagtgtcgacactgtcgtgtccggttggcgccccagcgaaaagcaaaagaaataccggaagaaactgcctcgtgcctcctcctctcctcgcttctccctgtagagaacaggccgaggcgggcgagtgctccagtacacctcgagctacataccccagctcgcacggtccagctctgagctccctcctctccacctccacgcccgatcgtgaatcgtcacttgctctgcagcgggcattccgtcgagcaccttccgttcggcgccgggtggcgtggggagcgagtcctgccgggttgcgtggtccgttgcgtgaacgggcgacagttgctgctttcccgggggcgctccttgatgccgctgttgtggcaggcgctgggttctagcggatggaatgcaacagctcctacgcgctgaagtcaagaaggttcgttgccgtagctgatgcgggatttgaggatgctgtagacggcgccagcgattttggagatacgatgagtctcgcacacaagcagaaggttgtcggggaaaccgtggagacggaggaggagcaggaatttgtttggaaatctagcctgctctcctacaaggatgatggtgattccgttcttccagcacgcatcaacatcaggagagacacctctgcctggcaaaatgaacccgaggattgacaggtctggaagcaatgaaacaagcaaggtccctagactgggttccattgttgggacagccagcatggctggatttggcaaggcagtggagattctagacacattaggctgcttgatgacgaccttgagctcagatggtggctttgtttccaggaccaagaccaaagggtgcaaaatatcaattcttgcttttgaggttgccaacacaatacttaaaggtgctagtattatgcaatcactctcagaagacactgtcacatacttcaaacaagttgtgcttccttccgaaggtgtacagaatttggtgtccagtgagatgagtgaattgatgcgaattgcagctaacgacaaaagagaggagctgaaaatattttctcaagagattgttaggttcgggaaccgctgtaaagatccccagtggcataacctggatcgctactttgtgaagttagaatcagaaaatgcgccccagaagcagttgaaagaaacgtcaatagcagagatgcaaaagttaatgagtcttgttcaacgtacaactgatttgtatcatgagctgcatgcattagacagatttgagcaagagtacttctctaggataaacggaaagggtcacacagatagaattgaaaaaggttactttgcaggaggcaatattcaaattgtgaaactggagttgaagacccaaagtagttatgtaaagagcttgaagaaaagatctctttggtccaagacgttggaagaagtagttgagaagtttgtagacattatgcactacttacatgttgagatcaacaatgatttcggatcttctgatggaggtgtgatgaatgccgaatcaactgagagctgtcaaaggtttctcgatcagggtatgtgccatcaaattcaagagatgcactgtaccagggattgccaccaaggatcaagtcagcactaccaaataaattgagaacgacctcggtgcctcaggagctcactattgatcaaataagggctaggatggagaaaactctgaaatggcttattcccatggccgtcaataccacctgcgctcgaggtttcttgaggtttagcgaatgggcgaaatcagggactgagagggttggtaggcgaccgggtgtagcagatcggattgagacgctataccatgctgacaaggcaaggactgaggactgcattctagagttgctcgtctggctccatcacctcgtcagccagagtaaccggttggcaatgcaaaaagtcactgaccaatgtatctaaccaaaagtcaggaattgtcatatgggccatcacatgctagcatcgcacggcgacttctatccagaaaaaaagaggctgggtttgtcgagtggtccaaggtatccaaaattatatggaaaagaggggacatcaaaattttctgatccagcttgctggttgttttcgtctttgttattaggttgtagatggaatctagagttgttcttgccatggaggtcgtgtgtttttcttctttccatggaggacgtgcggtttttcttgtccggatacagtcgggcatgcagcatgcttatatgtgctccgtacattagctgagtaggtgtagtataagaagagccctttttttttcttctctttgatctgcttgttatttgtaagtgtagttgtgacaatcacattatacaaagaaaacgcacgtcatgtcagtgcagtgaaaaacaaacaaacatgaatctcttttcatatacatatatctgccgtcgtgaaaatcacaatcggtgaccata

SEQ ID NO: 20379 - DNA, 1619 bp, Zea Mays
atggctggatttggcaaggcagtggagattctagacacattaggctgcttgatgacgaccttgagctcagatggtggctttgtttccaggaccaagaccaaagggtgcaaaatatcaattcttgcttttgaggttgccaacacaatacttaaaggtgctagtattatgcaatcactctcagaagacactgtcacatacttcaaacaagttgtgcttccttccgaaggtgtacagaatttggtgtccagtgagatgagtgaattgatgcgaattgcagctaacgacaaaaggttcgggaaccgctgtaaagatccccagtggcataacctggatcgctactttgtgaagttagaatcagaaaatgcgccccagaagcagttgaaagaaacgtcaatagcagagatgcaaaagttaatgagtcttgttcaacgtacaactgatttgtatcatgagctgcatgcattagacagatttgagcaagagtacttctctaggataaacggaaagggtcacacagatagaattgaaaaaggttactttgcaggaggcaatattcaaattgtgaaactggagttgaagacccaaagtagttatgtaaagagcttgaagaaaagatctctttggtccaagacgttggaagaagtagttgagaagtttgtagacattatgcactacttacatgttgagatcaacaatgatttcggatcttctgatggagggtatgtgccatcaaattcaagagatgcactgtaccagggattgccaccaaggatcaagtcagcactaccaaataaattgagaacgacctcggtgcctcaggagctcactattgatcaaataagggctaggatggagaaaactctgaaatggcttattcccatggccgtcaataccacctgcgctcgaggtttcttgaggtttagcgaatgggcgaaatcagggactgagagggttggtaggcgaccgggtgtagcagatcggattgagacgctataccatgctgacaaggcaaggactgaggactgcattctagagttgctcgtctggctccatcacctcgtcagccagagtaaccggttggcaatgcaaaaagtcactgaccaatgtatctaaccaaaagtcaggaattgtcatatgggccatcacatgctagcatcgcacggcgacttctatccagaaaaaaagaggctgggtttgtcgagtggtccaaggtatccaaaattatatggaaaagaggggacatcaaaattttctgatccagcttgctggttgttttcgtctttgttattaggttgtagatggaatctagagttgttcttgccatggaggtcgtgtgtttttcttctttccatggaggacgtgcggtttttcttgtccggatacagtcgggcatgcagcatgcttatatgtgctccgtacattagctgagtaggtgtagtataagaagagccctttttttttcttctctttgatctgcttgttatttgtaagtgtagttgtgacaatcacattatacaaagaaaacgcacgtcatgtcagtgcagtgaaaaacaaacaaacatgaatctcttttcatatacatatatctgccgtcgtgaaaatcacaatcggtgaccata

SEQ ID NO: 20380 - DNA, 1690 bp, Zea Mays
atggctggatttggcaaggcagtggagattctagacacattaggctgcttgatgacgaccttgagctcagatggtggctttgtttccaggaccaagaccaaagggtgcaaaatatcaattcttgcttttgaggttgccaacacaatacttaaaggtgctagtattatgcaatcactctcagaagacactgtcacatacttcaaacaagttgtgcttccttccgaaggtgtacagaatttggtgtccagtgagatgagtgaattgatgcgaattgcagctaacgacaaaagagaggagctgaaaatattttctcaagagattgttaggttcgggaaccgctgtaaagatccccagtggcataacctggatcgctactttgtgaaaatcagaaaatgcgccccagaagcagttgaaagaaacgtcaatagcagagatgcaaaagttaatgagtcttgttcaacgtacaactgatttgtatcatgagctgcatgcattagacagatttgagcaagagtacttctctaggataaacggaaagggtcacacagatagaattgaaaaaggaggcaatattcaaattgtgaaactggagttgaagacccaaagtagttatgtaaagagcttgaagaaaagatctctttggtccaagacgttggaagaagtagttgagaagtttgtagacattatgcactacttacatgttgagatcaacaatgatttcggatcttctgatggaggtgtgatgaatgccgaatcaactgagagctgtcaaaggcgtttctcgatcagggtatgtgccatcaaattcaagagatgcactgtaccagggattgccaccaaggatcaagtcagcactaccaaataaattgagaacgacctcggtgcctcaggagctcactattgatcaaataagggctaggatggagaaaactctgaaatggcttattcccatggccgtcaataccacctgcgctcgaggtttcttgaggtttagcgaatgggcgaaatcagggactgagagggttggtaggcgaccgggtgtagcagatcggattgagacgctataccatgctgacaaggcaaggactgaggactgcattctagagttgctcgtctggctccatcacctcgtcagccagagtaaccggttggcaatgcaaaaagtcactgaccaatgtatctaaccaaaagtcaggaattgtcatatgggccatcacatgctagcatcgcacggcgacttctatccagaaaaaaagaggctgggtttgtcgagtggtccaaggtatccaaaattatatggaaaagaggggacatcaaaattttctgatccagcttgctggttgttttcgtctttgttattaggttgtagatggaatctagagttgttcttgccatggaggtcgtgtgtttttcttctttccatggaggacgtgcggtttttcttgtccggatacagtcgggcatgcagcatgcttatatgtgctccgtacattagctgagtaggtgtagtataagaagagccctttttttttcttctctttgatctgcttgttatttgtaagtgtagttgtgacaatcacattatacaaagaaaacgcacgtcatgtcagtgcagtgaaaaacaaacaaacatgaatctcttttcatatacatatatctgccgtcgtgaaaatcacaatcggtgaccata

SEQ ID NO: 20381 - DNA, 1761 bp, Zea Mays
atggctggatttggcaaggcagtggagattctagacacattaggctgcttgatgacgaccttgagctcagatggtggctttgtttccaggaccaagaccaaagggtgcaaaatatcaattcttgcttttgaggttgccaacacaatacttaaaggtgctagtattatgcaatcactctcagaagacactgtcacatacttcaaacaagttgtgcttccttccgaaggtgtacagaatttggtgtccagtgagatgagtgaattgatgcgaattgcagctaacgacaaaagagaggagctgaaaatattttctcaagagattgttaggttcgggaaccgctgtaaagatccccagtggcataacctggatcgctactttgtgaagttagaatcagaaaatgcgccccagaagcagttgaaagaaacgtcaatagcagagatgcaaaagttaatgagtcttgttcaacgtacaactgatttgtatcatgagctgcatgcattagacagatttgagcaagagtacttctctaggataaacggaaagggtcacacagatagaattgaaaaaggttactttgcaggaggcaatattcaaattgtgaaactggagttgaagacccaaagtagttatgtaaagagcttgaagaaaagatctctttggtccaagacgttggaagaagtagttgagaagtttgtagacattatgcactacttacatgttgagatcaacaatgatttcggatcttctgatggaggtgtgatgaatgccgaatcaactgagagctgtcaaaggctaggacctgctggacttgcattacattatgcaaacattatcattcagatatacagtttctcgatcagggtatgtgccatcaaattcaagagatgcactgtaccagggattgccaccaaggatcaagtcagcactaccaaataaattgagaacgacctcggtgcctcaggagctcactattgatcaaataagggctaggatggagaaaactctgaaatggcttattcccatggccgtcaataccacctgcgctcgaggtttcttgaggtttagcgaatgggcgaaatcagggactgagagggttggtaggcgaccgggtgtagcagatcggattgagacgctataccatgctgacaaggcaaggactgaggactgcattctagagttgctcgtctggctccatcacctcgtcagccagagtaaccggttggcaatgcaaaaagtcactgaccaatgtatctaaccaaaagtcaggaattgtcatatgggccatcacatgctagcatcgcacggcgacttctatccagaaaaaaagaggctgggtttgtcgagtggtccaaggtatccaaaattatatggaaaagaggggacatcaaaattttctgatccagcttgctggttgttttcgtctttgttattaggttgtagatggaatctagagttgttcttgccatggaggtcgtgtgtttttcttctttccatggaggacgtgcggtttttcttgtccggatacagtcgggcatgcagcatgcttatatgtgctccgtacattagctgagtaggtgtagtataagaagagccctttttttttcttctctttgatctgcttgttatttgtaagtgtagttgtgacaatcacattatacaaagaaaacgcacgtcatgtcagtgcagtgaaaaacaaacaaacatgaatctcttttcatatacatatatctgccgtcgtgaaaatcacaatcggtgaccata

SEQ ID NO: 20382 - DNA, 1917 bp, Zea Mays
cttcattgttctttctgtgccaccggaaacagttgcagtacttttgtcctgcaggcaccacaatttcagaaaaaaagttgcaactgttaacgtcagccacctaaatgtaacagtgacagagaacccaaaacagaaggaaggaatatggggttgttgttgttgaccatatggggctcgctacttggaagaaactgaatagcactgattttcatatcttgcacgattgacaggttggggggggggggggggggggttcttacgtcagtcgctttgcgacaaagaacacaggtattctttgtagtttcccttcgtgtgcaggtttcagtgcatcaattacttgctcagcttgagtgcctgcggcagtcaagacaaactggaaatggaaagggtgtcaagttggaactcagaatttgttgtgtagtaaacaattgtaaaatcagtcaaagcactcttttccaaagcatctaggcactatgtaacaaaaactttaaattgatcaaggacatgtatctcaaaaagctcctgctccagggcaagatgaggaaagctgagatagcataataagtgtccatggcttgctctcttcttcacatacacaaatctgatattccacccagttcaggactagtattcttttggtcatgttttcgaactggtttgtacagttagggtgctgtgtgagtgggcgtggtgtgggtgttgtaagtctggccttagctagacagatttgtccctttccttcttaatgaaatgacacgcaggtctcctgcgttgttcgaaaaaataggactagtattctctctttttttttctgaaagttcaggactagtattttgagacaggtacagtgtgcaatcaccatatgccatacttctttcataatgattaataaataaccacatgcagacttctgatttttgttaattgccaacagggaactagataacaggaaaaaagggcagctagaggtactgtagaacaattgtgcacgtttggcaaaaaagcaattgcacaaattaaaactatagactgacaattcttagttctcaaatgtaatgctccaaaaaaaaacatataaaatttagaaaaaaaggaaccctgactgaaatgtgctaaaccgtaccaacggataaagtatagccagaaacccatagcttataagaggagagaagaagaaaattggaaggacgcatggagcacctacataggaaaaacaaataacatgtcagaataacacaaaaaaccagcttgtagctagcatatagtttattgaagaatatcaagaaatgacatgatagtgataagtgagcaattttacagaaaaacaacagtgccccctaacgtatgatggatgttctccaaattacagcaagaatatggttttaaatggttcagaacctattagacaagtggttggctatttacatttggaaattatagtgcaatggtttcgtttgatgcatattaagcgctactatgttttcatgtgtgaagcaagctgaactcgcaatcaatatttagtaatctataatcacagaaactttcccataacaagctgaaagtgcagattcttctttccatgaacgtacccacacacatgtaaaatgaaacaagttatttcacaccgacaaaatgtgcataaaaaagctgttgatagcatgcaaaatatgtagttgtaactataaaacaaagtttgatcactctttatatcaatgagataacaataagaccaccgatgtgaccaaatcctattcaacaaaatgccaagtgaaaagaagcagtttaataccacaaatctgtattactccaataactagactaaagaaaaaacagcatatcatacgacatcaccaatcagagcataaattgccaacataccaaatccagcaaagaacgcccagtttgattcaaagaaat

SEQ ID NO: 20383 - DNA, 193 bp, Zea Mays
ctgtcaaatccttcaggctgctcttttgtttcagttatgttgtgagcatccagtgattgagtcaaaactaggctcttacttttcacaacatccaatgcatgcttggcaatgtcattatacctggcataaaatgttccacatcacaaaatggataaaagcatgctcccttgttcagtctcggagttatacataa

SEQ ID NO: 20384 - DNA, 685 bp, Zea Mays
acaaatgataatggcaaaattgacaatgctcatcgtcgaaggcccgaccgcaacaaatcacaccgaaccacaccacaccaccggcggcggcggcgacccagtcgagaacacgaaggcgatggcgacagcgctgaaccgcgggctccgcctcctcgccgccggcgccgaggcgtccaagccagcttctcgtggattccatgccaccggcgtgaagagaatgggagggcatggccatgatgagccatactacatccatgccaagcacatgtataacttgcacaggatgaagcatcagggtttgaaggtgacactctccgtgctgggagcggttggcatcggtgttggagtccctgtgtatgcagtcatattccagcagaagaagactgcctctggctgagatgatgcctctcgctgcctgcatatggagacttattttgagcgacatttttttgaagttaaaagcttggacttcatcctatcttggctgtggagattggggaaaactcagcgctgataccatttgttacttttctgtttcttgtcatgcttcttgtgttgactgctgagcatgtttagctggtgtgttgccttttgaggtgtcacttgcttttgtatcaggatgcttacaatttaatggaaattactgtgtagtagcaaggggcttgacctggatcttggaaaccag

SEQ ID NO: 20385 - DNA, 4381 bp, Zea Mays
cacactttccctaaggttagtcgttagaattgaataactaaccttaggcagaaaagttaggcaaagtgtggtaactgaggtagtgaaccaaacagacccatagtcttactcttttagccgcgaaccgaacaaccaaaacccagcagttccgccgtcgcggaattccgaaagcccgccgtcgccggagacgatcgcgcacacttcgcacgggcacgactgtggccaaatggcgccgaagaagaagcagccggactcgaagcagaggcagaagcccaagtcctcgtcctcctcatccgcagccaccgccgcgccgcgcctccagatctcgtcggagaacgagcgccgcctccgccgcctcctccttaactcctccgcaccatccccgtcacctgccaacgtctcggaagtccgcggcgagtcgagggagcagaaggcgcggcggctgcgtggcgtgtacgacaagctcgctctcgagggcttctcttccgcgcaaatcgagcaggcgctctccgcgatacccgattcggcgacgtttgaatcggcgttggactggctatgttttaatctgcctggcgatgagctccccctcaagttctccagcgctggcgacagcaccatgtcgtctctcacaggagctgaaggttctgttaaagtactgtccacagccaaggacaattgggtgccacagagtcgtgaacctgaggaggtgaaggtgagcaccgaggggttggaagttagaattggtgggcggagagatgagaatgtgtcactggatgatgggcgattgtcacaagctgcatggattcgtcaatacatggaacaacaagaggaggaagaggatgcaaattccaatgattcctctacatgggaggatcactgcttacaaagttttgaagttgtcgaagcaaagccaagtaggcggaagagcaaggctgcaaaaaagaattccaagcatggaaacttgaaggaacagataagctatcctaccaattctgtatcttcaaattctgaaactgcaaatgttgagggtgttcagaatgatttagaggcaagtgaggaaagatctgagagtctaggcaatattgatgaaggatctgatttgaaaaaggaaattcctaaggatattgataaaacttgtgcaaaggaggtagacgaagaggtgatagagcttgataacatgttctttgaagactcatctgcttgggaagcagtggctccagaaatcttgaaacagcaacaaatagagaaattatcacatgatggttatggccatcttattggaaacatagatgatatatggaagaagggagattctggtaaaatgccgaaagctgttctacaaaagttttgtcaaaaacttggttgggaagcaccaaagtataataaaatatctgagagagatggcaaatttgtatattctgttaatgtgttgcggggagctactggccgtggtaagagtcggaaggctggaggcttgacgataatccagttacctaaactacatgaagaatatggatctgttcaggaagcacaaagtcgagttgcagcttttgctctatatcaattttttgctgaccttccactacgtcaactgcttactgagccatactcatcacttattttaagatggcaagaaggtgaattgtcatctacatcaagggtgctggttacggaggataggcgaagatctggctttgtagatatgttattgaatatagatgcagatacaattccttcatctgaaatagaaaattctgatactgatgtcatatctatggattctgggaatactgaaggcagcaaatctgtgaatgagaagagacagactaccatgacgagttgtatgggattgaaatcagcagagcgtgcagagagtgcaattttgaaaaagcagttggaagataaaaggaagctaccaaattacttgaaaatgctggaagcaagagcttctctaccaatagctagacagaggcaacacttcctacagttgctgaaagagaacgatgtagttgttgttagtggagaaactggatgtgggaaaacaactcaggtgccacagtttattttggatgacatgattgaatctgaacttggaggttcttgcaatatagtttgcacacagccccggcggatagcggctatttctgtggccgaaagagtatctgatgaaaggtgtgaaccatcacctggatcgaatgattcactggtcggataccaagttcgtctcgacagtgcacggaatgagaggacaaagcttttgttctgtactactggtatccttctcagaaagttatctggaaacagagacttaagtgatgttacccatgttgttgtggatgaagtacatgaacgtacaattttgagtgacttcctgcttattgttcttaagaatcttgttgagaaacgctccaatcaacaaggaaggaagttgaaagtgattctcatgtctgcaacggttgattcaagcctatttgcacgatattttggagaatgccccgtgatcagtgttgaaggaagaacacatccagtgtcaactcattttcttgaggatgtttatgagaaaatggagtactgtcttgcattggattctcctgcatcaggagcttactttgcgcagcatggggaaaagtggaagcatgctagcagctcagtgaacaaccgacgaggaaaaaagaaccttgtcttatcctcatggggtgatgagtcaacgctttccgaaggctatgttaaccctcactatatttctgattactataggtcatataatgagagaaccaaccaaaatctaaaacgcttgaatgaagatgtcatcgattttgatctattggaagacttgatatgctatattgatgagaactgtcctcagggtgctattcttgtttttcttcctggagttgcagagattgacttgttgattgatagattatctgctttagttagatttggaggggcatcatctgattggatccttcctttacattcactgcttggaccctctgatcaaaggaaagtgttccagtctccaccagataacttccgcaaggttattattgccacagacatagcagagaccagcattacaattgatgatgtagtatatgtagttgatactggaaagcacaaggagaaccgttataatccacacaagaaaatgtcaagcatagtagaagattggatttctcgtgcaaatgcaaaacagagacggggtagggctggtcgtgtgaagcctggtttatgtttctgtctgtatacaaggcatcggtttgaaaacgtcatgcgtccatttcaggtgcctgagatgttacggatgcctttgactgagctgtgcctgcaaataaaatcacttcatcttgatgacatcaaatccttcctgctaaaggcagtagagccccctaatgaagaagctatttcctctgcagttgacttgttatacaaggttggagcttttgaaggacatgaagagttgtcacctcttgggtatcatctggcgaaactgcctgttgatgttttgattggaaagatgatgctttatggtgctatctttggttgtttatcaccaattctgtccgttgctgctttcctgagttataaatctccatttctctctccaaaagatgagaagcaaaatgtggagaaagcaaaagccacattattgaatgagaaccttgatggatctagttctgtaacagataataaacaatccgatcacctgctaatggtaattgcatacgacaaatggtcccgcatactgctacagaatggtgataaatctgctcgtcagttttgccattcattctacttgaatagtactgtgatgcacatgatcagggacatgcgtcttcagtttggtaccttgttagcagacattggacttatagatcttcctaaagatactctgaggcacaaggtgggcagtagaaaaaataatctcgagagctggttttctaatatgtctcttccattcaatgcctatgctcgctgcacctcggttattaagtcggtgatgtgtgcaggtctataccctaatgtggcagcatctctagagggtgttgatcctggagctctaggtggaagaaagccatctgatgttctgttcagtaaggaccgtcctcgatggtatgatggaaggcgagaagttcatatacatccatcatctgttaatcacagcttgaaagctgttcaatatccatttttggtgtttcttgaaaaggttgagacaaccaaggtgttcttacgtgatactagcgtcgtttccccctactcacttcttttgtttggtggttccatggtaatccaacatcagtgtttgtccatgactccatgtgacttttctggtgacagtagagggtggtggaaacccttcaatgtgaaccttttttag

SEQ ID NO: 20386 - DNA, 5945 bp, Zea Mays
cttactcttttagccgcgaaccgaacaaccaaaacccagcagttccgccgtcgcggaattccgaaagcccgccgtcgccggagacgatcgcgcacacttcgcacgggcacgactgtggccaaatggcgccgaagaagaagcagccggactcgaagcagaggcagaagcccaagtcctcgtcctcctcatccgcagccaccgccgcgccgcgcctccagatctcgtcggagaacgagcgccgcctccgccgcctcctccttaactcctccgcaccatccccgtcacctgccaacgtctcggaagtccgcggcgagtcgagggagcagaaggcgcggcggctgcgtggcgtgtacgacaagctcgctctcgagggcttctcttccgcgcaaatcgagcaggcgctctccgcgatacccgattcggcgacgtttgaatcggcgttggactggctatgttttaatctgcctggcgatgagctccccctcaagttctccagcgctggcgacagcaccatgtcgtctctcacaggagctgaaggttctgttaaagtactgtccacagccaaggacaattgggtgccacagagtcgtgaacctgaggaggtgaaggtgagcaccgaggggttggaagttagaattggtgggcggagagatgagaatgtgtcactggatgatgggcgattgtcacaagctgcatggattcgtcaatacatggaacaacaagaggaggaagaggatgcaaattccaatgattcctctacatgggaggatcactgcttacaaagttttgaagttgtcgaagcaaagccaagtaggcggaagagcaaggctgcaaaaaagaattccaagcatggaaacttgaaggaacagataagctatcctaccaattctgtatcttcaaattctgaaactgcaaatgttgagggtgttcagaatgatttagaggcaagtgaggaaagatctgagagtctaggcaatattgatgaaggatctgatttgaaaaaggaaattcctaaggatattgataaaacttgtgcaaaggaggtagacgaagaggtgatagagcttgataacatgttctttgaagactcatctgcttgggaagcagtggctccagaaatcttgaaacagcaacaaatagagaaattatcacatgatggttatggccatcttattggaaacatagatgatatatggaagaagggagattctggtaaaatgccgaaagctgttctacaaaagttttgtcaaaaacttggttgggaagcaccaaagtataataaaatatctgagagagatggcaaatttgtatattctgttaatgtgttgcggggagctactggccgtggtaagagtcggaaggctggaggcttgacgataatccagttacctaaactacatgaagaatatggatctgttcaggaagcacaaagtcgagttgcagcttttgctctatatcaattttttgctgaccttccactacgtcaactgcttactgagccatactcatcacttattttaagatggcaagaaggtgaattgtcatctacatcaagggtgctggttacggaggataggcgaagatctggctttgtagatatgttattgaatatagatgcagatacaattccttcatctgaaatagaaaattctgatactgatgtcatatctatggattctgggaatactgaaggcagcaaatctgtgaatgagaagagacagactaccatgacgagttgtatgggattgaaatcagcagagcgtgcagagagtgcaattttgaaaaagcagttggaagataaaaggaagctaccaaattacttgaaaatgctggaagcaagagcttctctaccaatagctagacagaggcaacacttcctacagttgctgaaagagaacgatgtagttgttgttagtggagaaactggatgtgggaaaacaactcaggtgccacagtttattttggatgacatgattgaatctgaacttggaggttcttgcaatatagtttgcacacagccccggcggatagcggctatttctgtggccgaaagagtatctgatgaaaggtgtgaaccatcacctggatcgaatgattcactggtcggataccaagttcgtctcgacagtgcacggaatgagaggacaaagcttttgttctgtactactggtatccttctcagaaagttatctggaaacagagacttaagtgatgttacccatgttgttgtggatgaagtacatgaacgtacaattttgagtgacttcctgcttattgttcttaagaatcttgttgagaaacgctccaatcaacaaggaaggaagttgaaagtgattctcatgtctgcaacggttgattcaagcctatttgcacgatattttggagaatgccccgtgatcagtgttgaaggaagaacacatccagtgtcaactcattttcttgaggatgtttatgagaaaatggagtactgtcttgcattggattctcctgcatcaggagcttactttgcgcagcatggggaaaagtggaagcatgctagcagctcagtgaacaaccgacgaggaaaaaagaaccttgtcttatcctcatggggtgatgagtcaacgctttccgaaggctatgttaaccctcactatatttctgattactataggtcatataatgagagaaccaaccaaaatctaaaacgcttgaatgaagatgtcatcgattttgatctattggaagacttgatatgctatattgatgagaactgtcctcagggtgctattcttgtttttcttcctggagttgcagagattgacttgttgattgatagattatctgctttagttagatttggaggggcatcatctgattggatccttcctttacattcactgcttggaccctctgatcaaaggaaagtgttccagtctccaccagataacttccgcaaggttattattgccacagacatagcagagaccagcattacaattgatgatgtagtatatgtagttgatactggaaagcacaaggagaaccgttataatccacacaagaaaatgtcaagcatagtagaagattggatttctcgtgcaaatgcaaaacagagacggggtagggctggtcgtgtgaagcctggtttatgtttctgtctgtatacaaggcatcggtttgaaaacgtcatgcgtccatttcaggtgcctgagatgttacggatgcctttgactgagctgtgcctgcaaataaaatcacttcatcttgatgacatcaaatccttcctgctaaaggcagtagagccccctaatgaagaagctatttcctctgcagttgacttgttatacaaggttggagcttttgaaggacatgaagagttgtcacctcttgggtatcatctggcgaaactgcctgttgatgttttgattggaaagatgatgctttatggtgctatctttggttgtttatcaccaattctgtccgttgctgctttcctgagttataaatctccatttctctctccaaaagatgagaagcaaaatgtggagaaagcaaaagccacattattgaatgagaaccttgatggatctagttctgtaacagataataaacaatccgatcacctgctaatggtaattgcatacgacaaatggtcccgcatactgctacagaatggtgataaatctgctcgtcagttttgccattcattctacttgaatagtactgtgatgcacatgatcagggacatgcgtcttcagtttggtaccttgttagcagacattggacttatagatcttcctaaagatactctgaggcacaaggtgggcagtagaaaaaataatctcgagagctggttttctaatatgtctcttccattcaatgcctatgctcgctgcacctcggttattaagtcggtgatgtgtgcaggtctataccctaatgtggcagcatctctagagggtgttgatcctggagctctaggtggaagaaagccatctgatgttctgttcagtaaggaccgtcctcgatggtatgatggaaggcgagaagttcatatacatccatcatctgttaatcacagcttgaaagctgttcaatatccatttttggtgtttcttgaaaaggttgagacaaccaaggtgttcttacgtgatactagcgtcgtttccccctactcacttcttttgtttggtggttccatggtaatccaacatcagacaggagtggttgttatagatggatggttgaggctgtctgctgctgcacagactgctgttttattcaagcaacttcggatgactcttgatgctgttctaaaagaactgacaagaaaaccagagatggcaacttttgttgacaacgaagtggtcaggtccatcattcatttattgttagaagaagacaaggctcgataagcatgaattcatggcaatcctatcgatactaattttttagtaaaaacactatcggtccctaaaattttttagtaaaaacactgtcggtccctaaacttttaagtgtatcatccggttcctacactcctaaaatgcacatcgagctttctttggtagggaaacttgtatgattgctcgtttgaatcattctactgcatatcactaataaaatatattttttctagccccttttttccgtccacgtttgaagaatgataatgaatagacatacatacaaactacattcacatgttaatcaatgaatttatattaaatctaaaacgaattatattttggtaaatgataatgaatagacatacatacaaactacattcacatgttaatcaatgaatttatattaaatctaaaacgaattatattttggtacggagggagtaataattcttgagttgagtagtagtatcatctgtttggtaatttcattatgatatgataattttaactggccaatgaggatcaatattttgtaaatgtgtccatgtgattatgatttcttgcacgattcgaaaatgtaggagaaattacgggttggcatcttatccattttatttgttgtattgggtgtcttaatggggccaccagagacaggacacagccacctgatgttgagagactggaaacattctaattgtgtttctatcgaaacaaaatttgaaagtaggggactgcaaaataagggtctgttacagatccgtcatcccctactctcgaccaagtaggggactgcaaaattcactctaccaaaaaccactcaaaataccactaacaaaagaaggacctgaccaaccttccgctagaactacttagccaaccccttgaacgaaacctgtcaaataatggtagaaaacatggtgtctagtatgtaagtttgaagatacgcttttcagctactgttcttgttgctaatgtacgcttaatatccagatgatagccttttttaggatataattatgctattcagttgcatggacagatggttttagaacttggccattttgatattttctgttccgtcattctttgtaggcttttgatcagtatcggtttctgccgatgtgcacgttagtctgcacaggattcttattgcacaatgtggctgattgctaatgtggaagctgcaaagcggaaaaggagtttaatatattattcggctggctggttgttttatatggaacaagtttgtgtcggtctagtattagtgtaatacccttgtcctaattttggagcttacgtgcatcaacgtacagagcagataaaactcaaaagcctgaattgccgtcaattttccatctgacactttggacagaaaaaatgaaaaaaaatgaagagggaaaaaccatatacatatatgaaactgtagcaaatactattatagatggcagttagtgatgatgagagttgcattaggattcctgatatttagcgttgcacaccttgcacttgttgtacctcgtgatagttgcaattgaaaaattttggaacccaacc

SEQ ID NO: 20387 - DNA, 4978 bp, Zea Mays
ctcttttagccgcgaaccgaacaaccaaaacccagcagttccgccgtcgcggaattccgaaagcccgccgtcgccggagacgatcgcgcacacttcgcacgggcacgactgtggccaaatggcgccgaagaagaagcagccggactcgaagcagaggcagaagcccaagtcctcgtcctcctcatccgcagccaccgccgcgccgcgcctccagatctcgtcggagaacgagcgccgcctccgccgcctcctccttaactcctccgcaccatccccgtcacctgccaacgtctcggaagtccgcggcgagtcgagggagcagaaggcgcggcggctgcgtggcgtgtacgacaagctcgctctcgagggcttctcttccgcgcaaatcgagcaggcgctctccgcgatacccgattcggcgacgtttgaatcggcgttggactggctatgttttaatctgcctggcgatgagctccccctcaagttctccagcgctggcgacagcaccatgtcgtctctcacaggagctgaaggttctgttaaagtactgtccacagccaaggacaattgggtgccacagagtcgtgaacctgaggaggtgaaggtgagcaccgaggggttggaagttagaattggtgggcggagagatgagaatgtgtcactggatgatgggcgattgtcacaagctgcatggattcgtcaatacatggaacaacaagaggaggaagaggatgcaaattccaatgattcctctacatgggaggatcactgcttacaaagttttgaagttgtcgaagcaaagccaagtaggcggaagagcaaggctgcaaaaaagaattccaagcatggaaacttgaaggaacagataagctatcctaccaattctgtatcttcaaattctgaaactgcaaatgttgagggtgttcagaatgatttagaggcaagtgaggaaagatctgagagtctaggcaatattgatgaaggatctgatttgaaaaaggaaattcctaaggatattgataaaacttgtgcaaaggaggtagacgaagaggtgatagagcttgataacatgttctttgaagactcatctgcttgggaagcagtggctccagaaatcttgaaacagcaacaaatagagaaattatcacatgatggttatggccatcttattggaaacatagatgatatatggaagaagggagattctggtaaaatgccgaaagctgttctacaaaagttttgtcaaaaacttggttgggaagcaccaaagtataataaaatatctgagagagatggcaaatttgtatattctgttaatgtgttgcggggagctactggccgtggtaagagtcggaaggctggaggcttgacgataatccagttacctaaactacatgaagaatatggatctgttcaggaagcacaaagtcgagttgcagcttttgctctatatcaattttttgctgaccttccactacgtcaactgcttactgagccatactcatcacttattttaagatggcaagaaggtgaattgtcatctacatcaagggtgctggttacggaggataggcgaagatctggctttgtagatatgttattgaatatagatgcagatacaattccttcatctgaaatagaaaattctgatactgatgtcatatctatggattctgggaatactgaaggcagcaaatctgtgaatgagaagagacagactaccatgacgagttgtatgggattgaaatcagcagagcgtgcagagagtgcaattttgaaaaagcagttggaagataaaaggaagctaccaaattacttgaaaatgctggaagcaagagcttctctaccaatagctagacagaggcaacacttcctacagttgctgaaagagaacgatgtagttgttgttagtggagaaactggatgtgggaaaacaactcaggtgccacagtttattttggatgacatgattgaatctgaacttggaggttcttgcaatatagtttgcacacagccccggcggatagcggctatttctgtggccgaaagagtatctgatgaaaggtgtgaaccatcacctggatcgaatgattcactggtcggataccaagttcgtctcgacagtgcacggaatgagaggacaaagcttttgttctgtactactggtatccttctcagaaagttatctggaaacagagacttaagtgatgttacccatgttgttgtggatgaagtacatgaacgtacaattttgagtgacttcctgcttattgttcttaagaatcttgttgagaaacgctccaatcaacaaggaaggaagttgaaagtgattctcatgtctgcaacggttgattcaagcctatttgcacgatattttggagaatgccccgtgatcagtgttgaaggaagaacacatccagtgtcaactcattttcttgaggatgtttatgagaaaatggagtactgtcttgcattggattctcctgcatcaggagcttactttgcgcagcatggggaaaagtggaagcatgctagcagctcagtgaacaaccgacgaggaaaaaagaaccttgtcttatcctcatggggtgatgagtcaacgctttccgaaggctatgttaaccctcactatatttctgattactataggtcatataatgagagaaccaaccaaaatctaaaacgcttgaatgaagatgtcatcgattttgatctattggaagacttgatatgctatattgatgagaactgtcctcagggtgctattcttgtttttcttcctggagttgcagagattgacttgttgattgatagattatctgctttagttagatttggaggggcatcatctgattggatccttcctttacattcactgcttggaccctctgatcaaaggaaagtgttccagtctccaccagataacttccgcaaggttattattgccacagacatagcagagaccagcattacaattgatgatgtagtatatgtagttgatactggaaagcacaaggagaaccgttataatccacacaagaaaatgtcaagcatagtagaagattggatttctcgtgcaaatgcaaaacagagacggggtagggctggtcgtgtgaagcctggtttatgtttctgtctgtatacaaggcatcggtttgaaaacgtcatgcgtccatttcaggtgcctgagatgttacggatgcctttgactgagctgtgcctgcaaataaaatcacttcatcttgatgacatcaaatccttcctgctaaaggcagtagagccccctaatgaagaagctatttcctctgcagttgacttgttatacaaggttggagcttttgaaggacatgaagagttgtcacctcttgggtatcatctggcgaaactgcctgttgatgttttgattggaaagatgatgctttatggtgctatctttggttgtttatcaccaattctgtccgttgctgctttcctgagttataaatctccatttctctctccaaaagatgagaagcaaaatgtggagaaagcaaaagccacattattgaatgagaaccttgatggatctagttctgtaacagataataaacaatccgatcacctgctaatggtaattgcatacgacaaatggtcccgcatactgctacagaatggtgataaatctgctcgtcagttttgccattcattctacttgaatagtactgtgatgcacatgatcagggacatgcgtcttcagtttggtaccttgttagcagacattggacttatagatcttcctaaagatactctgaggcacaaggtgggcagtagaaaaaataatctcgagagctggttttctaatatgtctcttccattcaatgcctatgctcgctgcacctcggttattaagtcggtgatgtgtgcaggtctataccctaatgtggcagcatctctagagggtgttgatcctggagctctaggtggaagaaagccatctgatgttctgttcagtaaggaccgtcctcgatggtatgatggaaggcgagaagttcatatacatccatcatctgttaatcacagcttgaaagctgttcaatatccatttttggtgtttcttgaaaaggttgagacaaccaaggtgttcttacgtgatactagcgtcgtttccccctactcacttcttttgtttggtggttccatggtaatccaacatcagacaggagtggttgttatagatggatggttgaggctgtctgctgctgcacagactgctgttttattcaagcaacttcggatgactcttgatgctgttctaaaagaactgacaagaaaaccagagatggcaacttttgttgacaacgaagtggtcaggtccatcattcatttattgttagaagaagacaaggctcgataagcatgaattcatggcttttgatcagtatcggtttctgccgatgtgcacgttagtctgcacaggattcttattgcacaatgtggctgattgctaatgtggaagctgcaaagcggaaaaggagtttaatatattattcggctggctggcttcaggtgtttggactgctgcagctgtaatctatagaaacaaaatactatagaaaccacagttgcagtcggattaaagccgcagcaagccgcagtgattaatgtgttgcttgttttatatggaacaagtttgtgtcggtctagtattagtgtaatacccttgtcctaattttggagcttacgtgcatcaacgtacagagcagataaaactcaaaagcctgaattgccgtcaattttccatctgacactttggacagaaaaaatgaaaaaaaatgaagagggaaaaaccatatacatatatgaaactgtagcaaatactattatagatggcagttagtgatgatgagagttgcattaggattcctgatatttagcgttgcacaccttgcacttgttgtacctcgtgatagttgcaattgaaaaattttggaacccaacc

SEQ ID NO: 20388 - DNA, 4216 bp, Zea Mays
gaacaaccaaaacccagcagttccgccgtcgcggaattccgaaagcccgccgtcgccggagacgatcgcgcacacttcgcacgggcacgactgtggccaaatggcgccgaagaagaagcagccggactcgaagcagaggcagaagcccaagtcctcgtcctcctcatccgcagccaccgccgcgccgcgcctccagatctcgtcggagaacgagcgccgcctccgccgcctcctccttaactcctccgcaccatccccgtcacctgccaacgtctcggaagtccgcggcgagtcgagggagcagaaggcgcggcggctgcgtggcgtgtacgacaagctcgctctcgagggcttctcttccgcgcaaatcgagcaggcgctctccgcgatacccgattcggcgacgtttgaatcggcgttggactggctatgttttaatctgcctggcgatgagctccccctcaagttctccagcgctggcgacagcaccatgtcgtctctcacaggagctgaaggttctgttaaagtactgtccacagccaaggacaattgggtgccacagagtcgtgaacctgaggaggtgaaggtgagcaccgaggggttggaagttagaattggtgggcggagagatgagaatgtgtcactggatgatgggcgattgtcacaagctgcatggattcgtcaatacatggaacaacaagaggaggaagaggatgcaaattccaatgattcctctacatgggaggatcactgcttacaaagttttgaagttgtcgaagcaaagccaagtaggcggaagagcaaggctgcaaaaaagaattccaagcatggaaacttgaaggaacagataagctatcctaccaattctgtatcttcaaattctgaaactgcaaatgttgagggtgttcagaatgatttagaggcaagtgaggaaagatctgagagtctaggcaatattgatgaaggatctgatttgaaaaaggaaattcctaaggatattgataaaacttgtgcaaaggaggtagacgaagaggtgatagagcttgataacatgttctttgaagactcatctgcttgggaagcagtggctccagaaatcttgaaacagcaacaaatagagaaattatcacatgatggttatggccatcttattggaaacatagatgatatatggaagaagggagattctggtaaaatgccgaaagctgttctacaaaagttttgtcaaaaacttggttgggaagcaccaaagtataataaaatatctgagagagatggcaaatttgtatattctgttaatgtgttgcggggagctactggccgtggtaagagtcggaaggctggaggcttgacgataatccagttacctaaactacatgaagaatatggatctgttcaggaagcacaaagtcgagttgcagcttttgctctatatcaattttttgctgaccttccactacgtcaactgcttactgagccatactcatcacttattttaagatggcaagaaggtgaattgtcatctacatcaagggtgctggttacggaggataggcgaagatctggctttgtagatatgttattgaatatagatgcagatacaattccttcatctgaaatagaaaattctgatactgatgtcatatctatggattctgggaatactgaaggcagcaaatctgtgaatgagaagagacagactaccatgacgagttgtatgggattgaaatcagcagagcgtgcagagagtgcaattttgaaaaagcagttggaagataaaaggaagctaccaaattacttgaaaatgctggaagcaagagcttctctaccaatagctagacagaggcaacacttcctacagttgctgaaagagaacgatgtagttgttgttagtggagaaactggatgtgggaaaacaactcaggtgccacagtttattttggatgacatgattgaatctgaacttggaggttcttgcaatatagtttgcacacagccccggcggatagcggctatttctgtggccgaaagagtatctgatgaaaggtgtgaaccatcacctggatcgaatgattcactggtcggataccaagttcgtctcgacagtgcacggaatgagaggacaaagcttttgttctgtactactggtatccttctcagaaagttatctggaaacagagacttaagtgatgttacccatgttgttgtggatgaagtacatgaacgtacaattttgagtgacttcctgcttattgttcttaagaatcttgttgagaaacgctccaatcaacaaggaaggaagttgaaagtgattctcatgtctgcaacggttgattcaagcctatttgcacgatattttggagaatgccccgtgatcagtgttgaaggaagaacacatccagtgtcaactcattttcttgaggatgtttatgagaaaatggagtactgtcttgcattggattctcctgcatcaggagcttactttgcgcagcatggggaaaagtggaagcatgctagcagctcagtgaacaaccgacgaggaaaaaagaaccttgtcttatcctcatggggtgatgagtcaacgctttccgaaggctatgttaaccctcactatatttctgattactataggtcatataatgagagaaccaaccaaaatctaaaacgcttgaatgaagatgtcatcgattttgatctattggaagacttgatatgctatattgatgagaactgtcctcagggtgctattcttgtttttcttcctggagttgcagagattgacttgttgattgatagattatctgctttagttagatttggaggggcatcatctgattggatccttcctttacattcactgcttggaccctctgatcaaaggaaagtgttccagtctccaccagataacttccgcaaggttattattgccacagacatagcagagaccagcattacaattgatgatgtagtatatgtagttgatactggaaagcacaaggagaaccgttataatccacacaagaaaatgtcaagcatagtagaagattggatttctcgtgcaaatgcaaaacagagacggggtagggctggtcgtgtgaagcctggtttatgtttctgtctgtatacaaggcatcggtttgaaaacgtcatgcgtccatttcaggtgcctgagatgttacggatgcctttgactgagctgtgcctgcaaataaaatcacttcatcttgatgacatcaaatccttcctgctaaaggcagtagagccccctaatgaagaagctatttcctctgcagttgacttgttatacaaggttggagcttttgaaggacatgaagagttgtcacctcttgggtatcatctggcgaaactgcctgttgatgttttgattggaaagatgatgctttatggtgctatctttggttgtttatcaccaattctgtccgttgctgctttcctgagttataaatctccatttctctctccaaaagatgagaagcaaaatgtggagaaagcaaaagccacattattgaatgagaaccttgatggatctagttctgtaacagataataaacaatccgatcacctgctaatgaatggtgataaatctgctcgtcagttttgccattcattctacttgaatagtactgtgatgcacatgatcagggacatgcgtcttcagtttggtaccttgttagcagacattggacttatagatcttcctaaagatactctgaggcacaaggtgggcagtagaaaaaataatctcgagagctggttttctaatatgtctcttccattcaatgcctatgctcgctgcacctcggttattaagtcggtgatgtgtgcaggtctataccctaatgtggcagcatctctagagggtgttgatcctggagctctaggtggaagaaagccatctgatgttctgttcagtaaggaccgtcctcgatggtatgatggaaggcgagaagttcatatacatccatcatctgttaatcacagcttgaaagctgttcaatatccatttttggtgtttcttgaaaaggttgagacaaccaaggtgttcttacgtgatactagcgtcgtttccccctactcacttcttttgtttggtggttccatggtaatccaacatcagtgtttgtccatgactccatgtgacttttctggtgacagtagagggtggtggaaacccttcaatgtgaaccttttttag

SEQ ID NO: 20389 - DNA, 4231 bp, Zea Mays
ccaaaacccagcagttccgccgtcgcggaattccgaaagcccgccgtcgccggagacgatcgcgcacacttcgcacgggcacgactgtggccaaatggcgccgaagaagaagcagccggactcgaagcagaggcagaagcccaagtcctcgtcctcctcatccgcagccaccgccgcgccgcgcctccagatctcgtcggagaacgagcgccgcctccgccgcctcctccttaactcctccgcaccatccccgtcacctgccaacgtctcggaagtccgcggcgagtcgagggagcagaaggcgcggcggctgcgtggcgtgtacgacaagctcgctctcgagggcttctcttccgcgcaaatcgagcaggcgctctccgcgatacccgattcggcgacgtttgaatcggcgttggactggctatgttttaatctgcctggcgatgagctccccctcaagttctccagcgctggcgacagcaccatgtcgtctctcacaggagctgaaggttctgttaaagtactgtccacagccaaggacaattgggtgccacagagtcgtgaacctgaggaggtgaaggtgagcaccgaggggttggaagttagaattggtgggcggagagatgagaatgtgtcactggatgatgggcgattgtcacaagctgcatggattcgtcaatacatggaacaacaagaggaggaagaggatgcaaattccaatgattcctctacatgggaggatcactgcttacaaagttttgaagttgtcgaagcaaagccaactgcaaaaaagaattccaagcatggaaacttgaaggaacagataagctatcctaccaattctgtatcttcaaattctgaaactgcaaatgttgagggtgttcagaatgatttagaggcaagtgaggaaagatctgagagtctaggcaatattgatgaaggatctgatttgaaaaaggaaattcctaaggatattgataaaacttgtgcaaaggaggtagacgaagaggtgatagagcttgataacatgttctttgaagactcatctgcttgggaagcagtggctccagaaatcttgaaacagcaacaaatagagaaattatcacatgatggttatggccatcttattggaaacatagatgatatatggaagaagggagattctggtaaaatgccgaaagctgttctacaaaagttttgtcaaaaacttggttgggaagcaccaaagtataataaaatatctgagagagatggcaaatttgtatattctgttaatgtgttgcggggagctactggccgtggtaagagtcggaaggctggaggcttgacgataatccagttacctaaactacatgaagaatatggatctgttcaggaagcacaaagtcgagttgcagcttttgctctatatcaattttttgctgaccttccactacgtcaactgcttactgagccatactcatcacttattttaagatggcaagaaggtgaattgtcatctacatcaagggtgctggttacggaggataggcgaagatctggctttgtagatatgttattgaatatagatgcagatacaattccttcatctgaaatagaaaattctgatactgatgtcatatctatggattctgggaatactgaaggcagcaaatctgtgaatgagaagagacagactaccatgacgagttgtatgggattgaaatcagcagagcgtgcagagagtgcaattttgaaaaagcagttggaagataaaaggaagctaccaaattacttgaaaatgctggaagcaagagcttctctaccaatagctagacagaggcaacacttcctacagttgctgaaagagaacgatgtagttgttgttagtggagaaactggatgtgggaaaacaactcaggtgccacagtttattttggatgacatgattgaatctgaacttggaggttcttgcaatatagtttgcacacagccccggcggatagcggctatttctgtggccgaaagagtatctgatgaaaggtgtgaaccatcacctggatcgaatgattcactggtcggataccaagttcgtctcgacagtgcacggaatgagaggacaaagcttttgttctgtactactggtatccttctcagaaagttatctggaaacagagacttaagtgatgttacccatgttgttgtggatgaagtacatgaacgtacaattttgagtgacttcctgcttattgttcttaagaatcttgttgagaaacgctccaatcaacaaggaaggaagttgaaagtgattctcatgtctgcaacggttgattcaagcctatttgcacgatattttggagaatgccccgtgatcagtgttgaaggaagaacacatccagtgtcaactcattttcttgaggatgtttatgagaaaatggagtactgtcttgcattggattctcctgcatcaggagcttactttgcgcagcatggggaaaagtggaagcatgctagcagctcagtgaacaaccgacgaggaaaaaagaaccttgtcttatcctcatggggtgatgagtcaacgctttccgaaggctatgttaaccctcactatatttctgattactataggtcatataatgagagaaccaaccaaaatctaaaacgcttgaatgaagatgtcatcgattttgatctattggaagacttgatatgctatattgatgagaactgtcctcagggtgctattcttgtttttcttcctggagttgcagagattgacttgttgattgatagattatctgctttagttagatttggaggggcatcatctgattggatccttcctttacattcactgcttggaccctctgatcaaaggaaagtgttccagtctccaccagataacttccgcaaggttattattgccacagacatagcagagaccagcattacaattgatgatgtagtatatgtagttgatactggaaagcacaaggagaaccgttataatccacacaagaaaatgtcaagcatagtagaagattggatttctcgtgcaaatgcaaaacagagacggggtagggctggtcgtgtgaagcctggtttatgtttctgtctgtatacaaggcatcggtttgaaaacgtcatgcgtccatttcaggtgcctgagatgttacggatgcctttgactgagctgtgcctgcaaataaaatcacttcatcttgatgacatcaaatccttcctgctaaaggcagtagagccccctaatgaagaagctatttcctctgcagttgacttgttatacaaggttggagcttttgaaggacatgaagagttgtcacctcttgggtatcatctggcgaaactgcctgttgatgttttgattggaaagatgatgctttatggtgctatctttggttgtttatcaccaattctgtccgttgctgctttcctgagttataaatctccatttctctctccaaaagatgagaagcaaaatgtggagaaagcaaaagccacattattgaatgagaaccttgatggatctagttctgtaacagataataaacaatccgatcacctgctaatggtaattgcatacgacaaatggtcccgcatactgctacagaatggtgataaatctgctcgtcagttttgccattcattctacttgaatagtactgtgatgcacatgatcagggacatgcgtcttcagtttggtaccttgttagcagacattggacttatagatcttcctaaagatactctgaggcacaaggtgggcagtagaaaaaataatctcgagagctggttttctaatatgtctcttccattcaatgcctatgctcgctgcacctcggttattaagtcggtgatgtgtgcaggtctataccctaatgtggcagcatctctagagggtgttgatcctggagctctaggtggaagaaagccatctgatgttctgttcagtaaggaccgtcctcgatggtatgatggaaggcgagaagttcatatacatccatcatctgttaatcacagcttgaaagctgttcaatatccatttttggtgtttcttgaaaaggttgagacaaccaaggtgttcttacgtgatactagcgtcgtttccccctactcacttcttttgtttggtggttccatggtaatccaacatcagtgtttgtccatgactccatgtgacttttctggtgacagtagagggtggtggaaacccttcaatgtgaaccttttttag

SEQ ID NO: 20390 - DNA, 4756 bp, Zea Mays
ccaaaacccagcagttccgccgtcgcggaattccgaaagcccgccgtcgccggagacgatcgcgcacacttcgcacgggcacgactgtggccaaatggcgccgaagaagaagcagccggactcgaagcagaggcagaagcccaagtcctcgtcctcctcatccgcagccaccgccgcgccgcgcctccagatctcgtcggagaacgagcgccgcctccgccgcctcctccttaactcctccgcaccatccccgtcacctgccaacgtctcggaagtccgcggcgagtcgagggagcagaaggcgcggcggctgcgtggcgtgtacgacaagctcgctctcgagggcttctcttccgcgcaaatcgagcaggcgctctccgcgatacccgattcggcgacgtttgaatcggcgttggactggctatgttttaatctgcctggcgatgagctccccctcaagttctccagcgctggcgacagcaccatgtcgtctctcacaggagctgaaggttctgttaaagtactgtccacagccaaggacaattgggtgccacagagtcgtgaacctgaggaggtgaaggtgagcaccgaggggttggaagttagaattggtgggcggagagatgagaatgtgtcactggatgatgggcgattgtcacaagctgcatggattcgtcaatacatggaacaacaagaggaggaagaggatgcaaattccaatgattcctctacatgggaggatcactgcttacaaagttttgaagttgtcgaagcaaagccaagtaggcggaagagcaaggctgcaaaaaagaattccaagcatggaaacttgaaggaacagataagctatcctaccaattctgtatcttcaaattctgaaactgcaaatgttgagggtgttcagaatgatttagaggcaagtgaggaaagatctgagagtctaggcaatattgatgaaggatctgatttgaaaaaggaaattcctaaggatattgataaaacttgtgcaaaggaggtagacgaagaggtgatagagcttgataacatgttctttgaagactcatctgcttgggaagcagtggctccagaaatcttgaaacagcaacaaatagagaaattatcacatgatggttatggccatcttattggaaacatagatgatatatggaagaagggagattctggtaaaatgccgaaagctgttctacaaaagttttgtcaaaaacttggttgggaagcaccaaagtataataaaatatctgagagagatggcaaatttgtatattctgttaatgtgttgcggggagctactggccgtggtaagagtcggaaggctggaggcttgacgataatccagttacctaaactacatgaagaatatggatctgttcaggaagcacaaagtcgagttgcagcttttgctctatatcaattttttgctgaccttccactacgtcaactgcttactgagccatactcatcacttattttaagatggcaagaaggtgaattgtcatctacatcaagggtgctggttacggaggataggcgaagatctggctttgtagatatgttattgaatatagatgcagatacaattccttcatctgaaatagaaaattctgatactgatgtcatatctatggattctgggaatactgaaggcagcaaatctgtgaatgagaagagacagactaccatgacgagttgtatgggattgaaatcagcagagcgtgcagagagtgcaattttgaaaaagcagttggaagataaaaggaagctaccaaattacttgaaaatgctggaagcaagagcttctctaccaatagctagacagaggcaacacttcctacagttgctgaaagagaacgatgtagttgttgttagtggagaaactggatgtgggaaaacaactcaggtgccacagtttattttggatgacatgattgaatctgaacttggaggttcttgcaatatagtttgcacacagccccggcggatagcggctatttctgtggccgaaagagtatctgatgaaaggtgtgaaccatcacctggatcgaatgattcactggtcggataccaagttcgtctcgacagtgcacggaatgagaggacaaagcttttgttctgtactactggtatccttctcagaaagttatctggaaacagagacttaagtgatgttacccatgttgttgtggatgaagtacatgaacgtacaattttgagtgacttcctgcttattgttcttaagaatcttgttgagaaacgctccaatcaacaaggaaggaagttgaaagtgattctcatgtctgcaacggttgattcaagcctatttgcacgatattttggagaatgccccgtgatcagtgttgaaggaagaacacatccagtgtcaactcattttcttgaggatgtttatgagaaaatggagtactgtcttgcattggattctcctgcatcaggagcttactttgcgcagcatggggaaaagtggaagcatgctagcagctcagtgaacaaccgacgaggaaaaaagaaccttgtcttatcctcatggggtgatgagtcaacgctttccgaaggctatgttaaccctcactatatttctgattactataggtcatataatgagagaaccaaccaaaatctaaaacgcttgaatgaagatgtcatcgattttgatctattggaagacttgatatgctatattgatgagaactgtcctcagggtgctattcttgtttttcttcctggagttgcagagattgacttgttgattgatagattatctgctttagttagatttggaggggcatcatctgattggatccttcctttacattcactgcttggaccctctgatcaaaggaaagtgttccagtctccaccagataacttccgcaaggttattattgccacagacatagcagagaccagcattacaattgatgatgtagtatatgtagttgatactggaaagcacaaggagaaccgttataatccacacaagaaaatgtcaagcatagtagaagattggatttctcgtgcaaatgcaaaacagagacggggtagggctggtcgtgtgaagcctggtttatgtttctgtctgtatacaaggcatcggtttgaaaacgtcatgcgtccatttcaggtgcctgagatgttacggatgcctttgactgagctgtgcctgcaaataaaatcacttcatcttgatgacatcaaatccttcctgctaaaggcagtagagccccctaatgaagaagctatttcctctgcagttgacttgttatacaaggttggagcttttgaaggacatgaagagttgtcacctcttgggtatcatctggcgaaactgcctgttgatgttttgattggaaagatgatgctttatggtgctatctttggttgtttatcaccaattctgtccgttgctgctttcctgagttataaatctccatttctctctccaaaagatgagaagcaaaatgtggagaaagcaaaagccacattattgaatgagaaccttgatggatctagttctgtaacagataataaacaatccgatcacctgctaatggtaattgcatacgacaaatggtcccgcatactgctacagaatggtgataaatctgctcgtcagttttgccattcattctacttgaatagtactgtgatgcacatgatcagggacatgcgtcttcagtttggtaccttgttagcagacattggacttatagatcttcctaaagatactctgaggcacaaggtgggcagtagaaaaaataatctcgagagctggttttctaatatgtctcttccattcaatgcctatgctcgctgcacctcggttattaagtcggtgatgtgtgcaggtctataccctaatgtggcagcatctctagagggtgttgatcctggagctctaggtggaagaaagccatctgatgttctgttcagtaaggaccgtcctcgatggtatgatggaaggcgagaagttcatatacatccatcatctgttaatcacagcttgaaagctgttcaatatccatttttggtgtttcttgaaaaggttgagacaaccaaggtgttcttacgtgatactagcgtcgtttccccctactcacttcttttgtttggtggttccatggtaatccaacatcagacaggagtggttgttatagatggatggttgaggctgtctgctgctgcacagactgctgttttattcaagcaacttcggatgactcttgatgctgttctaaaagaactgacaagaaaaccagaggcttttgatcagtatcggtttctgccgatgtgcacgttagtctgcacaggattcttattgcacaatgtggctgattgctaatgtggaagctgcaaagcggaaaaggagtttaatatattattcggctggctggttgttttatatggaacaagtttgtgtcggtctagtattagtgtaatacccttgtcctaattttggagcttacgtgcatcaacgtacagagcagataaaactcaaaagcctgaattgccgtcaattttccatctgacactttggacagaaaaaatgaaaaaaaatgaagagggaaaaaccatatacatatatgaaactgtagcaaatactattatagatggcagttagtgatgatgagagttgcattaggattcctgatatttagcgttgcacaccttgcacttgttgtacctcgtgatagttgcaattgaaaaattttggaacccaacc

SEQ ID NO: 20391 - DNA, 4562 bp, Zea Mays
agcagttccgccgtcgcggaattccgaaagcccgccgtcgccggagacgatcgcgcacacttcgcacgggcacgactgtggccaaatggcgccgaagaagaagcagccggactcgaagcagaggcagaagcccaagtcctcgtcctcctcatccgcagccaccgccgcgccgcgcctccagatctcgtcggagaacgagcgccgcctccgccgcctcctccttaactcctccgcaccatccccgtcacctgccaacgtctcggaagtccgcggcgagtcgagggagcagaaggcgcggcggctgcgtggcgtgtacgacaagctcgctctcgagggcttctcttccgcgcaaatcgagcaggcgctctccgcgatacccgattcggcgacgtttgaatcggcgttggactggctatgttttaatctgcctggcgatgagctccccctcaagttctccagcgctggcgacagcaccatgtcgtctctcacaggagctgaaggttctgttaaagtactgtccacagccaaggacaattgggtgccacagagtcgtgaacctgaggaggtgaaggtgagcaccgaggggttggaagttagaattggtgggcggagagatgagaatgtgtcactggatgatgggcgattgtcacaagctgcatggattcgtcaatacatggaacaacaagaggaggaagaggatgcaaattccaatgattcctctacatgggaggatcactgcttacaaagttttgaagttgtcgaagcaaagccaagtaggcggaagagcaaggctgcaaaaaagaattccaagcatggaaacttgaaggaacagataagctatcctaccaattctgtatcttcaaattctgaaactgcaaatgttgagggtgttcagaatgatttagaggcaagtgaggaaagatctgagagtctaggcaatattgatgaaggatctgatttgaaaaaggaaattcctaaggatattgataaaacttgtgcaaaggaggtagacgaagaggtgatagagcttgataacatgttctttgaagactcatctgcttgggaagcagtggctccagaaatcttgaaacagcaacaaatagagaaattatcacatgatggttatggccatcttattggaaacatagatgatatatggaagaagggagattctggtaaaatgccgaaagctgttctacaaaagttttgtcaaaaacttggttgggaagcaccaaagtataataaaatatctgagagagatggcaaatttgtatattctgttaatgtgttgcggggagctactggccgtggtaagagtcggaaggctggaggcttgacgataatccagttacctaaactacatgaagaatatggatctgttcaggaagcacaaagtcgagttgcagcttttgctctatatcaattttttgctgaccttccactacgtcaactgcttactgagccatactcatcacttattttaagatggcaagaaggtgaattgtcatctacatcaagggtgctggttacggaggataggcgaagatctggctttgtagatatgttattgaatatagatgcagatacaattccttcatctgaaatagaaaattctgatactgatgtcatatctatggattctgggaatactgaaggcagcaaatctgtgaatgagaagagacagactaccatgacgagttgtatggcagagcgtgcagagagtgcaattttgaaaaagcagttggaagataaaaggaagctaccaaattacttgaaaatgctggaagcaagagcttctctaccaatagctagacagaggcaacacttcctacagttgctgaaagagaacgatgtagttgttgttagtggagaaactggatgtgggaaaacaactcaggtgccacagtttattttggatgacatgattgaatctgaacttggaggttcttgcaatatagtttgcacacagccccggcggatagcggctatttctgtggccgaaagagtatctgatgaaaggtgtgaaccatcacctggatcgaatgattcactggtcggataccaagttcgtctcgacagtgcacggaatgagaggacaaagcttttgttctgtactactggtatccttctcagaaagttatctggaaacagagacttaagtgatgttacccatgttgttgtggatgaagtacatgaacgtacaattttgagtgacttcctgcttattgttcttaagaatcttgttgagaaacgctccaatcaacaaggaaggaagttgaaagtgattctcatgtctgcaacggttgattcaagcctatttgcacgatattttggagaatgccccgtgatcagtgttgaaggaagaacacatccagtgtcaactcattttcttgaggatgtttatgagaaaatggagtactgtcttgcattggattctcctgcatcaggagcttactttgcgcagcatggggaaaagtggaagcatgctagcagctcagtgaacaaccgacgaggaaaaaagaaccttgtcttatcctcatggggtgatgagtcaacgctttccgaaggctatgttaaccctcactatatttctgattactataggtcatataatgagagaaccaaccaaaatctaaaacgcttgaatgaagatgtcatcgattttgatctattggaagacttgatatgctatattgatgagaactgtcctcagggtgctattcttgtttttcttcctggagttgcagagattgacttgttgattgatagattatctgctttagttagatttggaggggcatcatctgattggatccttcctttacattcactgcttggaccctctgatcaaaggaaagtgttccagtctccaccagataacttccgcaaggttattattgccacagacatagcagagaccagcattacaattgatgatgtagtatatgtagttgatactggaaagcacaaggagaaccgttataatccacacaagaaaatgtcaagcatagtagaagattggatttctcgtgcaaatgcaaaacagagacggggtagggctggtcgtgtgaagcctggtttatgtttctgtctgtatacaaggcatcggtttgaaaacgtcatgcgtccatttcaggtgcctgagatgttacggatgcctttgactgagctgtgcctgcaaataaaatcacttcatcttgatgacatcaaatccttcctgctaaaggcagtagagccccctaatgaagaagctatttcctctgcagttgacttgttatacaaggttggagcttttgaaggacatgaagagttgtcacctcttgggtatcatctggcgaaactgcctgttgatgttttgattggaaagatgatgctttatggtgctatctttggttgtttatcaccaattctgtccgttgctgctttcctgagttataaatctccatttctctctccaaaagatgagaagcaaaatgtggagaaagcaaaagccacattattgaatgagaaccttgatggatctagttctgtaacagataataaacaatccgatcacctgctaatggtaattgcatacgacaaatggtcccgcatactgctacagaatggtgataaatctgctcgtcagttttgccattcattctacttgaatagtactgtgatgcacatgatcagggacatgcgtcttcagtttggtaccttgttagcagacattggacttatagatcttcctaaagatactctgaggcacaaggtgggcagtagaaaaaataatctcgagagctggttttctaatatgtctcttccattcaatgcctatgctcgctgcacctcggttattaagtcggtgatgtgtgcaggtctataccctaatgtggcagcatctctagagggtgttgatcctggagctctaggtggaagaaagccatctgatgttctgttcagtaaggaccgtcctcgatggtatgatggaaggcgagaagttcatatacatccatcatctgttaatcacagcttgaaagctgttcaatatccatttttggtgtttcttgaaaaggttgagacaaccaaggtgttcttacgtgatactagcgtcgtttccccctactcacttcttttgtttggtggttccatggtaatccaacatcagacaggagtggttgttatagatggatggttgaggctgtctgctgctgcacagactgctgttttattcaagcaacttcggatgactcttgatgctgttctaaaagaactgacaagaaaaccagagatggcaacttttgttgacaacgaagtggtcaggtccatcattcatttattgttagaagaagacaaggctcgataagcatgaattcatggcaatcctatcgatactaattttttagtaaaaacactatcggtccctaaaattttttagtaaaaacactgtcggtccctaaacttttaagtgtatcatccggttcctacactcctaaaatgcacatcgagctttctttggtagggaaacttgtatgattgctcgtttgaatcattctactgcatatcactaataaaatata

SEQ ID NO: 20392 - DNA, 4876 bp, Zea Mays
agcagttccgccgtcgcggaattccgaaagcccgccgtcgccggagacgatcgcgcacacttcgcacgggcacgactgtggccaaatggcgccgaagaagaagcagccggactcgaagcagaggcagaagcccaagtcctcgtcctcctcatccgcagccaccgccgcgccgcgcctccagatctcgtcggagaacgagcgccgcctccgccgcctcctccttaactcctccgcaccatccccgtcacctgccaacgtctcggaagtccgcggcgagtcgagggagcagaaggcgcggcggctgcgtggcgtgtacgacaagctcgctctcgagggcttctcttccgcgcaaatcgagcaggcgctctccgcgatacccgattcggcgacgtttgaatcggcgttggactggctatgttttaatctgcctggcgatgagctccccctcaagttctccagcgctggcgacagcaccatgtcgtctctcacaggagctgaaggttctgttaaagtactgtccacagccaaggacaattgggtgccacagagtcgtgaacctgaggaggtgaaggtgagcaccgaggggttggaagttagaattggtgggcggagagatgagaatgtgtcactggatgatgggcgattgtcacaagctgcatggattcgtcaatacatggaacaacaagaggaggaagaggatgcaaattccaatgattcctctacatgggaggatcactgcttacaaagttttgaagttgtcgaagcaaagccaagtaggcggaagagcaaggctgcaaaaaagaattccaagcatggaaacttgaaggaacagataagctatcctaccaattctgtatcttcaaattctgaaactgcaaatgttgagggtgttcagaatgatttagaggcaagtgaggaaagatctgagagtctaggcaatattgatgaaggatctgatttgaaaaaggaaattcctaaggatattgataaaacttgtgcaaaggaggtagacgaagaggtgatagagcttgataacatgttctttgaagactcatctgcttgggaagcagtggctccagaaatcttgaaacagcaacaaatagagaaattatcacatgatggttatggccatcttattggaaacatagatgatatatggaagaagggagattctggtaaaatgccgaaagctgttctacaaaagttttgtcaaaaacttggttgggaagcaccaaagtataataaaatatctgagagagatggcaaatttgtatattctgttaatgtgttgcggggagctactggccgtggtaagagtcggaaggctggaggcttgacgataatccagttacctaaactacatgaagaatatggatctgttcaggaagcacaaagtcgagttgcagcttttgctctatatcaattttttgctgaccttccactacgtcaactgcttactgagccatactcatcacttattttaagatggcaagaaggtgaattgtcatctacatcaagggtgctggttacggaggataggcgaagatctggctttgtagatatgttattgaatatagatgcagatacaattccttcatctgaaatagaaaattctgatactgatgtcatatctatggattctgggaatactgaaggcagcaaatctgtgaatgagaagagacagactaccatgacgagttgtatggcagagcgtgcagagagtgcaattttgaaaaagcagttggaagataaaaggaagctaccaaattacttgaaaatgctggaagcaagagcttctctaccaatagctagacagaggcaacacttcctacagttgctgaaagagaacgatgtagttgttgttagtggagaaactggatgtgggaaaacaactcaggtgccacagtttattttggatgacatgattgaatctgaacttggaggttcttgcaatatagtttgcacacagccccggcggatagcggctatttctgtggccgaaagagtatctgatgaaaggtgtgaaccatcacctggatcgaatgattcactggtcggataccaagttcgtctcgacagtgcacggaatgagaggacaaagcttttgttctgtactactggtatccttctcagaaagttatctggaaacagagacttaagtgatgttacccatgttgttgtggatgaagtacatgaacgtacaattttgagtgacttcctgcttattgttcttaagaatcttgttgagaaacgctccaatcaacaaggaaggaagttgaaagtgattctcatgtctgcaacggttgattcaagcctatttgcacgatattttggagaatgccccgtgatcagtgttgaaggaagaacacatccagtgtcaactcattttcttgaggatgtttatgagaaaatggagtactgtcttgcattggattctcctgcatcaggagcttactttgcgcagcatggggaaaagtggaagcatgctagcagctcagtgaacaaccgacgaggaaaaaagaaccttgtcttatcctcatggggtgatgagtcaacgctttccgaaggctatgttaaccctcactatatttctgattactataggtcatataatgagagaaccaaccaaaatctaaaacgcttgaatgaagatgtcatcgattttgatctattggaagacttgatatgctatattgatgagaactgtcctcagggtgctattcttgtttttcttcctggagttgcagagattgacttgttgattgatagattatctgctttagttagatttggaggggcatcatctgattggatccttcctttacattcactgcttggaccctctgatcaaaggaaagtgttccagtctccaccagataacttccgcaaggttattattgccacagacatagcagagaccagcattacaattgatgatgtagtatatgtagttgatactggaaagcacaaggagaaccgttataatccacacaagaaaatgtcaagcatagtagaagattggatttctcgtgcaaatgcaaaacagagacggggtagggctggtcgtgtgaagcctggtttatgtttctgtctgtatacaaggcatcggtttgaaaacgtcatgcgtccatttcaggtgcctgagatgttacggatgcctttgactgagctgtgcctgcaaataaaatcacttcatcttgatgacatcaaatccttcctgctaaaggcagtagagccccctaatgaagaagctatttcctctgcagttgacttgttatacaaggttggagcttttgaaggacatgaagagttgtcacctcttgggtatcatctggcgaaactgcctgttgatgttttgattggaaagatgatgctttatggtgctatctttggttgtttatcaccaattctgtccgttgctgctttcctgagttataaatctccatttctctctccaaaagatgagaagcaaaatgtggagaaagcaaaagccacattattgaatgagaaccttgatggatctagttctgtaacagataataaacaatccgatcacctgctaatggtaattgcatacgacaaatggtcccgcatactgctacaggtttctaataagctggtttttttaatttcagaatggtgataaatctgctcgtcagttttgccattcattctacttgaatagtactgtgatgcacatgatcagggacatgcgtcttcagtttggtaccttgttagcagacattggacttatagatcttcctaaagatactctgaggcacaaggtgggcagtagaaaaaataatctcgagagctggttttctaatatgtctcttccattcaatgcctatgctcgctgcacctcggttattaagtcggtgatgtgtgcaggtctataccctaatgtggcagcatctctagagggtgttgatcctggagctctaggtggaagaaagccatctgatgttctgttcagtaaggaccgtcctcgatggtatgatggaaggcgagaagttcatatacatccatcatctgttaatcacagcttgaaagctgttcaatatccatttttggtgtttcttgaaaaggttgagacaaccaaggtgttcttacgtgatactagcgtcgtttccccctactcacttcttttgtttggtggttccatggtaatccaacatcagacaggagtggttgttatagatggatggttgaggctgtctgctgctgcacagactgctgttttattcaagcaacttcggatgactcttgatgctgttctaaaagaactgacaagaaaaccagaggcttttgatcagtatcggtttctgccgatgtgcacgttagtctgcacaggattcttattgcacaatgtggctgattgctaatgtggaagctgcaaagcggaaaaggagtttaatatattattcggctggctggcttcaggtgtttggactgctgcagctgtaatctatagaaacaaaatactatagaaaccacagttgcagtcggattaaagccgcagcaagccgcagtgattaatgtgttgcttgttttatatggaacaagtttgtgtcggtctagtattagtgtaatacccttgtcctaattttggagcttacgtgcatcaacgtacagagcagataaaactcaaaagcctgaattgccgtcaattttccatctgacactttggacagaaaaaatgaaaaaaaatgaagagggaaaaaccatatacatatatgaaactgtagcaaatactattatagatggcagttagtgatgatgagagttgcattaggattcctgatatttagcgttgcacaccttgcacttgttgtacctcgtgatagttgcaattgaaaaattttggaacccaacc

SEQ ID NO: 20393 - DNA, 4593 bp, Zea Mays
gtcgcggaattccgaaagcccgccgtcgccggagacgatcgcgcacacttcgcacgggcacgactgtggccaaatggcgccgaagaagaagcagccggactcgaagcagaggcagaagcccaagtcctcgtcctcctcatccgcagccaccgccgcgccgcgcctccagatctcgtcggagaacgagcgccgcctccgccgcctcctccttaactcctccgcaccatccccgtcacctgccaacgtctcggaagtccgcggcgagtcgagggagcagaaggcgcggcggctgcgtggcgtgtacgacaagctcgctctcgagggcttctcttccgcgcaaatcgagcaggcgctctccgcgatacccgattcggcgacgtttgaatcggcgttggactggctatgttttaatctgcctggcgatgagctccccctcaagttctccagcgctggcgacagcaccatgtcgtctctcacaggagctgaaggttctgttaaagtactgtccacagccaaggacaattgggtgccacagagtcgtgaacctgaggaggtgaaggtgagcaccgaggggttggaagttagaattggtgggcggagagatgagaatgtgtcactggatgatgggcgattgtcacaagctgcatggattcgtcaatacatggaacaacaagaggaggaagaggatgcaaattccaatgattcctctacatgggaggatcactgcttacaaagttttgaagttgtcgaagcaaagccaagtaggcggaagagcaaggctgcaaaaaagaattccaagcatggaaacttgaaggaacagataagctatcctaccaattctgtatcttcaaattctgaaactgcaaatgttgagggtgttcagaatgatttagaggcaagtgaggaaagatctgagagtctaggcaatattgatgaaggatctgatttgaaaaaggaaattcctaaggatattgataaaacttgtgcaaaggaggtagacgaagaggtgatagagcttgataacatgttctttgaagactcatctgcttgggaagcagtggctccagaaatcttgaaacagcaacaaatagagaaattatcacatgatggttatggccatcttattggaaacatagatgatatatggaagaagggagattctggtaaaatgccgaaagctgttctacaaaagttttgtcaaaaacttggttgggaagcaccaaagtataataaaatatctgagagagatggcaaatttgtatattctgttaatgtgttgcggggagctactggccgtggtaagagtcggaaggctggaggcttgacgataatccagttacctaaactacatgaagaatatggatctgttcaggaagcacaaagtcgagttgcagcttttgctctatatcaattttttgctgaccttccactacgtcaactgcttactgagccatactcatcacttattttaagatggcaagaaggtgaattgtcatctacatcaagggtgctggttacggaggataggcgaagatctggctttgtagatatgttattgaatatagatgcagatacaattccttcatctgaaatagaaaattctgatactgatgtcatatctatggattctgggaatactgaaggcagcaaatctgtgaatgagaagagacagactaccatgacgagttgtatgggattgaaatcagcagagcgtgcagagagtgcaattttgaaaaagcagttggaagataaaaggaagctaccaaattacttgaaaatgctggaagcaagagcttctctaccaatagctagacagaggcaacacttcctacagttgctgaaagagaacgatgtagttgttgttagtggagaaactggatgtgggaaaacaactcaggtgccacagtttattttggatgacatgattgaatctgaacttggaggttcttgcaatatagtttgcacacagccccggcggatagcggctatttctgtggccgaaagagtatctgatgaaaggtgtgaaccatcacctggatcgaatgattcactggtcggataccaagttcgtctcgacagtgcacggaatgagaggacaaagcttttgttctgtactactggtatccttctcagaaagttatctggaaacagagacttaagtgatgttacccatgttgttgtggatgaagtacatgaacgtacaattttgagtgacttcctgcttattgttcttaagaatcttgttgagaaacgctccaatcaacaaggaaggaagttgaaagtgattctcatgtctgcaacggttgattcaagcctatttgcacgatattttggagaatgccccgtgatcagtgttgaaggaagaacacatccagtgtcaactcattttcttgaggatgtttatgagaaaatggagtactgtcttgcattggattctcctgcatcaggagcttactttgcgcagcatggggaaaagtggaagcatgctagcagctcagtgaacaaccgacgaggaaaaaagaaccttgtcttatcctcatggggtgatgagtcaacgctttccgaaggctatgttaaccctcactatatttctgattactataggtcatataatgagagaaccaaccaaaatctaaaacgcttgaatgaagatgtcatcgattttgatctattggaagacttgatatgctatattgatgagaactgtcctcagggtgctattcttgtttttcttcctggagttgcagagattgacttgttgattgatagattatctgctttagttagatttggaggggcatcatctgattggatccttcctttacattcactgcttggaccctctgatcaaaggaaagtgttccagtctccaccagataacttccgcaaggttattattgccacagacatagcagagaccagcattacaattgatgatgtagtatatgtagttgatactggaaagcacaaggagaaccgttataatccacacaagaaaatgtcaagcatagtagaagattggatttctcgtgcaaatgcaaaacagagacggggtagggctggtcgtgtgaagcctggtttatgtttctgtctgtatacaaggcatcggtttgaaaacgtcatgcgtccatttcaggtgcctgagatgttacggatgcctttgactgagctgtgcctgcaaataaaatcacttcatcttgatgacatcaaatccttcctgctaaaggcagtagagccccctaatgaagaagctatttcctctgcagttgacttgttatacaaggttggagcttttgaaggacatgaagagttgtcacctcttgggtatcatctggcgaaactgcctgttgatgttttgattggaaagatgatgctttatggtgctatctttggttgtttatcaccaattctgtccgttgctgctttcctgagttataaatctccatttctctctccaaaagatgagaagcaaaatgtggagaaagcaaaagccacattattgaatgagaaccttgatggatctagttctgtaacagataataaacaatccgatcacctgctaatggtaattgcatacgacaaatggtcccgcatactgctacaggtttctaataagctggtttttttaatttcagaatggtgataaatctgctcgtcagttttgccattcattctacttgaatagtactgtgatgcacatgatcagggacatgcgtcttcagtttggtaccttgttagcagacattggacttatagatcttcctaaagatactctgaggcacaaggtgggcagtagaaaaaataatctcgagagctggttttctaatatgtctcttccattcaatgcctatgctcgctgcacctcggttattaagtcggtgatgtgtgcaggtctataccctaatgtggcagcatctctagagggtgttgatcctggagctctaggtggaagaaagccatctgatgttctgttcagtaaggaccgtcctcgatggtatgatggaaggcgagaagttcatatacatccatcatctgttaatcacagcttgaaagctgttcaatatccatttttggtgtttcttgaaaaggttgagacaaccaaggtgttcttacgtgatactagcgtcgtttccccctactcacttcttttgtttggtggttccatggtaatccaacatcagacaggagtggttgttatagatggatggttgaggctgtctgctgctgcacagactgctgttttattcaagcaacttcggatgactcttgatgctgttctaaaagaactgacaagaaaaccagagatggcaacttttgttgacaacgaagtggtcaggtccatcattcatttattgttagaagaagacaaggctcgataagcatgaattcatggcaatcctatcgatactaattttttagtaaaaacactatcggtccctaaaattttttagtaaaaacactgtcggtccctaaacttttaagtgtatcatccggttcctacactcctaaaatgcacatcgagctttctttggtagggaaacttgtatgattgctcgtttgaatcattctactgcatatcactaataaaatata

SEQ ID NO: 20394 - DNA, 4033 bp, Zea Mays
atggcgccgaagaagaagcagccggactcgaagcagaggcagaagcccaagtcctcgtcctcctcatccgcagccaccgccgcgccgcgcctccagatctcgtcggagaacgagcgccgcctccgccgcctcctccttaactcctccgcaccatccccgtcacctgccaacgtctcggaagtccgcggcgagtcgagggagcagaaggcgcggcggctgcgtggcgtgtacgacaagctcgctctcgagggcttctcttccgcgcaaatcgagcaggcgctctccgcgatacccgattcggcgacgtttgaatcggcgttggactggctatgttttaatctgcctggcgatgagctccccctcaagttctccagcgctggcgacagcaccatgtcgtctctcacaggagctgaaggttctgttaaagtactgtccacagccaaggacaattgggtgccacagagtcgtgaacctgaggaggtgaaggtgagcaccgaggggttggaagttagaattggtgggcggagagatgagaatgtgtcactggatgatgggcgattgtcacaagctgcatggattcgtcaatacatggaacaacaagaggaggaagaggatgcaaattccaatgattcctctacatgggaggatcactgcttacaaagttttgaagttgtcgaagcaaagccaagtaggcggaagagcaaggctgcaaaaaagaattccaagcatggaaacttgaaggaacagataagctatcctaccaattctgtatcttcaaattctgaaactgcaaatgttgagggtgttcagaatgatttagaggcaagtgaggaaagatctgagagtctaggcaatattgatgaaggatctgatttgaaaaaggaaattcctaaggatattgataaaacttgtgcaaaggaggtagacgaagaggtgatagagcttgataacatgttctttgaagactcatctgcttgggaagcagtggctccagaaatcttgaaacagcaacaaatagagaaattatcacatgatggttatggccatcttattggaaacatagatgatatatggaagaagggagattctggtaaaatgccgaaagctgttctacaaaagttttgtcaaaaacttggttgggaagcaccaaagtataataaaatatctgagagagatggcaaatttgtatattctgttaatgtgttgcggggagctactggccgtggtaagagtcggaaggctggaggcttgacgataatccagttacctaaactacatgaagaatatggatctgttcaggaagcacaaagtcgagttgcagcttttgctctatatcaattttttgctgaccttccactacgtcaactgcttactgagccatactcatcacttattttaagatggcaagaaggtgaattgtcatctacatcaagggtgctggttacggaggataggcgaagatctggctttgtagatatgttattgaatatagatgcagatacaattccttcatctgaaatagaaaattctgatactgatgtcatatctatggattctgggaatactgaaggcagcaaatctgtgaatgagaagagacagactaccatgacgagttgtatggcagagcgtgcagagagtgcaattttgaaaaagcagttggaagataaaaggaagctaccaaattacttgaaaatgctggaagcaagagcttctctaccaatagctagacagaggcaacacttcctacagttgctgaaagagaacgatgtagttgttgttagtggagaaactggatgtgggaaaacaactcaggtgccacagtttattttggatgacatgattgaatctgaacttggaggttcttgcaatatagtttgcacacagccccggcggatagcggctatttctgtggccgaaagagtatctgatgaaaggtgtgaaccatcacctggatcgaatgattcactggtcggataccaagttcgtctcgacagtgcacggaatgagaggacaaagcttttgttctgtactactggtatccttctcagaaagttatctggaaacagagacttaagtgatgttacccatgttgttgtggatgaagtacatgaacgtacaattttgagtgacttcctgcttattgttcttaagaatcttgttgagaaacgctccaatcaacaaggaaggaagttgaaagtgattctcatgtctgcaacggttgattcaagcctatttgcacgatattttggagaatgccccgtgatcagtgttgaaggaagaacacatccagtgtcaactcattttcttgaggatgtttatgagaaaatggagtactgtcttgcattggattctcctgcatcaggagcttactttgcgcagcatggggaaaagtggaagcatgctagcagctcagtgaacaaccgacgaggaaaaaagaaccttgtcttatcctcatggggtgatgagtcaacgctttccgaaggctatgttaaccctcactatatttctgattactataggtcatataatgagagaaccaaccaaaatctaaaacgcttgaatgaagatgtcatcgattttgatctattggaagacttgatatgctatattgatgagaactgtcctcagggtgctattcttgtttttcttcctggagttgcagagattgacttgttgattgatagattatctgctttagttagatttggaggggcatcatctgattggatccttcctttacattcactgcttggaccctctgatcaaaggaaagtgttccagtctccaccagataacttccgcaaggttattattgccacagacatagcagagaccagcattacaattgatgatgtagtatatgtagttgatactggaaagcacaaggagaaccgttataatccacacaagaaaatgtcaagcatagtagaagattggatttctcgtgcaaatgcaaaacagagacggggtagggctggtcgtgtgaagcctggtttatgtttctgtctgtatacaaggcatcggtttgaaaacgtcatgcgtccatttcaggtgcctgagatgttacggatgcctttgactgagctgtgcctgcaaataaaatcacttcatcttgatgacatcaaatccttcctgctaaaggcagtagagccccctaatgaagaagctatttcctctgcagttgacttgttatacaaggttggagcttttgaaggacatgaagagttgtcacctcttgggtatcatctggcgaaactgcctgttgatgttttgattggaaagatgatgctttatggtgctatctttggttgtttatcaccaattctgtccgttgctgctttcctgagttataaatctccatttctctctccaaaagatgagaagcaaaatgtggagaaagcaaaagccacattattgaatgagaaccttgatggatctagttctgtaacagataataaacaatccgatcacctgctaatgggacatgcgtcttcagtttggtaccttgttagcagacattggacttatagatcttcctaaagatactctgaggcacaaggtgggcagtagaaaaaataatctcgagagctggttttctaatatgtctcttccattcaatgcctatgctcgctgcacctcggttattaagtcggtgatgtgtgcaggtctataccctaatgtggcagcatctctagagggtgttgatcctggagctctaggtggaagaaagccatctgatgttctgttcagtaaggaccgtcctcgatggtatgatggaaggcgagaagttcatatacatccatcatctgttaatcacagcttgaaagctgttcaatatccatttttggtgtttcttgaaaaggttgagacaaccaaggtgttcttacgtgatactagcgtcgtttccccctactcacttcttttgtttggtggttccatggtaatccaacatcagtgtttgtccatgactccatgtgacttttctggtgacagtagagggtggtggaaacccttcaatgtgaaccttttttag

SEQ ID NO: 20395 - DNA, 4473 bp, Zea Mays
atggcgccgaagaagaagcagccggactcgaagcagaggcagaagcccaagtcctcgtcctcctcatccgcagccaccgccgcgccgcgcctccagatctcgtcggagaacgagcgccgcctccgccgcctcctccttaactcctccgcaccatccccgtcacctgccaacgtctcggaagtccgcggcgagtcgagggagcagaaggcgcggcggctgcgtggcgtgtacgacaagctcgctctcgagggcttctcttccgcgcaaatcgagcaggcgctctccgcgatacccgattcggcgacgtttgaatcggcgttggactggctatgttttaatctgcctggcgatgagctccccctcaagttctccagcgctggcgacagcaccatgtcgtctctcacaggagctgaaggttctgttaaagtactgtccacagccaaggacaattgggtgccacagagtcgtgaacctgaggaggtgaaggtgagcaccgaggggttggaagttagaattggtgggcggagagatgagaatgtgtcactggatgatgggcgattgtcacaagctgcatggattcgtcaatacatggaacaacaagaggaggaagaggatgcaaattccaatgattcctctacatgggaggatcactgcttacaaagttttgaagttgtcgaagcaaagccaagtaggcggaagagcaaggctgcaaaaaagaattccaagcatggaaacttgaaggaacagataagctatcctaccaattctgtatcttcaaattctgaaactgcaaatgttgagggtgttcagaatgatttagaggcaagtgaggaaagatctgagagtctaggcaatattgatgaaggatctgatttgaaaaaggaaattcctaaggatattgataaaacttgtgcaaaggaggtagacgaagaggtgatagagcttgataacatgttctttgaagactcatctgcttgggaagcagtggctccagaaatcttgaaacagcaacaaatagagaaattatcacatgatggttatggccatcttattggaaacatagatgatatatggaagaagggagattctggtaaaatgccgaaagctgttctacaaaagttttgtcaaaaacttggttgggaagcaccaaagtataataaaatatctgagagagatggcaaatttgtatattctgttaatgtgttgcggggagctactggccgtggtaagagtcggaaggctggaggcttgacgataatccagttacctaaactacatgaagaatatggatctgttcaggaagcacaaagtcgagttgcagcttttgctctatatcaattttttgctgaccttccactacgtcaactgcttactgagccatactcatcacttattttaagatggcaagaaggtgaattgtcatctacatcaagggtgctggttacggaggataggcgaagatctggctttgtagatatgttattgaatatagatgcagatacaattccttcatctgaaatagaaaattctgatactgatgtcatatctatggattctgggaatactgaaggcagcaaatctgtgaatgagaagagacagactaccatgacgagttgtatggcagagcgtgcagagagtgcaattttgaaaaagcagttggaagataaaaggaagctaccaaattacttgaaaatgctggaagcaagagcttctctaccaatagctagacagaggcaacacttcctacagttgctgaaagagaacgatgtagttgttgttagtggagaaactggatgtgggaaaacaactcaggtgccacagtttattttggatgacatgattgaatctgaacttggaggttcttgcaatatagtttgcacacagccccggcggatagcggctatttctgtggccgaaagagtatctgatgaaaggtgtgaaccatcacctggatcgaatgattcactggtcggataccaagttcgtctcgacagtgcacggaatgagaggacaaagcttttgttctgtactactggtatccttctcagaaagttatctggaaacagagacttaagtgatgttacccatgttgttgtggatgaagtacatgaacgtacaattttgagtgacttcctgcttattgttcttaagaatcttgttgagaaacgctccaatcaacaaggaaggaagttgaaagtgattctcatgtctgcaacggttgattcaagcctatttgcacgatattttggagaatgccccgtgatcagtgttgaaggaagaacacatccagtgtcaactcattttcttgaggatgtttatgagaaaatggagtactgtcttgcattggattctcctgcatcaggagcttactttgcgcagcatggggaaaagtggaagcatgctagcagctcagtgaacaaccgacgaggaaaaaagaaccttgtcttatcctcatggggtgatgagtcaacgctttccgaaggctatgttaaccctcactatatttctgattactataggtcatataatgagagaaccaaccaaaatctaaaacgcttgaatgaagatgtcatcgattttgatctattggaagacttgatatgctatattgatgagaactgtcctcagggtgctattcttgtttttcttcctggagttgcagagattgacttgttgattgatagattatctgctttagttagatttggaggggcatcatctgattggatccttcctttacattcactgcttggaccctctgatcaaaggaaagtgttccagtctccaccagataacttccgcaaggttattattgccacagacatagcagagaccagcattacaattgatgatgtagtatatgtagttgatactggaaagcacaaggagaaccgttataatccacacaagaaaatgtcaagcatagtagaagattggatttctcgtgcaaatgcaaaacagagacggggtagggctggtcgtgtgaagcctggtttatgtttctgtctgtatacaaggcatcggtttgaaaacgtcatgcgtccatttcaggtgcctgagatgttacggatgcctttgactgagctgtgcctgcaaataaaatcacttcatcttgatgacatcaaatccttcctgctaaaggcagtagagccccctaatgaagaagctatttcctctgcagttgacttgttatacaaggttggagcttttgaaggacatgaagagttgtcacctcttgggtatcatctggcgaaactgcctgttgatgttttgattggaaagatgatgctttatggtgctatctttggttgtttatcaccaattctgtccgttgctgctttcctgagttataaatctccatttctctctccaaaagatgagaagcaaaatgtggagaaagcaaaagccacattattgaatgagaaccttgatggatctagttctgtaacagataataaacaatccgatcacctgctaatggtaattgcatacgacaaatggtcccgcatactgctacagaatggtgataaatctgctcgtcagttttgccattcattctacttgaatagtactgtgatgcacatgatcagggacatgcgtcttcagtttggtaccttgttagcagacattggacttatagatcttcctaaagatactctgaggcacaaggtgggcagtagaaaaaataatctcgagagctggttttctaatatgtctcttccattcaatgcctatgctcgctgcacctcggttattaagtcggtgatgtgtgcaggtctataccctaatgtggcagcatctctagagggtgttgatcctggagctctaggtggaagaaagccatctgatgttctgttcagtaaggaccgtcctcgatggtatgatggaaggcgagaagttcatatacatccatcatctgttaatcacagcttgaaagctgttcaatatccatttttggtgtttcttgaaaaggttgagacaaccaaggtgttcttacgtgatactagcgtcgtttccccctactcacttcttttgtttggtggttccatggtaatccaacatcaggagtggttgttatagatggatggttgaggctgtctgctgctgcacagactgctgttttattcaagcaacttcggatgactcttgatgctgttctaaaagaactgacaagaaaaccagagatggcaacttttgttgacaacgaagtggtcaggtccatcattcatttattgttagaagaagacaaggctcgataagcatgaattcatggcaatcctatcgatactaattttttagtaaaaacactatcggtccctaaaattttttagtaaaaacactgtcggtccctaaacttttaagtgtatcatccggttcctacactcctaaaatgcacatcgagctttctttggtagggaaacttgtatgattgctcgtttgaatcattctactgcatatcactaataaaatata

SEQ ID NO: 20396 - DNA, 1502 bp, Zea Mays
agacaggagtggttgttatagatggatggttgaggctgtctgctgctgcacagactgctgttttattcaagcaacttcggatgactcttgatgctgttctaaaagaactgacaagaaaaccagaggtatggtgtattttgtgttaatgaacatgcaagaatggccagttgatgtaatggaaatgcgtgcagctgaagcatctattgtccatctccgcatgcagttgcttaatttctgttcactgtgtcataaaattgtatatctttctttgtacaaaacctgcttgacatcacagaagatatgggctgcaagcctgcaactccccttttctaattaccttatctgattgtcttatttcagatggcaacttttgttgacaacgaagtggtcaggtccatcattcatttattgttagaagaagacaaggctcgataagcatgaattcatggcaatcctatcgatactaattttttagtaaaaacactatcggtccctaaaattttttagtaaaaacactgtcggtccctaaacttttaagtgtatcatccggttcctacactcctaaaatgcacatcgagctttctttggtagggaaacttgtatgattgctcgtttgaatcattctactgcatatcactaataaaatatattttttctagccccttttttccgtccacgtttgaagaatgataatgaatagacatacatacaaactacattcacatgttaatcaatgaatttatattaaatctaaaacgaattatattttggtaaatgataatgaatagacatacatacaaactacattcacatgttaatcaatgaatttatattaaatctaaaacgaattatattttggtacggagggagtaataattcttgagttgagtagtagtatcatctgtttggtaatttcattatgatatgataattttaactggccaatgaggatcaatattttgtaaatgtgtccatgtgattatgatttcttgcacgattcgaaaatgtaggagaaattacgggttggcatcttatccattttatttgttgtattgggtgtcttaatggggccaccagagacaggacacagccacctgatgttgagagactggaaacattctaattgtgtttctatcgaaacaaaatttgaaagtaggggactgcaaaataagggtctgttacagatccgtcatcccctactctcgaccaagtaggggactgcaaaattcactctaccaaaaaccactcaaaataccactaacaaaagaaggacctgaccaaccttccgctagaactacttagccaaccccttgaacgaaacctgtcaaataatggtagaaaacatggtgtctagtatgtaagtttgaagatacgcttttcagctactgttcttgttgctaatgtacgcttaatatccagatgatagccttttttaggatataattatgctattcagttgcatggacagatggttttagaacttggccattttgatattttct

SEQ ID NO: 20397 - DNA, 394 bp, Zea Mays
gcctggtttcccctagccgacgtcacgactcactcacaagcacgacgacggggcacacgagctcacgggtgatggcgaacgagggcgtcgcggccgagcgggcggtcaaggcccctccaccggagacggagagcatcgtgtggagggaggacaaggggaggttccagacgcccgacggcgaggccttccttcagtaccgcctcctcgacggccgcggggcccccgctgcggcagtgatggacctggtgcacacgtacgtgccgcggagcaagcgcgggcaggggctcgcggcgcggctctgcgacgctgccttcgcccacgcgcaggcccgcggcatgcgcgtcctccccacctgctcctacatctccttgctgaccttgtgtcatctaatcta

SEQ ID NO: 20398 - DNA, 677 bp, Zea Mays
gagatacagccagccatacagggagggattcctcttcgtagttatgtacaggctacagcgacggggaagacctgctgcgccgatttatctgacaaactgagatatcaatcggtcggcaaatgttctttatttttttcactggaggaaaatggacacgtacctgcctcggaatccggcgttgaaggagctcgtggacaaggatcaagaaccccatcccaaacccagcagcatgtagatggttggttgttcaagaaaccagctgccacttaaataagcagatatccagaaatacctgtcacttgatgaacgtttgcttcttcgaaggcgttgatgtcagatgttacacgttggatatctcgtgcagtgtttcagaaccatttgattttggagaagataataataacaaagcttgaaatacatgtagctttctgctgaacaacaagtataatgccgatcattcagtgctcaagtagctaaacatcgtcccaataaataaaataatgtaaggaaggtgcaaaggtttaactgtacaatcagaaaaatatatattcacactacagagttttacaacggtagactgattgtttttgtagtacagaccccacattactacaggagggtggttccacttgttttgatagtgagtttgtttcctcccacgctgttttcaagcacca

SEQ ID NO: 20399 - DNA, 973 bp, Zea Mays
ggcgcagtcgtaaagttgcatgtcgagctgctattgcaacttgtgagcaatgagaagttgtcaacggggaagattttcctcccatgaaggacctaattcagctatacaggacagcttttctagaaggaaatgaggaggttcttggtgtagttgagaaggcaatcactgctgtggaaaaagagaagagtacgatagcttcccaatttgaaagtattacaaccgaaataacttctgggaaggaaaagtttattcgcttaaatgccgacctggagaatttccggaaacagactgaaaaggaccgtgcaaagttaacatcaaatatacgggtggaagttgttcagagtctgttacctctagttgatagttttgagaaaacgaatctagagaacaccccagagactgagaaggagcaaaagatcagcgcaagctatcaaggcatatacaagcagttagttgaaacactaagatatttgggtgtgggagttgtggaaacagttggcaagccatttgatccttcggtccatgaggccatctcacgagaagcatccatgcaattcaaggcagggattgtcatgcatgaagtccgcagagggttccatttgaaggagaggctgctaaggcctgctactgtgaaggtctctactggctctggcaaacaaagtgcaagctcataggcgggggacaaagatgctgctttgtgaatctgatcaaacgaccaacaggaactgatagacacacatttttctgttcataacatgccgaatgtgtttgatctcaaatgagacgggatcagctatgtatggtgttgacagggagcaccagcttgaagttttgctgttgcttgtaatctgctagaattttgtccaccagaagagagagaatgaaacattggacattcataccggatttatattgagttccttgctcacttcattggacatccataccggatttatattgacttccttgctca

SEQ ID NO: 20400 - DNA, 2586 bp, Zea Mays
gtcaatttcactatctcgtgtgcggctatctcgtcaattttctaccaactgcatttctccgcgacgactcgagctcgacacacgaaacagacatggccgccgtcgccgctctttcctgccccgcgcctccgcgtgtgttccgctgcgccaagacgctgcctgctccctccgccgccacatccagccgcggaagggtcggctacggctcctcctacgcccgccggtggcagtgccgccgctggacccaccggccggacgctacgacgacgcggatcaggcgggcaacgccgcgccgcacggcggtggtgagggtgaactgcgcctactctccccgcgctgaaacaatcactgcatgctcttggaatgaatatgtgatttgcagtgatgtacctgtgcttattgagttttgggcctcctggtgtggaccttgcagaatggtcacacggattgtcgatgagatagcacaagaatatgttgggagaataaaatgctataagcttgacaccgatgattacccacaggttgctacagcttacagcatcgagaggattccaactgttttactctttaaggatggagagaaaatacatagtattaccgggacactgccaaaggctgtttatgtgaaagccattgagaaatctatttcagaacaatgacatatttggttaatattctttggtccatagatattaaactgtacactccattttataccagatagtgcagagagctcaaggtaaaatttgagtttacagcacaagcatcttatctagaagtatggaactgatggtgatccttttgctatcaatagcagtgtaaatatatgtatttcttaaaagccagagtgttcccttttttaaccaaaaaaattcctcaaaggctgtaatgtattacagggcagaatatttgaggccctcagcgataccttatttaatgaaattaaagttttgtttccttaattttattgttgtatctatcatctaatttttatctgttttatcctttttgcgttccatagatagtgcatatcttgcatttacctaggccttgttagggtaatcccttacccatggggattggagaggattgggatggattaactgaacaagcccttagttttcacgatccttattcccactaaacgtagcactttgtatcacacctaatatgctacagcagctaaccatttgaattttttcttatcaaaaggtttgtctcaccaccatgtgactatgtgattgctactgttgctacttctttatagttgatacgtggctaaattttcagccacatctttacgaatgatcaggaaaggtactctgtatcaggattgggcacgggtggagctggtgtgggttgtgcctactctagttcgaatgctattgatcttgttagtgccattattgaccaaatatgatgttgtcatggcagacttgatggttgctgcacatactttcatgcatgacatgcaccaggtaagtttgtaatggttatggtagaatgaatgtgtactggatgatcagcttggtgtcaccaatctccatgcatcttgttcagcactcaattccctcagcagaagcccatgaggtcacaactcatggtatccatttcagccccaagtcggcatggtgaaatactgaaatggaattggtctttggtgcacgtgttgcagctgtgtaatttcttgttatgtccaccatttaagagcctgatatacagccttagcataagaaaattgcttggttcttgagtacatggacaccatctgccacagtgactagtcgagcacttcatggctgctgttgcttggacttcatctggcctcttatgccatgataagaaaatcattgggtcactttccgcaattgacatgaaggtagtgttggtcataaatatcaactggtataccatctagtctgggacatatatgaacatgtacattgggagcctaagaggtctcgaaaaacatttgaaatcaagtgggtaccaggaaagtaaccatgcaagtaagttttgtaactgctgatgcaaaatagcatgtgctgagactaacatagtgcatgactgtacagtttatggtggtaatggctgatgttgaatccagtaacagctgaaacaatgtgccatgatgaaccacgaaaacatgtgattgatgaccgtggtatatcgtattccatgggtccgtgcacagtgcactgtcaatgtcatcatcagtcaggtgtactggtatcagtgtttaaggcttcagaaaacttcatgagcctttgggtacctggtgaggcattacctgttggtatcatactatcatctcagacttgatgctgtcagcagaacaatacccaatctatgcttgacggtctttagtgttagtatgatcaacaacatggtgaagaacctaactgtgggtgacaaacgaatttgatgtgatatggataatcatttgcacgtgttgttcagctgacaatgacttcgtaccttcggtataagtttagaatgagtaggattttgcattttttttgatttatcaggtataaaatacacttgatttatcagtgtaaaaataatacttgagaaacctataat

SEQ ID NO: 20401 - DNA, 5909 bp, Zea Mays
gtcaatttcactatctcgtgtgcggctatctcgtcaattttctaccaactgcatttctccgcgacgactcgagctcgacacacgaaacagacatggccgccgtcgccgctctttcctgccccgcgcctccgcgtgtgttccgctgcgccaagacgctgcctgctccctccgccgccacatccagccgcggaagggtcggctacggctcctcctacgcccgccggtggcagtgccgccgctggacccaccggccggacgctacgacgacgcggatcaggcgggcaacgccgcgccgcacggcggtggtgagggtgaactgcgcctactctccccgcgctgaaacaatcactgcatgctcttggaatgaatatgtgatttgcagtgatgtacctgtgcttattgagttttgggcctcctggtgtggaccttgcagaatggtcacacggattgtcgatgagatagcacaagaatatgttgggagaataaaatgctataagcttgacaccgatgattacccacaggttgctacagcttacagcatcgagaggattccaactgttttactctttaaggatggagagaaaatacatagtattaccgggacactgccaaaggctgtttatgtgaaagccattgagaaatctatttcagaacaatgacatatttggttaatattctttggtccatagatattaaactgtacactccattttataccagatagtgcagagagctcaaggtaaaatttgagtttacagcacaagcatcttatctagaagtatggaactgatggtgatccttttgctatcaatagcagtgtaaatatatgtatttcttaaaagccagagtgttcccttttttaaccaaaaaaattcctcaaaggctgtaatgtattacagggcagaatatttgaggccctcagcgataccttatttaatgaaattaaagttttgtttccttaattttattgttgtatctatcatctaatttttatctgttttatcctttttgcgttccatagatagtgcatatcttgcatttacctaggccttgttagggtaatcccttacccatggggattggagaggattgggatggattaactgaacaagcccttagttttcacgatccttattcccactaaacgtagcactttgtatcacacctaatatgctacagcagctaaccatttgaattttttcttatcaaaaggtttgtctcaccaccatgtgactatgtgattgctactgttgctacttctttatagttgatacgtggctaaattttcagccacatctttacggtagttttgtgtctttccaggttatcacacctatatatggctagcattttggcctaggatggagggatttcatgatgtggtagctcaatcttgggtgtttgttccagcagggccttgcccacttatcactttggccaagaaattaaagacaacggctaggagtctgcagagctggaatgacaaaaaagttgggaagattaagctgcagcttgagatggctagggagctcctacatcaattagaggtggcgcaggacaatcgttccttatctcctgccgaattgtggctccgaaacatgctcaagaagcactcccttgccctgtcctctatctctcataccatggcaaggttgaaatcgcggattgggtggctcaaagaaggggatgccaatacctctctttttcatgcacaaacaaggttcaggaagaaaaagaatttcattgcagcaatacactcagaggatgggcaaatctggactgcccatgaaggaaaggcagcagccttctttaatttttatcaagggttacttggaactgcagaagtcagggatgttacagttgatctggaagctctagggatgccatcttatgaccttgatgcccttgatgcgcctgtctcggaggaggaagtctgggatgcaattaaggcccttccttcggacaaatccccgggtcccgacgggttcactggtagattttacaaaagttgttggtcggtaatcatggctgatttcatggcggccgttcactgcatttgggctagaaattttagaaacttgggcccgctgaattcaactttcattactcttctgcccaaggtggagggggccactagtgtgagagacttccgcccaataagtctggttcatagtttcgcgaagttggtaactaaattgttggctaacaggttagcaggccggctgcaaaatatggtttcccccaatcaaaccgcttttattaagaaacggtttattcttgacaactttatgctagtccagcagacgaccagattcttgcattgtcagaaacaggctcgtatacttctcaagcttgacatttctaaggcttttgactcggtatcgtgggccttccttctcgaggtcttgaaaaaacttggttttggacagatctggtgtgatataataagcgggttgttagctacctcttctaccaagattttactaaatggtctgccaggggaaagtattgggcatcaacgcggactgaggcagggtgatcctctatcgcctatgttgtttattcttgtaatggatgtcttgaatctgctcgtgcagcgagcctctgaggaagggtttcttcaacctctctcttcaaggaatatgcagcaccgtatctcgttgtacgtggatgacgcagtgttatttctaagtcctactgccctggacatcagtatggttatggatattcttcatttatttggttcagcttcaggtctaaggactaatatccagaagagcagtgtgttcccaatctgctgtggggaagaagaggtgaattgtttacatgacttgctgccatgtaatatttcagattttccctgtaagtacctcggtttgcctttgtctcccaagaaactcacaagggaccaggttcaggccattgttgatagagtggccagccttctgccaggatggaaagctgagcttatgaccagggctggtagagctatttcatgtgcagtttgtcatgatggcaaagatgatttatgcagctttggcacttgaccttcctgtatgggccattaaagcaatcgataagctgaggaaggtcttcctctagaggggcaggaaagagttccgtggtggtcattgcctcttcgcttggcctaaggttacccgtcccaaggagctgggtggtcttgggattagtgagttaaagagcctctgttgggctctgagagctcgttggccatggttgcagaaaacagatcccagtaggccttggacggacttccccactcatgtttgtaaggtggtaaaaatctgattgctgcagccattattactaagctcggtgatggagccaatacccttttctggaaggacagatggttggatgggagatgtattaaggacatagctactgcaatgtttgatttgtgcccttgcgtcttgccaacaggcggttggtcaaagatgctctccccaatttccagtggatctccgatgtgaatggggcaatttcagtcagagtcattgctgaattcctggaactttgtgaagtgcttgatgcagttgtgctccagcctggaataagggatcgacatttatggaaattcagcgcttcaggtgattatacaactagttctgcttataaagctctcttccttggttcagttcagttcgaaccagcagagcgtgtgtggaaatcttgggctcctgggaagtgcaagttctttatttggcttgtggaacataataggtgctggactgctgacaggctcataaaagaggactagaccgaccagatccgtgccccttgtgcgaccaagaggctgaaaccataaatcatttgctggtcaaatgtgtttttgccaagcagttctggtttgatttccttagttcagcggggctgcaggagctgtgtccagctcatgaggattccttttagtcgtggtggaagtctagcagctcccgtgcatctgatcttttgagaaaaaggtttcaattctttagtgatcctaggtgcttggaccatttggaagcataggaatagatgtgtttttgatggttgtaatcctagcttggtcacagcccttagggtggctagggaagaggcggtgctctggtccttgactggagccaaggccctgtccttcctccaagtcgatgagttgctggcttaaaacagcgttgtgggttgtgtttcctccatgttagtcggtgatccttagttagtctctagtggtgtgtgtgctgtaatggggttctctccccctttcttattcttctattaatacaaagatgcgcagctctcctgcgtataccagaaaaaaaaaatacttctacttgtgctaactgctaaggtcatacatgataccttttttagagtttacactatatgattaccacatttttggctaattttcccgattttttaaatgaacgagcaggggatctgcctattgtattacttaagaagacacacacgggcaaagccaattttcctgatcgcctccatatttctgaacactgtttttttaatgttggtttggatgcccatgtaaatattttaattggatgtagattaagtgattttctgtaagatcatgtttagcctttcctaattttttgtcttctcaagaatgatcaggaaaggtactctgtatcaggattgggcacgggtggagctggtgtgggttgtgcctactctagttcgaatgctattgatcttgttagtgccattattgaccaaatatgatgttgtcatggcagacttgatggttgctgcacatactttcatgcatgacatgcaccaggtaagtttgtaatggttatggtagaatgaatgtgtactggatgatcagcttggtgtcaccaatctccatgcatcttgttcagcactcaattccctcagcagaagcccatgaggtcacaactcatggtatccatttcagccccaagtcggcatggtgaaatactgaaatggaattggtctttggtgcacgtgttgcagctgtgtaatttcttgttatgtccaccatttaagagcctgatatacagccttagcataagaaaattgcttggttcttgagtacatggacaccatctgccacagtgactagtcgagcacttcatggctgctgttgcttggacttcatctggcctcttatgccatgataagaaaatcattgggtcactttccgcaattgacatgaaggtagtgttggtcataaatatcaactggtataccatctagtctgggacatatatgaacatgtacattgggagcctaagaggtctcgaaaaacatttgaaatcaagtgggtaccaggaaagtaaccatgcaagtaagttttgtaactgctgatgcaaaatagcatgtgctgagactaacatagtgcatgactgtacagtttatggtggtaatggctgatgttgaatccagtaacagctgaaacaatgtgccatgatgaaccacgaaaacatgtgattgatgaccgtggtatatcgtattccatgggtccgtgcacagtgcactgtcaatgtcatcatcagtcaggtgtactggtatcagtgtttaaggcttcagaaaacttcatgagcctttgggtacctggtgaggcattacctgttggtatcatactatcatctcagacttgatgctgtcagcagaacaatacccaatctatgcttgacggtctttagtgttagtatgatcaacaacatggtgaagaacctaactgtgggtgacaaacgaatttgatgtgatatggataatcatttgcacgtgttgttcagctgacaatgacttcgtaccttcggtataagtttagaatgagtaggattttgcattttttttgatttatcaggtataaaatacacttgatttatcagtgtaaaaataatacttgagaaacctataat

SEQ ID NO: 20402 - DNA, 5522 bp, Zea Mays
tttcactatctcgtgtgcggctatctcgtcaattttctaccaactgcatttctccgcgacgactcgagctcgacacacgaaacagacatggccgccgtcgccgctctttcctgccccgcgcctccgcgtgtgttccgctgcgccaagacgctgcctgctccctccgccgccacatccagccgcggaagggtcggctacggctcctcctacgcccgccggtggcagtgccgccgctggacccaccggccggacgctacgacgacgcggatcaggcgggcaacgccgcgccgcacggcggtggtgagggtgaactgcgcctactctccccgcgctgaaacaatcactgcatgctcttggaatgaatatgtgatttgcagtgatgtacctgtgcttattgagttttgggcctcctggtgtggaccttgcagaatggtcacacggattgtcgatgagatagcacaagaatatgttgggagaataaaatgctataagcttgacaccgatgattacccacaggttgctacagcttacagcatcgagaggattccaactgttttactctttaaggatggagagaaaatacatagtattaccgggacactgccaaaggctgtttatgtgaaagccattgagaaatctatttcagaacaatgacatatttggttaatattctttggtccatagatattaaactgtacactccattttataccagatagtgcagagagctcaaggtttgtctcaccaccatgtgactatgtgattgctactgttgctacttctttatagttgatacgtggctaaattttcagccacatctttacggtatgcactgccaacatgacctttttagctaccatcttcaatctgttcaatgtgggatatttataaaatcatggttctacttgttaggcaggtagttttgtgtctttccaggttatcacacctatatatggctagcattttggcctaggatggagggatttcatgatgtggtagctcaatcttgggtgtttgttccagcagggccttgcccacttatcactttggccaagaaattaaagacaacggctaggagtctgcagagctggaatgacaaaaaagttgggaagattaagctgcagcttgagatggctagggagctcctacatcaattagaggtggcgcaggacaatcgttccttatctcctgccgaattgtggctccgaaacatgctcaagaagcactcccttgccctgtcctctatctctcataccatggcaaggttgaaatcgcggattgggtggctcaaagaaggggatgccaatacctctctttttcatgcacaaacaaggttcaggaagaaaaagaatttcattgcagcaatacactcagaggatgggcaaatctggactgcccatgaaggaaaggcagcagccttctttaatttttatcaagggttacttggaactgcagaagtcagggatgttacagttgatctggaagctctagggatgccatcttatgaccttgatgcccttgatgcgcctgtctcggaggaggaagtctgggatgcaattaaggcccttccttcggacaaatccccgggtcccgacgggttcactggtagattttacaaaagttgttggtcggtaatcatggctgatttcatggcggccgttcactgcatttgggctagaaattttagaaacttgggcccgctgaattcaactttcattactcttctgcccaaggtggagggggccactagtgtgagagacttccgcccaataagtctggttcatagtttcgcgaagttggtaactaaattgttggctaacaggttagcaggccggctgcaaaatatggtttcccccaatcaaaccgcttttattaagaaacggtttattcttgacaactttatgctagtccagcagacgaccagattcttgcattgtcagaaacaggctcgtatacttctcaagcttgacatttctaaggcttttgactcggtatcgtgggccttccttctcgaggtcttgaaaaaacttggttttggacagatctggtgtgatataataagcgggttgttagctacctcttctaccaagattttactaaatggtctgccaggggaaagtattgggcatcaacgcggactgaggcagggtgatcctctatcgcctatgttgtttattcttgtaatggatgtcttgaatctgctcgtgcagcgagcctctgaggaagggtttcttcaacctctctcttcaaggaatatgcagcaccgtatctcgttgtacgtggatgacgcagtgttatttctaagtcctactgccctggacatcagtatggttatggatattcttcatttatttggttcagcttcaggtctaaggactaatatccagaagagcagtgtgttcccaatctgctgtggggaagaagaggtgaattgtttacatgacttgctgccatgtaatatttcagattttccctgtaagtacctcggtttgcctttgtctcccaagaaactcacaagggaccaggttcaggccattgttgatagagtggccagccttctgccaggatggaaagctgagcttatgaccagggctggtagagctatttcatgtgcagtttgtcatgatggcaaagatgatttatgcagctttggcacttgaccttcctgtatgggccattaaagcaatcgataagctgaggaaggtcttcctctagaggggcaggaaagagttccgtggtggtcattgcctcttcgcttggcctaaggttacccgtcccaaggagctgggtggtcttgggattagtgagttaaagagcctctgttgggctctgagagctcgttggccatggttgcagaaaacagatcccagtaggccttggacggacttccccactcatgtttgtaaggtggtaaaaatctgattgctgcagccattattactaagctcggtgatggagccaatacccttttctggaaggacagatggttggatgggagatgtattaaggacatagctactgcaatgtttgatttgtgcccttgcgtcttgccaacaggcggttggtcaaagatgctctccccaatttccagtggatctccgatgtgaatggggcaatttcagtcagagtcattgctgaattcctggaactttgtgaagtgcttgatgcagttgtgctccagcctggaataagggatcgacatttatggaaattcagcgcttcaggtgattatacaactagttctgcttataaagctctcttccttggttcagttcagttcgaaccagcagagcgtgtgtggaaatcttgggctcctgggaagtgcaagttctttatttggcttgtggaacataataggtgctggactgctgacaggctcataaaagaggactagaccgaccagatccgtgccccttgtgcgaccaagaggctgaaaccataaatcatttgctggtcaaatgtgtttttgccaagcagttctggtttgatttccttagttcagcggggctgcaggagctgtgtccagctcatgaggattccttttagtcgtggtggaagtctagcagctcccgtgcatctgatcttttgagaaaaaggtttcaattctttagtgatcctaggtgcttggaccatttggaagcataggaatagatgtgtttttgatggttgtaatcctagcttggtcacagcccttagggtggctagggaagaggcggtgctctggtccttgactggagccaaggccctgtccttcctccaagtcgatgagttgctggcttaaaacagcgttgtgggttgtgtttcctccatgttagtcggtgatccttagttagtctctagtggtgtgtgtgctgtaatggggttctctccccctttcttattcttctattaatacaaagatgcgcagctctcctgcgtataccagaaaaaaaaaatacttctacttgtgctaactgctaaggtcatacatgataccttttttagagtttacactatatgattaccacatttttggctaattttcccgattttttaaatgaacgagcaggggatctgcctattgtattacttaagaagacacacacgggcaaagccaattttcctgatcgcctccatatttctgaacactgtttttttaatgttggtttggatgcccatgtaaatattttaattggatgtagattaagtgattttctgtaagatcatgtttagcctttcctaattttttgtcttctcaagaatgatcaggaaaggtactctgtatcaggattgggcacgggtggagctggtgtgggttgtgcctactctagttcgaatgctattgatcttgttagtgccattattgaccaaatatgatgttgtcatggcagacttgatggttgctgcacatactttcatgcatgacatgcaccaggtaagtttgtaatggttatggtagaatgaatgtgtactggatgatcagcttggtgtcaccaatctccatgcatcttgttcagcactcaattccctcagcagaagcccatgaggtcacaactcatggtatccatttcagccccaagtcggcatggtgaaatactgaaatggaattggtctttggtgcacgtgttgcagctgtgtaatttcttgttatgtccaccatttaagagcctgatatacagccttagcataagaaaattgcttggttcttgagtacatggacaccatctgccacagtgactagtcgagcacttcatggctgctgttgcttggacttcatctggcctcttatgccatgataagaaaatcattgggtcactttccgcaattgacatgaaggtagtgttggtcataaatatcaactggtataccatctagtctgggacatatatgaacatgtacattgggagcctaagaggtctcgaaaaacatttgaaatcaagtgggtaccaggaaagtaaccatgcaagtaagttttgtaactgctgatgcaaaatagcatgtgctgagactaacatagtgcatgactgtacagtttatggtggtaatggctgatgttgaatccagtaacagctgaaacaatgtgccatgatgaaccacgaaaacatgtgattgatgaccgtggtatatcgtattccatgggtccgtgcacagtgcactgtcaatgtcatcatcagtcaggtgtactggtatcagtgtttaaggcttcagaaaacttcatgagcctttgggtacctggtgaggcattacctgttggtatcatactatcatctcagacttgatgctgtcagcagaacaatacccaatctatgcttgacggtctttagtgttagtatgatcaacaacatggtgaagaacctaactgtgggtgacaaacgaatttgatgtgatatggataatcatttgcacgtgttgttcagctgacaatgacttcgtaccttcggtataagtttagaatgagtaggattttgcattttttttgatttatcaggtataaaatacacttgatttatcagtgtaaaaataatacttgagaaacctataat

SEQ ID NO: 20403 - DNA, 2161 bp, Zea Mays
caactgcatttctccgcgacgactcgagctcgacacacgaaacagacatggccgccgtcgccgctctttcctgccccgcgcctccgcgtgtgttccgctgcgccaagacgctgcctgctccctccgccgccacatccagccgcggaagggtcggctacggctcctcctacgcccgccggtggcagtgccgccgctggacccaccggccggacgctacgacgacgcggatcaggcgggcaacgccgcgccgcacggcggtggtgagggtgaactgcgcctactctccccgcgctgaaacaatcactgcatgctcttggaatgaatatgtgatttgcagtgatgtacctgtgcttattgagttttgggcctcctggtgtggaccttgcagaatggtcacacggattgtcgatgagatagcacaagaatatgttgggagaataaaatgctataagcttgacaccgatgattacccacaggttgctacagcttacagcatcgagaggattccaactgttttactctttaaggatggagagaaaatacatagtattaccgggacactgccaaaggctgtttatgtgaaagccattgagaaatctatttcagaacaatgacatatttggttaatattctttggtccatagatattaaactgtacactccattttataccagatagtgcagagagctcaaggtttgtctcaccaccatgtgactatgtgattgctactgttgctacttctttatagttgatacgtggctaaattttcagccacatctttacgaatgatcaggaaaggtactctgtatcaggattgggcacgggtggagctggtgtggtatgtcatagtcattgctcctactaaaaatattaggtgcacaatttaaggttgaactgttaacgtaacacagctatcatcaatacatggcagggttgtgcctactctagttcgaatgctattgatcttgttagtgccattattgaccaaatatgatgttgtcatggcagacttgatggttgctgcacatactttcatgcatgacatgcaccaggtaagtttgtaatggttatggtagaatgaatgtgtactggatgatcagcttggtgtcaccaatctccatgcatcttgttcagcactcaattccctcagcagaagcccatgaggtcacaactcatggtatccatttcagccccaagtcggcatggtgaaatactgaaatggaattggtctttggtgcacgtgttgcagctgtgtaatttcttgttatgtccaccatttaagagcctgatatacagccttagcataagaaaattgcttggttcttgagtacatggacaccatctgccacagtgactagtcgagcacttcatggctgctgttgcttggacttcatctggcctcttatgccatgataagaaaatcattgggtcactttccgcaattgacatgaaggtagtgttggtcataaatatcaactggtataccatctagtctgggacatatatgaacatgtacattgggagcctaagaggtctcgaaaaacatttgaaatcaagtgggtaccaggaaagtaaccatgcaagtaagttttgtaactgctgatgcaaaatagcatgtgctgagactaacatagtgcatgactgtacagtttatggtggtaatggctgatgttgaatccagtaacagctgaaacaatgtgccatgatgaaccacgaaaacatgtgattgatgaccgtggtatatcgtattccatgggtccgtgcacagtgcactgtcaatgtcatcatcagtcaggtgtactggtatcagtgtttaaggcttcagaaaacttcatgagcctttgggtacctggtgaggcattacctgttggtatcatactatcatctcagacttgatgctgtcagcagaacaatacccaatctatgcttgacggtctttagtgttagtatgatcaacaacatggtgaagaacctaactgtgggtgacaaacgaatttgatgtgatatggataatcatttgcacgtgttgttcagctgacaatgacttcgtaccttcggtataagtttagaatgagtaggattttgcattttttttgatttatcaggtataaaatacacttgatttatcagtgtaaaaataatacttgagaaacctataat

SEQ ID NO: 20404 - DNA, 2061 bp, Zea Mays
cgagcggggcccacggcggatgaggcactccccagtccccaccaaacggccaacatccgcggggggcgcggggcggaaggaaagacgaaattagagcgaccgggtccgagaaaaaccacgcacggcggggtgccgtgccgacgccactggcatgtccggccttgcaagccacacaacaagcaccactcggagacgcgagcggagcgaagcgacgccgcccacgcaccagcctgcttgctcctcctcctcctcctggcttctttggctgcaagctgaaagttccgtgctcaggccagcaacggagcacaacatacagatacagctcggccggagctagagtagcgggcggcggcgagaggagaaaacaaggaagcgaggagatggcgggcgggggcagggatgggccggcggcgcgtcttctccggcgcgtccccgccgccgtgtccgtcctcttgatgctgacgctgtgctcccccgggccgcccggcgcggtggtggtggtgtcggcccggaaggtgggcgagacgtgcgcgctggaccggaactgcgacgccgggctgcactgcgagacgtgtgtggccgacggcaacgtgcggccgcgctgcacccgcgtcgctcccgtcgacccacaaaccaaggcgggatctgccgttcaaccgctacgcgtggctgacgacgcacaactcgttcgcgcggctcgggcagcggtcgcagaccggggtcgccatagccacgccgtggaaccagcaggacaccgtcaccgagcagctcaacaacggcgtgaggggtctgatgctggacatgtacgacttccgcaacgacgtctggctctgccactcctacggcggcatctgccagaacttcaccgcgtttcaaccggcggtgaacgtgctccgcgaggtggagcgcttcctgtcgcggaaccccgccgaggtggtgaccatcttcgtggaggactacgtggagtcgcccatggggctcacccgggtgctcaacgcgtcgggcctcgcgcgctacgtgctccccgcctggcgcatgcccaagagcggcggcgactggccgctgctcagcgacatggtccgcgacaaccaccgcctgctcgtcttcacctccaaggccgctaaggaggccgccgagggcgtcgcctacgagtggcgctacgtcgtcgagaaccagtacgggaccaaggggatggtgaaggggacgtgccacaaccgcgccgagtcggccgccatgaacgacctgtcgaggtcgctggtgctcgtcaactacttcagggacctcccgaacctgccggcggcgtgcaaggacaactcggcgcagctgctggacatggtcaccgcctgccacgacaagtccggggaccggtggcccaacttcatcgccgtggacttctacaagaggagcgaccggggcggcgcggcggaggccacggacaaggcgaacggcggcctagtctgcggctgcgggagcatatcggcctgcaacgccaacgggacatgcactccccggcacggcaggacgcccagaggcatcttcaacgcctcatctgacgcagcggcgtggaggccgccgccgccggtgctgcaatggcagaggctcatcctgctgccttctctccttgctcttcttctgggcctgtgaattctacgtattttgttgtatagaccgatacggatcggtttggttgcaggcaccgagcgcattttgttgtgtatatatacacacagatgacagattggttgaagccagctagcagcttagtccatggtagtctgtgtataagacagagtgcatatacaaggttaacacaacatcaacaatcagatgcggaaaactgcgtttaatcatgatctcacactaaacgcctcttttgcagcttctcacatctaccaattgacgactaaaaaattatatcaaaatttgcaatttaaccctttagtaatctatttttcttttatttatatagatcatcaagtggtaatatgagaggctgcaaagtacctttttcacaactcatcgactacaacaatttttttcacactcatagcctaaccaaac

SEQ ID NO: 20405 - DNA, 1964 bp, Zea Mays
cgagcggggcccacggcggatgaggcactccccagtccccaccaaacggccaacatccgcggggggcgcggggcggaaggaaagacgaaattagagcgaccgggtccgagaaaaaccacgcacggcggggtgccgtgccgacgccactggcatgtccggccttgcaagccacacaacaagcaccactcggagacgcgagcggagcgaagcgacgccgcccacgcaccagcctgcttgctcctcctcctcctcctggcttctttggctgcaagctgaaagttccgtgctcaggccagcaacggagcacaacatacagatacagctcggccggagctagagtagcgggcggcggcgagaggagaaaacaaggaagcgaggagatggcgggcgggggcagggatgggccggcggcgcgtcttctccggcgcgtccccgccgccgtgtccgtcctcttgatgctgacgctgtgctcccccgggccgcccggcgcggtggtggtggtgtcggcccggaaggtgggcgagacgtgcgcgctggaccggaactgcgacgccgggctgcactgcgagacgtgtgtggccgacggcaacgtgcggccgcgctgcacccgcgtcgctcccgtcgacccacaaaccaaggcgcgggatctgccgttcaaccgctacgcgtggctgacgacgcacaactcgttcgcgcggctcgggcagcggtcgcagaccggggtcgccatagccacgccgtggaaccagcaggacaccgtcaccgagcagctcaaccaaccggcggtgaacgtgctccgcgaggtggagcgcttcctgtcgcggaaccccgccgaggtggtgaccatcttcgtggaggactacgtggagtcgcccatggggctcacccgggtgctcaacgcgtcgggcctcgcgcgctacgtgctccccgcctggcgcatgcccaagagcggcggcgactggccgctgctcagcgacatggtccgcgacaaccaccgcctgctcgtcttcacctccaaggccgctaaggaggccgccgagggcgtcgcctacgagtggcgctacgtcgtcgagaaccagtacgggaccaaggggatggtgaaggggacgtgccacaaccgcgccgagtcggccgccatgaacgacctgtcgaggtcgctggtgctcgtcaactacttcagggacctcccgaacctgccggcggcgtgcaaggacaactcggcgcagctgctggacatggtcaccgcctgccacgacaagtccggggaccggtggcccaacttcatcgccgtggacttctacaagaggagcgaccggggcggcgcggcggaggccacggacaaggcgaacggcggcctagtctgcggctgcgggagcatatcggcctgcaacgccaacgggacatgcactccccggcacggcaggacgcccagaggcatcttcaacgcctcatctgacgcagcggcgtggaggccgccgccgccggtgctgcaatggcagaggctcatcctgctgccttctctccttgctcttcttctgggcctgtgaattctacgtattttgttgtatagaccgatacggatcggtttggttgcaggcaccgagcgcattttgttgtgtatatatacacacagatgacagattggttgaagccagctagcagcttagtccatggtagtctgtgtataagacagagtgcatatacaaggttaacacaacatcaacaatcagatgcggaaaactgcgtttaatcatgatctcacactaaacgcctcttttgcagcttctcacatctaccaattgacgactaaaaaattatatcaaaatttgcaatttaaccctttagtaatctatttttcttttatttatatagatcatcaagtggtaatatgagaggctgcaaagtacctttttcacaactcatcgactacaacaatttttttcacactcatagcctaaccaaac

SEQ ID NO: 20406 - DNA, 1660 bp, Zea Mays
cgagcggggcccacggcggatgaggcactccccagtccccaccaaacggccaacatccgcggggggcgcggggcggaaggaaagacgaaattagagcgaccgggtccgagaaaaaccacgcacggcggggtgccgtgccgacgccactggcatgtccggccttgcaagccacacaacaagcaccactcggagacgcgagcggagcgaagcgacgccgcccacgcaccagcctgcttgctcctcctcctcctcctggcttctttggctgcaagctgaaagttccgtgctcaggccagcaacggagcacaacatacagatacagctcggccggagctagagtagcgggcggcggcgagaggagaaaacaaggaagcgaggagatggcgggcgggggcagggatgggccggcggcgcgtcttctccggcgcgtccccgccgccgtgtccgtcctcttgatgctgacgctgtgctcccccgggccgcccggcgcggtggtggtggtgtcggcccggaaggtgggcgagacgtgcgcgctggaccggaactgcgacgccgggctgcactgcgagacgtgtgtggccgacggcaacgtgcggccgcgctgcacccgcgtcgctcccgtcgacccacaaaccaaggcgcgggatctgccgttcaaccgctacgcgtggctgacgacgcacaactcgttcgcgcggctcgggcagcggtcgcagaccggggtcgccatagccacgccgtggaaccagcaggacaccgtcaccgagcagctcaacacgggaccaaggggatggtgaaggggacgtgccacaaccgcgccgagtcggccgccatgaacgacctgtcgaggtcgctggtgctcgtcaactacttcagggacctcccgaacctgccggcggcgtgcaaggacaactcggcgcagctgctggacatggtcaccgcctgccacgacaagtccggggaccggtggcccaacttcatcgccgtggacttctacaagaggagcgaccggggcggcgcggcggaggccacggacaaggcgaacggcggcctagtctgcggctgcgggagcatatcggcctgcaacgccaacgggacatgcactccccggcacggcaggacgcccagaggcatcttcaacgcctcatctgacgcagcggcgtggaggccgccgccgccggtgctgcaatggcagaggctcatcctgctgccttctctccttgctcttcttctgggcctgtgaattctacgtattttgttgtatagaccgatacggatcggtttggttgcaggcaccgagcgcattttgttgtgtatatatacacacagatgacagattggttgaagccagctagcagcttagtccatggtagtctgtgtataagacagagtgcatatacaaggttaacacaacatcaacaatcagatgcggaaaactgcgtttaatcatgatctcacactaaacgcctcttttgcagcttctcacatctaccaattgacgactaaaaaattatatcaaaatttgcaatttaaccctttagtaatctatttttcttttatttatatagatcatcaagtggtaatatgagaggctgcaaagtacctttttcacaactcatcgactacaacaatttttttcacactcatagcctaaccaaac

SEQ ID NO: 20407 - DNA, 1595 bp, Zea Mays
gtttgcgtgcacgcccgcggtgtcggggtagagcagcgaagctcacaccacacgccgggcttgctgctgcggctgcgtttgcttgaagcgtgatcgcggcacacatggcactgcactacgggtaggcacgcgcgctggatgtgctcctgcgtgtttctgtggcctgcgcgtcaatgtgtcatgacatctcaccgcagtcaatgtctcatactctcatctcattgcttcgccatgatgtcacctcgacaaagacggattggggggctggggagggtgctacctcgccttcaaacatcgcgcttcttctgaacggcgtgaggggtctgatgctggacatgtacgacttccgcaacgacgtctggctctgccactcctacggcggcatctgccagaacttcaccgcgtttcaaccggcggtgaacgtgctccgcgaggtggagcgcttcctgtcgcggaaccccgccgaggtggtgaccatcttcgtggaggactacgtggagtcgcccatggggctcacccgggtgctcaacgcgtcgggcctcgcgcgctacgtgctccccgcctggcgcatgcccaagagcggcggcgactggccgctgctcagcgacatggtccgcgacaaccaccgcctgctcgtcttcacctccaaggccgctaaggaggccgccgagggcgtcgcctacgagtggcgctacgtcgtcgagaaccagtacgggaccaaggggatggtgaaggggacgtgccacaaccgcgccgagtcggccgccatgaacgacctgtcgaggtcgctggtgctcgtcaactacttcagggacctcccgaacctgccggcggcgtgcaaggacaactcggcgcagctgctggacatggtcaccgcctgccacgacaagtccggggaccggtggcccaacttcatcgccgtggacttctacaagaggagcgaccggggcggcgcggcggaggccacggacaaggcgaacggcggcctagtctgcggctgcgggagcatatcggcctgcaacgccaacgggacatgcactccccggcacggcaggacgcccagaggcatcttcaacgcctcatctgacgcagcggcgtggaggccgccgccgccggtgctgcaatggcagaggctcatcctgctgccttctctccttgctcttcttctgggcctgtgaattctacgtattttgttgtatagaccgatacggatcggtttggttgcaggcaccgagcgcattttgttgtgtatatatacacacagatgacagattggttgaagccagctagcagcttagtccatggtagtctgtgtataagacagagtgcatatacaaggttaacacaacatcaacaatcagatgcggaaaactgcgtttaatcatgatctcacactaaacgcctcttttgcagcttctcacatctaccaattgacgactaaaaaattatatcaaaatttgcaatttaaccctttagtaatctatttttcttttatttatatagatcatcaagtggtaatatgagaggctgcaaagtacctttttcacaactcatcgactacaacaatttttttcacactcatagcctaaccaaac

SEQ ID NO: 20408 - DNA, 1627 bp, Zea Mays
tgcacgcccgcggtgtcggggtagagcagcgaagctcacaccacacgccgggcttgctgctgcggctgcgtttgcttgaagcgtgatcgcggcacacatggcactgcactacgggtaggcacgcgcgctggatgtgctcctgcgtgtttctgtggcctgcgcgtcaatgtgtcatgacatctcaccgcagtcaatgtctcatactctcatctcattgcttcgccatgatgtcacctcgacaaagacggattggggggctggggagggtgctacctcgccttcaaacatcgcgcttcttctgaacggcgtgaggggtctgatgctggacatgtacgacttccgcaacgacgtctggctctgccactcctacggcggcatctgccagaacttcaccgcgtttcaaccggcggtgaacgtgctccgcgaggtggagcgcttcctgtcgcggaaccccgccgaggtggtgaccatcttcgtggaggactacgtggagtcgcccatggggctcacccgggtgctcaacgcgtcgggcctcgcgcgctacgtgctccccgcctggcgcatgcccaagagcggcggcgactggccgctgctcagcgacatggtccgcgacaaccaccgcctgctcgtcttcacctccaaggccgctaaggaggccgccgagggcgtcgcctacgagtggcgctacgtcgtcgagaaccagtattctgacggccgggtccgggtccgggtcttgctcgcagacgggaccaaggggatggtgaaggggacgtgccacaaccgcgccgagtcggccgccatgaacgacctgtcgaggtcgctggtgctcgtcaactacttcagggacctcccgaacctgccggcggcgtgcaaggacaactcggcgcagctgctggacatggtcaccgcctgccacgacaagtccggggaccggtggcccaacttcatcgccgtggacttctacaagaggagcgaccggggcggcgcggcggaggccacggacaaggcgaacggcggcctagtctgcggctgcgggagcatatcggcctgcaacgccaacgggacatgcactccccggcacggcaggacgcccagaggcatcttcaacgcctcatctgacgcagcggcgtggaggccgccgccgccggtgctgcaatggcagaggctcatcctgctgccttctctccttgctcttcttctgggcctgtgaattctacgtattttgttgtatagaccgatacggatcggtttggttgcaggcaccgagcgcattttgttgtgtatatatacacacagatgacagattggttgaagccagctagcagcttagtccatggtagtctgtgtataagacagagtgcatatacaaggttaacacaacatcaacaatcagatgcggaaaactgcgtttaatcatgatctcacactaaacgcctcttttgcagcttctcacatctaccaattgacgactaaaaaattatatcaaaatttgcaatttaaccctttagtaatctatttttcttttatttatatagatcatcaagtggtaatatgagaggctgcaaagtacctttttcacaactcatcgactacaacaatttttttcacactcatagcctaaccaaac

SEQ ID NO: 20409 - DNA, 796 bp, Zea Mays
atgccatcttaacttacatctctgtacgggaaatcgtcaacctcaagcatgtgaatgacatgcccaatctttggcctcttgcgagcttcagggtctacgcaccgcagagccactagcaaagccttcttcaatgccctagaagtaggcttctcagtcatctttggatccaaaaccccctcagaatttctgttgctgaccatcgtcttcagccactcaactagattaatctgaaaagattgctccacaaagttcatatatgcacttctcacgttcattattcagcgaatgcaaggaggtactgccattactaacctcccctggcggcctgttgtaatcaacaggtacacggccagatattatttccatgataagaattccgaaactatagacatcgctagtttcattcaacatgccagtgcccgcatactctggtgcaacataactcctttctgaacccaaaagtttcgctagcccaaaatcagaaagctttgcattccaatgcttgtcaagaagaatattgctcgacttgacatcacggtgaacaacctttggctcaagtccctctcagcaaagtgcatacccttttgctgttcccagaataatcttcattctgatatcccatgtaagagggctcacagggccaacatccccatggagccattgctccaagtttccattattaacgtactcatacacaagcatcctggaatggaaaagaaccatatacaatgaaatttatgataaagctacaaactccttggttctataatttcacaatataagctaaagctattgt

SEQ ID NO: 20410 - DNA, 577 bp, Zea Mays
ttctaaacaaatcaatatctttcataattttttcaatctcgttcaatccacataagataggaataacggaataagatttaacctggtaggctttgtacaccaaaaatagggacagaagaattacgttcccttttatccaatacatttttgcaactattaaaaactattttttgcctcattttttgtgacagtcttggagatgctaatcttgatctatattagatggtttttggacgggtgaatgaaatggagtgctcagatctgtatgtcccagaaaccgtaggtaacgtgaccttgtccttgcctcccgggcatggacctgcctcagtcacgggtctctatcgttgcgagctttcaattgagaaacgtgtgcctcttccatggaaattagccttttggcaggaattgagcaagaagagcaaacaaccatgcatgccgccacaacatccaaaagcaactaaccgatctgttagatgtgctgtcataacgcaatggtagtttagaaaaataaccagccaaaagtgctgctttgctaatgcacggcggcacggcagttgagaacgcatcaccaatttac

SEQ ID NO: 20411 - DNA, 1188 bp, Zea Mays
agcttcctctccctcgttcacgagcacaaacagaacgagctgggtcatcttctccaggactcgcgtctgttgcccagagccgtcatgcgcacagatattttctcgtccagaatacgaccccttcctcttcgatcgggacccatggtccagcctctcccatgcgcatagcttatgaatcatctcccacgcgatcgtattccattgcaaccacctccgtaaacattacatgctcaagctcttcgttcctagtccgttgagatcccttccgggattttcgtggtcgctgcaacaaaccccgagtcgggctctgaacaacctctgcgagatctttggggccgacgtggccaactcgccagcgcctctgggctataaaagcgagcccccgtgacctcctcatccctcgaatcgagttctgccttggattagcgtcaccatgtctacaggagaagaagagtgctaccgcagggaaagagaatctggtccgccgccatagccatcccgcactcccgtcgttattaggtgcctggggcttggtccgagagcttcggaccacactatcgcttgggtatctggcgaatcggagctctgtatcgtcgccgggtcgcgcggattgctcatcagagtactccttcgccttggatccgcagttcgccgtgacccgtggtaccgggcatccttatacctagtaagaactccctcatccgaatcaatttgctctgctcatggcgtcgatcgtgtgaattgtcgaattgggtcgctgctgcgcgtactccagtttgccggtggtgaccaccgccgctcggcagctgggagctgctgcggtctgggtaggagggcggcggggtcgttcagaccgcccgatcggaatggacgtctcggattaatcggtcacatacaccgtcgcatagatcaatcggaggccttagatggcaatcgtgcggctagaaccggatcgggtcgtaggagtacgtggaccgtggatctctgatccagcggtgcttataacccatcagttaaataaattactcaatctaatgtgaatgcttggtcgtcaatccaacggcctagattgaaccataccccttcggccgatatcaattgcgaaagagaccctttagacttcataaatcaacccgccgtccatataaggttcgtctgagtctcgggtttcttgcgccgaggcccctg

SEQ ID NO: 20412 - DNA, 1060 bp, Zea Mays
agcttcctctccctcgttcacgagcacaaacagaacgagctgggtcatcttctccaggactcgcgtctgttgcccagagccgtcatgcgcacagatattttctcgtccagaatacgaccccttcctcttcgatcgggacccatggtccagcctctcccatgcgcatagcttatgaatcatctcccacgcgatcgtattccattgcaaccacctccgtaaacattacatgctcaagctcttcgttcctagtccgttgagatcccttccgggattttcgtggtcgctgcaacaaaccccgagtcgggctctgaacaacctctgcgagatctttggggccgacgtggccaactcgccagcgcctctgggctataaaagcgagcccccgtgacctcctcatccctcgaatcgagttctgccttggattagcgtcaccatgtctacaggagaagaagagtgctaccgcagggaaagagaatctggtccgccgccatagccatcccgcactcccgtcgttattaggtgcctggggcttggtccgagagcttcggaccacactatcgcttgggtatctggcgaatcggagctctgtatcgtcgccgggtcgcgcggattgctcatcagagtactccttcgccttggatccgcagttcgccgtgacccgtggtaccgggcatccttatacctacagcgagaacacgtgtcacctgcagatcatcctggtacctggaatctcaagtcccaggcaagttgtgcccttgaccactttttacccaataatgttctttaatatcatttattcatgcataggttaattttgatgggacccaataggttaccctagattgtttatctctttaccttgtttacccctgaatcacttgggtagtttgctattgctttacatggatttgggataattatttatcatatctatgttccagttattttgttattctatttatgttcatgtcaagatcattaatgttaattggaacatagagcttaacttgagaaacacgtgccgccacaagggtttatggacgcccttggctgattaatt

SEQ ID NO: 20413 - DNA, 1057 bp, Zea Mays
agcttcctctccctcgttcacgagcacaaacagaacgagctgggtcatcttctccaggactcgcgtctgttgcccagagccgtcatgcgcacagatattttctcgtccagaatacgaccccttcctcttcgatcgggacccatggtccagcctctcccatgcgcatagcttatgaatcatctcccacgcgatcgtattccattgcaaccacctccgtaaacattacatgctcaagctcttcgttcctagtccgttgagatcccttccgggattttcgtggtcgctgcaacaaaccccgagtcgggctctgaacaacctctgcgagatctttggggccgacgtggccaactcgccagcgcctctgggctataaaagcgagcccccgtgacctcctcatccctcgaatcgagttctgccttggattagcgtcaccatgtctacaggagaagaagagtgctaccgcagggaaagagaatctggtccgccgccatagccatcccgcactcccgtcgttattaggtgcctggggcttggtccgagagcttcggaccacactatcgcttgggtatctggcgaatcggagctctgtatcgtcgccgggtcgcgcggattgctcatcagagtactccttcgccttggatccgcagttcgccgtgacccgtggtaccgggcatccttatacctacgagaacacgtgtcacctgcagatcatcctggtacctggaatctcaagtcccaggcaagttgtgcccttgaccactttttacccaataatgttctttaatatcatttattcatgcataggttaattttgatgggacccaataggttaccctagattgtttatctctttaccttgtttacccctgaatcacttgggtagtttgctattgctttacatggatttgggataattatttatcatatctatgttccagttattttgttattctatttatgttcatgtcaagatcattaatgttaattggaacatagagcttaacttgagaaacacgtgccgccacaagggtttatggacgcccttggctgattaatt

SEQ ID NO: 20414 - DNA, 2735 bp, Zea Mays
actggttccgtctgtgttttcttgtggttctcgcgtgctactgtgctgagaggggaccaggaagaatccgtcgtccggccggctcgctctctgccggccatgacgagcgccaataaggcgaagctccagctgcaggagagggtcccgctcccccgcacggcgtggaagctggccgacctcgccgtcctttccctgctcctggccctcctcgcccgccgtgcgtcctcgctggtgtcgtcgggcggcacggcggccgcgtgcacgtggtgctgggtcgccgcgctcatttgcgaggcgtggttcacggtggtctggctgctcaacatgaacgccaaatggaaccccgtccgcttcgtcacgcaccctgaacgcctcgccggatattgggcgggcgacgacgagctgctgccggcggtggacatgttcgtgacgacggcggacccgaagctggagccggcggtggtgacggtgaacacggtgctgtcgctgctggcgctggactaccccgcgggcaagctgtcgtgctacgtctccgacgacggctgctcggcggtgacatgctacgcgctgcgcgaggccgccgagttcgccaagctctgggtgccgttcaccaggaagcacggcgccaaggtcagggcccccttcgcgtacttctcctcctcctccggcggcggggcggcggagcgtggcggtggcggtggggccgccgacgccgacgccgagttcctgcgcgcttggacgtccatgaagaacgagtacgaggagctggtccgccggatcgagagcgccgaggagaagtctctagtccggcgcggcgacggcgcgttcgccgagttcgtgggtgctgaccgcgggaaccacccgaccataatcaaggtcctgtgggacaacgacagcagcaagagcgagagcgatgagcaggcggcaggggatggagtcccaagcctcatatacgtctcgagggagaagagccgcacgcagccccaccacttcaaggccggggccatgaacgtcctgacgagggtgtccgcggtgctgaccaacgcgccgatcatgctgaacgtggactgcgacatgttcgccaacaacccgcaggcggccctccacgccatgtgcctcctcctgggcttcgacgacgaggtccacagcggcttcgtccaggcgccgcagcggttctacggcggcctcgcggacgaccctttcgggaaccagatgcaggttatattcgagaaagttggacacggaattgccggactccaaggcatattttactgcgggacgggttgctttcaccgcaggaaagtcatgtacggcgtgccaccgggctccggcaccggcgccaccaaagcagattcaccgtcctacaaggagctacagaagaagtttggcagttcgaaagaactgatcgagtcggcgaggagcatcatcacgtcgaaagaagcgccagctgcggtggcagatctaacgagccgcgtcgaagtggcgaagcaagtctctgcctgcagctacgagacgggcacgagctggggtcaggaggttggctgggtgtacgggtccatgaccgaggacgtcctgacggggcagcgcatccacgccgccggctggaggtcggcgctcctgagcccggacccaccggcgttcctcggcggcgcgcccaccggcgggcccgccagcctcacccagtacaagagatgggcgacgggcctgctggagatcgtcctcagccgccacaacccgttcctcctctccgcgtccaagcgcctccgtttccggcagtgcctcgcctaccttgtcatcgacgtgtggcccgtcagggcgcccttcgagctctgctacgcgctgctcggaccctactgcctcatcgccaaccgctccttcctgccaaaggcatcggagcccggcttcgtcgttccgctggcgctgttcctggcctacaacgcgtacaacctgggcgagtacgtggactgccggctctcggcgcgcgcctggtggaacaaccagcggatgcagcggatcacgtcgtcctccgcatggctgctcgcgttcctcaccgtggtcctcaagacggtgggcctctcggagacggtgttcgaggtgacacgcaaggagcagcagcagcagcagggctcgcccgacggcgacggcgccgacgccgacccggggcggttcaccttcgactcgtcgccggtgttcgtcccgccggcggcgctcgcgatgctgagcgtcgtcgccgtcgccgtcggagcgtggagggcggtcaccggtggcggcggcggcccgggcgtcggggagttcgtgtgctgcgcctggcttctgctctgcttctggccgttcgtgaggggcctcgtcggcggcaggggaagctacggcatcccctggagcgtcaggatcaaggctgccctgctcgtggccgcgttcgtgcacctgtccacacgcaagtaacttgcccggccccggcgtcgactcaccactgctactgctgcggaaggttttcatgtcagagacccgtaataatgcagacaacagcatgttccgcctaagatttgtacacaactctctgcttccactgcttgtatagaattcttgctcaagattacaagtcgaggccagtggtcggcgatagaaacagcgagtattattttatcctactcccaccagttcctgagcgtcgattctgggccgcgtctgaggctgtgagccaaggataaccaaatcgtctggagtaaaaaaaaaat

SEQ ID NO: 20415 - DNA, 2747 bp, Zea Mays
actggttccgtctgtgttttcttgtggttctcgcgtgctactgtgctgagaggggaccaggaagaatccgtcgtccggccggctcgctctctgccggccatgacgagcgccaataaggcgaagctccagctgcaggagagggtcccgctcccccgcacggcgtggaagctggccgacctcgccgtcctttccctgctcctggccctcctcgcccgccgtgcgtcctcgctggtgtcgtcgggcggcacggcggccgcgtgcacgtggtgctgggtcgccgcgctcatttgcgaggcgtggttcacggtggtctggctgctcaacatgaacgccaaatggaaccccgtccgcttcgtcacgcaccctgaacgcctcgccggatattgggcgggcgacgacgagctgctgccggcggtggacatgttcgtgacgacggcggacccgaagctggagccggcggtggtgacggtgaacacggtgctgtcgctgctggcgctggactaccccgcgggcaagctgtcgtgctacgtctccgacgacggctgctcggcggtgacatgctacgcgctgcgcgaggccgccgagttcgccaagctctgggtgccgttcaccaggaagcacggcgccaaggtcagggcccccttcgcgtacttctcctcctcctccggcggcggggcggcggagcgtggcggtggcggtggggccgccgacgccgacgccgagttcctgcgcgcttggacgtccatgaagaacgagtacgaggagctggtccgccggatcgagagcgccgaggagaagtctctagtccggcgcggcgacggcgcgttcgccgagttcgtgggtgctgaccgcgggaaccacccgaccataatcaaggtcctgtgggacaacgacagcagcaagagcgagagcgatgagcaggcggcaggggatggagtcccaagcctcatatacgtctcgagggagaagagccgcacgcagccccaccacttcaaggccggggccatgaacgtcctgacgagggtgtccgcggtgctgaccaacgcgccgatcatgctgaacgtggactgcgacatgttcgccaacaacccgcaggcggccctccacgccatgtgcctcctcctgggcttcgacgacgaggtccacagcggcttcgtccaggcgccgcagcggttctacggcggcctcgcggacgaccctttcgggaaccagatgcaggttatattcgagaaagttggacacggaattgccggactccaaggcatattttactgcgggacgggttgctttcaccgcaggaaagtcatgtacggcgtgccaccgggctccggcaccggcgccaccaaagctctggcagcagcagattcaccgtcctacaaggagctacagaagaagtttggcagttcgaaagaactgatcgagtcggcgaggagcatcatcacgtcgaaagaagcgccagctgcggtggcagatctaacgagccgcgtcgaagtggcgaagcaagtctctgcctgcagctacgagacgggcacgagctggggtcaggaggttggctgggtgtacgggtccatgaccgaggacgtcctgacggggcagcgcatccacgccgccggctggaggtcggcgctcctgagcccggacccaccggcgttcctcggcggcgcgcccaccggcgggcccgccagcctcacccagtacaagagatgggcgacgggcctgctggagatcgtcctcagccgccacaacccgttcctcctctccgcgtccaagcgcctccgtttccggcagtgcctcgcctaccttgtcatcgacgtgtggcccgtcagggcgcccttcgagctctgctacgcgctgctcggaccctactgcctcatcgccaaccgctccttcctgccaaaggcatcggagcccggcttcgtcgttccgctggcgctgttcctggcctacaacgcgtacaacctgggcgagtacgtggactgccggctctcggcgcgcgcctggtggaacaaccagcggatgcagcggatcacgtcgtcctccgcatggctgctcgcgttcctcaccgtggtcctcaagacggtgggcctctcggagacggtgttcgaggtgacacgcaaggagcagcagcagcagcagggctcgcccgacggcgacggcgccgacgccgacccggggcggttcaccttcgactcgtcgccggtgttcgtcccgccggcggcgctcgcgatgctgagcgtcgtcgccgtcgccgtcggagcgtggagggcggtcaccggtggcggcggcggcccgggcgtcggggagttcgtgtgctgcgcctggcttctgctctgcttctggccgttcgtgaggggcctcgtcggcggcaggggaagctacggcatcccctggagcgtcaggatcaaggctgccctgctcgtggccgcgttcgtgcacctgtccacacgcaagtaacttgcccggccccggcgtcgactcaccactgctactgctgcggaaggttttcatgtcagagacccgtaataatgcagacaacagcatgttccgcctaagatttgtacacaactctctgcttccactgcttgtatagaattcttgctcaagattacaagtcgaggccagtggtcggcgatagaaacagcgagtattattttatcctactcccaccagttcctgagcgtcgattctgggccgcgtctgaggctgtgagccaaggataaccaaatcgtctggagtaaaaaaaaaat

SEQ ID NO: 20416 - DNA, 2845 bp, Zea Mays
tgttttcttgtggttctcgcgtgctactgtgctgagaggggaccaggaagaatccgtcgtccggccggctcgctctctgccggccatgacgagcgccaataaggcgaagctccagctgcaggagagggtcccgctcccccgcacggcgtggaagctggccgacctcgccgtcctttccctgctcctggccctcctcgcccgccgtgcgtcctcgctggtgtcgtcgggcggcacggcggccgcgtgcacgtggtgctgggtcgccgcgctcatttgcgaggcgtggttcacggtggtctggctgctcaacatgaacgccaaatggaaccccgtccgcttcgtcacgcaccctgaacgcctcgccggatattgggcgggcgacgacgagctgctgccggcggtggacatgttcgtgacgacggcggacccgaagctggagccggcggtggtgacggtgaacacggtgctgtcgctgctggcgctggactaccccgcgggcaagctgtcgtgctacgtctccgacgacggctgctcggcggtgacatgctacgcgctgcgcgaggccgccgagttcgccaagctctgggtgccgttcaccaggaagcacggcgccaaggtcagggcccccttcgcgtacttctcctcctcctccggcggcggggcggcggagcgtggcggtggcggtggggccgccgacgccgacgccgagttcctgcgcgcttggacgtccatgaagaacgagtacgaggagctggtccgccggatcgagagcgccgaggagaagtctctagtccggcgcggcgacggcgcgttcgccgagttcgtgggtgctgaccgcgggaaccacccgaccataatcaaggtagagagatgaactgatgctcgtcggtcgagcactgcagcacgcagcgcgtgtcatcatggcatagtcgtgtgtgacgatcgtgaatcaccatcttctgctggcatgcgcgagtgctcggcaggtcctgtgggacaacgacagcagcaagagcgagagcgatgagcaggcggcaggggatggagtcccaagcctcatatacgtctcgagggagaagagccgcacgcagccccaccacttcaaggccggggccatgaacgtcctgacgagggtgtccgcggtgctgaccaacgcgccgatcatgctgaacgtggactgcgacatgttcgccaacaacccgcaggcggccctccacgccatgtgcctcctcctgggcttcgacgacgaggtccacagcggcttcgtccaggcgccgcagcggttctacggcggcctcgcggacgaccctttcgggaaccagatgcagaaagttggacacggaattgccggactccaaggcatattttactgcgggacgggttgctttcaccgcaggaaagtcatgtacggcgtgccaccgggctccggcaccggcgccaccaaagctctggcagcagcagattcaccgtcctacaaggagctacagaagaagtttggcagttcgaaagaactgatcgagtcggcgaggagcatcatcacgtcgaaagaagcgccagctgcggtggcagatctaacgagccgcgtcgaagtggcgaagcaagtctctgcctgcagctacgagacgggcacgagctggggtcaggaggttggctgggtgtacgggtccatgaccgaggacgtcctgacggggcagcgcatccacgccgccggctggaggtcggcgctcctgagcccggacccaccggcgttcctcggcggcgcgcccaccggcgggcccgccagcctcacccagtacaagagatgggcgacgggcctgctggagatcgtcctcagccgccacaacccgttcctcctctccgcgtccaagcgcctccgtttccggcagtgcctcgcctaccttgtcatcgacgtgtggcccgtcagggcgcccttcgagctctgctacgcgctgctcggaccctactgcctcatcgccaaccgctccttcctgccaaaggcatcggagcccggcttcgtcgttccgctggcgctgttcctggcctacaacgcgtacaacctgggcgagtacgtggactgccggctctcggcgcgcgcctggtggaacaaccagcggatgcagcggatcacgtcgtcctccgcatggctgctcgcgttcctcaccgtggtcctcaagacggtgggcctctcggagacggtgttcgaggtgacacgcaaggagcagcagcagcagcagggctcgcccgacggcgacggcgccgacgccgacccggggcggttcaccttcgactcgtcgccggtgttcgtcccgccggcggcgctcgcgatgctgagcgtcgtcgccgtcgccgtcggagcgtggagggcggtcaccggtggcggcggcggcccgggcgtcggggagttcgtgtgctgcgcctggcttctgctctgcttctggccgttcgtgaggggcctcgtcggcggcaggggaagctacggcatcccctggagcgtcaggatcaaggctgccctgctcgtggccgcgttcgtgcacctgtccacacgcaagtaacttgcccggccccggcgtcgactcaccactgctactgctgcggaaggttttcatgtcagagacccgtaataatgcagacaacagcatgttccgcctaagatttgtacacaactctctgcttccactgcttgtatagaattcttgctcaagattacaagtcgaggccagtggtcggcgatagaaacagcgagtattattttatcctactcccaccagttcctgagcgtcgattctgggccgcgtctgaggctgtgagccaaggataaccaaatcgtctggagtaaaaaaaaaat

SEQ ID NO: 20417 - DNA, 1208 bp, Zea Mays
tttaacactgttggctgggtgtacgggtccatgaccgaggacgtcctgacggggcagcgcatccacgccgccggctggaggtcggcgctcctgagcccggacccaccggcgttcctcggcggcgcgcccaccggcgggcccgccagcctcacccagtacaagagatgggcgacgggcctgctggagatcgtcctcagccgccacaacccgttcctcctctccgcgtccaagcgcctccgtttccggcagtgcctcgcctaccttgtcatcgacgtgtggcccgtcagggcgcccttcgagctctgctacgcgctgctcggaccctactgcctcatcgccaaccgctccttcctgccaaaggcatcggagcccggcttcgtcgttccgctggcgctgttcctggcctacaacgcgtacaacctgggcgagtacgtggactgccggctctcggcgcgcgcctggtggaacaaccagcggatgcagcggatcacgtcgtcctccgcatggctgctcgcgttcctcaccgtggtcctcaagacggtgggcctctcggagacggtgttcgaggtgacacgcaaggagcagcagcagcagcagggctcgcccgacggcgacggcgccgacgccgacccggggcggttcaccttcgactcgtcgccggtgttcgtcccgccggcggcgctcgcgatgctgagcgtcgtcgccgtcgccgtcggagcgtggagggcggtcaccggtggcggcggcggcccgggcgtcggggagttcgtgtgctgcgcctggcttctgctctgcttctggccgttcgtgaggggcctcgtcggcggcaggggaagctacggcatcccctggagcgtcaggatcaaggctgccctgctcgtggccgcgttcgtgcacctgtccacacgcaagtaacttgcccggccccggcgtcgactcaccactgctactgctgcggaaggttttcatgtcagagacccgtaataatgcagacaacagcatgttccgcctaagatttgtacacaactctctgcttccactgcttgtatagaattcttgctcaagattacaagtcgaggccagtggtcggcgatagaaacagcgagtattattttatcctactcccaccagttcctgagcgtcgattctgggccgcgtctgaggctgtgagccaaggataaccaaatcgtctggagtaaaaaaaaaat

SEQ ID NO: 20418 - DNA, 1237 bp, Zea Mays
acgacccatattttaaatggagtactggatcgaagcattccggtccgacgtgattaaaactctcgcaccggagacccctttagagcttgacctctttaatcctctcaaaccactaggtttacgcgcattgtggctcctcacttccgcgccgccacccctacaggtaaggaagaggaggagggcaggatgtcgcaccgtaagttcgagcacccgaggcacggctccctcggcttccttcccaggaagcgctcctcccgtcaccgcggcaaggaactccataagaaggaaacttgtgaggctgttaccatcattgaaacccctcctcttgtcattgttgggctcgtggcatatgtgaagactcctcgtggcctccgcaaagttgcttgtatcggtgcatggcatccggctagggtctcctatacggttgcccgtgctggtcaaaatgggtaccaccaccgcactgagatgaacaagaaggtttacaagatcggcaaggctggacaagagacccacgatgcctccacagagtttgacaggactgagaaggacatcactcccatgggtggcttcccccattatggtatcgtgaagggtgactacctgatgatcaagggctgctgtgtgggtccaaagaagagggtggtgaccctccgccagtccctcctgaagcagacttcccggctggcgctggaggagatcaagctcaagttcatcgacacatcgtccaaatttgggcacggtcgtttccagactaccgatgagaagcagaggttctttggcaagctcaaggcgtaaggtgctgcggtgcagcgacaagtcccatttctcaaaatcatcaaactgtgatacttttgtttgtaaccttgctgtactaagttttgtagccggatggtttgggagcatggtccggtcttctatggattgttccatgcttctgaactgcaatgtctatgttttgtgctactttggttgtttaatgccctaatcattgcatatagattccaattgttttggtgtttgatgatcaacataactatttatactaattgtgtttgctagtgtttataaatatagtttagagggtgcaacgtggactgatgaagtcaacaacatattaaagtaatacattaggatatttattgaagacttatgaagatcatgtaagagtccacacaagaagaaacacgaaaaaaataaagtcataaggtcaaagagcagcaccaaaaaatcaaagaaa

SEQ ID NO: 20419 - DNA, 872 bp, Zea Mays
caaaacacttgcagtgattagggcattaaaacaaccaaaatagcacaaaacatagtcactgcagttctgaagcgtagaacaatccattgaagaccggaacatgctcccaaatcatcctgctacaaaacttggtacagcaaggtaacaaacaaaggtttcacagtttgatgattttgacaaatgggactttcgctgcaccgcagcaccttacgccttgagcttaccaaagaacctctgcttctcatcggtagtctggaagcgaccgtgcccaaatttggacgatgtgtcaatgaacttgagcttgatctcctccagcgccagccgggaagtctgcttcaggagggactggcggagggtcaccaccctcttctttggacccacacagcatcccttgatcatcaggtagtcacccttcacgataccatagtgggggaagccacccatgggagtgatgtccttctcgtacctgtcaaactctgtggaggcatcgtgggtctcttgtccagccttgccgatcttgtagaccttcttgttcatctcagtgcggtggtggtacccattctgaccagcacgggcaaccgtatacgagaccctagccggatgccatgcaccgatacaagcaaccttgcggagacccctgtgggttttgcggggaaggcgggtgacaccccaacgagtgaccacaccctcataacctttacctttggtcacaccaatgatgtcaatcatctcatccttctggaagacagcatcaacagggacctctttctcaaaaaatttatagccgtagtccaccttgtcagcaatggtaccaccattgacctgaatctccatcaggtgagccttcttctgcttcaaacccttcatcttcc

SEQ ID NO: 20420 - DNA, 1493 bp, Zea Mays
caaaacacttgcagtgattagggcattaaaacaaccaaaatagcacaaaacatagtcactgcagttctgaagcgtagaacaatccattgaagaccggaacatgctcccaaatcatcctgctacaaaacttggtacagcaaggtaacaaacaaaggtttcacagtttgatgattttgacaaatgggactttcgctgcaccgcagcaccttacgccttgagcttaccaaagaacctctgcttctcatcggtagtctggaagcgaccgtgcccaaatttggacgatgtgtcaatgaacttgagcttgatctcctccagcgccagccgggaagtctgcttcaggagggactggcggagggtcaccaccctcttctttggacccacacagcatcccttgatcatcaggtagtcacccttcacgataccatagtgggggaagccacccatgggagtgatgtccttctcgtacctgtcaaactctgtggaggcatcgtgggtctcttgtccagccttgccgatcttgtagaccttcttgttcatctcagtgcggtggtggtacccattctgaccagcacgggcaaccgtatacgagaccctagccggatgccatgcaccgatacaagcaaccttgcggagacccctgtgggttttgcggggaaggcgggtgacaccccaacgagtgaccacaccctcataacctttacctttggtcacaccaatgatgtcaatcatctcatccttctggaagacagcatcaacagggacctctttctcaaaaaatttatagccgtagtccaccttgtcagcaatggtaccaccattgacctgaatctccatcaggtgagccttcttcttgctcttgcaccagttcttgtagaaccttctcctcacttcttcgctaagatgttgggcccaaacagagttgagtgtgcggaggccacgaggagtcttcacatatgccacgagcccaacaatgacaagaggaggggtttcaatgatggtaacagcctcacaagtttccttcttatggagtttggatcctggcttctcaacctcacggacaatgtgagtcatgccagccttgtagccaaggaaggcagtgagatggcaaggcttcttggggtcatccctgggaaatgacttcactgcaaaaacaggaaaacgagtatcagattttggacattaagtaaacctgccaaaggaatatgcataccatacaaaacaggtaaaagcacttagcgcagcatggcaaaacaaaccatagtttaatattcatagcaacaaaaattcaattgtacaactcgttttcagattatacataatgttggattgaacttatatacaatagataatccttcactgacggaagacaaccctatgaaaattattacttaacaccactaccggagtacagtttgtttaaatagaaggaagataaataatacttcaagttctaaaggttgaagggtagaacatttcagataacatgaatcggg

SEQ ID NO: 20421 - DNA, 1392 bp, Zea Mays
cggagccggactcccacgacgcgctgctcgacccacccggcaaccaaaccctatccaccccgcgtcctctctcccctcatttaaaccgccaccacgacggcacgccgcctcgtcggaaaaaccatcatctaaagttcaacgcccgcaccgcaagcgcaacacgccaacacccgagacccgacgcggccttcgccttccctccgcgcgagggagattcgaggggagagaggttctcaccttcgcgcctgcggttgcttggcgcagagtcgtcgcagatggaccggtaccagagggtggagaagccgcgggaggagtcccctatcggcgccaacgagatccgcatcacggcgcagggccggccccgcaactacatcacctatgcgctcgccctgctccagatgacattgtcatcaaggccatgggaagggcgatcaacaagacagttgccatcgtggagcttcttaagagaaggattgctggtctccatcagaatacctctattgaatccattgatataacagacacttgggagccattggaagaaggccttgtcactcttgagaccattcgccatgtgtccttaatcactattaaattgtcaaagaaggagctggatacatcatccccaggttaccagccgcccataccagctgaccaggtcaggccagcagctgactttgatcaggatgcagaggccgtaccaagtggtcgtggaagaggacgtggtcgtcgcagcaggggcaggggaaggggaagggggttcagcagtggagtagactatgatgatgagattggagagccagaggaggctccgcgtggatatcgtggcagagggaggggccgtggagggcgtggatcttttgcagttggaaggggctatggtggtgataattatgcgatggaagaagctggtagatatgatgatgatggatataacgcaccacctatgcaacgatatgaaggtggcagaggaaggggcagagggcgtggacgcggtcgtgggcggggaaggcaaggccatggacctcctccgcagcagtagattggttggcacatcacctttgggatgtcataacctccatttctttccataagataaatgttaccgtccattatattttttatctggttattaggttcatgttgaaagttgacatagtgactctagtgtggaggatgcggctagttaagatttggtagctaggttgttcgtccatttgcctatttattatctcagatcagacttggtgccgttccagttgtgcattgtagcctctttttaccatgaaagttagttcagaagattcttttatgttgttgcaaatcacagactgaaaacgtttgttttcaacttagtaccatggttctgtaattgaacatggtacctaacaa

SEQ ID NO: 20422 - DNA, 574 bp, Zea Mays
cccttctctgcctccgctcgcgaggcggacgctgccgtaaccaccgcgcgatgacaccagactccagttggctcaagggccctccaaccaactcgtctgcgtggaagataaaagctccctagggtctcgcccacactgtcgtattcccaccgccgtcctgcaatcgccgtgagctgagagggagattcacgccgctgccgtgggattcacaccagcgcctccgcttgggtgccaatcgcccgctcgcaagcttcgccgagtcgtggggaaggtttccgaaggccaacgctaaggatttgtcgtcgggacccagggaattcatcaccggagttgcgcccgaccgcggagccgctcctcgccgtggttctccctgcactgcgaccctcgttgtcgggataaaaagccttgggaccatagctagtggaagcttcatgatgagccagtttcgaagtggtgcaatggtatctcagtacgaatttaatacactataaccccgagtacatttttgaaactgatcactactcttccatttgtgattaagtatagaatatttaaacacaaatgcatgcaggtt

SEQ ID NO: 20423 - DNA, 441 bp, Zea Mays
ctctgcctccgctcgcgaggcggacgctgccgtaaccaccgcgcgatgacaccagactccagttggctcaagggccctccaaccaactcgtctgcgtggaagataaaagctccctagggtctcgcccacactgtcgtattcccaccgccgtcctgcaatcgccgtgagctgagagggagattcacgccgctgccgtgggattcacaccagcgcctccgcttgggtgccaatcgcccgctcgcaagcttcgccgagtcgtggggaaggtttccgaaggccaacgctaaggatttgtcgtcgggacccagggaattcatcaccggagttgcgcccgaccgcggagccgctcctcgccgtggttctccctgcactgcgaccctcgttgtcgaagaacccgtgaccgaggatcctggtgagcagcagattgaagtagctgagcag

SEQ ID NO: 20424 - DNA, 445 bp, Zea Mays
ctctgcctccgctcgcgaggcggacgctgccgtaaccaccgcgcgatgacaccagactccagttggctcaagggccctccaaccaactcgtctgcgtggaagataaaagctccctagggtctcgcccacactgtcgtattcccaccgccgtcctgcaatcgccgtgagctgagagggagattcacgccgctgccgtgggattcacaccagcgcctccgcttgggtgccaatcgcccgctcgcaagcttcgccgagtcgtggggaaggtttccgaaggccaacgctaaggatttgtcgtcgggacccagggaattcatcaccggagttgcgcccgaccgcggagccgctcctcgccgtggttctccctgcactgcgaccctcgttgtcgaagaacccgtgaccgaggatcctggtgagcagcagattgaagtagctgagcaggagc

SEQ ID NO: 20425 - DNA, 3787 bp, Zea Mays
tgaaaaatccgctgtggtctgtgggcttgttacagctccgatccacgcaatttcaagaatcaagaccatcaaaatcgtgaagtttctctctcttcgtatactgtacacacgcgcgcgcgctctctctctctcctccccttctcctttctcccgcgccccagatccgagccccggcgcctgaggccatggcgagcgacagcgacgtcgacgaggacgagctcctccagattgcgctgcaggagcaggcggcgcgggacctcagccaccagcgcccgcccgccgccaacaagcccgtcgtcaacctcgtccgcccacccgcccccaacgcccgcggcggcaacggcagagccgggggcgccgcagcgaaggcgcgccagcccagccgcggcggagacgaggacgaagactcagatgttgagctgctctctatctcctctggcgaagaggacgacaatccccgcgctcgtggcccgccgccgccccgcgggggtgggggtgggcgcgctggggcgcggagggccgtggcacgggacgatggggacttcgacgatgaggagcccaggagctggaagcgcgtcgacgaggcagagcttgctcgtagggttcgagaaatgcgtgaagcaaaggtggctcctaacattcaagaacttgatcagaaagcagcagcagcagctgctgctgctcgaaaggccctcacgtctgtacagactttaccaaaaggagttgaggttttggatccattgggccttggtgtcatagataataaatccctgcgattgatcactgatgcttcagtaagttctccaatttcaagggagaagtctcaaggtttagatcccaatatgcgagacaaagttatctattcatctccaagttttgatcccaaagttttcctttcgtgggtccacaaagacacaagcgctgctgatttagaggctggtgctctcactttgaaaactgatctcaaagggagaacacagcagaaaaaacagttagtcaaggagaactttgattgttttgtctcgtgcaaaactacaatagatgacattgagtcaaaattgagacagatagaggaagatcctgaaggtgcaggcccaagctgaaaagatcagatctgttcagggaatgcttcaaagatttcggacactatttaacctcccaagtgcaatccgtgggaacattagaaaaggagaatatgatcttgctgtcagagagtaccaaaaagcaaagtcaattgttcttccttcccatgtggggatactaaaacgtgtactcgaagaggtcgaaaaggtgatgcaggaattcagaggcatgctttataagtccatggaggatcctcaccttgactttgctgagcttgagaacattgttcgtctactgttggagctggaacctgaaacagatccagtgtggcattatctaaatattcagaatagcaggattcatggattgtttgaaaagtgtactcaagatcatgaattgcgaatggaagttttgcaaaataaaattcgtgaaaaagtgctctctgattcaaagtggaggcagctgcaacaagattcaaataaatctctggaagttgattctgccatttgtgattctcctcgagctgatcagttgtcaacaaactttatggctgaggaagctgatagtttaagggccacctacactcgtaggctaacttctgtgcttatacagcatgttccagctttctggagattagctttatctgttttcagtggaaagtttgccaagacagcttctggtaatgtagtttctgattctgacatgaatgcaaagccgtctgcaaataagaacgatgacaaaggtggagatgtgaagtacacaaaccacactctcgatgaagttgctagtatggttcgggatactatatcggcttttgacactaaggttcagagtaccttccgtgatttcgaggaatgcaacattctttgtccatacatgagtgacactataaaagaaatagctaaggcctgtcagactcttgaagggaaggattcatctccaactgctgtaaaattgttgcgcacccttcattttcaaatgacgaagctttacgttctacggctttgttcatggatgcgggcaacaactaaggagatatcaaaagatgatacttgggttattttatccacccttgagagaaacaagtctccatatgcaatttcatgcatgcccctggaattccgtgacataataatttcagcaatggaccggattgatactatgattcttaatctgatgagcgagactgcgaagtcatatgacatttctcaaccacttcaggaaattaatgagtctgtcagacttgcatttttgaattcctttctggattttgctggttatctggagaggtttggaggtgaactaactgagaacaggccaaacaatgaaaacaattatgttcaaaatggatacataaatggtactagagaaacatctgctaacacagatggagatttgcacaaaaagctgctggttgttttgagtaacattggatattgtaaagctgaactttcagaagaactgtacaccacatatagacacatttggtctccagtcaggaataatgatgagcgaagttctgacatgcgagatctgatgacttctttctctgcgcttgaagagaaagtcctggaccaatatacttttgcaaagtcaaacttgatcagaagttctgcacaaagttatcttttggatcctgggatttattggggagcagcaccaatggtaaagagcattcgagatgcaactcttgacttgctgcacatccttgtagcagtacatgcagagatatactctggtgctcggcctttgttggagaagacaatgaaaattttggttgagggtttggtcgacatctttcttagtgtttttcatgagaataagaccaaaggtattaggttgttggatgcaaatggtttttgtcaactcatgcttgagcttgagtattttgagactgtgctacacacatacttctcacccgaggcacagcaggctatgaaatccttacaagagaatttgttggaaaaggcctgtgaaagtattgcagaagccatggaaaatcctggacaccaacggcgaccaacccgtggcagtgaagatgcatcgtcagatgatagacagccatcagtatcacctgatgatttgcttttgcttgctcaacagtacagtagtgatctgctgcaaggggagctggagaggactcgattgaacatagcctgcttcatggagtcagcccttcaatcaacgtctgcgccagcaggctcaaagcctgctgcatattcttcttaccatgcgcaagtaccacagcacgcccccattcaaacgtcctcgcctagttttagaaggcagcagactggtacaagctctcctgtagtctccagacggcgacggtgagcgtagtgcatcttccctggaatttcctaccacccctcatgtttttttttatttcttgtaattatcatcctgttgtcatgtgttatgaattttgatccattcttttggtgtcgtaagataaaaatggtggtcaagtgcttctgcacgggaacataaaattgtataatatgcccacgaatcaaatactgccttgctgactgaagatagcaccacagctgtatctgctgcgccagtctccttcggtcctcactgcttgtttgtatattcatttggacagtttatgtatcccgacatttgttaatgttgtatcaggtggttcaactagcatcgggataattttcttatatcgaaagcggctgaagtgattgag

SEQ ID NO: 20426 - DNA, 2680 bp, Zea Mays
gatagaggaagatcctgaaggtgcaggtactgctcacttgtattcagtgacacaaaaaattagtggtgtggcgaatcgtgcatttgagcctctatttgagaggcaggcccaagctgaaaagatcagatctgttcagggaatgcttcaaagatttcggacactatttaacctcccaagtgcaatccgtgggaacattagaaaaggagaatatgatcttgctgtcagagagtaccaaaaagcaaagtcaattgttcttccttcccatgtggggatactaaaacgtgtactcgaagaggtcgaaaaggtgatgcaggaattcagaggcatgctttataagtccatggaggatcctcaccttgactttgctgagcttgagaacattgttcgtctactgttggagctggaacctgaaacagatccagtgtggcattatctaaatattcagaatagcaggattcatggattgtttgaaaagtgtactcaagatcatgaattgcgaatggaagttttgcaaaataaaattcgtgaaaaagtgctctctgattcaaagtggaggcagctgcaacaagattcaaataaatctctggaagttgattctgccatttgtgattctcctcgagctgatcagttgtcaacaaactttatggctgaggaagctgatagtttaagggccacctacactcgtaggctaacttctgtgcttatacagcatgttccagctttctggagattagctttatctgttttcagtggaaagtttgccaagacagcttctggtaatgtagtttctgattctgacatgaatgcaaagccgtctgcaaataagaacgatgacaaaggtggagatgtgaagtacacaaaccacactctcgatgaagttgctagtatggttcgggatactatatcggcttttgacactaaggttcagagtaccttccgtgatttcgaggaatgcaacattctttgtccatacatgagtgacactataaaagaaatagctaaggcctgtcagactcttgaagggaaggattcatctccaactgctgtaaaattgttgcgcacccttcattttcaaatgacgaagctttacgttctacggctttgttcatggatgcgggcaacaactaaggagatatcaaaagatgatacttgggttattttatccacccttgagagaaacaagtctccatatgcaatttcatgcatgcccctggaattccgtgacataataatttcagcaatggaccggattgatactatgattcttaatctgatgagcgagactgcgaagtcatatgacatttctcaaccacttcaggaaattaatgagtctgtcagacttgcatttttgaattcctttctggattttgctggttatctggagaggtttggaggtgaactaactgagaacaggccaaacaatgaaaacaattatgttcaaaatggatacataaatggtactagagaaacatctgctaacacagatggagatttgcacaaaaagctgctggttgttttgagtaacattggatattgtaaagctgaactttcagaagaactgtacaccacatatagacacatttggtctccagtcaggaataatgatgagcgaagttctgacatgcgagatctgatgacttctttctctgcgcttgaagagaaagtcctggaccaatatacttttgcaaagtcaaacttgatcagaagttctgcacaaagttatcttttggatcctgggatttattggggagcagcaccaatggtaaagagcattcgagatgcaactcttgacttgctgcacatccttgtagcagtacatgcagagatatactctggtgctcggcctttgttggagaagacaatgaaaattttggttgagggtttggtcgacatctttcttagtgtttttcatgagaataagaccaaaggtattaggttgttggatgcaaatggtttttgtcaactcatgcttgagcttgagtattttgagactgtgctacacacatacttctcacccgaggcacagcaggctatgaaatccttacaagagaatttgttggaaaaggcctgtgaaagtattgcagaagccatggaaaatcctggacaccaacggcgaccaacccgtggcagtgaagatgcatcgtcagatgatagacagccatcagtatcacctgatgatttgcttttgcttgctcaacagtacagtagtgatctgctgcaaggggagctggagaggactcgattgaacatagcctgcttcatggagtcagcccttcaatcaacgtctgcgccagcaggctcaaagcctgctgcatattcttcttaccatgcgcaagtaccacagcacgcccccattcaaacgtcctcgcctagttttagaaggcagcagactggtacaagctctcctgtagtctccagacggcgacgataaaaatggtggtcaagtgcttctgcacgggaacataaaattgtataatatgcccacgaatcaaatactgccttgctgactgaagatagcaccacagctgtatctgctgcgccagtctccttcggtcctcactgcttgtttgtatattcatttggacagtttatgtatcccgacatttgttaatgttgtatcaggtggttcaactagcatcgggataattttcttatatcgaaagcggctgaagtgattgag

SEQ ID NO: 20427 - DNA, 1116 bp, Zea Mays
gagtttttgcagccaagaagagggccggccgaccgccccccaccccacgtattaacaaaacgcctcccgaagcagacagagcctcactccgcgcgcccgcgcagcgaagctggagggagcatggagctgaggccgccgcgcctgcgaccgtgagcacgctctgtagccagccgggtccggctgggcggccatggcagccaccgttctcttcactccggcgcagtgccaccgcgccaccgcgacgacgagcgggcggggagccccctcgcattgcgccctggcccctgggcaccggcgcccggggcggggatcggtgagggcggtgcctcccgagcagagcagcttgcctcaggcggcggcggctgctgtctacgggactgctggcgacgtcaaggccgcgctgtaccgagcgctggacggcgccaacagggggatattcgggatgacgtccgccaagcgctcggagatccatggcctggtggagctgctcgagtccaggaaccccacgccggagcccaccgccaagctgcaggacaaggaaaaggcggtgaatgtggtagagttcagcgcgagagcactgaagatactgacggggaagctcaccatcgaggcttcgtacagagttaccagccaaacaagagtggatatcaagctcgagagctcaaccatcacccctgagcagctgatgaacatatttcagaagaactacgacatgctcctggacatattcaatccagagggctggctggagataacatatgttgatgaatcgctacggattggacgagacgacaaagaaaacatattcgtgctggagagagcagacctgccagacgtctgatgacgcgcagttcatgcgcacaggcgatccgtaattttgtgacgaggagcgagtgtatgtaacacgcagaaaacatagcctgcaaatatataaatatggtatatccgacagctaggactcttgcatggttattggcagttcgatgcagacaatctaccactcgaagtaaaaacaaacaaaaaaaaacttttcttctcgaataaagtaggtatgtatacgcacaggcacaggccgttcttcttcatttttgagtttttatgagcatcaaagagcag

SEQ ID NO: 20428 - DNA, 993 bp, Zea Mays
ccgaccgccccccaccccacgtattaacaaaacgcctcccgaagcagacagagcctcactccgcgcgcccgcgcagcgaagctggagggagcatggagctgaggccgccgcgcctgcgaccgtgagcacgctctgtagccagccgggtccggctgggcggccatggcagccaccgttctcttcactccggcgcagtgccaccgcgccaccgcgacgacgagcgggcggggagccccctcgcattgcgccctggcccctgggcaccggcgcccggggcggggatcggtgagggcggtgcctcccgagcagagcagcttgcctcaggcggcggcggctgctgtctacgggactgctggcgacgtcaaggccgcgctgtaccgagcgctggacggcgccaacagggggatattcgggatgacgtccgccaagcgctcggagatccatggcctggtggagctgctcgagtccaggaaccccacgccggagcccaccgccaagctgcaggacaaggtggatggatgctggaagctcatctacagcacgatctccatactggggaagaagaggaccaagttagggctgcgagatttcatcagcctaggggacttcctccagataattgacgtcaaacagatatgttgatgaatcgctacggattggacgagacgacaaagaaaacatattcgtgctggagagagcagacctgccagacgtctgatgacgcgcagttcatgcgcacaggcgatccgtaattttgtgacgaggagcgagtgtatgtaacacgcagaaaacatagcctgcaaatatataaatatggtatatccgacagctaggactcttgcatggttattggcagttcgatgcagacaatctaccactcgaagtaaaaacaaacaaaaaaaaacttttcttctcgaataaagtaggtatgtatacgcacaggcacaggccgttcttcttcatttttgagtttttatgagcatcaaagagcag

SEQ ID NO: 20429 - DNA, 1242 bp, Zea Mays
ccgccccccaccccacgtattaacaaaacgcctcccgaagcagacagagcctcactccgcgcgcccgcgcagcgaagctggagggagcatggagctgaggccgccgcgcctgcgaccgtgagcacgctctgtagccagccgggtccggctgggcggccatggcagccaccgttctcttcactccggcgcagtgccaccgcgccaccgcgacgacgagcgggcggggagccccctcgcattgcgccctggcccctgggcaccggcgcccggggcggggatcggtgagggcggtgcctcccgagcagagcagcttgcctcaggcggcggcggctgctgtctacgggactgctggcgacgtcaaggccgcgctgtaccgagcgctggacggcgccaacagggggatattcgggatgacgtccgccaagcgctcggagatccatggcctggtggagctgctcgagtccaggaaccccacgccggagcccaccgccaagctgcaggacaagtgggggcgcatgcatgtttgggtggtggatcgaaggtggatggatgctggaagctcatctacagcacgatctccatactggggaagaagaggaccaagttagggctgcgagatttcatcagcctaggggacttcctccagataattgacgtcaaacaggaaaaggcggtgaatgtggtagagttcagcgcgagagcactgaagatactgacggggaagctcaccatcgaggcttcgtacagagttaccagccaaacaagagtggatatcaagctcgagagctcaaccatcacccctgagcagctgatgaacatatttcagaagaactacgacatgctcctggacatattcaatccagagggctggctggagataacatatgttgatgaatcgctacggattggacgagacgacaaagaaaacatattcgtgctggagagagcagacctgccagacgtctgatgacgcgcagttcatgcgcacaggcgatccgtaattttgtgacgaggagcgagtgtatgtaacacgcagaaaacatagcctgcaaatatataaatatggtatatccgacagctaggactcttgcatggttattggcagttcgatgcagacaatctaccactcgaagtaaaaacaaacaaaaaaaaacttttcttctcgaataaagtaggtatgtatacgcacaggcacaggccgttcttcttcatttttgagtttttatgagcatcaaagagcag

SEQ ID NO: 20430 - DNA, 1108 bp, Zea Mays
ccgccccccaccccacgtattaacaaaacgcctcccgaagcagacagagcctcactccgcgcgcccgcgcagcgaagctggagggagcatggagctgaggccgccgcgcctgcgaccgtgagcacgctctgtagccagccgggtccggctgggcggccatggcagccaccgttctcttcactccggcgcagtgccaccgcgccaccgcgacgacgagcgggcggggagccccctcgcattgcgccctggcccctgggcaccggcgcccggggcggggatcggtgagggcggtgcctcccgagcagagcagcttgcctcaggcggcggcggctgctgtctacgggactgctggcgacgtcaaggccgcgctgtaccgagcgctggacggcgccaacagggggatattcgggatgacgtccgccaagcgctcggagatccatggcctggtggagctgctcgagtccaggaaccccacgccggagcccaccgccaagctgcaggacaaggtggatggatgctggaagctcatctacagcacgatctccatactggggaagaagaggaccaagttagggctgcgagatttcatcagcctaggggacttcctccagataattgacgtcaaacagagagtggatatcaagctcgagagctcaaccatcacccctgagcagctgatgaacatatttcagaagaactacgacatgctcctggacatattcaatccagagggctggctggagataacatatgttgatgaatcgctacggattggacgagacgacaaagaaaacatattcgtgctggagagagcagacctgccagacgtctgatgacgcgcagttcatgcgcacaggcgatccgtaattttgtgacgaggagcgagtgtatgtaacacgcagaaaacatagcctgcaaatatataaatatggtatatccgacagctaggactcttgcatggttattggcagttcgatgcagacaatctaccactcgaagtaaaaacaaacaaaaaaaaacttttcttctcgaataaagtaggtatgtatacgcacaggcacaggccgttcttcttcatttttgagtttttatgagcatcaaagagcag

SEQ ID NO: 20431 - DNA, 1143 bp, Zea Mays
ccgccccccaccccacgtattaacaaaacgcctcccgaagcagacagagcctcactccgcgcgcccgcgcagcgaagctggagggagcatggagctgaggccgccgcgcctgcgaccgtgagcacgctctgtagccagccgggtccggctgggcggccatggcagccaccgttctcttcactccggcgcagtgccaccgcgccaccgcgacgacgagcgggcggggagccccctcgcattgcgccctggcccctgggcaccggcgcccggggcggggatcggtgagggcggtgcctcccgagcagagcagcttgcctcaggcggcggcggctgctgtctacgggactgctggcgacgtcaaggccgcgctgtaccgagcgctggacggcgccaacagggggatattcgggatgacgtccgccaagcgctcggagatccatggcctggtggagctgctcgagtccaggaaccccacgccggagcccaccgccaagctgcaggacaagtgggggcgcatgcatgtttgggtggtggatcgaaggtggatggatgctggaagctcatctacagcacgatctccatactggggaagaagaggaccaagttagggctgcgagatttcatcagcctaggggacttcctccagataattgacgtcaaacagagagtggatatcaagctcgagagctcaaccatcacccctgagcagctgatgaacatatttcagaagaactacgacatgctcctggacatattcaatccagagggctggctggagataacatatgttgatgaatcgctacggattggacgagacgacaaagaaaacatattcgtgctggagagagcagacctgccagacgtctgatgacgcgcagttcatgcgcacaggcgatccgtaattttgtgacgaggagcgagtgtatgtaacacgcagaaaacatagcctgcaaatatataaatatggtatatccgacagctaggactcttgcatggttattggcagttcgatgcagacaatctaccactcgaagtaaaaacaaacaaaaaaaaacttttcttctcgaataaagtaggtatgtatacgcacaggcacaggccgttcttcttcatttttgagtttttatgagcatcaaagagcag

SEQ ID NO: 20432 - DNA, 1222 bp, Zea Mays
ccgccccccaccccacgtattaacaaaacgcctcccgaagcagacagagcctcactccgcgcgcccgcgcagcgaagctggagggagcatggagctgaggccgccgcgcctgcgaccgtgagcacgctctgtagccagccgggtccggctgggcggccatggcagccaccgttctcttcactccggcgcagtgccaccgcgccaccgcgacgacgagcgggcggggagccccctcgcattgcgccctggcccctgggcaccggcgcccggggcggggatcggtgagggcggtgcctcccgagcagagcagcttgcctcaggcggcggcggctgctgtctacgggactgctggcgacgtcaaggccgcgctgtaccgagcgctggacggcgccaacagggggatattcgggatgacgtccgccaagcgctcggagatccatggcctggtggagctgctcgagtccaggaaccccacgccggagcccaccgccaagctgcaggacaaggtggatggatgctggaagctcatctacagcacgatctccatactggggaagaagaggaccaagttagggctgcgagatttcatcagcctaggggacttcctccagataattgacgtcaaacaggaaaaggcggtgaatgtggtagagttcagcgcgagagcactgaagatactgacggggaagctcaccatcgaggcttcgtacagagttaccagccaaacactttcttgttttcagagagtggatatcaagctcgagagctcaaccatcacccctgagcagctgatgaacatatttcagaagaactacgacatgctcctggacatattcaatccagagggctggctggagataacatatgttgatgaatcgctacggattggacgagacgacaaagaaaacatattcgtgctggagagagcagacctgccagacgtctgatgacgcgcagttcatgcgcacaggcgatccgtaattttgtgacgaggagcgagtgtatgtaacacgcagaaaacatagcctgcaaatatataaatatggtatatccgacagctaggactcttgcatggttattggcagttcgatgcagacaatctaccactcgaagtaaaaacaaacaaaaaaaaacttttcttctcgaataaagtaggtatgtatacgcacaggcacaggccgttcttcttcatttttgagtttttatgagcatcaaagagcag

SEQ ID NO: 20433 - DNA, 1201 bp, Zea Mays
ccgccccccaccccacgtattaacaaaacgcctcccgaagcagacagagcctcactccgcgcgcccgcgcagcgaagctggagggagcatggagctgaggccgccgcgcctgcgaccgtgagcacgctctgtagccagccgggtccggctgggcggccatggcagccaccgttctcttcactccggcgcagtgccaccgcgccaccgcgacgacgagcgggcggggagccccctcgcattgcgccctggcccctgggcaccggcgcccggggcggggatcggtgagggcggtgcctcccgagcagagcagcttgcctcaggcggcggcggctgctgtctacgggactgctggcgacgtcaaggccgcgctgtaccgagcgctggacggcgccaacagggggatattcgggatgacgtccgccaagcgctcggagatccatggcctggtggagctgctcgagtccaggaaccccacgccggagcccaccgccaagctgcaggacaaggtggatggatgctggaagctcatctacagcacgatctccatactggggaagaagaggaccaagttagggctgcgagatttcatcagcctaggggacttcctccagataattgacgtcaaacaggcggtgaatgtggtagagttcagcgcgagagcactgaagatactgacggggaagctcaccatcgaggcttcgtacagagttaccagccaaacaagagtggatatcaagctcgagagctcaaccatcacccctgagcagctgatgaacatatttcagaagaactacgacatgctcctggacatattcaatccagagggctggctggagataacatatgttgatgaatcgctacggattggacgagacgacaaagaaaacatattcgtgctggagagagcagacctgccagacgtctgatgacgcgcagttcatgcgcacaggcgatccgtaattttgtgacgaggagcgagtgtatgtaacacgcagaaaacatagcctgcaaatatataaatatggtatatccgacagctaggactcttgcatggttattggcagttcgatgcagacaatctaccactcgaagtaaaaacaaacaaaaaaaaacttttcttctcgaataaagtaggtatgtatacgcacaggcacaggccgttcttcttcatttttgagtttttatgagcatcaaagagcag

SEQ ID NO: 20434 - DNA, 1767 bp, Zea Mays
ccgccccccaccccacgtattaacaaaacgcctcccgaagcagacagagcctcactccgcgcgcccgcgcagcgaagctggagggagcatggagctgaggccgccgcgcctgcgaccgtgagcacgctctgtagccagccgggtccggctgggcggccatggcagccaccgttctcttcactccggcgcagtgccaccgcgccaccgcgacgacgagcgggcggggagccccctcgcattgcgccctggcccctgggcaccggcgcccggggcggggatcggtgagggcggtgcctcccgagcagagcagcttgcctcaggcggcggcggctgctgtctacgggactgctggcgacgtcaaggccgcgctgtaccgagcgctggacggcgccaacagggggatattcgggatgacgtccgccaagcgctcggagatccatggcctggtggagctgctcgagtccaggaaccccacgccggagcccaccgccaagctgcaggacaaggtggatggatgctggaagctcatctacagcacgatctccatactggggaagaagaggaccaagttagggctgcgagatttcatcagcctaggggacttcctccagataattgacgtcaaacaggtcagtaaaggccacacctgctgtaaagttttccccctccgagtccttgtttggatgctctctattgacctcaatccacatgtattaaggtggattatgatttaaattaatttaaattacactctagatcaacttaatagatcaacttaatacatatggattgagttaaatacgacaaataaggcccctcactgttgactggctagctgcgggttaccgcttcatctgctcgaacttttgaacctgtaagcactacgcatatctcgtgttcttgacacaaaaactagtcacgttgggtcaatggactatacatgcatatttggatatatattctagctgcatatacaaagtacgtgaaataaatggagatttagcgtcgtcacttgtctacacccgaaggaaaaggcggtgaatgtggtagagttcagcgcgagagcactgaagatactgacggggaagctcaccatcgaggcttcgtacagagttaccagccaaacagtaaggcctcctttttttttcttctggtgctcgctagctcctagctcctggtctcggttattaggcgctgtttcggcgagtcttacactgctgttcctgaccgcctaatcgaaaagctagcttggagaattcctcacgacctgtagctttcttgttttcagagagtggatatcaagctcgagagctcaaccatcacccctgagcagctgatgaacatatttcagaagaactacgacatgctcctggacatattcaatccagagggctggctggagataacatatgttgatgaatcgctacggattggacgagacgacaaagaaaacatattcgtgctggagagagcagacctgccagacgtctgatgacgcgcagttcatgcgcacaggcgatccgtaattttgtgacgaggagcgagtgtatgtaacacgcagaaaacatagcctgcaaatatataaatatggtatatccgacagctaggactcttgcatggttattggcagttcgatgcagacaatctaccactcgaagtaaaaacaaacaaaaaaaaacttttcttctcgaataaagtaggtatgtatacgcacaggcacaggccgttcttcttcatttttgagtttttatgagcatcaaagagcag

SEQ ID NO: 20435 - DNA, 926 bp, Zea Mays
gataacatcatggaaagatctagagattatgaaggtaagggaggtgaaaggcaaaaacacaccaaaagatagagttaggacaagacttgcaacacgacagaggaaaaggggaataaacaagagcgggataggcaagacatcactcttgaaatgaaatgggagaggaggctttaaaatgcaggtgcaagataagcatcatggtaaagatcaagggatgacaagggttaaggtgataacagacaaacacaaccaaggatgtattttagacaaaacttgtgaggcatcaaagaaggggaagctatcaatggtgaagtaggtgaggcattattcctcaaaccgggatggagaagaggaggctttaaagggtaggttcaaattaagcaggaagacaagggcatatatatcacgagggttttgaaagtaataacggacaatgatgtaggagaggaggtaaacaggcataagacaaagaatataagtgccacagagaatggagttaagacaggacctgcaagtgttagaggaaaggatgcattcaagggccagataggtaaattgccactcccaaattgaggtggaaaagaggggattttttaaagagtaggaataaagatgagtatcaaagcaagatcaatggatgacaaggtgagggtgatagccaataacaacacagtaagggatggaattaacacaaaacttgtaaggcgacaagaagtgaaaagaaatcaagggatagataggtaactcgcaactctcaagctgggtggaaagaagggagaggcttttaaagggtaagttcaaattatgcatttaggtagaagacatcaatatcgcaagggtcaacggcgataacagacaaggatatgagagaaaagatgaaggcattgaaggtcagtggaatgagtacaacaaataatggagttgag

SEQ ID NO: 20436 - DNA, 2713 bp, Zea Mays
ttggaaaccaagaccaccagagacgacggacggacggacggagaccggagcaaacgaggcggccggggtccggagcagaggacgcgtccaatactacaacaggagcgcccgatccttcccatcccccaagctcgcccgcctccgattcccgctgtcctgtcccctccaaacaccctcccgccgaaggcctccgatccaggccgcaaccgggatggcgcgtgccggcgggaggaggtcggcggcggcgccggcggcttcgggagagccctccgtcgagtgctctcgcggcggataacagtctgatacccccccacccactgccttcactgactgctagagcccctccttgtcagtacagtgtttggtgctgaatcaaatccactgaagatgccaagttctgaaccagacagtgatgatgttttctttgacgcatttgaagatgttcgatctgcaggggaaccttcatgttcagaggattgcagcaccagcgatgaagtttcagtggtgaaatttgagtatgagatttgggcaaacgagccgatgagcgttcaagaaaggcggcaaaggttcctcaagggaatgggattcgatgatttcgtgtctagtagaacagattcttttcaatgccatggtgaaatcacagccgttgagtcttccactggcatggaggtgagaacggccagttgccattcttccgtggattcatctgtttgtgacaatgaatcggagtttgacggtgcctgttgcataagggatatggatagtagaaagagagatattgtcaagggtggacatagcagtataactgacatgctcaaggaggttggatcagataaggtgatgtctcttctggagttccagagtttgcctggcctctctcgggctgttcaaaatttagttcggagggggtgtggtaaaagtcctgcaaaagaaacgaaaagtgctaagaaaatggatgccaaaagcttgtggaagaaattcatgataaagagaagctttggtagcgtgtgcaagtatgatgtccatgtgaaaaactgcacaaatagtataccaaccagaacaagagttcaacatcggaagaaaaatttccttgaattctctgctgtctacatggatcaagaaatcagagctcacaagggttcaattcgggtcatgaaattcagcccatctggctggtatttagcaagtggtggtgaggattgtgttgtacggatatggcaaatcatacaagtagaagcatctcctaagttgtataggggagaggacccctatgaaaaagtggagaaagttcaggtctttaagacaagtatagaaaaggggcagaaccaggcacttgcagttatacccaataaggtttttcgtatatcagagactccattacatgaattccgtggccatacaagtgatatccttgatctggcatggtccaaatcagattatctcttaacttcatccaaagataagacagtgcgcttatggaaacccggctgtgatggttgtcttgcagttttcaaacacaaagactatgcggttcagtagatggtaaagtgcgcatttgggacgtgttggacaagcgagtaactgactgggccgatacgcgaaatatcataactgatttgagttaccaaccggatggaaagggctttattgttggcacgattgcaggcacatgtcgtttctatgatcaatcaggtgaaagcatccagctagagaaagaattgtttgtgcaagggaagaaaaagtcagctgcctgtcggatcaacagcctaaagctatgtgcaattggttccaacagggttataatcacatcaggagattccaaaatccgagttgccaatggtgataccatccaaaagtttgaagggccttggaagtcgaaggctctgtcattaccgtctctaacatcagacgagagatacctcatatcggccggcaaagattccaacgtctacatctgggacttggccaactcgagagacgacgcaaagccagtccactcgtgcgagctgttcttctccaaggacgtgacgaccgcagtgccatggccgggagtgcggcaacaagacgggcacgcgagcgcgaaacctgcctgtgtggccgagaaatccgccagcgcgcccatcctgcgccagtcggcccccgggccgtggccgttcgtggacggcggcggcagcagcagcaaggggtcggcgacgtggcccgaggagaagctcctttctgcagcgaagcctgtggaaagcagcccgcggctggacgactgcctctccatgctatccgccgcgtggagcacggtcatcgtgaccgccggccgcgatggcgtcatccggtcttttcccaactacggcttgcccgtcaggctgtgagctccgtcaccggtctgggctgctggtcagtggaggcgcagcagccgtggttggcgactgatgatagataacctgctaacgtcttgaagtttttttttctctctctcgtttttctgggcggagttactagaaattcttttttatgtaagcatttgttagatcatgaaccttgtcatgaagagatgatctgtagtagtcagttcaagtccaaacacttgtgctctgtgtgtgtgtgttttttttgctggatggttgtgacaaggtaaaaaaacgcaagcattcagttagatgtgaccagccttttttttgccctctaacatcaggatgtttatattgaaaatatatttaaa

SEQ ID NO: 20437 - DNA, 2743 bp, Zea Mays
ggaaaccaagaccaccagagacgacggacggacggacggagaccggagcaaacgaggcggccggggtccggagcagaggacgcgtccaatactacaacaggagcgcccgatccttcccatcccccaagctcgcccgcctccgattcccgctgtcctgtcccctccaaacaccctcccgccgaaggcctccgatccaggccgcaaccgggatggcgcgtgccggcgggaggaggtcggcggcggcgccggcggcttcgggagagccctccgtcgagtgctctcgcggcggataacagtctgatacccccccacccactgccttcactgactgctagagcccctccttgtcagtacagtgtttggtgctgaatcaaatccactgaagatgccaagttctgaaccagacagtgatgatgttttctttgacgcatttgaagatgttcgatctgcaggggaaccttcatgttcagaggattgcagcaccagcgatgaagtttcagtggtgaaatttgagtatgagatttgggcaaacgagccgatgagcgttcaagaaaggcggcaaaggttcctcaagggaatgggattcgatgatttcgtgtctagtagaacagattcttttcaatgccatggtgaaatcacagccgttgagtcttccactggcatggaggtgagaacggccagttgccattcttccgtggattcatctgtttgtgacaatgaatcggagtttgacggtgcctgttgcataagggatatggatagtagaaagagagatattgtcaagggtggacatagcagtataactgacatgctcaaggaggttggatcagataaggtgatgtctcttctggagttccagagtttgcctggcctctctcgggctgttcaaaatttagttcggagggggtgtggtaaaagtcctgcaaaagaaacgaaaagtgctaagaaaatggatgccaaaagcttgtggaagaaattcatgataaagagaagctttggtagcgtgtgcaagtatgatgtccatgtgaaaaactgcacaaatagtataccaaccagaacaagagttcaacatcggaagaaaaatttccttgaattctctgctgtctacatggatcaagaaatcagagctcacaagggttcaattcgggtcatgaaattcagcccatctggctggtatttagcaagtggtggtgaggattgtgttgtacggatatggcaaatcatacaagtagaagcatctcctaagttgtataggggagaggacccctatgaaaaagtggagaaagttcaggtctttaagacaagtatagaaaaggggcagaaccaggcacttgcagttatacccaataaggtttttcgtatatcagagactccattacatgaattccgtggccatacaagtgatatccttgatctggcatggtccaaatcagattatctcttaacttcatccaaagataagacagtgcgcttatggaaacccggctgtgatggttgtcttgcagttttcaaacacaaagactatgttcaaccctattgatgagaaatacttcatcagcggttcagtagatggtaaagtgcgcatttgggacgtgttggacaagcgagtaactgactgggccgatacgcgaaatatcataactgatttgagttaccaaccggatggaaagggctttattgttggcacgattgcaggcacatgtcgtttctatgatcaatcaggtgaaagcatccagctagagaaagaattgtttgtgcaagggaagaaaaagtcagctgcctgtcggatcaacagcctaaagctatgtgcaattggttccaacagggttataatcacatcaggagattccaaaatccgagttgccaatggtgataccatccaaaagtttgaagggccttggaagtcgaaggctctgtcattaccgtctctaacatcagacgagagatacctcatatcggccggcaaagattccaacgtctacatctgggacttggccaactcgagagacgacgcaaagccagtccactcgtgcgagctgttcttctccaaggacgtgacgaccgcagtgccatggccgggagtgcggcaacaagacgggcacgcgagcgcgaaacctgcctgtgtggccgagaaatccgccagcgcgcccatcctgcgccagtcggcccccgggccgtggccgttcgtggacggcggcggcagcagcagcaaggggtcggcgacgtggcccgaggagaagctcctttctgcagcgaagcctgtggaaagcagcccgcggctggacgactgcctctccatgctatccgccgcgtggagcacggtcatcgtgaccgccggccgcgatggcgtcatccggtcttttcccaactacggcttgcccgtcaggctgtgagctccgtcaccggtctgggctgctggtcagtggaggcgcagcagccgtggttggcgactgatgatagataacctgctaacgtcttgaagtttttttttctctctctcgtttttctgggcggagttactagaaattcttttttatgtaagcatttgttagatcatgaaccttgtcatgaagagatgatctgtagtagtcagttcaagtccaaacacttgtgctctgtgtgtgtgtgttttttttgctggatggttgtgacaaggtaaaaaaacgcaagcattcagttagatgtgaccagccttttttttgccctctaacatcaggatgtttatattgaaaatatatttaaa

SEQ ID NO: 20438 - DNA, 2501 bp, Zea Mays
aaacaatccaacgctaccagtagtcaattatttcggttcacggaaggataacagtctgatacccccccacccactgccttcactgactgctagagcccctccttgtcagtacagtgtttggtgctgaatcaaatccactgaagatgccaagttctgaaccagacagtgatgatgttttctttgacgcatttgaagatgttcgatctgcaggggaaccttcatgttcagaggattgcagcaccagcgatgaagtttcagtggtgaaatttgagtatgagatttgggcaaacgagccgatgagcgttcaagaaaggcggcaaaggttcctcaagggaatgggattcgatgatttcgtgtctagtagaacagattcttttcaatgccatggtgaaatcacagccgttgagtcttccactggcatggaggtgagaacggccagttgccattcttccgtggattcatctgtttgtgacaatgaatcggagtttgacggtgcctgttgcataagggatatggatagtagaaagagagatattgtcaagggtggacatagcagtataactgacatgctcaaggaggttggatcagataaggtgatgtctcttctggagttccagagtttgcctggcctctctcgggctgttcaaaatttagttcggagggggtgtggtaaaagtcctgcaaaagaaacgaaaagtgctaagaaaatggatgccaaaagcttgtggaagaaattcatgataaagagaagctttggtagcgtgtgcaagtatgatgtccatgtgaaaaactgcacaaatagtataccaaccagaacaagagttcaacatcggaagaaaaatttccttgaattctctgctgtctacatggatcaagaaatcagagctcacaagggttcaattcgggtcatgaaattcagcccatctggctggtatttagcaagtggtggtgaggattgtgttgtacggatatggcaaatcatacaagtagaagcatctcctaagttgtataggggagaggacccctatgaaaaagtggagaaagttcaggtctttaagacaagtatagaaaaggggcagaaccaggcacttgcagttatacccaataaggtttttcgtatatcagagactccattacatgaattccgtggccatacaagtgatatccttgatctggcatggtccaaatcagattatctcttaacttcatccaaagataagacagtgcgcttatggaaacccggctgtgatggttgtcttgcagttttcaaacacaaagactatgttcaaccctattgatgagaaatacttcatcagcggttcagtagatggtaaagtgcgcatttgggacgtgttggacaagcgagtaactgactgggccgatacgcgaaatatcataactgatttgagttaccaaccggatggaaagggctttattgttggcacgattgcaggcacatgtcgtttctatgatcaatcaggtgaaagcatccagctagagaaagaattgtttgtgcaagggaagaaaaagtcagctgcctgtcggatcaacagcctaaagctatgtgcaattggttccaacagggttataatcacatcaggagattccaaaatccgagttgccaatggtgataccatccaaaagtttgaagggccttggaagtcgaaggctctgtcattaccgtctctaacatcagacgagagatacctcatatcggccggcaaagattccaacgtctacatctgggacttggccaactcgagagacgacgcaaagccagtccactcgtgcgagctgttcttctccaaggacgtgacgaccgcagtgccatggccgggagtgcggcaacaagacgggcacgcgagcgcgaaacctgcctgtgtggccgagaaatccgccagcgcgcccatcctgcgccagtcggcccccgggccgtggccgttcgtggacggcggcggcagcagcagcaaggggtcggcgacgtggcccgaggagaagctcctttctgcagcgaagcctgtggaaagcagcccgcggctggacgactgcctctccatgctatccgccgcgtggagcacggtcatcgtgaccgccggccgcgatggcgtcatccggtcttttcccaactacggcttgcccgtcaggctgtgagctccgtcaccggtctgggctgctggtcagtggaggcgcagcagccgtggttggcgactgatgatagataacctgctaacgtcttgaagtttttttttctctctctcgtttttctgggcggagttactagaaattcttttttatgtaagcatttgttagatcatgaaccttgtcatgaagagatgatctgtagtagtcagttcaagtccaaacacttgtgctctgtgtgtgtgtgttttttttgctggatggttgtgacaaggtaaaaaaacgcaagcattcagttagatgtgaccagccttttttttgccctctaacatcaggatgtttatattgaaaatatatttaaa

SEQ ID NO: 20439 - DNA, 2374 bp, Zea Mays
acaaggacaatcgtcctcgtcgacaggagacgccacagacctgaatcagaagacaggtcgcagccagctcaaacgacccggcatgcgtgcatgcctaggcatggctgccttcgagtttgcgcagttgggcacatgaacagggcaagagcaaccacccacgcggcgtggtggcgagaaacaagcaaggcagcagcagcaagcggaactgcgacacgaaagagagctctaggctctcgcaccgaccgatcgacgtcgtcgcgagccaagattccgcacaaaaaggccggcggccacggcacacgcacacgcttttggctgccgtgttgcggtgccccgttatcccgaagccgctgccggccggttgatctcctcctcccctccgcagctccgcttatataagccctccgtgcccgcgcctcaatggagacatgcaccacgcacgcgcggcaccacatctagtagagcctgcctaccgccccactgtcgtcgtcattaattcaccaggctagagctagctagctggctctaccgccgttccccgatcgagcgtccgtcatggagattgatgagatggagagcggtgtcgtcaatggaagcggcggcggcgggtcgttccggcgggcgaggtgctgggagctgctgtgctcggcggcgggcatgctctggggcaaggtcgtcgggttcgcccgcaagctgggcaggatcgcgagggacgacccccggcgggtggcgcactccatcaaggtcggcctggcgctcacgctcgtgtccgtgctctactacgtcaggccgctcttcaacaactggggggtgtccaccatgtgggccgtgctcaccgtcgtcgtcgtcatggagtacaccgtcggtggcacgctgagcaaaggcctgaacagagcgtgcgggacgctggccgccggcttcatcgccgtcggggctcacaaggtggcctacctgtgcggcgacaaggccgagcccgtgctgctcgccgtcttcgtcttcttgctctcgtcggcggcgacgttctcgcggttcatcccggaggtgaaggcgcggtacgactacggcgtgaccatcttcatcctcaccttcagcctggtggccgtgtccagctaccgcgtcgacgagctcatccgcctcgcccaccagcgcttctccaccatcgtcgtcggcgtcggcacatgcctctgcaccaccgtcttcgtcttcccggtctgggccggggaggacctccacaggctcgccatcggaaacctcaacaagctggccgagttctttgaaggactcgagtctgaatgcttcagagagaacgccacgttcgagaatttggaagcaaaacccttcctccaagtgtacaagagcgtcctcaattccaaggccaccgaagactctttgtgcaattttgccaagtgggagccctgccatggcaagttcaagttccggcacccatggagccagtaccagaagctcggcgctctctctcgccagtgcgcttcctcaatggaggctctcgcttcctacgtcatcaccctcacaagaaccgagtaccctgaagcgcggcccgagctacgctcggaggttcgaacagcgtgccgccagatgagcctgcactcggccaaggcgctccgcgagctctcggcggcgatgcggacgatggccgtgccgccgtccccggccaacgctcacatgtccgcggcagccaaagcggccaaggacctcagggacgagctagaggacgcggacctggcgcaggcgatgcacgtcgctgttgtcgcgtctctgctctcggacctggtgaccaaggcgaagcagatcacggaatctgtcggtacccttgcgcgacttgcccgcttcgtcaagaacaacgaccatgagaacaacgctgacgacaaggatattgcggctatcgatgctgtgagctgagaaagctagcagacggtcctgtggcggcaaaaatatatcctaattaaccgtgcatccagacgttcatagctatctaattcgcacatatcgaagatcggatggctctgaacgtctagatgcatggctgcacaagttaatatggatgcacaatatatatgcgttgccggcgatcttttcggtgggacttgactagtgatgttctatatttggcgtggtggggaatacatgtatcagaagcatttggtaaatgggataaaagtaagtcgatatcaattagtacaatgctagatgcgcatgcacagcaagtgactaattcttcgatttgtacaagtcgttaattacgatgctggtggtaaaacttcactgtcttccaccaattaacctctctcggcaggccaaaaaaaaaaattgatattcttcgagatacaaggaagaaaaacaaattacatctcaa

SEQ ID NO: 20440 - DNA, 387 bp, Zea Mays
aatgaaaatgacaagactagagatctttattgcacaatgtcatgtatatatatacaggggatacaaagtctcccaaggggtgtgtcccttggaaataagggtcagttcatcacagaacaatattttgtaacacttataatacttttgccataactttagtggttttgatatattatctatcattactaaactaataaaaactttttaacccacgtagcctgtttcgttacctcataatttataacaaacttagtatataagatagattaatctagagagattaaagaaaacgtgtggcgtgggatgcaaaggctccatctaataggtcatgattttgcaaagacttagaataagatgttaatcttgcgaagaccaacaataaaaacg

SEQ ID NO: 20441 - DNA, 1224 bp, Zea Mays
agccagcggttgccggttgtgaccgtcgtcgttggaaggcgacgcgaagcggcagtgcagtgctcgtcttcgtcggcgcgtcgccgtccggagggcggaggccaaagcttgtacttgtcttcggcggaggggattctgaaatcgaggtgcgcaactaggagagccagttgccacggttgcgcttttgctcatcatcggaggcggttgaagtgtcgatgtttctgtgccttcctgggggtattctggagaaagtcaaggagaacagggctcttgcactgggggcaccgagggtcatcttgtgggagcatgacgtagatgaagcagcgaggacaggcagcaagaaccatggatgtggcctcagggctgttggaccactgcaggccatgctcgttctctgacgataggcaggagctcggggatgactcctcatcagccatcgccctcctggaggagtcccctgttgcaggaagtgagaggttcagtttcaggtcaaggcccctagagctcttcctgttgctgcggctcatcctttggagagtgacgaggcgctggatgcaagcaggtggagatgagagcgatgtgaaatgctctggaaggagagggctatgagctttagaatgctcagaggtgtttctctggtgttgctggagaagggatagatggtatttatagggggtgaggatgggaggtcaattggttttctttaatgtgacataagagctacgctcccatttaattattactcactactatctcatagtagtagcaatagtacaattgtacgcattttattgcctatcatattcatggttggggagtggcgaaggaataggattgaatatgtgttgggtggaagagaagtgctaggtgagaggttttgtggtggcctgttgggtcatatgcaaaagatcaacaaatctgaacgaggaaaaacaggacctgggacacatgcctacagttgagcatttgcttcttcgctcgttgctttttacacaacattaacaggtactgggaaacttttacctggtgcttaacaagttaattcgtatttttttattgttaatcagtatttttagcctgctagcaatgcaaagtatttgctccacagcattttctggattcaggcttctttcttattgcatttgggcgagaggttaaacttgctatctatatttaaaaaatgttccaaattttttaaaatgactgacatcccacagattttag

SEQ ID NO: 20442 - DNA, 1303 bp, Zea Mays
gacattatgtccagcaatcaaaacacgccacctgtgcgtacactccacacctcgcctccgtgcttccgtctcgcacttccggacataaagtgcgaccatggccatggcggcgctgcgggaaacctcccgctgtttggcgtccagggggagatctgcggcctggcgacccgtgctcctcgcgcagtcccgcggcatcacttacaagctcttcgtcggaggtttatcacagtttgcgacggaagcaagcctagcagaagcattctcacgttacggacaagtaatagaagctaccgtcgtcagggataaggtgaccgacgtaccgaaaggattcggcttcgtgaagtttgcttccccggaggaagccaataacgcgagggaagagatgaacggcaaggcattgaacggtcgggtcatatacgtggacattgcaaaggccagacaggaccgtgctgcagatgccctcccaatagcgagaggccctcctaagcctatcagcaacgactgatagaggaaggccttggtgtgcgctcccaatagcgagaggtcctcctaaaccaattagcaacggctgttcaaggaatgcctggtgtgtagttccctcccgtcctcagctggcatactagttcgattctcagatacggaggctcttagatgatgaaacgtgccgtgaaatattctgcggaactttgaggtgctgctttaataaatccgtggtgctagccacacgaaacatcttgatgttacaggttgcggatggcagttgcatggtctcttcaatctgttctacacttctactattatagaacagtatggtgccccgttcgcatgcattctgtttggaaccaatgctttgcagttcatctgtgctttcctactatagaacagtatattcgtctgtattgttatcacgttatttcttattggacataggaaaatggtgcacatcagtgccaggacatgatatacacagttcctaactgttaccccaggaagaaaaaacgcgctgctcgatgttgcgcacgcgcacttggcgtccttaatacatgcgctcgtctggcgccggtggtcaccggagcgcgacagcggcgaggcaggtgagcacgacggcagcgctggcagcggagcagcacaggtccacgagcgcctcgcggcgcgccttgctctccttcctccccttcttgcgcatcacgaactcgaggtaccgcctgttgagcaccaaattgaggatcggatggtccgttgtgctacagttgttagctaaattcgtgaaattagctcgggagattagtttgtaaagggtcca

SEQ ID NO: 20443 - DNA, 2494 bp, Zea Mays
cgggtcacgtgagtgacgtggcacgcaagcagttcagctttcggttctcctgccggcggcgccgcgtcttttcccgcaccttcgcatcgtatgccacttcagacgccatggccgtggctccgcctctctcaacccacgtctcccgaactctaacctcaaacctgcacctctggccgcggacccacggtggcgtggctcatgcgcggacgcgggctctgatcccgacaccggctgcggcgtgcgccttccgtttcagtttccgtgttcgcgccaccgccagtggctcgaagctgccgccttatcctctacccgatgtcttcccctacattaccgccgagtgggaggccgtcgcgaagggttgggcgtgcgccgccgtcgccgtatactgcctctcccgcgcagtgcccgccgcggggcgcctgccgcgcgcgctcgccggcggcggcgggggagggggcgcggctgttgtggtggcagccaggggcggggtcgccctcgctgcgtttgcatcggcgcgtgccgccgctacatacgcgcagcaggcgtttctctgggaggcggcgctgcaggcggcggggcggctgcgggagcgcgccttcgagcgcctcctagagcgcgatctcgagttcttcgagggtaggggaggggtggctgcgggcgacatcgcgcacaggatcaccgacgaggcggacgatgtcgcggatgccttgttctccgtgctcaacgtcattccatgcatgtgcttcgccatagtcaatcttggtaaaaggcttcgtcaaatatccaaggaggcacatcttagcctcgccatgctcgcatcatatctcaacgatgtacttccatctatgctgactgtgaaggcaaacaatggggaacttaaggagatcatgagattccaaaagttagctcgtgctgatctaaagaataatttgagtaagaagaaaatgaaggctctcatacctcaagcggttcgagcaacatacattgggggcctgcttgtgctctgtgctgggtcgatagttgtttcaggctcatcctttgatgctgaagagtttctgtctttcctaacagcacttgctcttgttgtggagcctattcaggatgcagggaaggcatacaatgaatataagcaaggacagccagcattagaacgcatatttgatcttatgaggttcaaccctaaggtgactgataagccaagggcaattcatttacaaagtattaatggggacattaagttccatgatgttacatttagatatgttgatgacatgcctccagtagcagatggtgtgaatcttcatattagaccgggagaaataattgctttagttggaccttctggtggaggcaaaactactcttgccaaattactcctccgtctttatcatccacaaaaagggtatatacttctggacaaccatgatattcaggacattcaatcgcaatgcctgagaacacatatcgcttttgtttcacaggacactatgctattttctgggacaattgctgaaaacattgcttatagagaccctgtgggagatattgacatgaatagggttgagtacgctgctaagattgccaatgctgaggagttcattaagatgttgccagaagggtacaattcaaatgtgggacagagaggttctagtttgagcggtggacagaagcaaaggtaaaatgctcactttccagtttccagactaccttgtatcacaaggttatctattgccagggcaatctatcaaaattcctccatattgataatggatgaagcaacttctgctttggatatcagatctgagctgctactgaaagaagcgcttagtaatctaattgcaaaacactcagtaactgttatcatcattgctcatcgacaggaaatggtcctaatggctgacaggattatttcactagagcgcggtgaattgcgagagatgtcgaaacaggcatttttgtctcaagatggtcacttcagcttaccaaggatcaggagtccaaattagggtgtccaaactagggtgagacttggcatgggtaatggtagtttctctcgtgaagatttgttcatatatttggccatggaagaaaacgattgatagaatcacatttcttgcctgagccctgctcagaactttggcttcttggaaccttgtttcatcccaacagcaacaaatctgtcaacattatcgaaggtcgtctgccggagagaatagcaggctcctcagcggcattggctcctacctgctgcaagattctcctcaagacctcaacaggaaggtcaaagcaaggtatagggttttaccaatttttgtacacatgaaaaagcacaggttccttacatcccccgcccccgcccctgcatacatgcaggatgcagtagttgagctgtatatatgccaaaataaagttattcgttttagatttttttattgccaaactccagattggtgcgtttcagaatcgtcaggtagtaaacgtgtaactgaggtag

SEQ ID NO: 20444 - DNA, 2275 bp, Zea Mays
cgggtcacgtgagtgacgtggcacgcaagcagttcagctttcggttctcctgccggcggcgccgcgtcttttcccgcaccttcgcatcgtatgccacttcagacgccatggccgtggctccgcctctctcaacccacgtctcccgaactctaacctcaaacctgcacctctggccgcggacccacggtggcgtggctcatgcgcggacgcgggctctgatcccgacaccggctgcggcgtgcgccttccgtttcagtttccgtgttcgcgccaccgccagtggctcgaagctgccgccttatcctctacccgatgtcttcccctacattaccgccgagtgggaggccgtcgcgaagggttgggcgtgcgccgccgtcgccgtatactgcctctcccgcgcagtgcccgccgcggggcgcctgccgcgcgcgctcgccggcggcggcgggggagggggcgcggctgttgtggtggcagccaggggcggggtcgccctcgctgcgtttgcatcggcgcgtgccgccgctacatacgcgcagcaggcgtttctctgggaggcggcgctgcaggcggcggggcggctgcgggagcgcgccttcgagcgcctcctagagcgcgatctcgagttcttcgagggtaggggaggggtggctgcgggcgacatcgcgcacaggatcaccgacgaggcggacgatgtcgcggatgccttgttctccgtgctcaacgtacttccatctatgctgactgtgaaggcaaacaatggggaacttaaggagatcatgagattccaaaagttagctcgtgctgatctaaagaataatttgagtaagaagaaaatgaaggctctcatacctcaagcggttcgagcaacatacattgggggcctgcttgtgctctgtgctgggtcgatagttgtttcaggctcatcctttgatgctgaagagtttctgtctttcctaacagcacttgctcttgttgtggagcctattcaggatgcagggaaggcatacaatgaatataagcaaggacagccagcattagaacgcatatttgatcttatgaggttcaaccctaaggtgactgataagccaagggcaattcatttacaaagtattaatggggacattaagttccatgatgttacatttagatatgttgatgacatgcctccagtagcagatgggtatatacttctggacaaccatgatattcaggacattcaatcgcaatgcctgagaacacatatcgcttttgtttcacaggacactatgctattttctgggacaattgctgaaaacattgcttatagagaccctgtgggagatattgacatgaatagggttgagtacgctgctaagattgccaatgctgaggagttcattaagatgttgccagaagggtacaattcaaatgtgggacagagaggttctagtttgagcggtggacagaagcaaaggtaaaatgctcactttccagtttccagactaccttgtatcacaaggttatctattgccagggcaatctatcaaaattcctccatattgataatggatgaagcaacttctgctttggatatcagatctgagctgctactgaaagaagcgcttagtaatctaattgcaaaacactcagtaactgttatcatcattgctcatcgacaggaaatggtcctaatggctgacaggattatttcactagagcgcggtgaattgcgagagatgtcgaaacaggcatttttgtctcaagatggtcacttcagcttaccaaggatcaggagtccaaattagggtgtccaaactagggtgagacttggcatgggtaatggtagtttctctcgtgaagatttgttcatatatttggccatggaagaaaacgattgatagaatcacatttcttgcctgagccctgctcagaactttggcttcttggaaccttgtttcatcccaacagcaacaaatctgtcaacattatcgaaggtcgtctgccggagagaatagcaggctcctcagcggcattggctcctacctgctgcaagattctcctcaagacctcaacaggaaggtcaaagcaaggtatagggttttaccaatttttgtacacatgaaaaagcacaggttccttacatcccccgcccccgcccctgcatacatgcaggatgcagtagttgagctgtatatatgccaaaataaagttattcgttttagatttttttattgccaaactccagattggtgcgtttcagaatcgtcaggtagtaaacgtgtaactgaggtag

SEQ ID NO: 20445 - DNA, 1922 bp, Zea Mays
cgggtcacgtgagtgacgtggcacgcaagcagttcagctttcggttctcctgccggcggcgccgcgtcttttcccgcaccttcgcatcgtatgccacttcagacgccatggccgtggctccgcctctctcaacccacgtctcccgaactctaacctcaaacctgcacctctggccgcggacccacggtggcgtggctcatgcgcggacgcgggctctgatcccgacaccggctgcggcgtgcgccttccgtttcagtttccgtgttcgcgccaccgccagtggctcgaagctgccgccttatcctctacccgatgtcttcccctacattaccgccgagtgggaggccgtcgcgaagggttgggcgtgcgccgccgtcgccgtatactgcctctcccgcgcagtgcccgccgcggggcgcctgccgcgcgcgctcgccggcggcggcgggggagggggcgcggctgttgtggtggcagccaggggcggggtcgccctcgctgcgtttgcatcggcgcgtgccgccgctacatacgcgcagcaggcgtttctctgggaggcggcgctgcaggcggcggggcggctgcgggagcgcgccttcgagcgcctcctagagcgcgatctcgagttcttcgagggtaggggaggggtggctgcgggcgacatcgcgcacaggatcaccgacgaggcggacgatgtcgcggatgccttgttctccgtgctcaacgatgcagggaaggcatacaatgaatataagcaaggacagccagcattagaacgcatatttgatcttatgaggttcaaccctaaggtgactgataagccaagggcaattcatttacaaagtattaatggggacattaagttccatgatgttacatttagatatgttgatgacatgcctccagtagcagatgggtatatacttctggacaaccatgatattcaggacattcaatcgcaatgcctgagaacacatatcgcttttgtttcacaggacactagaccctgtgggagatattgacatgaatagggttgagtacgctgctaagattgccaatgctgaggagttcattaagatgttgccagaagggtacaattcaaatgtgggacagagaggttctagtttgagcggtggacagaagcaaaggttatctattgccagggcaatctatcaaaattcctccatattgataatggatgaagcaacttctgctttggatatcagatctgagctgctactgaaagaagcgcttagtaatctaattgcaaaacactcagtaactgttatcatcattgctcatcgacaggaaatggtcctaatggctgacaggattatttcactagagcgcggtgaattgcgagagatgtcgaaacaggcatttttgtctcaagatggtcacttcagcttaccaaggatcaggagtccaaattagggtgtccaaactagggtgagacttggcatgggtaatggtagtttctctcgtgaagatttgttcatatatttggccatggaagaaaacgattgatagaatcacatttcttgcctgagccctgctcagaactttggcttcttggaaccttgtttcatcccaacagcaacaaatctgtcaacattatcgaaggtcgtctgccggagagaatagcaggctcctcagcggcattggctcctacctgctgcaagattctcctcaagacctcaacaggaaggtcaaagcaaggtatagggttttaccaatttttgtacacatgaaaaagcacaggttccttacatcccccgcccccgcccctgcatacatgcaggatgcagtagttgagctgtatatatgccaaaataaagttattcgttttagatttttttattgccaaactccagattggtgcgtttcagaatcgtcaggtagtaaacgtgtaactgaggtag

SEQ ID NO: 20446 - DNA, 2230 bp, Zea Mays
cgggtcacgtgagtgacgtggcacgcaagcagttcagctttcggttctcctgccggcggcgccgcgtcttttcccgcaccttcgcatcgtatgccacttcagacgccatggccgtggctccgcctctctcaacccacgtctcccgaactctaacctcaaacctgcacctctggccgcggacccacggtggcgtggctcatgcgcggacgcgggctctgatcccgacaccggctgcggcgtgcgccttccgtttcagtttccgtgttcgcgccaccgccagtggctcgaagctgccgccttatcctctacccgatgtcttcccctacattaccgccgagtgggaggccgtcgcgaagggttgggcgtgcgccgccgtcgccgtatactgcctctcccgcgcagtgcccgccgcggggcgcctgccgcgcgcgctcgccggcggcggcgggggagggggcgcggctgttgtggtggcagccaggggcggggtcgccctcgctgcgtttgcatcggcgcgtgccgccgctacatacgcgcagcaggcgtttctctgggaggcggcgctgcaggcggcggggcggctgcgggagcgcgccttcgagcgcctcctagagcgcgatctcgagttcttcgagggtaggggaggggtggctgcgggcgacatcgcgcacaggatcaccgacgaggcggacgatgtcgcggatgccttgttctccgtgctcaacgtacttccatctatgctgactgtgaaggcaaacaatggggaacttaaggagatcatgagattccaaaagttagctcgtgctgatctaaagaataatttgagtaagaagaaaatgaaggctctcatacctcaagcggttcgagcaacatacattgggggcctgcttgtgctctgtgctgggtcgatagttgtttcaggctcatcctttgatgctgaagagtttctgtctttcctaacagcacttgctcttgttgtggagcctattcaggatgcagggaaggcatacaatgaatataagcaaggacagccagcattagaacgcatatttgatcttatgaggttcaaccctaaggtgactgataagccaagggcaattcatttacaaagtattaatggggacattaagttccatgatgttacatttagatatgttgatgacatgcctccagtagcagatgggtatatacttctggacaaccatgatattcaggacattcaatcgcaatgcctgagaacacatatcgcttttgtttcacaggacactatgctattttctgggacaattgctgaaaacattgcttatagagaccctgtgggagatattgacatgaatagggttgagtacgctgctaagattgccaatgctgaggagttcattaagatgttgccagaagggtacaattcaaatgtgggacagagaggttctagtttgagcggtggacagaagcaaaggttatctattgccagggcaatctatcaaaattcctccatattgataatggatgaagcaacttctgctttggatatcagatctgagctgctactgaaagaagcgcttagtaatctaattgcaaaacactcagtaactgttatcatcattgctcatcgacaggaaatggtcctaatggctgacaggattatttcactagagcgcggtgaattgcgagagatgtcgaaacaggcatttttgtctcaagatggtcacttcagcttaccaaggatcaggagtccaaattagggtgtccaaactagggtgagacttggcatgggtaatggtagtttctctcgtgaagatttgttcatatatttggccatggaagaaaacgattgatagaatcacatttcttgcctgagccctgctcagaactttggcttcttggaaccttgtttcatcccaacagcaacaaatctgtcaacattatcgaaggtcgtctgccggagagaatagcaggctcctcagcggcattggctcctacctgctgcaagattctcctcaagacctcaacaggaaggtcaaagcaaggtatagggttttaccaatttttgtacacatgaaaaagcacaggttccttacatcccccgcccccgcccctgcatacatgcaggatgcagtagttgagctgtatatatgccaaaataaagttattcgttttagatttttttattgccaaactccagattggtgcgtttcagaatcgtcaggtagtaaacgtgtaactgaggtag

SEQ ID NO: 20447 - DNA, 2341 bp, Zea Mays
cgggtcacgtgagtgacgtggcacgcaagcagttcagctttcggttctcctgccggcggcgccgcgtcttttcccgcaccttcgcatcgtatgccacttcagacgccatggccgtggctccgcctctctcaacccacgtctcccgaactctaacctcaaacctgcacctctggccgcggacccacggtggcgtggctcatgcgcggacgcgggctctgatcccgacaccggctgcggcgtgcgccttccgtttcagtttccgtgttcgcgccaccgccagtggctcgaagctgccgccttatcctctacccgatgtcttcccctacattaccgccgagtgggaggccgtcgcgaagggttgggcgtgcgccgccgtcgccgtatactgcctctcccgcgcagtgcccgccgcggggcgcctgccgcgcgcgctcgccggcggcggcgggggagggggcgcggctgttgtggtggcagccaggggcggggtcgccctcgctgcgtttgcatcggcgcgtgccgccgctacatacgcgcagcaggcgtttctctgggaggcggcgctgcaggcggcggggcggctgcgggagcgcgccttcgagcgcctcctagagcgcgatctcgagttcttcgagggtaggggaggggtggctgcgggcgacatcgcgcacaggatcaccgacgaggcggacgatgtcgcggatgccttgttctccgtgctcaacgtacttccatctatgctgactgtgaaggcaaacaatggggaacttaaggagatcatgagattccaaaagttagctcgtgctgatctaaagaataatttgagtaagaagaaaatgaaggctctcatacctcaagcggttcgagcaacatacattgggggcctgcttgtgctctgtgctgggtcgatagttgtttcaggctcatcctttgatgctgaagagtttctgtctttcctaacagcacttgctcttgttgtggagcctattcaggatgcagggaaggcatacaatgaatataagcaaggacagccagcattagaacgcatatttgatcttatgaggttcaaccctaaggtgactgataagccaagggcaattcatttacaaagtattaatggggacattaagttccatgatgttacatttagatatgttgatgacatgcctccagtagcagatggtgtgaatcttcatattagaccgggagaaataattgctttagttggaccttctggtggaggcaaaactactcttgccaaattactcctccgtctttatcatccacaaaaagggtatatacttctggacaaccatgatattcaggacattcaatcgcaatgcctgagaacacatatcgcttttgtttcacaggacactatgctattttctgggacaattgctgaaaacattgcttatagagaccctgtgggagatattgacatgaatagggttgagtacgctgctaagattgccaatgctgaggagttcattaagatgttgccagaagggtacaattcaaatgtgggacagagaggttctagtttgagcggtggacagaagcaaaggttatctattgccagggcaatctatcaaaattcctccatattgataatggatgaagcaacttctgctttggatatcagatctgagctgctactgaaagaagcgcttagtaatctaattgcaaaacactcagtaactgttatcatcattgctcatcgacaggaaatggtcctaatggctgacaggattatttcactagagcgcggtgaattgcgagagatgtcgaaacaggcatttttgtctcaagatggtcacttcagcttaccaaggatcaggagtccaaattagggtgtccaaactagggtgagacttggcatgggtaatggtagtttctctcgtgaagatttgttcatatatttggccatggaagaaaacgattgatagaatcacatttcttgcctgagccctgctcagaactttggcttcttggaaccttgtttcatcccaacagcaacaaatctgtcaacattatcgaaggtcgtctgccggagagaatagcaggctcctcagcggcattggctcctacctgctgcaagattctcctcaagacctcaacaggaaggtcaaagcaaggtatagggttttaccaatttttgtacacatgaaaaagcacaggttccttacatcccccgcccccgcccctgcatacatgcaggatgcagtagttgagctgtatatatgccaaaataaagttattcgttttagatttttttattgccaaactccagattggtgcgtttcagaatcgtcaggtagtaaacgtgtaactgaggtag

SEQ ID NO: 20448 - DNA, 2425 bp, Zea Mays
cgggtcacgtgagtgacgtggcacgcaagcagttcagctttcggttctcctgccggcggcgccgcgtcttttcccgcaccttcgcatcgtatgccacttcagacgccatggccgtggctccgcctctctcaacccacgtctcccgaactctaacctcaaacctgcacctctggccgcggacccacggtggcgtggctcatgcgcggacgcgggctctgatcccgacaccggctgcggcgtgcgccttccgtttcagtttccgtgttcgcgccaccgccagtggctcgaagctgccgccttatcctctacccgatgtcttcccctacattaccgccgagtgggaggccgtcgcgaagggttgggcgtgcgccgccgtcgccgtatactgcctctcccgcgcagtgcccgccgcggggcgcctgccgcgcgcgctcgccggcggcggcgggggagggggcgcggctgttgtggtggcagccaggggcggggtcgccctcgctgcgtttgcatcggcgcgtgccgccgctacatacgcgcagcaggcgtttctctgggaggcggcgctgcaggcggcggggcggctgcgggagcgcgccttcgagcgcctcctagagcgcgatctcgagttcttcgagggtaggggaggggtggctgcgggcgacatcgcgcacaggatcaccgacgaggcggacgatgtcgcggatgccttgttctccgtgctcaacgtcattccatgcatgtgcttcgccatagtcaatcttggtaaaaggcttcgtcaaatatccaaggaggcacatcttagcctcgccatgctcgcatcatatctcaacgatgtacttccatctatgctgactgtgaaggcaaacaatggggaacttaaggagatcatgagattccaaaagttagctcgtgctgatctaaagaataatttgagtaagaagaaaatgaaggctctcatacctcaagcggttcgagcaacatacattgggggcctgcttgtgctctgtgctgggtcgatagttgtttcaggctcatcctttgatgctgaagagtttctgtctttcctaacagcacttgctcttgttgtggagcctattcaggatgcagggaaggcatacaatgaatataagcaaggacagccagcattagaacgcatatttgatcttatgaggttcaaccctaaggtgactgataagccaagggcaattcatttacaaagtattaatggggacattaagttccatgatgttacatttagatatgttgatgacatgcctccagtagcagatggtgtgaatcttcatattagaccgggagaaataattgctttagttggaccttctggtggaggcaaaactactcttgccaaattactcctccgtctttatcatccacaaaaagggtatatacttctggacaaccatgatattcaggacattcaatcgcaatgcctgagaacacatatcgcttttgtttcacaggacactatgctattttctgggacaattgctgaaaacattgcttatagagaccctgtgggagatattgacatgaatagggttgagtacgctgctaagattgccaatgctgaggagttcattaagatgttgccagaagggtacaattcaaatgtgggacagagaggttctagtttgagcggtggacagaagcaaaggttatctattgccagggcaatctatcaaaattcctccatattgataatggatgaagcaacttctgctttggatatcagatctgagctgctactgaaagaagcgcttagtaatctaattgcaaaacactcagtaactgaaatggtcctaatggctgacaggattatttcactagagcgcggtgaattgcgagagatgtcgaaacaggcatttttgtctcaagatggtcacttcagcttaccaaggatcaggagtccaaattagggtgtccaaactagggtgagacttggcatgggtaatggtagtttctctcgtgaagatttgttcatatatttggccatggaagaaaacgattgatagaatcacatttcttgcctgagccctgctcagaactttggcttcttggaaccttgtttcatcccaacagcaacaaatctgtcaacattatcgaaggtcgtctgccggagagaatagcaggctcctcagcggcattggctcctacctgctgcaagattctcctcaagacctcaacaggaaggtcaaagcaaggtatagggttttaccaatttttgtacacatgaaaaagcacaggttccttacatcccccgcccccgcccctgcatacatgcaggatgcagtagttgagctgtatatatgccaaaataaagttattcgttttagatttttttattgccaaactccagattggtgcgtttcagaatcgtcaggtagtaaacgtgtaactgaggtag

SEQ ID NO: 20449 - DNA, 2497 bp, Zea Mays
cgggtcacgtgagtgacgtggcacgcaagcagttcagctttcggttctcctgccggcggcgccgcgtcttttcccgcaccttcgcatcgtatgccacttcagacgccatggccgtggctccgcctctctcaacccacgtctcccgaactctaacctcaaacctgcacctctggccgcggacccacggtggcgtggctcatgcgcggacgcgggctctgatcccgacaccggctgcggcgtgcgccttccgtttcagtttccgtgttcgcgccaccgccagtggctcgaagctgccgccttatcctctacccgatgtcttcccctacattaccgccgagtgggaggccgtcgcgaagggttgggcgtgcgccgccgtcgccgtatactgcctctcccgcgcagtgcccgccgcggggcgcctgccgcgcgcgctcgccggcggcggcgggggagggggcgcggctgttgtggtggcagccaggggcggggtcgccctcgctgcgtttgcatcggcgcgtgccgccgctacatacgcgcagcaggcgtttctctgggaggcggcgctgcaggcggcggggcggctgcgggagcgcgccttcgagcgcctcctagagcgcgatctcgagttcttcgagggtaggggaggggtggctgcgggcgacatcgcgcacaggatcaccgacgaggcggacgatgtcgcggatgccttgttctccgtgctcaacacgattgtgccaacaagcttgcagttgataacgatggccattcagatggtcattccatgcatgtgcttcgccatagtcaatcttggtaaaaggcttcgtcaaatatccaaggaggcacatcttagcctcgccatgctcgcatcatatctcaacgatgtacttccatctatgctgactgtgaaggcaaacaatggggaacttaaggagatcatgagattccaaaagttagctcgtgctgatctaaagaataatttgagtaagaagaaaatgaaggctctcatacctcaagcggttcgagcaacatacattgggggcctgcttgtgctctgtgctgggtcgatagttgtttcaggctcatcctttgatgctgaagagtttctgtctttcctaacagcacttgctcttgttgtggagcctattcaggatgcagggaaggcatacaatgaatataagcaaggacagccagcattagaacgcatatttgatcttatgaggttcaaccctaaggtgactgataagccaagggcaattcatttacaaagtattaatggggacattaagttccatgatgttacatttagatatgttgatgacatgcctccagtagcagatggtgtgaatcttcatattagaccgggagaaataattgctttagttggaccttctggtggaggcaaaactactcttgccaaattactcctccgtctttatcatccacaaaaagggtatatacttctggacaaccatgatattcaggacattcaatcgcaatgcctgagaacacatatcgcttttgtttcacaggacactatgctattttctgggacaattgctgaaaacattgcttatagagaccctgtgggagatattgacatgaatagggttgagtacgctgctaagattgccaatgctgaggagttcattaagatgttgccagaagggtacaattcaaatgtgggacagagaggttctagtttgagcggtggacagaagcaaaggttatctattgccagggcaatctatcaaaattcctccatattgataatggatgaagcaacttctgctttggatatcagatctgagctgctactgaaagaagcgcttagtaatctaattgcaaaacactcagtaactgttatcatcattgctcatcgacaggaaatggtcctaatggctgacaggattatttcactagagcgcggtgaattgcgagagatgtcgaaacaggcatttttgtctcaagatggtcacttcagcttaccaaggatcaggagtccaaattagggtgtccaaactagggtgagacttggcatgggtaatggtagtttctctcgtgaagatttgttcatatatttggccatggaagaaaacgattgatagaatcacatttcttgcctgagccctgctcagaactttggcttcttggaaccttgtttcatcccaacagcaacaaatctgtcaacattatcgaaggtcgtctgccggagagaatagcaggctcctcagcggcattggctcctacctgctgcaagattctcctcaagacctcaacaggaaggtcaaagcaaggtatagggttttaccaatttttgtacacatgaaaaagcacaggttccttacatcccccgcccccgcccctgcatacatgcaggatgcagtagttgagctgtatatatgccaaaataaagttattcgttttagatttttttattgccaaactccagattggtgcgtttcagaatcgtcaggtagtaaacgtgtaactgaggtag

SEQ ID NO: 20450 - DNA, 2331 bp, Zea Mays
cgggtcacgtgagtgacgtggcacgcaagcagttcagctttcggttctcctgccggcggcgccgcgtcttttcccgcaccttcgcatcgtatgccacttcagacgccatggccgtggctccgcctctctcaacccacgtctcccgaactctaacctcaaacctgcacctctggccgcggacccacggtggcgtggctcatgcgcggacgcgggctctgatcccgacaccggctgcggcgtgcgccttccgtttcagtttccgtgttcgcgccaccgccagtggctcgaagctgccgccttatcctctacccgatgtcttcccctacattaccgccgagtgggaggccgtcgcgaagggttgggcgtgcgccgccgtcgccgtatactgcctctcccgcgcagtgcccgccgcggggcgcctgccgcgcgcgctcgccggcggcggcgggggagggggcgcggctgttgtggtggcagccaggggcggggtcgccctcgctgcgtttgcatcggcgcgtgccgccgctacatacgcgcagcaggcgtttctctgggaggcggcgctgcaggcggcggggcggctgcgggagcgcgccttcgagcgcctcctagagcgcgatctcgagttcttcgagggtaggggaggggtggctgcgggcgacatcgcgcacaggatcaccgacgaggcggacgatgtcgcggatgccttgttctccgtgctcaacgtcattccatgcatgtgcttcgccatagtcaatcttggtaaaaggcttcgtcaaatatccaaggaggcacatcttagcctcgccatgctcgcatcatatctcaacgatgtacttccatctatgctgactgtgaaggcaaacaatggggaacttaaggagatcatgagattccaaaagttagctcgtgctgatctaaagaataatttgagtaagaagaaaatgaaggctctcatacctcaagcggttcgagcaacatacattgggggcctgcttgtgctctgtgctgggtcgatagttgtttcaggctcatcctttgatgctgaagagtttctgtctttcctaacagcacttgctcttgttgtggagcctattcagggaaggcatacaatgaatataagcaaggacagccagcattagaacgcatatttgatcttatgaggttcaaccctaaggtgactgataagccaagggcaattcatttacaaagtattaatggggacattaagttccatgatgttacatttagatatgttgatgacatgcctccagtagcagatgggtatatacttctggacaaccatgatattcaggacattcaatcgcaatgcctgagaacacatatcgcttttgtttcacaggacactatgctattttctgggacaattgctgaaaacattgcttatagagaccctgtgggagatattgacatgaatagggttgagtacgctgctaagattgccaatgctgaggagttcattaagatgttgccagaagggtacaattcaaatgtgggacagagaggttctagtttgagcggtggacagaagcaaaggttatctattgccagggcaatctatcaaaattcctccatattgataatggatgaagcaacttctgctttggatatcagatctgagctgctactgaaagaagcgcttagtaatctaattgcaaaacactcagtaactgttatcatcattgctcatcgacaggaaatggtcctaatggctgacaggattatttcactagagcgcggtgaattgcgagagatgtcgaaacaggcatttttgtctcaagatggtcacttcagcttaccaaggatcaggagtccaaattagggtgtccaaactagggtgagacttggcatgggtaatggtagtttctctcgtgaagatttgttcatatatttggccatggaagaaaacgattgatagaatcacatttcttgcctgagccctgctcagaactttggcttcttggaaccttgtttcatcccaacagcaacaaatctgtcaacattatcgaaggtcgtctgccggagagaatagcaggctcctcagcggcattggctcctacctgctgcaagattctcctcaagacctcaacaggaaggtcaaagcaaggtatagggttttaccaatttttgtacacatgaaaaagcacaggttccttacatcccccgcccccgcccctgcatacatgcaggatgcagtagttgagctgtatatatgccaaaataaagttattcgttttagatttttttattgccaaactccagattggtgcgtttcagaatcgtcaggtagtaaacgtgtaactgaggtag

SEQ ID NO: 20451 - DNA, 2383 bp, Zea Mays
cgggtcacgtgagtgacgtggcacgcaagcagttcagctttcggttctcctgccggcggcgccgcgtcttttcccgcaccttcgcatcgtatgccacttcagacgccatggccgtggctccgcctctctcaacccacgtctcccgaactctaacctcaaacctgcacctctggccgcggacccacggtggcgtggctcatgcgcggacgcgggctctgatcccgacaccggctgcggcgtgcgccttccgtttcagtttccgtgttcgcgccaccgccagtggctcgaagctgccgccttatcctctacccgatgtcttcccctacattaccgccgagtgggaggccgtcgcgaagggttgggcgtgcgccgccgtcgccgtatactgcctctcccgcgcagtgcccgccgcggggcgcctgccgcgcgcgctcgccggcggcggcgggggagggggcgcggctgttgtggtggcagccaggggcggggtcgccctcgctgcgtttgcatcggcgcgtgccgccgctacatacgcgcagcaggcgtttctctgggaggcggcgctgcaggcggcggggcggctgcgggagcgcgccttcgagcgcctcctagagcgcgatctcgagttcttcgagggtaggggaggggtggctgcgggcgacatcgcgcacaggatcaccgacgaggcggacgatgtcgcggatgccttgttctccgtgctcaacgtcattccatgcatgtgcttcgccatagtcaatcttggtaaaaggcttcgtcaaatatccaaggaggcacatcttagcctcgccatgctcgcatcatatctcaacgatgtacttccatctatgctgactgtgaaggcaaacaatggggaacttaaggagatcatgagattccaaaagttagctcgtgctgatctaaagaataatttgagtaagaagaaaatgaaggctctcatacctcaagcggttcgagcaacatacattgggggcctgcttgtgctctgtgctgggtcgatagttgtttcaggctcatcctttgatgctgaagagtttctgtctttcctaacagcacttgctcttgttgtggagcctattcaggatgcagggaaggcatacaatgaatataagcaaggacagccagcattagaacgcatatttgatcttatgaggttcaaccctaaggtgactgataagccaagggcaattcatttacaaagtattaatggggacattaagttccatgatgttacatttagatatgttgatgacatgcctccagtagcagatgggtatatacttctggacaaccatgatattcaggacattcaatcgcaatgcctgagaacacatatcgcttttgtttcacaggacactatgctattttctgggacaattgctgaaaacattgcttatagagaccctgtgggagatattgacatgaatagggttgagtacgctgctaagattgccaatgctgaggagttcattaagatgttgccagaagggtacaattcaaatgtgggacagagaggttctagtttgagcggtggacagaagcaaaggtaaaatgctcactttccagtttccagactaccttgtatcacaaggttatctattgccagggcaatctatcaaaattcctccatattgataatggatgaagcaacttctgctttggatatcagatctgagctgctactgaaagaagcgcttagtaatctaattgcaaaacactcagtaactgttatcatcattgctcatcgacaggaaatggtcctaatggctgacaggattatttcactagagcgcggtgaattgcgagagatgtcgaaacaggcatttttgtctcaagatggtcacttcagcttaccaaggatcaggagtccaaattagggtgtccaaactagggtgagacttggcatgggtaatggtagtttctctcgtgaagatttgttcatatatttggccatggaagaaaacgattgatagaatcacatttcttgcctgagccctgctcagaactttggcttcttggaaccttgtttcatcccaacagcaacaaatctgtcaacattatcgaaggtcgtctgccggagagaatagcaggctcctcagcggcattggctcctacctgctgcaagattctcctcaagacctcaacaggaaggtcaaagcaaggtatagggttttaccaatttttgtacacatgaaaaagcacaggttccttacatcccccgcccccgcccctgcatacatgcaggatgcagtagttgagctgtatatatgccaaaataaagttattcgttttagatttttttattgccaaactccagattggtgcgtttcagaatcgtcaggtagtaaacgtgtaactgaggtag
